United States Patent Application Publication US 2011/0183924 A1 - sequence listing, part 284

SEQ ID NO: 885866 - protein, 484 aa, Homo sapiens
MSPTRQAVLGVQLVVTLLTATLMHRLAPHCSFARWLLCNGSLFRYKHPSEEELRALAGKPRPRGRKERWANGLSEEKPLSVPRDAPFQLETCPLTTVDALVLRFFLEYQWFVDFAVYSGGVYLFTEAYYYMLGPAKETNIAVFWCLLTVTFSIKMFLTVTRLYFSAEEGGERSVCLTFAFLFLLLAMLVQVVREETLELGLEPGLASMTQNLEPLLKKQGWDWALPVAKLAIRVGLAVVGSVLGAFLTFPGLRLAQTHRDALTMSEDRPMLQFLLHTSFLSPLFILWLWTKPIARDFLHQPPFGETRFSLLSDSAFDSGRLWLLVVLCLLRLAVTRPHLQAYLCLAKARVEQLRREAGRIEAREIQQRVVRVYCYVTVVSLQYLTPLILTLNCTLLLKTLGGYSWGLGPAPLLSPDPSSASAAPIGSGEDEVQQTAARIAGALGGLLTPLFLRGVLAYLIWWTAACQLLASLFGLYFHQHLAGS

SEQ ID NO: 885867 - protein, 354 aa, Homo sapiens
MLGPAKETNIAVFWCLLTVTFSIKMFLTVTRLYFSAEEGGERSVCLTFAFLFLLLAMLVQVVREETLELGLEPGLASMTQNLEPLLKKQGWDWALPVAKLAIRVGLAVVGSVLGAFLTFPGLRLAQTHRDALTMSEDRPMLQFLLHTSFLSPLFILWLWTKPIARDFLHQPPFGETRFSLLSDSAFDSGRLWLLVVLCLLRLAVTRPHLQAYLCLAKARVEQLRREAGRIEAREIQQRVVRVYCYVTVVSLQYLTPLILTLNCTLLLKTLGGYSWGLGPAPLLSPDPSSASAAPIGSGEDEVQQTAARIAGALGGLLTPLFLRGVLAYLIWWTAACQLLASLFGLYFHQHLAGS

SEQ ID NO: 885868 - protein, 475 aa, Homo sapiens
SPRPVGECTAFSHASCLFRYKHPSEEELRALAGKPRPRGRKERWANGLSEEKPLSVPRDAPFQLETCPLTTVDALGGELSWAPGLSRVPPTVLRFFLEYQWFVDFAVYSGGVYLFTEAYYYMLGPAKETNIAVFWCLLTVTFSIKMFLTVTRLYFSAEEGGERSVCLTFAFLFLLLAMLVQVVREETLELGLEPGLASMTQNLEPLLKKQGWDWALPVAKLAIRVGLAVVGSVLGAFLTFPGLRLAQTHRDALTMSEDRPMLQFLLHTSFLSPLFILWLWTKPIARDFLHQPPFGETRFSLLSDSAFDSGRLWLLVVLCLLRLAVTRPHLQAYLCLAKARVEQLRREAGRIEAREIQQRVVRVYCYVTVVSLQYLTPLILTLNCTLLLKTLGGYSWGLGPAPLLSPDPSSASAAPIGSGEDEVQQTAARIAGALGGLLTPLFLRGVLAYLIWWTAACQLLASLFGLYFHQHLAGS

SEQ ID NO: 885869 - protein, 528 aa, Homo sapiens
MAVLGVQLVVTLLTATLMHRLAPHCSFARWLLCNGSLFRYKHPSEEELRALAGKPRPRGRKERWANGLSEEKPLSVPRDAPFQLETCPLTTVDALGNSPVPSLNSTPSALKVSTPSGGGEDLKEECSIRRGASWAPGLSRVPPTVLRFFLEYQWFVDFAVYSGGVYLFTEAYYYMLGPAKETNIAVFWCLLTVTFSIKMFLTVTRLYFSAEEGGERSVCLTFAFLFLLLAMLVQVVREETLELGLEPGLASMTQNLEPLLKKQGWDWALPVAKLAIRVGLAVVGSVLGAFLTFPGLRLAQTHRDALTMSEDRPMLQFLLHTSFLSPLFILWLWTKPIARDFLHQPPFGETRFSLLSDSAFDSGRLWLLVVLCLLRLAVTRPHLQAYLCLAKARVEQLRREAGRIEAREIQQRVVRVYCYVTVVSLQYLTPLILTLNCTLLLKTLGGYSWGLGPAPLLSPDPSSASAAPIGSGEDEVQQTAARIAGALGGLLTPLFLRGVLAYLIWWTAACQLLASLFGLYFHQHLAGS

SEQ ID NO: 885870 - protein, 349 aa, Homo sapiens
MEAHNASAPFNFTLPPNFGKRPTDLALSVILVFMLFFIMLSLGCTMEFSKIKAHLWKPKGLAIALVAQYGIMPLTAFVLGKVFRLKNIEALAILVCGCSPGGNLSNVFSLAMKGDMNLSIVMTTCSTFCALGMMPLLLYIYSRGIYDGDLKDKVPYKGIVISLVLVLIPCTIGIVLKSKRPQYMRYVIKGGMIIILLCSVAVTVLSAINVGKSIMFAMTPLLIATSSLMPFIGFLLGYVLSALFCLNGRCRRTVSMETGCQNVQLCSTILNVAFPPEVIGPLFFFPLLYMIFQLGEGLLLIAIFWCYEKFKTPKDKTKMIYTAATTEETIPGALGNGTYKGEDCSPCTA

SEQ ID NO: 885871 - protein, 283 aa, Homo sapiens
PENALHLAEAGGLCGESRARGQQRLLHSGGPGFGRPPIGLADWLTDTPRLPPPPPVPRPASSLPPLPGLGGRRQTEAPLSPRPSPRPFLFPAPRLLPGSGSSCVGGPHSSERREEAASRMKCKPNQTRTYDPEGFKKRAACLCFRSEREDEVLLVSSSRYPDRWIVPGGGMEPEEEPGGAAVREVYEEAGVKGKLGRLLGVFEQNQDPKHRTYVYVLTVTELLEDWEDSVSIGRKREWFKVEDAIKVLQCHKPVHAEYLEKLKLGGSPTNGNSMAPSSPDSDP

SEQ ID NO: 885872 - protein, 283 aa, Homo sapiens; identical to SEQ ID NO: 885871

SEQ ID NO: 885873 - protein, 265 aa, Homo sapiens
MPTTTKFAAASTLRALCPVTGIERCRLKTPSVSDAVAMAICQFFLQGRCRFGDRCWNEHPGARGAGGGRQQPQQQPSGNNRRGWNTTSQRYSNVIQPSSFSKSTPWGGSRDQEKPYFSSFDSGASTNRKEGFGLSENPFASLSPDEQKDEKKLLEGIVKDMEVWESSGQWMFSVYSPVKKKPNISGFTDISPEELRLEYHNFLTSNNLQSYLNSVQRLINQWRNRVNELKSLNISTKVALKCLWKIYTHLSPKIYGPDCGKFIIF

SEQ ID NO: 885874 - protein, 460 aa, Homo sapiens
PPTTTKFAAASTLRALCPVTGIERCRLKTPSVSDAVAMAICQFFLQGRCRFGDRCWNEHPGARGAGGGRQQPQQQPSGNNRRGWNTTSQRYSNVIQPSSFSKSTPWGGSRDQEKPYFSSFDSGASTNRKEGFGLSENPFASLSPDEQKDEKKLLEGIVKDMEVWESSGQWMFSVYSPVKKKPNISGFTDISPEELRLEYHNFLTSNNLQSYLNSVQRLINQWRNRVNELKSLNISTKVALLSDVKDGVNQAAPAFGFGSSQAATFMSPGFPVNNSSSDNAQNFSFKTNSGFAAASSGSPAGFGSSPAFGAAASTSSGISTSAPAFGFGKPEVTSAASFSFKSPAASSFGSPGFSGLPASLATGPVRAPVAPAFGGGSSVAGFGSPGSHSHTAFSKPSSDTFGNSSISTSLSASSSIIATDNVLFTPRDKLTVEELEQFQSKKFTLGKIPLKPPPLELLNV

SEQ ID NO: 885875 - protein, 482 aa, Homo sapiens
PPTTTKFAAASTLRALCPVTGIERCRLKTPSVSDAVAMAICQFFLQGRCRFGDRCWNEHPGARGAGGGRQQPQQQPSGNNRRGWNTTSQRYSNVIQPSSFSKSTPWGGSRDQEKPYFSSFDSGASTNRKEGFGLSENPFASLSPDEQKDEKKLLEGIVKDMEVWESSGQWMFSVYSPVKKKPNISGFTDISPEELRLEYHNFLTSNNLQSYLNSVQRLINQWRNRVNELKSLNISTKVALKCLWKIYTHLSPKIYGPDCGKFLSDVKDGVNQAAPAFGFGSSQAATFMSPGFPVNNSSSDNAQNFSFKTNSGFAAASSGSPAGFGSSPAFGAAASTSSGISTSAPAFGFGKPEVTSAASFSFKSPAASSFGSPGFSGLPASLATGPVRAPVAPAFGGGSSVAGFGSPGSHSHTAFSKPSSDTFGNSSISTSLSASSSIIATDNVLFTPRDKLTVEELEQFQSKKFTLGKIPLKPPPLELLNV

SEQ ID NO: 885876 - protein, 179 aa, Homo sapiens
MAICQFFLQGRCRFGDRCWNEHPGARGAGGGRQQPQQQPSGNNRRGWNTTSQRYSNVIQPSSFSKSTPWGGSRDQEKPYFSSFDSGASTNRKEGFGLSENPFASLSPDEQKDEKKLLEGIVKDMEVWESSGQWMFSVYSPVKKKPNISDVFGVYSFWWGPWSRWLRSEAVDLRGECYGS

SEQ ID NO: 885877 - protein, 300 aa, Homo sapiens
MEVWESSGQWMFSVYSPVKKKPNISGFTDISPEELRLEYHNFLTSNNLQSYLNSVQRLINQWRNRVNELKSLNISTKVALLSDVKDGVNQAAPAFGFGSSQAATFMSPGFPVNNSSSDNAQNFSFKTNSGFAAASSGSPAGFGSSPAFGAAASTSSGISTSAPAFGFGKPEVTSAASFSFKSPAASSFGSPGFSGLPASLATGPVRAPVAPAFGGGSSVAGFGSPGSHSHTAFSKPSSDTFGNSSISTSLSASSSIIATDNVLFTPRDKLTVEELEQFQSKKFTLGKIPLKPPPLELLNV

SEQ ID NO: 885878 - protein, 164 aa, Homo sapiens
MAICQFFLQGRCRFGDRCWNEHPGARGAGGGRQQPQQQPSGNNRRGWNTTSQRYSNVIQPSSFSKSTPWGGSRDQEKPYFSSFDSGASTNRKEGFGLSENPFASLSPDEQKDEKKLLEGIVKDMEVWESSGQWMFSVYSPVKKKPNISAKFCPTFNKSMEEQGK

SEQ ID NO: 885879 - protein, 475 aa, Homo sapiens
PPTTTKFAAASTLRALCPVTGIERCRLKTPSVSDAVAMAICQFFLQGRCRFGDRCWNEHPGARGAGGGRQQPQQQPSGNNRRGWNTTSQRYSNVIQPSSFSKSTPWGGSRDQEKPYFSSFDSGASTNRKEGFGLSENPFASLSPDEQKDEKKLLEGIVKDMEVWESSGQWMFSVYSPVKKKPNISGFTDISPEELRLEYHNFLTSNNLQSYLNSVQRLINQWRNRVNELKSLNISTKVALKCLWKIYTHLSPKIYGPDCGKFLSDVKDGVNQAAPAFGFGSSQAATFMSPGFPVNNSSSDNAQNFSFKTNSGFAAASSGSPAGFGSSPAFGAAASTSSGISTSAPAFGFGKPEVTSAASFSFKSPAASSFGSPGFSGLPASLATGPVRAPVAPAFGGGSSVAGFGSPGSHSHTAFSKPSSDTFGNSSISTSLSASSSIIATDNVLFTPRDKLTVEELEQFQSKKFTLGKIPLSSL

SEQ ID NO: 885880 - protein, 150 aa, Homo sapiens
MAICQFFLQGRCRFGDRCWNEHPGARGAGGGRQQPQQQPSGNNRRGWNTTSQRYSNVIQPSSFSKSTPWGGSRDQEKPYFSSFDSGASTNRKEGFGLSENPFASLSPDEQKDEKKLLEGIVKDMEVWESSGQWMFSVYSPVKKKPNISGN

SEQ ID NO: 885881 - protein, 155 aa, Homo sapiens
MAICQFFLQGRCRFGDRCWNEHPGARGAGGGRQQPQQQPSGNNRRGWNTTSQRYSNVIQPSSFSKSTPWGGSRDQEKPYFSSFDSGASTNRKEGFGLSENPFASLSPDEQKDEKKLLEGIVKDMEVWESSGQWMFSVYSPVKKKPNISVPKPFLG

SEQ ID NO: 885882 - protein, 423 aa, Homo sapiens
MAICQFFLQGRCRFGDRCWNEHPGARGAGGGRQQPQQQPSGNNRRGWNTTSQRYSNVIQPSSFSKSTPWGGSRDQEKPYFSSFDSGASTNRKEGFGLSENPFASLSPDEQKDEKKLLEGIVKDMEVWESSGQWMFSVYSPVKKKPNISGFTDISPEELRLEYHNFLTSNNLQSYLNSVQRLINQWRNRVNELKSLNISTKVALLSDVKDGVNQAAPAFGFGSSQAATFMSPGFPVNNSSSDNAQNFSFKTNSGFAAASSGSPAGFGSSPAFGAAASTSSGISTSAPAFGFGKPEVTSAASFSFKSPAASSFGSPGFSGLPASLATGPVRAPVAPAFGGGSSVAGFGSPGSHSHTAFSKPSSDTFGNSSISTSLSASSSIIATDNVLFTPRDKLTVEELEQFQSKKFTLGKIPLKPPPLELLNV

SEQ ID NO: 885883 - protein, 423 aa, Homo sapiens; identical to SEQ ID NO: 885882

SEQ ID NO: 885884 - protein, 179 aa, Homo sapiens; identical to SEQ ID NO: 885876

SEQ ID NO: 885885 - protein, 151 aa, Homo sapiens
FVLLFILGNNRRGWNTTSQRYSNVIQPSSFSKSTPWGGSRDQEKPYFSSFDSGASTNRKEGFGLSENPFASLSPDEQKDEKKLLEGIVKDMEVWESSGQWMFSVYSPVKKKPNISGFTDISPEELRLEYHNFLTSNNLQSYVSLFPINLLQ

SEQ ID NO: 885886 - protein, 195 aa, Homo sapiens
MSPGFPVNNSSSDNAQNFSFKTNSGFAAASSGSPAGFGSSPAFGAAASTSSGISTSAPAFGFGKPEVTSAASFSFKSPAASSFGSPGFSGLPASLATGPVRAPVAPAFGGGSSVAGFGSPGSHSHTAFSKPSSDTFGNSSISTSLSASSSIIATDNVLFTPRDKLTVEELEQFQSKKFTLGKIPLKPPPLELLNV

SEQ ID NO: 885887 - protein, 233 aa, Homo sapiens
MAICQFFLQGRCRFGDRCWNEHPGARGAGGGRQQPQQQPSGNNRRGWNTTSQRYSNVIQPSSFSKSTPWGGSRDQEKPYFSSFDSGASTNRKEGFGLSENPFASLSPDEQKDEKKLLEGIVKDMEVWESSGQWMFSVYSPVKKKPNISGFTDISPEELRLEYHNFLTSNNLQSYLNSVQRLINQWRNRVNELKSLNISTKVALLSDVKDGVNQAAPAFGFGSSQAATFMSPGK

SEQ ID NO: 885888 - protein, 341 aa, Homo sapiens
GIWRQGTSEEDSTAVYARWHGPRQKREGENCFLVVGHRGTGSSILSALQDLFSVTWLNRSKVEKQLQVISVLQWVLSFLVLGVACSAILMYIFCTDCWLIAVLYFTWLVFDWNTPKKGGRRSQWVRNWAVWRYFRDYFPIQLVKTHNLLTTRNYIFGYHPHGIMGLGAFCNFSTEATEVSKKFPGIRPYLATLAGNFRMPVLREYLMSGGICPVQRDTIELLRSNDRDWQAIIITAAEAGETLKPSREKAPREPRVVNRAPGRRHPGCPPNPWGEKKGQAGEFTEGTRSTASRQDPKNSSVPARTGEETSRRGGEHTPEGGDTTDKHNTHSISQTTVHAEI

SEQ ID NO: 885889 - protein, 43 aa, Homo sapiens
MREDEAATQQTPSTVRKAIRRKDRRVKEQQKNTETHSSGRISR

SEQ ID NO: 885890 - protein, 388 aa, Homo sapiens
MKTLIAAYSGVLRGERQAEADRSQRSHGGPALSREGSGRWGTGSSILSALQDLFSVTWLNRSKVEKQLQVISVLQWVLSFLVLGVACSAILMYIFCTDCWLIAVLYFTWLVFDWNTPKKGGRRSQWVRNWAVWRYFRDYFPIQLVKTHNLLTTRNYIFGYHPHGIMGLGAFCNFSTEATEVSKKFPGIRPYLATLAGNFRMPVLREYLMSGGICPVSRDTIDYLLSKNGSGNAIIIVVGGAAESLSSMPGKNAVTLRNRKGFVKLALRHGADLVPIYSFGENEVYKQVIFEEGSWGRWVQKKFQKYIGFAPCIFHGRGLFSSDTWGLVPYSKPITTVVGEPITIPKLEHPTQQDIDLYHTMYMEALVKLFDKHKTKFGLPETEVLEVN

SEQ ID NO: 885891 - protein, 297 aa, Homo sapiens
MYIFCTDCWLIAVLYFTWLVFDWNTPKKGGRRSQWVRNWAVWRYFRDYFPIQLVKTHNLLTTRNYIFGYHPHGIMGLGAFCNFSTEATEVSKKFPGIRPYLATLAGNFRMPVLREYLMSGGICPVSRDTIDYLLSKNGSGNAIIIVVGGAAESLSSMPGKNAVTLRNRKGFVKLALRHGADLVPIYSFGENEVYKQVIFEEGSWGRWVQKKFQKYIGFAPCIFHGRGLFSSDTWGLVPYSKPITTVVGEPITIPKLEHPTQQDIDLYHTMYMEALVKLFDKHKTKFGLPETEVLEVN

SEQ ID NO: 885892 - protein, 388 aa, Homo sapiens; identical to SEQ ID NO: 885890

SEQ ID NO: 885893 - protein, 388 aa, Homo sapiens; identical to SEQ ID NO: 885890

SEQ ID NO: 885894 - protein, 148 aa, Homo sapiens
HRPTAPEHVAVHFGTCSFPRQDGRSRGLCAARRWSLRCREQSDLPAASHVLVCWGLVLIRSEFTVYHELEGPNWDHLLPLEGPDGVSPLRLPLTHPPPLCRQGRKDNREEGVLLGDHLDNISPMASWIPVDYFELKTFHKMGMKDSFK

SEQ ID NO: 885895 - protein, 122 aa, Homo sapiens
MTAPGPHPQLWGKSGGGEGGCCSLSVGGRVWGEDPELSPQVTQEELRPREVQRLAQGCTASTGTDVALRGLGFQQGETRTPVIASRWIPEISDLPAASHVLVCWGLVLIRSEFTVYHELEGS

SEQ ID NO: 885896 - protein, 132 aa, Homo sapiens
WRQLARGWGALSRASCPALPRLANNTVRMAKGDPKKPKGKMSAYAFFVQTCREEHKKKNPEVPVNFAEFSKKCSERWKTMSGKESNLMNGKQISRYDRNEDMATRRQREVYLQSPLISVCQIASHPTRIYWS

SEQ ID NO: 885897 - protein, 228 aa, Homo sapiens
WRQLARGWGALSRASCPALPRLANNTVRMAKGDPKKPKGKMSAYAFFVQTCREEHKKKNPEVPVNFAEFSKKCSERWKTMSGKEKSKFDEMAKADKVRYDREMKDYGPAKGGKKKKDPNAPKRPPSGFFLFCSEFRPKIKSTNPGISIGDVAKKLGEMWNNLNDSEKQPYITKAAKLKEKYEKDVADYKSKGKFDGAKGPAKVARKKVEEEDEEEEEEEEEEEEEEDE

SEQ ID NO: 885898 - protein, 217 aa, Homo sapiens
MEILPARKRNPFIIRIRMAKGDPKKPKGKMSAYAFFVQTCREEHKKKNPEVPVNFAEFSKKCSERWKTMSGKEKSKFDEMAKADKVRYDREMKDYGPAKGGKKKKDPNAPKRPPSGFFLFCSEFRPKIKSTNPGISIGDVAKKLGEMWNNLNDSEKQPYITKAAKLKEKYEKDVADYKSKGKFDGAKGPAKVARKKVEEEDEEEEEEEEEEEEEEDE

SEQ ID NO: 885899 - protein, 243 aa, Homo sapiens
  misc_feature (7)..(10): Xaa can be any naturally occurring amino acid
ETYWQLXXXXAPPWEVSTGGARTRYYYRICQPSRLIVERSILRMAKGDPKKPKGKMSAYAFFVQTCREEHKKKNPEVPVNFAEFSKKCSERWKTMSGKEKSKFDEMAKADKVRYDREMKDYGPAKGGKKKKDPNAPKRPPSGFFLFCSEFRPKIKSTNPGISIGDVAKKLGEMWNNLNDSEKQPYITKAAKLKEKYEKDVADYKSKGKFDGAKGPAKVARKKVEEEDEEEEEEEEEEEEEEDE

SEQ ID NO: 885900 - protein, 117 aa, Homo sapiens
VDLEDPRICFHQATSGFFLFCSEFRPKIKSTNPGISIGDVAKKLGEMWNNLNDSEKQPYITKAAKLKEKYEKDVADYKSKGKFDGAKGPAKVARKKVEEEDEEEEEEEEEEEEEEDE

SEQ ID NO: 885901 - protein, 104 aa, Homo sapiens
INRACTGVIMHLSMIKSTNPGISIGDVAKKLGEMWNNLNDSEKQPYITKAAKLKEKYEKDVADYKSKGKFDGAKGPAKVARKKVEEEDEEEEEEEEEEEEEEDE

SEQ ID NO: 885902 - protein, 157 aa, Homo sapiens
MAKGDPKKPKGKMSAYAFFVQTCREEHKKKNPEVPVNFAEFSKKCSERWKTMSGKEKSKFDEMAKADKVRYDREMKDYGPAKGGKKKKDPNAPKRPPSGFFLFCSEFRPKIKSTNPGISIGDVAKKLGEMWNNLNDSEKQPYITKAAKLKEKYEKDE

SEQ ID NO: 885903 - protein, 179 aa, Homo sapiens
TSCQFLLAFPHCISLFLFYHIRMAKGDPKKPKGKMSAYAFFVQTCREEHKKKNPEVPVNFAEFSKKCSERWKTMSGKEKSKFDEMAKADKVRYDREMKDYGPAKGGKKKKDPNAPKRPPSGFFLFCSEFRPKIKSTNPGISIGDVAKKLGEMWNNLNDSEKQPYITKAAKLKEKYEKDE

SEQ ID NO: 885904 - protein, 228 aa, Homo sapiens; identical to SEQ ID NO: 885897

SEQ ID NO: 885905 - protein, 228 aa, Homo sapiens; identical to SEQ ID NO: 885897

SEQ ID NO: 885906 - protein, 228 aa, Homo sapiens; identical to SEQ ID NO: 885897

SEQ ID NO: 885907 - protein, 156 aa, Homo sapiens
MAKGDPKKPKGKMSAYAFFVQTCREEHKKKNPEVPVNFAEFSKKCSERWKTMSGKEKSKFDEMAKADKVRYDREMKDYGPAKGGKKKKDPNAPKRPPSGFFLFCSEFRPKIKSTNPGISIGDVAKKLGEMWNNLNDSEKQPYITKAAKLKEKYEKV

SEQ ID NO: 885908 - protein, 769 aa, Homo sapiens
LGWRECPVAAASGGWADWRQARRGAESRLRDRPRAMAASPGPAGVGGAGAVYGSGSSGFALDSGLEIKTRSVEQTLLPLVSQITTLINHKDNTKKSDKTLQAIQRVGQAVNLAVGRFVKVGEAIANENWDLKEEINIACIEAKQAGETIAALTDITNLNHLESDGQITIFTDKTGVIKAARLLLSSVTKVLLLADRVVIKQIITSRNKVLATMERLEKVNSFQEFVQIFSQFGNEMVEFAHLSGDRQNDLKDEKKKAKMAAARAVLEKCTMMLLTASKTCLRHPNCESAHKNKEGVFDRMKVALDKVIEIVTDCKPNGETDISSISIFTGIKEFKMNIEALRENLYFQSKENLSVTLEVILERMEDFTDSAYTSHEHRERILELSTQARMELQQLISVWIQAQSKKTKSIAEELELSILKISHSLNELKKELHSTATQLAADLLKYHADHVVLKALKLTGVEGNLEALAEYACKLSEQKEQLVETCRLLRHISGTEPLEITCIHAEETFQVTGQQIISAAETLTLHPSSKIAKENLDVFCEAWESQISDMSTLLREINDVFEGRRGEKYGYLSLPKPMKNNANLKSLKPDKPDSEEQAKIAKLGLKLGLLTSDADCEIEKWEDQENEIVQYGRNMSSMAYSLYLFTRGEGPLKTSQDLIHQLEVFAAEGLKLTSSVQAFSKQLKDDDKLMLLLEINKLIPLCHQLQTVTKTSLQNKVFLKVDKCITKTRSMMALLVQLLSLCYKLLKKLQMENNGWVSVTNKDTMDSKT

SEQ ID NO: 885909 - protein, 753 aa, Homo sapiens
LGWRECPVAAASGGWADWRQARRGAESRLRDRPRAMAASPGPAGVGGAGAVYGSGSSGFALDSGLEIKTRSVEQTLLPLVSQITTLINHKDNTKKSDKTLQAIQRVGQAVNLAVGRFVKVGEAIANENWDLKEEINIACIEAKQAGETIAALTDITNLNHLESDGQITIFTDKTGVIKAARLLLSSVTKVLLLADRVVIKQIITSRNKVLATMERLEKVNSFQEFVQIFSQFGNEMVEFAHLSGDRQNDLKDEKKKAKMAAARAVLEKCTMMLLTASKTCLRHPNCESAHKNKEGVFDRMKVALDKVIEIVTDCKPNGETDISSISIFTGIKEFKMNIEALRENLYFQSKENLSVTLEVILERMEDFTDSAYTSHEHRERILELSTQARMELQQLISVWIQAQSKKTKSIAEELELSILKISHSLNELKKELHSTATQLAADLLKYHADHVVLKALKLTGVEGNLEALAEYACKLSEQKEQLVETCRLLRHISGTEPLEITCIHAEETFQVTGQQIISAAETLTLHPSSKIAKENLDVFCEAWESQISDMSTLLREINDVFEGRRGEKYGYLSLPKPMKNNANLKSLKPDKPDSEEQAKIAKLGLKLGLLTSDADCEIEKWEDQENEIVQYGRNMSSMAYSLYLFTRGEGPLKTSQDLIHQLEVFAAEGLKLTSSVQAFSKQLKDDDKLMLLLEINKLIPLCHQLQTVTKTSLQNKVFLKVDKCITKTRSMMALLVQLLSLCYKLLKKSETRY

SEQ ID NO: 885910 - protein, 135 aa, Homo sapiens
MSSMAYSLYLFTRGEGPLKTSQDLIHQLEVFAAEGLKLTSSVQAFSKQLKDDDKLMLLLEINKLIPLCHQLQTVTKTSLQNKVFLKVDKCITKTRSMMALLVQLLSLCYKLLKKLQMENNGWVSVTNKDTMDSKT

SEQ ID NO: 885911 - protein, 245 aa, Homo sapiens
LGWRECPVAAASGGWADWRQARRGAESRLRDRPRAMAASPGPAGVGGAGAVYGSGSSGFALDSGLEIKTRSVEQTLLPLVSQITTLINHKDNTKKSDKTLQAIQRVGQAVNLAVGRFVKVGEAIANENWDLKEEINIACIEAKQAGETIAALTDITNLNHLESDGQITIFTDKTGVIKAARLLLSSVTKVLLLADRVVIKQIITSRNKVLTFLMLLYFCLSVLFKVLFMTLSGGLLGLCVDEECS

SEQ ID NO: 885912 - protein, 218 aa, Homo sapiens
LGWRECPVAAASGGWADWRQARRGAESRLRDRPRAMAASPGPAGVGGAGAVYGSGSSGFALDSGLEIKTRSVEQTLLPLVSQITTLINHKDNTKKSDKTLQAIQRVGQAVNLAVGRFVKVGEAIANENWDLKEEINIACIEAKQAGETIAALTDITNLNHLESDGQITIFTDKTGVIKAARLLLSSVTKVLLLADRVVIKQIITSRNKRLTIYNLRHS

SEQ ID NO: 885913 - protein, 189 aa, Homo sapiens
VKSGEEDEEILFKERAQLYRWDRDVSQWKERGEGEIHDVFEGRRGEKYGYLSLPKPMKNNANLKALKLTGVEGNLEALAEYACKLSEQKEQLVETCRLLRHISGTEPLEITCIHAEETFQVTGQQIISAAETLTLHPSSKIAKENLDVFCEAWESQISDMSTLLREINDVFEGRRGSMATLFTSKPNEE

SEQ ID NO: 885914 - protein, 685 aa, Homo sapiens
LGWRECPVAAASGGWADWRQARRGAESRLRDRPRAMAASPGPAGVGGAGAVYGSGSSGFALDSGLEIKTRSVEQTLLPLVSQITTLINHKDNTKKSDKTLQAIQRVGQAVNLAVGRFVKVGEAIANENWDLKEEINIACIEAKQAGETIAALTDITNLNHLESDGQITIFTDKTGVIKAARLLLSSVTKVLLLADRVVIKQIITSRNKVLATMERLEKVNSFQEFVQIFSQFGNEMVEFAHLSGDRQNDLKDEKKKAKMAAARAVLEKCTMMLLTASKTCLRHPNCESAHKNKEGVFDRMKVALDKVIEIVTDCKPNGETDISSISIFTGIKEFKMNIEALRENLYFQSKENLSVTLEVILERMEDFTDSAYTSHEHRERILELSTQARMELQQLISVWIQAQSKKTKSIAEELELSILKISHSLNELKKEIISAAETLTLHPSSKIAKENLDVFCEAWESQISDMSTLLREINDVFEGRRGEKYGYLSLPKPMKNNANLKSLKPDKPDSEEQAKIAKLGLKLGLLTSDADCEIEKWEDQENEIVQYGRNMSSMAYSLYLFTRGEGPLKTSQDLIHQLEVFAAEGLKLTSSVQAFSKQLKDDDKLMLLLEINKLIPLCHQLQTVTKTSLQNKVFLKVDKCITKTRSMMALLVQLLSLCYKLLKKLQMENNGWVSVTNKDTMDSKT

SEQ ID NO: 885915 - protein, 497 aa, Homo sapiens
MKRKRQKWQQLGQFLKAHKNKEGVFDRMKVALDKVIEIVTDCKPNGETDISSISIFTGIKEFKMNIEALRENLYFQSKENLSVTLEVILERMEDFTDSAYTSHEHRERILELSTQARMELQQLISVWIQAQSKKTKSIAEELELSILKISHSLNELKKELHSTATQLAADLLKYHADHVVLKALKLTGVEGNLEALAEYACKLSEQKEQLVETCRLLRHISGTEPLEITCIHAEETFQVTGQQIISAAETLTLHPSSKIAKENLDVFCEAWESQISDMSTLLREINDVFEGRRGEKYGYLSLPKPMKNNANLKSLKPDKPDSEEQAKIAKLGLKLGLLTSDADCEIEKWEDQENEIVQYGRNMSSMAYSLYLFTRGEGPLKTSQDLIHQLEVFAAEGLKLTSSVQAFSKQLKDDDKLMLLLEINKLIPLCHQLQTVTKTSLQNKVFLKVDKCITKTRSMMALLVQLLSLCYKLLKKLQMENNGWVSVTNKDTMDSKT

SEQ ID NO: 885916 - protein, 434 aa, Homo sapiens
MNIEALRENLYFQSKENLSVTLEVILERMEDFTDSAYTSHEHRERILELSTQARMELQQLISVWIQAQSKKTKSIAEELELSILKISHSLNELKKELHSTATQLAADLLKYHADHVVLKALKLTGVEGNLEALAEYACKLSEQKEQLVETCRLLRHISGTEPLEITCIHAEETFQVTGQQIISAAETLTLHPSSKIAKENLDVFCEAWESQISDMSTLLREINDVFEGRRGEKYGYLSLPKPMKNNANLKSLKPDKPDSEEQAKIAKLGLKLGLLTSDADCEIEKWEDQENEIVQYGRNMSSMAYSLYLFTRGEGPLKTSQDLIHQLEVFAAEGLKLTSSVQAFSKQLKDDDKLMLLLEINKLIPLCHQLQTVTKTSLQNKVFLKVDKCITKTRSMMALLVQLLSLCYKLLKKLQMENNGWVSVTNKDTMDSKT

SEQ ID NO: 885917 - protein, 751 aa, Homo sapiens
LGWRECPVAAASGGWADWRQARRGAESRLRDRPRAMAASPGPAGVGGAGAVYGSGSSGFALDSGLEIKTRSVEQTLLPLVSQITTLINHKDNTKKSDKTLQAIQRVGQAVNLAVGRFVKVGEAIANENWDLKEEINIACIEAKQAGETIAALTDITNLNHLESDGQITIFTDKTGVIKAARLLLSSVTKVLLLADRVVIKQIITSRNKVLATMERLEKVNSFQEFVQIFSQFGNEMVEFAHLSGDRQNDLKDEKKKAKMAAARAVLEKCTMMLLTASKTCLRHPNCESAHKNKEGVFDRMKVALDKVIEIVTDCKPNGETDISSISIFTGIKEFKMNIEALRENLYFQSKENLSVTLEVILERMEDFTDSAYTSHEHRERILELSTQARMELQQLISVWIQAQSKKTKSIAEELELSILKISHSLNELKKELHSTATQLAADLLKYHADHVVLKALISEQKEQLVETCRLLRHISGTEPLEITCIHAEETFQVTGQQIISAAETLTLHPSSKIAKENLDVFCEAWESQISDMSTLLREINDVFEGRRGEKYGYLSLPKPMKNNANLKSLKPDKPDSEEQAKIAKLGLKLGLLTSDADCEIEKWEDQENEIVQYGRNMSSMAYSLYLFTRGEGPLKTSQDLIHQLEVFAAEGLKLTSSVQAFSKQLKDDDKLMLLLEINKLIPLCHQLQTVTKTSLQNKVFLKVDKCITKTRSMMALLVQLLSLCYKLLKKLQMENNGWVSVTNKDTMDSKT

SEQ ID NO: 885918 - protein, 749 aa, Homo sapiens
LGWRECPVAAASGGWADWRQARRGAESRLRDRPRAMAASPGPAGVGGAGAVYGSGSSGFALDSGLEIKTRSVEQTLLPLVSQITTLINHKDNTKKSDKTLQAIQRVGQAVNLAVGRFVKVGEAIANENWDLKEEINIACIEAKQAGETIAALTDITNLNHLESDGQITIFTDKTGVIKAARLLLSSVTKVLLLADRVVIKQIITSRNKVLATMERLEKVNSFQEFVQIFSQFGNEMVEFAHLSGDRQNDLKDEKKKAKMAAARAVLEKCTMMLLTASKTCLRHPNCESAHKNKEGVFDRMKVALDKVIEIVTDCKPNGETDISSISIFTGIKEFKMNIEALRENLYFQSKENLSVTLEVILERMEDFTDSAYTSHEHRERILELSTQARMELQQLISVWIQAQSKKTKSIAEELELSILKISHSLNELKKELHSTATQLAADLLKYHADHVVLKALKLTGVEGNLEALAEYACKLSEQKEQLVETCRLLRHISGTEPLEITCIHAEETFQVTGQQIISAAETLTLHPSSMSTLLREINDVFEGRRGEKYGYLSLPKPMKNNANLKSLKPDKPDSEEQAKIAKLGLKLGLLTSDADCEIEKWEDQENEIVQYGRNMSSMAYSLYLFTRGEGPLKTSQDLIHQLEVFAAEGLKLTSSVQAFSKQLKDDDKLMLLLEINKLIPLCHQLQTVTKTSLQNKVFLKVDKCITKTRSMMALLVQLLSLCYKLLKKLQMENNGWVSVTNKDTMDSKT

SEQ ID NO: 885919 - protein, 769 aa, Homo sapiens; identical to SEQ ID NO: 885908

SEQ ID NO: 885920 - protein, 750 aa, Homo sapiens
LGWRECPVAAASGGWADWRQARRGAESRLRDRPRAMAASPGPAGVGGAGAVYGSGSSGFALDSGLEIKTRSVEQTLLPLVSQITTLINHKDNTKKSDKTLQAIQRVGQAVNLAVGRFVKVGEAIANENWDLKEEINIACIEAKQAGETIAALTDITNLNHLESDGQITIFTDKTGVIKAARLLLSSVTKVLLLADRVVIKQIITSRNKVLATMERLEKVNSFQEFVQIFSQFGNEMVEFAHLSGDRQNDLKDEKKKAKMAAARAVLEKCTMMLLTASKTCLRHPNCESAHKNKEGVFDRMKVALDKVIEIVTDCKPNGETDISSISIFTGIKEFKMNIEALRENLYFQSKENLSVTLEVILERMEDFTDSAYTSHEHRERILELSTQARMELQQLISVWIQAQSKKTKSIAEELELSILKISHSLNELKKELHSTATQLAADLLKYHADHVVLKALKLTGVEGNLEALAEYACKLSEQKEQLVETCRLLRHISGTEPLEITCIHAEETFQVTGQQIISAAETLTLHPSSKIAKENLDVFCEAWESQISDMSTLLREINDVFEGRRGEKYGYLSLPKPMKNNANLKSLKPDKPDSEEQAKIAKLGLKLGLLTSDADCEIEKWEDQENEIVQYGRNMSSMAYSLYLFTRGEGPLKTSQDLIHQLEVFAAEGLKLTSSVQAFSKQLKDDDKLMLLLEINKLIPLCHQLQTVTKTSLQNKVFLKVDKCITKTRSMMALLVQLLSLCYKLLKKVR

SEQ ID NO: 885921 - protein, 728 aa, Homo sapiens
LGWRECPVAAASGGWADWRQARRGAESRLRDRPRAMAASPGPAGVGGAGAVYGSGSSGFALDSGLEIKTRSVEQTLLPLVSQITTLINHKDNTKKSDKTLQAIQRVGQAVNLAVGRFVKVGEAIANENWDLKEEINIACIEAKQAGETIAALTDITNLNHLESDGQITIFTDKTGVIKAARLLLSSVTKVLLLADRVVIKQIITSRNKVLATMERLEKVNSFQEFVQIFSQFGNEMVEFAHLSGDRQNDLKDEKKKAKMAAARAVLEKCTMMLLTASKTCLRHPNCESAHKNKEGVFDRMKVALDKVIEIVTDCKPNGETDISSISIFTGIKEFKMNIEALRENLYFQSKENLSVTLEVILERMEDFTDSAYTSHEHRERILELSTQARMELQQLISVWIQAQSKKTKSIAEELELSILKISHSLNELKKELHSTATQLAADLLKYHADHVVLKALKLTGVEGNLEALAEYACKLSEQKEQLVETCRLLRHISGTEPLEITCIHAEETFQVTGQQIISAAETLTLHPSSKIAKENLDVFCEAWESQISDMSTLLREINDVFEGRRGEKYGYLSLPKPMKNNANLKSLKPDKPDSEEQAKIAKLGLKLGLLTSDADCEIEKWEDQENEIVQYGRNMSSMAYSLYLFTRGEGPLKTSQDLIHQLEVFAAEGLKLTSSVQAFSKQLKDDDKLMLLLEINKLIPLCHQLQTVTKTSLQNKVFLKLQCFETRS

SEQ ID NO: 885922 - protein, 379 aa, Homo sapiens
VKSGEEDEEILFKERAQLYRWDRDVSQWKERGEGEIHDVFEGRRGEKYGYLSLPKPMKNNANLKALKLTGVEGNLEALAEYACKLSEQKEQLVETCRLLRHISGTEPLEITCIHAEETFQVTGQQIISAAETLTLHPSSKIAKENLDVFCEAWESQISDMSTLLREINDVFEGRRGEKYGYLSLPKPMKNNANLKSLKPDKPDSEEQAKIAKLGLKLGLLTSDADCEIEKWEDQENEIVQYGRNMSSMAYSLYLFTRGEGPLKTSQDLIHQLEVFAAEGLKLTSSVQAFSKQLKDDDKLMLLLEINKLIPLCHQLQTVTKTSLQNKVFLKVDKCITKTRSMMALLVQLLSLCYKLLKKLQMENNGWVSVTNKDTMDSKT

SEQ ID NO: 885923 - protein, 220 aa, Homo sapiens
MSTLLREINDVFEGRRGEKYGYLSLPKPMKNNANLKSLKPDKPDSEEQAKIAKLGLKLGLLTSDADCEIEKWEDQENEIVQYGRNMSSMAYSLYLFTRGEGPLKTSQDLIHQLEVFAAEGLKLTSSVQAFSKQLKDDDKLMLLLEINKLIPLCHQLQTVTKTSLQNKVFLKVDKCITKTRSMMALLVQLLSLCYKLLKKLQMENNGWVSVTNKDTMDSKT

SEQ ID NO: 885924 - protein, 566 aa, Homo sapiens
LGWRECPVAAASGGWADWRQARRGAESRLRDRPRAMAASPGPAGVGGAGAVYGSGSSGFALDSGLEIKTRSVEQTLLPLVSQITTLINHKDNTKKSDKTLQAIQRVGQAVNLAVGRFVKVGEAIANENWDLKEEINIACIEAKQAGETIAALTDITNLNHLESDGQITIFTDKTGVIKAARLLLSSVTKVLLLADRVVIKQIITSRNKVLATMERLEKVNSFQEFVQIFSQFGNEMVEFAHLSGDRQNDLKDEKKKAKMAAARAVLEKCTMMLLTASKTCLRHPNCESAHKNKEGVFDRMKVALDKVIEIVTDCKPNGETDISSISIFTGIKEFKMNIEALRENLYFQSKENLSVTLEVILERMEDFTDSAYTSHEHRERILELSTQARMELQQLISVWIQAQSKKTKSIAEELELSILKISHSLNELKKELHSTATQLAADLLKYHADHVVLKALKLTGVEGNLEALAEYACKLSEQKEQLVETCRLLRHISGTEPLEITCIHAEETFQVTGQQIISAAETLTLHPSSKIAKENLDVFCEAWESQISDMSTLLREINDVFEGRRE

SEQ ID NO: 885925 - protein, 571 aa, Homo sapiens
LGWRECPVAAASGGWADWRQARRGAESRLRDRPRAMAASPGPAGVGGAGAVYGSGSSGFALDSGLEIKTRSVEQTLLPLVSQITTLINHKDNTKKSDKTLQAIQRVGQAVNLAVGRFVKVGEAIANENWDLKEEINIACIEAKQAGETIAALTDITNLNHLESDGQITIFTDKTGVIKAARLLLSSVTKVLLLADRVVIKQIITSRNKVLATMERLEKVNSFQEFVQIFSQFGNEMVEFAHLSGDRQNDLKDEKKKAKMAAARAVLEKCTMMLLTASKTCLRHPNCESAHKNKEGVFDRMKVALDKVIEIVTDCKPNGETDISSISIFTGIKEFKMNIEALRENLYFQSKENLSVTLEVILERMEDFTDSAYTSHEHRERILELSTQARMELQQLISVWIQAQSKKTKSIAEELELSILKISHSLNELKKELHSTATQLAADLLKYHADHVVLKALKLTGVEGNLEALAEYACKLSEQKEQLVETCRLLRHISGTEPLEITCIHAEETFQVTGQQIISAAETLTLHPSSKIAKENLDVFCEAWESQISDMSTLLREINDVFEGRRGEKLST

SEQ ID NO: 885926 - protein, 3011 aa, Homo sapiens
MAPPPPPVLPVLLLLAAAAALPAMGLRAAAWEPRVPGGTRAFALRPGCTYAVGAACTPRAPRELLDVGRDGRLAGRRRVSGAGRPLPLQVRLVARSAPTALSRRLRARTHLPGCGARARLCGTGARLCGALCFPVPGGCAAAQHSALAAPTTLPACRCPPRPRPRCPGRPICLPPGGSVRLRLLCALRRAAGAVRVGLALEAATAGTPSASPSPSPPLPPNLPEARAGPARRARRGTSGRGSLKFPMPNYQVALFENEPAGTLILQLHAHYTIEGEEERVSYYMEGLFDERSRGYFRIDSATGAVSTDSVLDRETKETHVLRVKAVDYSTPPRSATTYITVLVKDTNDHSPVFEQSEYRERVRENLEVGYEVLTIRASDRDSPINANLRYRVLGGAWDVFQLNESSGVVSTRAVLDREEAAEYQLLVEANDQGRNPGPLSATATVYIEVEDENDNYPQFSEQNYVVQVPEDVGLNTAVLRVQATDRDQGQNAAIHYSILSGNVAGQFYLHSLSGILDVINPLDFEDVQKYSLSIKAQDGGRPPLINSSGVVSVQVLDVNDNEPIFVSSPFQATVLENVPLGYPVVHIQAVDADSGENARLHYRLVDTASTFLGGGSAGPKNPAPTPDFPFQIHNSSGWITVCAELDREEVEHYSFGVEAVDHGSPPMSSSTSVSITVLDVNDNDPVFTQPTYELRLNEDAAVGSSVLTLQARDRDANSVITYQLTGGNTRNRFALSSQRGGGLITLALPLDYKQEQQYVLAVTASDGTRSHTAHVLINVTDANTHRPVFQSSHYTVSVSEDRPVGTSIATLSANDEDTGENARITYVIQDPVPQFRIDPDSGTMYTMMELDYENQVAYTLTIMAQDNGIPQKSDTTTLEILILDANDNAPQFLWDFYQGSIFEDAPPSTSILQVSATDRDSGPNGRLLYTFQGGDDGDGDFYIEPTSGVIRTQRRLDRENVAVYNLWALAVDRGSPTPLSASVEIQVTILDINDNAPMFEKDELELFVEENNPVGSVVAKIRANDPDEGPNAQIMYQIVEGDMRHFFQLDLLNGDLRAMVELDFEVRREYVLVVQATSAPLVSRATVHILLVDQNDNPPVLPDFQILFNNYVTNKSNSFPTGVIGCIPAHDPDVSDSLNYTFVQGNELRLLLLDPATGELQLSRDLDNNRPLEALMEVSVSDGIHSVTAFCTLRVTIITDDMLTNSITVRLENMSQEKFLSPLLALFVEGVAAVLSTTKDDVFVFNVQNDTDVSSNILNVTFSALLPGGVRGQFFPSEDLQEQIYLNRTLLTTISTQRVLPFDDNICLREPCENYMKCVSVLRFDSSAPFLSSTTVLFRPIHPINGLRCRCPPGFTGDYCETEIDLCYSDPCGANGRCRSREGGYTCECFEDFTGEHCEVDARSGRCANGVCKNGGTCVNLLIGGFHCVCPPGEYERPYCEVTTRSFPPQSFVTFRGLRQRFHFTISLTFATQERNGLLLYNGRFNEKHDFIALEIVDEQVQLTFSAGETTTTVAPKVPSGVSDGRWHSVQVQYYNKPNIGHLGLPHGPSGEKMAVVTVDDCDTTMAVRFGKDIGNYSCAAQGTQTGSKKSLDLTGPLLLGGVPNLPEDFPVHNRQFVGCMRNLSVDGKNVDMAGFIANNGTREGCAARRNFCDGRRCQNGGTCVNRWNMYLCECPLRFGGKNCEQAMPHPQLFSGESVVSWSDLNIIISVPWYLGLMFRTRKEDSVLMEATSGGPTSFRLQILNNYLQFEVSHGPSDVESVMLSGLRVTDGEWHHLLIELKNVKEDSEMKHLVTMTLDYGMDQNKADIGGMLPGLTVRSVVVGGASEDKVSVRRGFRGCMQGVRMGGTPTNVATLNMNNALKVRVKDGCDVDDPCTSSPCPPNSRCHDAWEDYSCVCDKGKNCVDACHLNPCENMGACVRSPGSPQGYVCECGPSHYGPYCENKLDLPCPRGWWGNPVCGPCHCAVSKGFDPDCNKTNGQCQCKENYYKLLAQDTCLPCDCFPHGSHSRTCDMATGQCACKPGVIGRQCNRCDNPFAEVTTLGCEVIYNGCPKAFEAGIWWPQTKFGQPAAVPCPKGSVGNAVRHCSGEKGWLPPELFNCTTISFVDLRAMNEKLSRNETQVDGARALQLVRALRSATQHTGTLFGNDVRTAYQLLGHVLQHESWQQGFDLAATQDADFHEDVIHSGSALLAPATRAAWEQIQRSEGGTAQLLRRLEGYFSNVARNVRRTYLRPFVIVTANMILAVDIFDKFNFTGARVPRFDTIHEEFPRELESSVSFPADFFRPPEEKEGPLLRPAGRRTTPQTTRPGPGTEREAPISRRRRHPDDAGQFAVALVIIYRTLGQLLPERYDPDRRSLRLPHRPIINTPMVSTLVYSEGAPLPRPLERPVLVEFALLEVEERTKPVCVFWNHSLAVGGTGGWSARGCELLSRNRTHVACQCSHTASFAVLMDISRRENGEVLPLKIVTYAAVSLSLAALLVAFVLLSLVRMLRSNLHSIHKHLAVALFLSQLVFVIGINQTENPFLCTVVAILLHYIYMSTFAWTLVESLHVYRMLTEVRNIDTGPMRFYYVVGWGIPAIVTGLAVGLDPQGYGNPDFCWLSLQDTLIWSFAGPIGAVIIINTVTSVLSAKVSCQRKHHYYGKKGIVSLLRTAFLLLLLISATWLLGLLAVNRDALSFHYLFAIFSGLQGPFVLLFHCVLNQEVRKHLKGVLGGRKLHLEDSATTRATLLTRSLNCNTTFGDGPDMLRTDLGESTASLDSIVRDEGIQKLGVSSGLVRGSHGEPDASLMPRSCKDPPGHDSDSDSELSLDEQSSSYASSHSSDSEDDGVGAEEKWDPARGAVHSTPKGDAVANHVPAGWPDQSLAESDSEDPSGKPRLKVETKVSVELHREEQGSHRGEYPPDQESGGAARLASSQPPEQRKGILKNKVTYPPPLTLTEQTLKGRLREKLADCEQSPTSSRTSSLGSGGPDCAITVKSPGREPGRDHLNGVAMNVRTGSAQADGSDSEKP

SEQ ID NO: 885927 - protein, 1397 aa, Homo sapiens
MAPPPPPVLPVLLLLAAAAALPAMGLRAAAWEPRVPGGTRAFALRPGCTYAVGAACTPRAPRELLDVGRDGRLAGRRRVSGAGRPLPLQVRLVARSAPTALSRRLRARTHLPGCGARARLCGTGARLCGALCFPVPGGCAAAQHSALAAPTTLPACRCPPRPRPRCPGRPICLPPGGSVRLRLLCALRRAAGAVRVGLALEAATAGTPSASPSPSPPLPPNLPEARAGPARRARRGTSGRGSLKFPMPNYQVALFENEPAGTLILQLHAHYTIEGEEERVSYYMEGLFDERSRGYFRIDSATGAVSTDSVLDRETKETHVLRVKAVDYSTPPRSATTYITVLVKDTNDHSPVFEQSEYRERVRENLEVGYEVLTIRASDRDSPINANLRYRVLGGAWDVFQLNESSGVVSTRAVLDREEAAEYQLLVEANDQGRNPGPLSATATVYIEVEDENDNYPQFSEQNYVVQVPEDVGLNTAVLRVQATDRDQGQNAAIHYSILSGNVAGQFYLHSLSGILDVINPLDFEDVQKYSLSIKAQDGGRPPLINSSGVVSVQVLDVNDNEPIFVSSPFQATVLENVPLGYPVVHIQAVDADSGENARLHYRLVDTASTFLGGGSAGPKNPAPTPDFPFQIHNSSGWITVCAELDREEVEHYSFGVEAVDHGSPPMSSSTSVSITVLDVNDNDPVFTQPTYELRLNEDAAVGSSVLTLQARDRDANSVITYQLTGGNTRNRFALSSQRGGGLITLALPLDYKQEQQYVLAVTASDGTRSHTAHVLINVTDANTHRPVFQSSHYTVSVSEDRPVGTSIATLSANDEDTGENARITYVIQDPVPQFRIDPDSGTMYTMMELDYENQVAYTLTIMAQDNGIPQKSDTTTLEILILDANDNAPQFLWDFYQGSIFEDAPPSTSILQVSATDRDSGPNGRLLYTFQGGDDGDGDFYIEPTSGVIRTQRRLDRENVAVYNLWALAVDRGSPTPLSASVEIQVTILDINDNAPMFEKDELELFVEENNPVGSVVAKIRANDPDEGPNAQIMYQIVEGDMRHFFQLDLLNGDLRAMVELDFEVRREYVLVVQATSAPLVSRATVHILLVDQNDNPPVLPDFQILFNNYVTNKSNSFPTGVIGCIPAHDPDVSDSLNYTFVQGNELRLLLLDPATGELQLSRDLDNNRPLEALMEVSVSDGIHSVTAFCTLRVTIITDDMLTNSITVRLENMSQEKFLSPLLALFVEGVAAVLSTTKDDVFVFNVQNDTDVSSNILNVTFSALLPGGVRGQFFPSEDLQEQIYLNRTLLTTISTQRVLPFDDNICLREPCENYMKCVSVLRFDSSAPFLSSTTVLFRPIHPINGLRCRCPPGFTGDYCETEIDLCYSDPCGANGRCRSREGGYTCECFEDFTEIS

SEQ ID NO: 885928 - protein, 3016 aa, Homo sapiens
MAPPPPPVLPVLLLLAAAAALPAMGLRAAAWEPRVPGGTRAFALRPGCTYAVGAACTPRAPRELLDVGRDGRLAGRRRVSGAGRPLPLQVRLVARSAPTALSRRLRARTHLPGCGARARLCGTGARLCGALCFPVPGGCAAAQHSALAAPTTLPACRCPPRPRPRCPGRPICLPPGGSVRLRLLCALRRAAGAVRVGLALEAATAGTPSASPSPSPPLPPNLPEARAGPARRARRGTSGRGSLKFPMPNYQVALFENEPAGTLILQLHAHYTIEGEEERVSYYMEGLFDERSRGYFRIDSATGAVSTDSVLDRETKETHVLRVKAVDYSTPPRSATTYITVLVKDTNDHSPVFEQSEYRERVRENLEVGYEVLTIRASDRDSPINANLRYRVLGGAWDVFQLNESSGVVSTRAVLDREEAAEYQLLVEANDQGRNPGPLSATATVYIEVEDENDNYPQFSEQNYVVQVPEDVGLNTAVLRVQATDRDQGQNAAIHYSILSGNVAGQFYLHSLSGILDVINPLDFEDVQKYSLSIKAQDGGRPPLINSSGVVSVQVLDVNDNEPIFVSSPFQATVLENVPLGYPVVHIQAVDADSGENARLHYRLVDTASTFLGGGSAGPKNPAPTPDFPFQIHNSSGWITVCAELDREEVEHYSFGVEAVDHGSPPMSSSTSVSITVLDVNDNDPVFTQPTYELRLNEDAAVGSSVLTLQARDRDANSVITYQLTGGNTRNRFALSSQRGGGLITLALPLDYKQEQQYVLAVTASDGTRSHTAHVLINVTDANTHRPVFQSSHYTVSVSEDRPVGTSIATLSANDEDTGENARITYVIQDPVPQFRIDPDSGTMYTMMELDYENQVAYTLTIMAQDNGIPQKSDTTTLEILILDANDNAPQFLWDFYQGSIFEDAPPSTSILQVSATDRDSGPNGRLLYTFQGGDDGDGDFYIEPTSGVIRTQRRLDRENVAVYNLWALAVDRGSPTPLSASVEIQVTILDINDNAPMFEKDELELFVEENNPVGSVVAKIRANDPDEGPNAQIMYQIVEGDMRHFFQLDLLNGDLRAMVELDFEVRREYVLVVQATSAPLVSRATVHILLVDQNDNPPVLPDFQILFNNYVTNKSNSFPTGVIGCIPAHDPDVSDSLNYTFVQGNELRLLLLDPATGELQLSRDLDNNRPLEALMEVSVSDGIHSVTAFCTLRVTIITDDMLTNSITVRLENMSQEKFLSPLLALFVEGVAAVLSTTKDDVFVFNVQNDTDVSSNILNVTFSALLPGGVRGQFFPSEDLQEQIYLNRTLLTTISTQRVLPFDDNICLREPCENYMKCVSVLRFDSSAPFLSSTTVLFRPIHPINGLRCRCPPGFTGDYCETEIDLCYSDPCGANGRCRSREGGYTCECFEDFTGEHCEVDARSGRCANGVCKNGGTCVNLLIGGFHCVCPPGEYERPYCEVTTRSFPPQSFVTFRGLRQRFHFTISLTFATQERNGLLLYNGRFNEKHDFIALEIVDEQVQLTFSAGETTTTVAPKVPSGVSDGRWHSVQVQYYNKPNIGHLGLPHGPSGEKMAVVTVDDCDTTMAVRFGKDIGNYSCAAQGTQTGSKKSLDLTGPLLLGGVPNLPEDFPVHNRQFVGCMRNLSVDGKNVDMAGFIANNGTREGCAARRNFCDGRRCQNGGTCVNRWNMYLCECPLRFGGKNCEQAMPHPQLFSGESVVSWSDLNIIISVPWYLGLMFRTRKEDSVLMEATSGGPTSFRLQILNNYLQFEVSHGPSDVESVMLSGLRVTDGEWHHLLIELKNVKEDSEMKHLVTMTLDYGMDQNKADIGGMLPGLTVRSVVVGGASEDKVSVRRGFRGCMQGVRMGGTPTNVATLNMNNALKVRVKDGCDVDDPCTSSPCPPNSRCHDAWEDYSCVCDKGKNCVDACHLNPCENMGACVRSPGSPQGYVCECGPSHYGPYCENKLDLPCPRGWWGNPVCGPCHCAVSKGFDPDCNKTNGQCQCKENYYKLLAQDTCLPCDCFPHGSHSRTCDMATGQCACKPGVIGRQCNRCDNPFAEVTTLGCEVIYNGCPKAFEAGIWWPQTKFGQPAAVPCPKGSVGNAVRHCSGEKGWLPPELFNCTTISFVDLRAMNEKLSRNETQVDGARALQLVRALRSATQHTGTLFGNDVRTAYQLLGHVLQHESWQQGFDLAATQDADFHEDVIHSGSALLAPATRAAWEQIQRSEGGTAQLLRRLEGYFSNVARNVRRTYLRPFVIVTANMILAVDIFDKFNFTGARVPRFDTIHEEFPRELESSVSFPADFFRPPEEKEGPLLRPAGRRTTPQTTRPGPGTEREAPISRRRRHPDDAGQFAVALVIIYRTLGQLLPERYDPDRRSLRLPHRPIINTPMVSTLVYSEGAPLPRPLERPVLVEFALLEVEERTKPVCVFWNHSLAVGGTGGWSARGCELLSRNRTHVACQCSHTASFAVLMDISRRENGEVLPLKIVTYAAVSLSLAALLVAFVLLSLVRMLRSNLHSIHKHLAVALFLSQLVFVIGINQTENPFLCTVVAILLHYIYMSTFAWTLVESLHVYRMLTEVRNIDTGPMRFYYVVGWGIPAIVTGLAVGLDPQGYGNPDFCWLSLQDTLIWSFAGPIGAVIIINTVTSVLSAKVSCQRKHHYYGKKGIVSLLRTAFLLLLLISATWLLGLLAVNRDALSFHYLFAIFSGLQGPFVLLFHCVLNQEVRKHLKGVLGGRKLHLEDSATTRATLLTRSLNCNTTFGDGPDMLRTDLGESTASLDSIVRDEGIQKLGVSSGLVRGSHGEPDASLMPRSCKDPPGHDSDSDSELSLDEQSSSYASSHSSDSEDDGVGAEEKWDPARGAVHSTPKGDAVANHVPAGWPDQSLAESDSEDPSGKPRLKVETKVSVELHREEQGSHRGEYPPDQESGGAARLASSQPPEQRKGILKNKVTYPPPLTLTEQTLKGRLREKLADCEQSPTSSRTSSLGSGGPDCAITVKSPGREPGRDHLNGVAMNVRTGSAQADGSDSEGSNETSI

SEQ ID NO: 885929 - protein, 1329 aa, Homo sapiens
MPHPQLFSGESVVSWSDLNIIISVPWYLGLMFRTRKEDSVLMEATSGGPTSFRLQILNNYLQFEVSHGPSDVESVMLSGLRVTDGEWHHLLIELKNVKEDSEMKHLVTMTLDYGMDQNKADIGGMLPGLTVRSVVVGGASEDKVSVRRGFRGCMQGVRMGGTPTNVATLNMNNALKVRVKDGCDVDDPCTSSPCPPNSRCHDAWEDYSCVCDKGKNCVDACHLNPCENMGACVRSPGSPQGYVCECGPSHYGPYCENKLDLPCPRGWWGNPVCGPCHCAVSKGFDPDCNKTNGQCQCKENYYKLLAQDTCLPCDCFPHGSHSRTCDMATGQCACKPGVIGRQCNRCDNPFAEVTTLGCEVIYNGCPKAFEAGIWWPQTKFGQPAAVPCPKGSVGNAVRHCSGEKGWLPPELFNCTTISFVDLRAMNEKLSRNETQVDGARALQLVRALRSATQHTGTLFGNDVRTAYQLLGHVLQHESWQQGFDLAATQDADFHEDVIHSGSALLAPATRAAWEQIQRSEGGTAQLLRRLEGYFSNVARNVRRTYLRPFVIVTANMILAVDIFDKFNFTGARVPRFDTIHEEFPRELESSVSFPADFFRPPEEKEGPLLRPAGRRTTPQTTRPGPGTEREAPISRRRRHPDDAGQFAVALVIIYRTLGQLLPERYDPDRRSLRLPHRPIINTPMVSTLVYSEGAPLPRPLERPVLVEFALLEVEERTKPVCVFWNHSLAVGGTGGWSARGCELLSRNRTHVACQCSHTASFAVLMDISRRENGEVLPLKIVTYAAVSLSLAALLVAFVLLSLVRMLRSNLHSIHKHLAVALFLSQLVFVIGINQTENPFLCTVVAILLHYIYMSTFAWTLVESLHVYRMLTEVRNIDTGPMRFYYVVGWGIPAIVTGLAVGLDPQGYGNPDFCWLSLQDTLIWSFAGPIGAVIIINTVTSVLSAKVSCQRKHHYYGKKGIVSLLRTAFLLLLLISATWLLGLLAVNRDALSFHYLFAIFSGLQGPFVLLFHCVLNQEVRKHLKGVLGGRKLHLEDSATTRATLLTRSLNCNTTFGDGPDMLRTDLGESTASLDSIVRDEGIQKLGVSSGLVRGSHGEPDASLMPRSCKDPPGHDSDSDSELSLDEQSSSYASSHSSDSEDDGVGAEEKWDPARGAVHSTPKGDAVANHVPAGWPDQSLAESDSEDPSGKPRLKVETKVSVELHREEQGSHRGEYPPDQESGGAARLASSQPPEQRKGILKNKVTYPPPLTLTEQTLKGRLREKLADCEQSPTSSRTSSLGSGGPDCAITVKSPGREPGRDHLNGVAMNVRTGSAQADGSDSEGSNETSI

SEQ ID NO: 885930 - protein, 1151 aa, Homo sapiens
GRGCVRVACSSPHQLAHSRSGRLHQHSSQGGWMVAGINCVDACHLNPCENMGACVRSPGSPQGYVCECGPSHYGPYCENKLDLPCPRGWWGNPVCGPCHCAVSKGFDPDCNKTNGQCQCKENYYKLLAQDTCLPCDCFPHGSHSRTCDMATGQCACKPGVIGRQCNRCDNPFAEVTTLGCEVIYNGCPKAFEAGIWWPQTKFGQPAAVPCPKGSVGNAVRHCSGEKGWLPPELFNCTTISFVDLRAMNEKLSRNETQVDGARALQLVRALRSATQHTGTLFGNDVRTAYQLLGHVLQHESWQQGFDLAATQDADFHEDVIHSGSALLAPATRAAWEQIQRSEGGTAQLLRRLEGYFSNVARNVRRTYLRPFVIVTANMILAVDIFDKFNFTGARVPRFDTIHEEFPRELESSVSFPADFFRPPEEKEGPLLRPAGRRTTPQTTRPGPGTEREAPISRRRRHPDDAGQFAVALVIIYRTLGQLLPERYDPDRRSLRLPHRPIINTPMVSTLVYSEGAPLPRPLERPVLVEFALLEVEERTKPVCVFWNHSLAVGGTGGWSARGCELLSRNRTHVACQCSHTASFAVLMDISRRENGEVLPLKIVTYAAVSLSLAALLVAFVLLSLVRMLRSNLHSIHKHLAVALFLSQLVFVIGINQTENPFLCTVVAILLHYIYMSTFAWTLVESLHVYRMLTEVRNIDTGPMRFYYVVGWGIPAIVTGLAVGLDPQGYGNPDFCWLSLQDTLIWSFAGPIGAVIIINTVTSVLSAKVSCQRKHHYYGKKGIVSLLRTAFLLLLLISATWLLGLLAVNRDALSFHYLFAIFSGLQGPFVLLFHCVLNQEVRKHLKGVLGGRKLHLEDSATTRATLLTRSLNCNTTFGDGPDMLRTDLGESTASLDSIVRDEGIQKLGVSSGLVRGSHGEPDASLMPRSCKDPPGHDSDSDSELSLDEQSSSYASSHSSDSEDDGVGAEEKWDPARGAVHSTPKGDAVANHVPAGWPDQSLAESDSEDPSGKPRLKVETKVSVELHREEQGSHRGEYPPDQESGGAARLASSQPPEQRKGILKNKVTYPPPLTLTEQTLKGRLREKLADCEQSPTSSRTSSLGSGGPDCAITVKSPGREPGRDHLNGVAMNVRTGSAQADGSDSEGSNETSI

SEQ ID NO: 885931 - protein, 82 aa, Homo sapiens
VRRTYLRPFVIVTANMSKALAALGVEPCYHQGCAPELGPHGVKQVGSRPPLGHALRKMIVRPGTVAHTCNPSTLGDRDRQTT

SEQ ID NO: 885932 - protein, 367 aa, Homo sapiens
MAPSGPGSSARRRCRRVLYWIPVVFITLLLGWSYYAYAIQLCIVSMENTGEQVVCLMAYHLLFAMFVWSYWKTIFTLPMNPSKEFHLSYAEKDLLEREPRGEAHQEVLRRAAKDLPIYTRTMSGAIRYCDRCQLIKPDRCHHCSVCDKCILKMDHHCPWVNNCVGFSNYKFFLLFLAYSLLYCLFIAATDLQYFIKFWTNGLPDTQAKFHIMFLFFAAAMFSVSLSSLFGYHCWLVSKNKSTLEAFRSPVFRHGTDKNGFSLGFSKNMRQVFGDEKKYWLLPIFSSLGDGCSFPTCLVNQDPEQASTPAGLNSTAKNLENHQFPAKPLRESQSHLLTDSQSWTESSINPGKCKAGMSNPALTMENET

SEQ ID NO: 885933 - protein, 367 aa, Homo sapiens; identical to SEQ ID NO: 885932

SEQ ID NO: 885934 - protein, 367 aa, Homo sapiens; identical to SEQ ID NO: 885932

SEQ ID NO: 885935 - protein, 777 aa, Homo sapiens
MTFYPFVASSSTRRVDNSNTRLAVQIERDPGNDDNNLNSIFYEHLTRTLQESLCGDLVLGRWGNYSSGDCFILASDDLNAFVHLIEIGNGLVTFQLRGLEFRGTYCQQREVEAIMEGDEEDRGCCCCKPGHLPHLLSCNAAFHLRWLTWEITQTQYILEGYSILDNNAATMLQVFDLRRILIRYYIKSIIYYMVTSPKLLSWIKNESLLKSLQPFAKWHYIERDLAMFNINIDDDYVPCLQGITRASFCNVYLEWIQHCARKRQEPSTTLDSDEDSPLVTLSFALCTLGRRALGTAAHNMAISLDSFLYGLHVLFKGDFRITARDEWVFADMDLLHKVVAPAIRMSLKLHQDQFTCPDEYEDPAVLYEAIQSFEKKVVICHEGDPAWRGAVLSNKEELLTLRHVVDEGADEYKVIMLHRSFLSFKVIKVNKECVRGLWAGQQQELIFLRNRNPERGSIQNNKQVLRNLINSSCDQPLGYPMYVSPLTTSYLGTHRQLKNIWGGPITLDRIRTWFWTKWVRMRKDCNARQHSGGNIEDVDGGGAPTTGGNNAPSGGSQESSAEQPRKGGAQHGVSSCEGTQRTGRRKGRSQSVQAHSALSQRPPMLSSSGPILESRQTFLQTSTSVHELAQRLSGSRLSLHASATSLHSQPPPVTTTGHLSVRERAEALIRSSLGSSTSSTLSFLFGKRSFSSALVISGLSAAEGGNTSDTQSSSSVNIVMGPSARAASQATRVRGWAGLTRTGWDGGTGSWPERGTCLAFPPFCLQNPIPFSMGLPE

SEQ ID NO: 885936 - protein, 777 aa, Homo sapiens; identical to SEQ ID NO: 885935

SEQ ID NO: 885937 - protein, 777 aa, Homo sapiens; identical to SEQ ID NO: 885935

SEQ ID NO: 885938 - protein, 789 aa, Homo sapiens [sequence omitted]

SEQ ID NO: 885939 - protein, 777 aa, Homo sapiens; identical to SEQ ID NO: 885935

SEQ ID NO: 885940 - protein, 309 aa, Homo sapiens
MYVSPLTTSYLGTHRQLKNIWGGPITLDRIRTWFWTKWVRMRKDCNARQHSGGNIEDVDGGGAPTTGGNNAPSGGSQESSAEQPRKGGAQHGVSSCEGTQRTGRRKGRSQSVQAHSALSQRPPMLSSSGPILESRQTFLQTSTSVHELAQRLSGSRLSLHASATSLHSQPPPVTTTGHLSVRERAEALIRSSLGSSTSSTLSFLFGKRSFSSALVISGLSAAEGGNTSDTQSSSSVNIVMGPSARAASQATRHLSEPCEPPDATEQGQLHDRCLAEAVADTLGVVCRRASQEDMGLDDTASQQSVSDEQ

SEQ ID NO: 885941 - protein, 739 aa, Homo sapiens
MTFYPFVASSSTRRVDNSNTRLAVQIERDPGNDDNNLNSIFYEHLTRTLQESLCGDLVLGRWGNYSSGDCFILASDDLNAFVHLIEIGNGLVTFQLRGLEFRGTYCQQREVEAIMEGDEEDRGCCCCKPGHLPHLLSCNAAFHLRWLTWEITQTQYILEGYSILDNNAATMLQVFDLRRILIRYYIKSIIYYMVTSPKLLSWIKNESLLKSLQPFAKWHYIERDLAMFNINIDDDYVPCLQGITRASFCNVYLEWIQHCARKRQEPSTTLDSDEDSPLVTLSFALCTLGRRALGTAAHNMAISLDSFLYGLHVLFKGDFRITARDEWVFADMDLLHKVVAPAIRMSLKLHQDQFTCPDEYEDPAVLYEAIQSFEKKVVICHEGDPAWRGAVLSNKEELLTLRHVVDEGADEYKVIMLHRSFLSFKVIKVNKECVRGLWAGQQQELIFLRNRNPERGSIQNNKQVLRNLINSSCDQPLGYPMYVSPLTTSYLGTHRQLKNIWGGPITLDRIRTWFWTKWVRMRKDCNARQHSGGNIEDVDGGGAPTTGGNNAPSGGSQESSAEQPRKGGAQHGVSSCEGTQRTGRRKGRSQSVQAHSALSQRPPMLSSSGPILESRQTFLQTSTSVHELAQRLSGSRLSLHASATSLHSQPPPVTTTGHLSVRERAEALIRSSLGSSTSSTLSFLFGKRSFSSALVISGLSAAEGGNTSDTQSSSSVNIVMGPSARAASQATRISLPPPR

SEQ ID NO: 885942 - protein, 104 aa, Homo sapiens
MPPSRGSFMTDVWLRLWRTLSGLSAGEQARRTWAWTTRPRSKVCQTSSDGRAAGRGGWLPHTSHLHCSPSCSPNHHNQPIPRSMRDSSCGKGELFQNTELISGF

SEQ ID NO: 885943 - protein, 789 aa, Homo sapiens [sequence omitted]

SEQ ID NO: 885944 - protein, 777 aa, Homo sapiens; identical to SEQ ID NO: 885935

SEQ ID NO: 885945 - protein, 717 aa, Homo sapiens
MTFYPFVASSSTRRVDNSNTRLAVQIERDPGNDDNNLNSIFYEHLTRTLQESLCGDLVLGRWGNYSSGDCFILASDDLNAFVHLIEIGNGLVTFQLRGLEFRGTYCQQREVEAIMEGDEEDRGCCCCKPGHLPHLLSCNAAFHLRWLTWEITQTQYILEGYSILDNNAATMLQVFDLRRILIRYYIKSIIYYMVTSPKLLSWIKNESLLKSLQPFAKWHYIERDLAMFNINIDDDYVPCLQGITRASFCNVYLEWIQHCARKRQEPSTTLDSDEDSPLVTLSFALCTLGRRALGTAAHNMAISLDSFLYGLHVLFKGDFRITARDEWVFADMDLLHKVVAPAIRMSLKLHQDQFTCPDEYEDPAVLYEAIQSFEKKVVICHEGDPAWRGAVLSNKEELLTLRHVVDEGADEYKVIMLHRSFLSFKVIKVNKECVRGLWAGQQQELIFLRNRNPERGSIQNNKQVLRNLINSSCDQPLGYPMYVSPLTTSYLGTHRQLKNIWGGPITLDRIRTWFWTKWVRMRKDCNARQHSGGNIEDVDGGGAPTTGGNNAPSGGSQESSAEQPRKGGAQHGVSSCEGTQRTGRRKGRSQSVQAHSALSQRPPMLSSSGPILESRQTFLQTSTSVHELAQRLSGSRLSLHASATSLHSQPPPVTTTGHLSVRERAEALIRSSLGSSTSSTLSFLFGKRSFSSALVISGLSRQPRECPPQPQPDIGHE

SEQ ID NO: 885946 - protein, 555 aa, Homo sapiens
MTFYPFVASSSTRRVDNSNTRLAVQIERDPGNDDNNLNSIFYEHLTRTLQESLCGDLVLGRWGNYSSGDCFILASDDLNAFVHLIEIGNGLVTFQLRGLEFRGTYCQQREVEAIMEGDEEDRGCCCCKPGHLPHLLSCNAAFHLRWLTWEITQTQYILEGYSILDNNAATMLQVFDLRRILIRYYIKSIIYYMVTSPKLLSWIKNESLLKSLQPFAKWHYIERDLAMFNINIDDDYVPCLQGITRASFCNVYLEWIQHCARKRQEPSTTLDSDEDSPLVTLSFALCTLGRRALGTAAHNMAISLDSFLYGLHVLFKGDFRITARDEWVFADMDLLHKVVAPAIRMSLKLHQDQFTCPDEYEDPAVLYEAIQSFEKKVVICHEGDPAWRGAVLSNKEELLTLRHVVDEGADEYKVIMLHRSFLSFKVIKVNKECVRGLWAGQQQELIFLRNRNPERGSIQNNKQVLRNLINSSCDQPLGYPMYVSPLTTSYLGTHRQLKNIWGGPITLDRIRTWFWTKWVRMRKDCNARQHSGGNIEPDSLPASYPVQFPKRTGTG

SEQ ID NO: 885947 - protein, 129 aa, Homo sapiens
MGDCTDTGWQQVVAQQEEVLQVVLQGVGWPQGDCTDTGWQQVVAQQEEVLQVVLQGVGWPQGGRQQGDCTDTGWQQVVAQQQGLHTTAVHDEGQQVMGRQQPSCREQGSQHTGRRQGSQMGRVQRGTQV

SEQ ID NO: 885948 - protein, 253 aa, Homo sapiens
KNKRALKTKEDRPRLQRKQEAVGPALSPAAGAPSSGMESVALYSFQATESDELAFNKGDTLKILNMEDDQNWYKAELRGVEGFIPKNYIRVKPHPWYSGRISRQLAEEILMKRNHLGAFLIRESESSPGEFSVSVNYGDQVQHFKVLREASGKYFLWEEKFNSLNELVDFYRTTTIAKKRQIFLRDEEPLLKSPGACFAQAQFDFSAQDPSQLSFRRGDIIEVLERPDPHWWRGRSCGRVGFFPRSYVQPVHL

SEQ ID NO: 885949 - protein, 276 aa, Homo sapiens
KNKRALKTKEDRPRLQRKQEAVGPALSPAAGAPSSGMESVALYSFQATESDELAFNKGDTLKILNMEDDQNWYKAELRGVEGFIPKNYIRVKPHPWYSGRISRQLAEEILMKRNHLGAFLIRESESSPGEFSVSVKWANRGQRGAMPDGDLPSGQLAPSYGDQVQHFKVLREASGKYFLWEEKFNSLNELVDFYRTTTIAKKRQIFLRDEEPLLKSPGACFAQAQFDFSAQDPSQLSFRRGDIIEVLERPDPHWWRGRSCGRVGFFPRSYVQPVHL

SEQ ID NO: 885950 - protein, 200 aa, Homo sapiens
KNKRALKTKEDRPRLQRKQEAVGPALSPAAGAPSSGMESVALYSFQATESDELAFNKGDTLKILNMEDDQNWYKAELRGVEGFIPKNYIRVKPHPHLGPALPRPSLTSQPRTPRSSASAVATSLRSWSAQTPTGGGAGPAGALASSHGVTCSPCTCEQPGGRSGQRAFLQELRSREDMDTPSSVRVTRGSVDGLGLNVGS

SEQ ID NO: 885951 - protein, 241 aa, Homo sapiens
KNKRALKTKEDRPRLQRKQEAVGPALSPAAGAPSSGMESVALYSFQATESDELAFNKGDTLKILNMEDDQNWYKAELRGVEGFIPKNYIRVKPHPWYSGRISRQLAEEILMKRNHLGAFLIRESESSPGEFSVSVNHLGPALPRPSLTSQPRTPRSSASAVATSLRSWSAQTPTGGGAGPAGALASSHGVTCSPCTCEQPGGRSGQRAFLQELRSREDMDTPSSVRVTRGSVDGLGLNVGS

SEQ ID NO: 885952 - protein, 235 aa, Homo sapiens
KNKRALKTKEDRPRLQRKQEAVGPALSPAAGAPSSGMESVALYSFQATESDELAFNKGDTLKILNMEDDQNWYKAELRGVEGFIPKNYIRVKPHPWYSGRISRQLAEEILMKRNHLGAFLIRESESSPGEFSVSVKAQRGPCLGTKITQQIGVEPERTRDSCASLGIPSTAREGLHPSRIRTQAEVSEAQAEIRLLLQRPSFQGLVKWAVPDDPQACHWLLFGSDTPNLTKHFHF

SEQ ID NO: 885953 - protein, 118 aa, Homo sapiens
CLHQCPAPPKLSLTLVPVCCEQVVPPLLFTDGQTEAREGPCLMEIAQRAVSTQVGPHVHKPWLGWWRGCPRAPAPTPALFFLSGLTLLPLLLLLLLLLLLLPPPGQKNSLGRTGCCQH

SEQ ID NO: 885954 - protein, 657 aa, Homo sapiens
PPPQSPPAPLLSGGGGARDREQRLWRSWRSEIRELCFSEKRVAFWTCFRPPTSQRERIASQRKTNSEVPMHRSAPSQTTKRSRSPFSTTRRSWDDSESSGTNLNIDNEDYSRYPPREYRASGSRRGMAYGHIDSYGADDSEEEGAGPVERPPVRGKTGKFKDDKLYDPEKGARSLAGPPPHFSSFSRDVREERDKLDPVPAARCSASRADFLPQSSVASQSSSEGKLATKGDSSERERREQNLPARPSRAPVSICGGGENTSKSAEEPVVRPKIRNLASPNCVKPKIFFDTDDDDDMPHSTSRWRDTANDNEGHSDGLARRGRGESSSGYPEPKYPEDKREARSDQVKPEKVPRRRRTMADPDFWTHSDDYYKYCDEDSDSDKEWIAALRRKYRSREQTLSSSGESWETLPGKEEREPPQAKVSASTGTSPGPGASASAGAGAGASAGSNGSNYLEEVREPSLQEEQASLEEGEIPWLQYHENDSSSEGDNDSGHELMQPGVFMLDGNNNLEDDSSVSEDLEVDWSLFDGFADGLGVAEAISYVDPQFLTYMALEERLAQAMETALAHLESLAVDVEVANPPASKESIDALPEILVTEDHGAVGQEMCCPICCSEYVKGEVATELPCHHYFHKPCVSIWLQKSGTCPVCRCMFPPPL

SEQ ID NO: 885955 - protein, 644 aa, Homo sapiens
MGQESSKPVWPNPTGGYQSNTGRRYGRRHAYVSFFRPPTSQRERIASQRKTNSEVPMHRSAPSQTTKRSRSPFSTTRRSWDDSESSGTNLNIDNEDYSRYPPREYRASGSRRGMAYGHIDSYGADDSEEEGAGPVERPPVRGKTGKFKDDKLYDPEKGARSLAGPPPHFSSFSRDVREERDKLDPVPAARCSASRADFLPQSSVASQSSSEGKLATKGDSSERERREQNLPARPSRAPVSICGGGENTSKSAEEPVVRPKIRNLASPNCVKPKIFFDTDDDDDMPHSTSRWRDTANDNEGHSDGLARRGRGESSSGYPEPKYPEDKREARSDQVKPEKVPRRRRTMADPDFWTHSDDYYKYCDEDSDSDKEWIAALRRKYRSREQTLSSSGESWETLPGKEEREPPQAKVSASTGTSPGPGASASAGAGAGASAGSNGSNYLEEVREPSLQEEQASLEEGEIPWLQYHENDSSSEGDNDSGHELMQPGVFMLDGNNNLEDDSSVSEDLEVDWSLFDGFADGLGVAEAISYVDPQFLTYMALEERLAQAMETALAHLESLAVDVEVANPPASKESIDALPEILVTEDHGAVGQEMCCPICCSEYVKGEVATELPCHHYFHKPCVSIWLQKSGTCPVCRCMFPPPL

SEQ ID NO: 885956 - protein, 628 aa, Homo sapiens
QAGGWLRGCTGWVTQSSSDAYLWAQHLLAPAESCTRPPPPSPPPLSPPLPPLSPQQLGLGAHLWVSLTPYLSLAREMVMSWYFSPTRLPGGDSREAGLRSLKLPLQQTETRGDTGAGPVERPPVRGKTGKFKDDKLYDPEKGARSLAGPPPHFSSFSRDVREERDKLDPVPAARCSASRADFLPQSSVASQSSSEGKLATKGDSSERERREQNLPARPSRAPVSICGGGENTSKSAEEPVVRPKIRNLASPNCVKPKIFFDTDDDDDMPHSTSRWRDTANDNEGHSDGLARRGRGESSSGYPEPKYPEDKREARSDQVKPEKVPRRRRTMADPDFWTHSDDYYKYCDEDSDSDKEWIAALRRKYRSREQTLSSSGESWETLPGKEEREPPQAKVSASTGTSPGPGASASAGAGAGASAGSNGSNYLEEVREPSLQEEQASLEEGEIPWLQYHENDSSSEGDNDSGHELMQPGVFMLDGNNNLEDDSSVSEDLEVDWSLFDGFADGLGVAEAISYVDPQFLTYMALEERLAQAMETALAHLESLAVDVEVANPPASKESIDALPEILVTEDHGAVGQEMCCPICCSEYVKGEVATELPCHHYFHKPCVSIWLQKSGTCPVCRCMFPPPL

SEQ ID NO: 885957 - protein, 474 aa, Homo sapiens
PPPQSPPAPLLSGGGGARDREQRLWRSWRSEIRELCFSEKRVAFWTCFRPPTSQRERIASQRKTNSEVPMHRSAPSQTTKRSRSPFSTTRRSWDDSESSGTNLNIDNEDYSRYPPREYRASGSRRGMAYGHIDSYGADDSEEEGAGPVERPPVRGKTGKFKDDKLYDPEKGARSLAGPPPHFSSFSRDVREERDKLDPVPAARCSASRADFLPQSSVASQSSSEGKLATKGDSSERERREQNLPARPSRAPVSICGGGENTSKSAEEPVVRPKIRNLASPNCVKPKIFFDTDDDDDMPHSTSRWRDTANDNEGHSDGLARRGRGESSSGYPEPKYPEDKREARSDQVKPEKVPRRRRTMADPDFWTHSDDYYKYCDEDSDSDKEWIAALRRKYRSREQTLSSSGESWETLPGKEEREPPQAKVMLAAMAAITLKKFENHLFRKSRHPWKKEKFLGSSTMRMTVAVRGIMILVTS

SEQ ID NO: 885958 - protein, 262 aa, Homo sapiens
PPPQSPPAPLLSGGGGARDREQRLWRSWRSEIRELCFSEKRVAFWTCFRPPTSQRERIASQRKTNSEVPMHRSAPSQTTKRSRSPFSTTRRSWDDSESSGTNLNIDNEDYSRYPPREYRASGSRRGMAYGHIDSYGADDSEEEGAGPVERPPVRGKTGKFKDDKLYDPEKGARSLAGPPPHFSSFSRDVREERDKLDPVPAARCSASRADFLPQSSVASQSSSEGKLATKGDSSERERREQNLPARALLKLTMEIKPISQLA

SEQ ID NO: 885959 - protein, 131 aa, Homo sapiens
MGQESSKPVWPNPTGGYQSNTGRRYGRRHAYVSFFRPPTSQRERIASQRKTNSEVPMHRSAPSQTTKRSRSPFSTTRRSWDDSESSGTNLNIDNEDYSRYPPREYRASGSRRRQNHFCCMLWVDVPVIAVP

SEQ ID NO: 885960 - protein, 185 aa, Homo sapiens
  misc_feature (2)..(2): Xaa can be any naturally occurring amino acid
  misc_feature (11)..(11): Xaa can be any naturally occurring amino acid
LXPFWTIPGPXFPGPPRVRDSGHELMQPGVFMLDGNNNLEDDSSVSEDLEVDWSLFDGFADGLGVAEAISYVDPQFLTYMALEERLAQAMETALAHLESLAVDVEVANPPASKESIDALPEILVTEDHGAVGQEMCCPICCSEYVKGEVATELPCHHYFHKPCVSIWLQKSGTCPVCRCMFPPPL

SEQ ID NO: 885961 - protein, 459 aa, Homo sapiens
SRIAQFWMLSALEVQFHRDSQQQEAETPPTSSSGCGGGAGKPREEKRTALSKVVIRRLPPGLTKEQLEEQLRPLPAHDYFEFFAADLSLYPHLYSRAYINFRNPDDILLFRDRFDGYIFLDSKGLEYPAVVEFAPFQKIAKKKLRKKDAKTGSIEDDPEYKKFLETYCVEEEKTSANPETLLGEMEAKTRELIARRTTPLLEYIKNRKLEKQRIREEKREERRRRELEKKRLREEEKRRRREEERCKKKETDKQKKIAEKEVRIKLLKKPEKGEEPTTEKPKERGEEIDTGGGKQESCAPGAVVKARPMEGSLEEPQETSHSGSDKEHRDVERSQEQESEAQRYHVDDGRRHRAHHEPERLSRRSEDEQRWGKGPGQDRGKKGSQDSGAPGEAMERLGRAQRCDDSPAPRKERLANKDRPALQLYDPGARFRARECGGNRRICKAEGSGTGPEKREEAE

SEQ ID NO: 885962 - protein, 123 aa, Homo sapiens
LSRGFVGGWRLRLGGECGMRSEKEGAGGLRAAVAARGPSGREKLSALEVQFHRDSQQQEAETPPTSSSGCGGGAGKPREEKRTALSKVVIRRLPPGLTKEQLEEQLRPLPAHDYFEFFAADLR

SEQ ID NO: 885963 - protein, 439 aa, Homo sapiens
GRGPGLPARYAVPFELLVHAPPPVGTAARSPQVVIRRLPPGLTKEQLEEQLRPLPAHDYFEFFAADLSLYPHLYSRAYINFRNPDDILLFRDRFDGYIFLDSKGLEYPAVVEFAPFQKIAKKKLRKKDAKTGSIEDDPEYKKFLETYCVEEEKTSANPETLLGEMEAKTRELIARRTTPLLEYIKNRKLEKQRIREEKREERRRRELEKKRLREEEKRRRREEERCKKKETDKQKKIAEKEVRIKLLKKPEKGEEPTTEKPKERGEEIDTGGGKQESCAPGAVVKARPMEGSLEEPQETSHSGSDKEHRDVERSQEQESEAQRYHVDDGRRHRAHHEPERLSRRSEDEQRWGKGPGQDRGKKGSQDSGAPGEAMERLGRAQRCDDSPAPRKERLANKDRPALQLYDPGARFRARECGGNRRICKAEGSGTGPEKREEAE

SEQ ID NO: 885964 - protein, 346 aa, Homo sapiens
MASGTCFLLKGLEYPAVVEFAPFQKIAKKKLRKKDAKTGSIEDDPEYKKFLETYCVEEEKTSANPETLLGEMEAKTRELIARRTTPLLEYIKNRKLEKQRIREEKREERRRRELEKKRLREEEKRRRREEERCKKKETDKQKKIAEKEVRIKLLKKPEKGEEPTTEKPKERGEEIDTGGGKQESCAPGAVVKARPMEGSLEEPQETSHSGSDKEHRDVERSQEQESEAQRYHVDDGRRHRAHHEPERLSRRSEDEQRWGKGPGQDRGKKGSQDSGAPGEAMERLGRAQRCDDSPAPRKERLANKDRPALQLYDPGARFRARECGGNRRICKAEGSGTGPEKREEAE

SEQ ID NO: 885965 - protein, 461 aa, Homo sapiens
LSRGFVGGWRLRLGGECGMRSEKEGAGGLRAAVAARGPSGREKLSALEVQFHRDSQQQEAETPPTSSSGCGGGAGKPREEKRTALSKVVIRRLPPGLTKEQLEEQLRPLPAHDYFEFFAADLSLYPHLYSRAYINFRNPDDILLFRDRFDGYIFLDSKDPEYKKFLETYCVEEEKTSANPETLLGEMEAKTRELIARRTTPLLEYIKNRKLEKQRIREEKREERRRRELEKKRLREEEKRRRREEERCKKKETDKQKKIAEKEVRIKLLKKPEKGEEPTTEKPKERGEEIDTGGGKQESCAPGAVVKARPMEGSLEEPQETSHSGSDKEHRDVERSQEQESEAQRYHVDDGRRHRAHHEPERLSRRSEDEQRWGKGPGQDRGKKGSQDSGAPGEAMERLGRAQRCDDSPAPRKERLANKDRPALQLYDPGARFRARECGGNRRICKAEGSGTGPEKREEAE

SEQ ID NO: 885966 - protein, 494 aa, Homo sapiens
LSRGFVGGWRLRLGGECGMRSEKEGAGGLRAAVAARGPSGREKLSALEVQFHRDSQQQEAETPPTSSSGCGGGAGKPREEKRTALSKVVIRRLPPGLTKEQLEEQLRPLPAHDYFEFFAADLSLYPHLYSRAYINFRNPDDILLFRDRFDGYIFLDSKGLEYPAVVEFAPFQKIAKKKLRKKDAKTGSIEDDPEYKKFLETYCVEEEKTSANPETLLGEMEAKTRELIARRTTPLLEYIKNRKLEKQRIREEKREERRRRELEKKRLREEEKRRRREEERCKKKETDKQKKIAEKEVRIKLLKKPEKGEEPTTEKPKERGEEIDTGGGKQESCAPGAVVKARPMEGSLEEPQETSHSGSDKEHRDVERSQEQESEAQRYHVDDGRRHRAHHEPERLSRRSEDEQRWGKGPGQDRGKKGSQDSGAPGEAMERLGRAQRCDDSPAPRKERLANKDRPALQLYDPGARFRARECGGNRRICKAEGSGTGPEKREEAE

SEQ ID NO: 885967 - protein, 275 aa, Homo sapiens
MEAKTRELIARRTTPLLEYIKNRKLEKQRIREEKREERRRRELEKKRLREEEKRRRREEERCKKKETDKQKKIAEKEVRIKLLKKPEKGEEPTTEKPKERGEEIDTGGGKQESCAPGAVVKARPMEGSLEEPQETSHSGSDKEHRDVERSQEQESEAQRYHVDDGRRHRAHHEPERLSRRSEDEQRWGKGPGQDRGKKGSQDSGAPGEAMERLGRAQRCDDSPAPRKERLANKDRPALQLYDPGARFRARECGGNRRICKAEGSGTGPEKREEAE

SEQ ID NO: 885968 - protein, 168 aa, Homo sapiens [sequence omitted]

SEQ ID NO: 885969 - protein, 168 aa, Homo sapiens [sequence omitted]

SEQ ID NO: 885970 - protein, 91 aa, Homo sapiens
SRIAQFWMLSALEVQFHRDSQQQEAETPPTSSSGCGGGAGKPREEKRTALSKVVIRRLPPGLTKEQLEEQLRPLPAHDYFEFFAADLRSRI

SEQ ID NO: 885971 - protein, 66 aa, Homo sapiens
GRGPGLPARYAVPFELLVHAPPRWERPRAPRRWSSAACLRASPRSSWRSSCARCQHTTTSSSSPPT

SEQ ID NO: 885972 - protein, 494 aa, Homo sapiens; identical to SEQ ID NO: 885966

SEQ ID NO: 885973 - protein, 346 aa, Homo sapiens; identical to SEQ ID NO: 885964

SEQ ID NO: 885974 - protein, 394 aa, Homo sapiens
KEAKLMDYCIFQLTIFTVISYFSLYPHLYSRAYINFRNPDDILLFRDRFDGYIFLDSKGLEYPAVVEFAPFQKIAKKKLRKKDAKTGSIEDDPEYKKFLETYCVEEEKTSANPETLLGEMEAKTRELIARRTTPLLEYIKNRKLEKQRIREEKREERRRRELEKKRLREEEKRRRREEERCKKKETDKQKKIAEKEVRIKLLKKPEKGEEPTTEKPKERGEEIDTGGGKQESCAPGAVVKARPMEGSLEEPQETSHSGSDKEHRDVERSQEQESEAQRYHVDDGRRHRAHHEPERLSRRSEDEQRWGKGPGQDRGKKGSQDSGAPGEAMERLGRAQRCDDSPAPRKERLANKDRPALQLYDPGARFRARECGGNRRICKAEGSGTGPEKREEAE

SEQ ID NO: 885975 - protein, 406 aa, Homo sapiens
GRGPGLPARYAVPFELLVHAPPPVGTAARSPQVVIRRLPPGLTKEQLEEQLRPLPAHDYFEFFAADLSLYPHLYSRAYINFRNPDDILLFRDRFDGYIFLDSKDPEYKKFLETYCVEEEKTSANPETLLGEMEAKTRELIARRTTPLLEYIKNRKLEKQRIREEKREERRRRELEKKRLREEEKRRRREEERCKKKETDKQKKIAEKEVRIKLLKKPEKGEEPTTEKPKERGEEIDTGGGKQESCAPGAVVKARPMEGSLEEPQETSHSGSDKEHRDVERSQEQESEAQRYHVDDGRRHRAHHEPERLSRRSEDEQRWGKGPGQDRGKKGSQDSGAPGEAMERLGRAQRCDDSPAPRKERLANKDRPALQLYDPGARFRARECGGNRRICKAEGSGTGPEKREEAE

SEQ ID NO: 885976 - protein, 168 aa, Homo sapiens [sequence omitted]

SEQ ID NO: 885977 - protein, 331 aa, Homo sapiens
MASGTCFLLKGLEYPAVVEFAPFQKIAKKKLRKKDAKTGSIEDDPEYKKFLETYCVEEEKTSANPETLLGEMEAKTRELIARRTTPLLEYIKNRKLEKQRIREEKREERRRRELEKKRLREEEKRRRREEERCKKKETDKQKKIAEKEVRIKLLKKPEKGEEPTTEKPKERGEEIDTGGGKQESCAPGAVVSHSGSDKEHRDVERSQEQESEAQRYHVDDGRRHRAHHEPERLSRRSEDEQRWGKGPGQDRGKKGSQDSGAPGEAMERLGRAQRCDDSPAPRKERLANKDRPALQLYDPGARFRARECGGNRRICKAEGSGTGPEKREEAE

SEQ ID NO: 885978 - protein, 400 aa, Homo sapiens
GRGPGLPARYAVPFELLVHAPPPVGTAARSPQVVIRRLPPGLTKEQLEEQLRPLPAHDYFEFFAADLSLYPHLYSRAYINFRNPDDILLFRDRFDGYIFLDSKGLEYPAVVEFAPFQKIAKKKLRKKDAKTGSIEDDPEYKKFLETYCVEEEKTSANPETLLGEMEAKTRELIARRTTPLLEYIKNRKLEKQRIREEKREERRRRELEKKRLREEEKRRRREEERCKKKETDKQKKIAEKEVRIKLLKKPEKGEEPTTEKPKERGEEIDTGGGKQESCAPGAVVKARPMEGSLEEPQETSHSGSDKEHRDVERSQEQESEAQRYHVDDGRRHRAHHEPERLSRRSEDEQRWGKGPGQDRGKKGSQDSGAPGEAMERLGRAQRCDDSPAPRKERLANKGFY

SEQ ID NO: 885979 - protein, 254 aa, Homo sapiens
LSRGFVGGWRLRLGGECGMRSEKEGAGGLRAAVAARGPSGREKLSALEVQFHRDSQQQEAETPPTSSSGCGGGAGKPREEKRTALSKVVIRRLPPGLTKEQLEEQLRPLPAHDYFEFFAADLSLYPHLYSRAYINFRNPDDILLFRDRFDGYIFLDSKGLEYPAVVEFAPFQKIAKKKLRKKDAKTGSIEDDPEYKKFLETYCVEEEKTSANPETLLGEMEAKTRELIGLFCSFLLFSLLRDLLVEDIRFFSFS

SEQ ID NO: 885980 - protein, 437 aa, Homo sapiens
MEKELRSTILFNAYKKEIFTTNNGYKSMQKKLRSNWKIQSLKDEITSEKLNGVKLWITAGPREKFTAAEFEILKKYLDTGGDVFVMLGEGGESRFDTNINFLLEEYGIMVNNDAVVRNVYHKYFHPKEALVSSGVLNREISRAAGKAVPGIIDEESSGNNAQALTFVYPFGATLSVMKPAVAVLSTGSVCFPLNRPILAFYHSKNQGGKLAVLGSCHMFSDQYLDKEENSKIMDVVFQWLTTGDIHLNQIDAEDPEISDYMMLPYTATLSKRNRECLQESDEIPRDFTTLFDLSIFQLDTTSFHSVIEAHEQLNVKHEPLQLIQPQFETPLPTLQPAVFPPSFRELPPPPLELFDLDETFSSEKARLAQITNKCTEEDLEFYVRKCGDILGVTSKLPKDQQDAKHILEHVFFQVVEFKKLNQEHDIDTSETAFQNNF

SEQ ID NO: 885981 - protein, 352 aa, Homo sapiens [sequence omitted]

SEQ ID NO: 885982 - protein, 485 aa, Homo sapiens
MEKELRSTILFNAYKKEIFTTNNGYKSMQKKLRSNWKIQSLKDEITSEKLNGVKLWITAGPREKFTAAEFEILKKYLDTGGDVFVMLGEGGESRFDTNINFLLEEYGIMVNNDAVVRNVYHKYFHPKEALVSSGVLNREISRAAGKAVPGIIDEESSGNNAQLSVFSDAIMRKMYHFGVFFFKMKRAFVSGYKNNQNLKVQEEKSRSSALALTFVYPFGATLSVMKPAVAVLSTGSVCFPLNRPILAFYHSKNQGGKLAVLGSCHMFSDQYLDKEENSKIMDVVFQWLTTGDIHLNQIDAEDPEISDYMMLPYTATLSKRNRECLQESDEIPRDFTTLFDLSIFQLDTTSFHSVIEAHEQLNVKHEPLQLIQPQFETPLPTLQPAVFPPSFRELPPPPLELFDLDETFSSEKARLAQITNKCTEEDLEFYVRKCGDILGVTSKLPKDQQDAKHILEHVFFQVVEFKKLNQEHDIDTSETAFQNNF

SEQ ID NO: 885983 - protein, 266 aa, Homo sapiens
MEKELRSTILFNAYKKEIFTTNNGYKSMQKKLRSNWKIQSLKDEITSEKLNGVKLWITAGPREKFTAAEFEILKKYLDTGGDVFVMLGEGGESRFDTNINFLLEEYGIMVNNDAVVRNVYHKYFHPKEALVSSGVLNREISRAAGKAVPGIIDEESSGNNAQALTFVYPFGATLSVMKPAVAVLSTGSVCFPLNRPILAFYHSKNQGGKLAVLGSCHMFSDQYLDKEENSKIMDVVFQWLTTGDIHLNQIDAEDPEVDTELLETFK

SEQ ID NO: 885984 - protein, 437 aa, Homo sapiens; identical to SEQ ID NO: 885980

SEQ ID NO: 885985 - protein, 474 aa, Homo sapiens
MEKELRSTILFNAYKKEIFTTNNGYKSMQKKLRSNWKIQSLKDEITSEKLNGVKLWITAGPREKFTAAEFEILKKYLDTGGDVFVMLGEGGESRFDTNINFLLEEYGIMVNNDAVVRNVYHKYFHPKEALVSSGVLNREISRAAGKAVPGIIDEESSGNNAQALTFVYPFGATLSVMKPAVAVLSTGSVCFPLNRPILAFYHSKRQVSQAGVHGAVIAHCNLELLGSSDSPAPASQVAGLQNQGGKLAVLGSCHMFSDQYLDKEENSKIMDVVFQWLTTGDIHLNQIDAEDPEISDYMMLPYTATLSKRNRECLQESDEIPRDFTTLFDLSIFQLDTTSFHSVIEAHEQLNVKHEPLQLIQPQFETPLPTLQPAVFPPSFRELPPPPLELFDLDETFSSEKARLAQITNKCTEEDLEFYVRKCGDILGVTSKLPKDQQDAKHILEHVFFQVVEFKKLNQEHDIDTSETAFQNNF

SEQ ID NO: 885986 - protein, 373 aa, Homo sapiens
MEKELRSTILFNAYKKEIFTTNNGYKSMQKKLRSNWKIQSLKDEITSEKLNGVKLWITAGPREKFTAAEFEILKKYLDTGGDVFVMLGEGGESRFDTNINFLLEEYGIMVNNDAVVRNVYHKYFHPKEALVSSGVLNREISRAAGKAVPGIIDEESSGNNAQALTFVYPFGATLSVMKPAVAVLSTGSVCFPLNRPILAFYHSKNQGGKLAVLGSCHMFSDQYLDKEENSKIMDVVFQWLTTGDIHLNQIDAEDPEISDYMMLPYTATLSKRNRECLQESDEIPRDFTTLFDLSIFQLDTTSFHSVIEAHEQLNVKHEPLQLIQPQFETPLPTLQPAVFPPSFRELPPPPLELFDLDETFSSEKARLAQITNK

SEQ ID NO: 885987 - protein, 236 aa, Homo sapiens
MEKELRSTILFNAYKKEIFTTNNGYKSMQKKLRSNWKIQSLKDEITSEKLNGVKLWITAGPREKFTAAEFEILKKYLDTGGDVFVMLGEGGESRFDTNINFLLEEYGIMVNNDAVVRNVYHKYFHPKEALVSSGVLNREISRAAGKAVPGIIDEESSGNNAQALTFVYPFGATLSVMKPAVAVLSTGSVCFPLNRPILAFYHSKVQLFLDMGIDVIFIVEIIKTTLPFPEGFYMFS

SEQ ID NO: 885988 - protein, 216 aa, Homo sapiens
MEKELRSTILFNAYKKEIFTTNNGYKSMQKKLRSNWKIQSLKDEITSEKLNGVKLWITAGPREKFTAAEFEILKKYLDTGGDVFVMLGEGGESRFDTNINFLLEEYGIMVNNDAVVRNVYHKYFHPKEALVSSGVLNREISRAAGKAVPGIIDEESSGNNAQALTFVYPFGATLSVMKPAVAVLSTGSVCFPLNRPILAFYHSKRQGFPGWCMVQS

SEQ ID NO: 885989 - protein, 235 aa, Homo sapiens
MNSYFTNPSLSCHLAGGQDVLPNVALNSTAYDPVRHFSTYGAAVAQNRIYSTPFYSPQENVVFSSSRGPYDYGSNSFYQEKDMLSNCRQNTLGHNTQTSIAQDFSSEQGRTAPQDQKASIQIYPWMQRMNSHSGVGYGADRRRGRQIYSRYQTLELEKEFHFNRYLTRRRRIEIANALCLTERQIKIWFQNRRMKWKKESNLTSTLSGGGGGATADSLGGKEEKREETEEEKQKE

SEQ ID NO: 885990 - protein, 222 aa, Homo sapiens
MSSYVANSFYKQSPNIPAYNMQTCGNYGSASEVQASRYCYGGLDLSITFPPPAPSNSLHGVDMAANPRAHPDRPACSAAAAPGHAPGRDEAAPLNPGMYSQKAARPALEERAKSSGEIKEEQAQTGQPAGLSQPPAPPQIYPWMTKLHMSHETDGKRSRTSYTRYQTLELEKEFHFNRYLTRRRRIEIANNLCLNERQIKIWFQNRRMKWKKDSKMKSKEAL

SEQ ID NO: 885991 - protein, 262 aa, Homo sapiens
MSSYLMDSNYIDPKFPPCEEYSQNSYIPEHSPEYYGRTRESGFQHHHQELYPPPPPRPSYPERQYSCTSLQGPGNSRGHGPAQAGHHHPEKSQSLCEPAPLSGASASPSPAPPACSQPAPDHPSSAASKQPIVYPWMKKIHVSTVNPNYNGGEPKRSRAAYTRQQVLELEKEFHYNRYLTRRRRIEIAHSLCLSERQIKIWFQNRRMKWKKDHRLPNTKVRSAPPAGAAPSTLSAATPGTSEDHSQSATPPEQQRAEDITRL

SEQ ID NO: 885992 - protein, 262 aa, Homo sapiens; identical to SEQ ID NO: 885991

SEQ ID NO: 885993 - protein, 153 aa, Homo sapiens
MLSNCRQNTLGHNTQTSIAQDFSSEQGRTAPQDQKASIQIYPWMQRMNSHSGVGYGADRRRGRQIYSRYQTLELEKEFHFNRYLTRRRRIEIANALCLTERQIKIWFQNRRMKWKKESNLTSTLSGGGGGATADSLGGKEEKREETEEEKQKE

SEQ ID NO: 885994 - protein, 235 aa, Homo sapiens; identical to SEQ ID NO: 885989

SEQ ID NO: 885995 - protein, 153 aa, Homo sapiens; identical to SEQ ID NO: 885993

SEQ ID NO: 885996 - protein, 126 aa, Homo sapiens
VSFPETPKSDSQTPSPNEIKTEQSLAGPKGSPSESEKERAKAADSSPDTSDNEAKETDGKRSRTSYTRYQTLELEKEFHFNRYLTRRRRIEIANNLCLNERQIKIWFQNRRMKWKKDSKMKSKEAL

SEQ ID NO: 885997 - protein, 110 aa, Homo sapiens
MCFVPGSLGVGYGADRRRGRQIYSRYQTLELEKEFHFNRYLTRRRRIEIANALCLTERQIKIWFQNRRMKWKKESNLTSTLSGGGGGATADSLGGKEEKREETEEEKQKE

SEQ ID NO: 885998 - protein, 209 aa, Homo sapiens
SGIGPNQRDRVFWVSLPEALEGEKENVVFSSSRGPYDYGSNSFYQEKDMLSNCRQNTLGHNTQTSIAQDFSSEQGRTAPQDQKASIQIYPWMQRMNSHSVCFVPGSLGVGYGADRRRGRQIYSRYQTLELEKEFHFNRYLTRRRRIEIANALCLTERQIKIWFQNRRMKWKKESNLTSTLSGGGGGATADSLGGKEEKREETEEEKQKE

SEQ ID NO: 885999 - protein, 90 aa, Homo sapiens
MSSYLMDSNYIDPKFPPCEEYSQNSYIPEHSPEYYGRTRESGFQHHHQELYPPPPPRPSYPERQYSCTSLQGPGNSRGHGPAQAGHHHPE

SEQ ID NO: 886000 - protein, 130 aa, Homo sapiens
IFLPAEPMVHIGLSPEILLDPWTHLGKGHGRSWLEFCPTLTNPSNFSKSQSRALHLFLGLAAGPPGCQSISSAIFCDHGCWLPLALCKQTHSHLLSQPPGALSTPHAWCRRDWTDLRKAVKWGQEDSAQE

SEQ ID NO: 886001 - protein, 79 aa, Homo sapiens
RRMARSMTPRMPHSMHAVGAGALGRRISRKRILSRAQDCRNSAEAGKNMGSPEDRLLSRAEAMKKCFRGRQSGNESIIH

SEQ ID NO: 886002 - protein, 130 aa, Homo sapiens; identical to SEQ ID NO: 886000

SEQ ID NO: 886003 - protein, 130 aa, Homo sapiens; identical to SEQ ID NO: 886000

SEQ ID NO: 886004 - protein, 130 aa, Homo sapiens; identical to SEQ ID NO: 886000

SEQ ID NO: 886005 - protein, 130 aa, Homo sapiens; identical to SEQ ID NO: 886000

SEQ ID NO: 886006 - protein, 130 aa, Homo sapiens; identical to SEQ ID NO: 886000

SEQ ID NO: 886007 - protein, 396 aa, Homo sapiens
SIKAARGSQESEGRTYSPRHPGCAHAVPVCSWRASGHREPPAQPAPAPQEPAKMPRRSLHAAAVLLLVILKEQPSSPAPVNGSKWTYFGPDGENSWSKKYPSCGGLLQSPIDLHSDILQYDASLTPLEFQGYNLSANKQFLLTNNGHSVKLNLPSDMHIQGLQSRYSATQLHLHWGNPNDPHGSEHTVSGQHFAAELHIVHYNSDLYPDASTASNKSEGLAVLAVLIEMGSFNPSYDKIFSHLQHVKYKGQEAFVPGFNIEELLPERTAEYYRYRGSLTTPPCNPTVLWTVFRNPVQISQEQLLALETALYCTHMDDPSPREMINNFRQVQKFDERLVYTSFSQGIILSLALAGILGICIVVVVSIWLFRRKSIKKGDNKGVIYKPATKMETEAHA

SEQ ID NO: 886008 - protein, 396 aa, Homo sapiens; identical to SEQ ID NO: 886007

SEQ ID NO: 886009 - protein, 420 aa, Homo sapiens
SIKAARGSQESEGRTYSPRHPGCAHAVPVCSWRASGHREPPAQPAPAPQEPAKMPRRSLHAAAVLLLVILKEQPSSPAPVNVQVDLFVVLMGRIAGPKKYPSQMLVRSHWHWPRVHHPPSYGTIATSLPILQYDASLTPLEFQGYNLSANKQFLLTNNGHSVKLNLPSDMHIQGLQSRYSATQLHLHWGNPNDPHGSEHTVSGQHFAAELHIVHYNSDLYPDASTASNKSEGLAVLAVLIEMGSFNPSYDKIFSHLQHVKYKGQEAFVPGFNIEELLPERTAEYYRYRGSLTTPPCNPTVLWTVFRNPVQISQEQLLALETALYCTHMDDPSPREMINNFRQVQKFDERLVYTSFSQVQVCTAAGLSLGIILSLALAGILGICIVVVVSIWLFRRKSIKKGDNKGVIYKPATKMETEAHA

SEQ ID NO: 886010 - protein, 145 aa, Homo sapiens
HHPLTGPGWHSWHLYCGGGVHLAFQKEEVSWFGSKMGMDSYVSMMISLPGKAALWHEEPQSPGPPLTLGGPSPKHPCPGLLCMRRTCDPGRSKGSGVTVLRFGSVCALLAAIAWPWTSLLTWGLCLKLSSQAVFLSRSLHMLFGL

SEQ ID NO: 886011 - protein, 407 aa, Homo sapiens
SIKAARGSQESEGRTYSPRHPGCAHAVPVCSWRASGHREPPAQPAPAPQEPAKMPRRSLHAAAVLLLVILKEQPSSPAPVNGSKWTYFGPDGENSWSKKYPSCGGLLQSPIDLHSDILQYDASLTPLEFQGYNLSANKQFLLTNNGHSVKLNLPSDMHIQGLQSRYSATQLHLHWGNPNDPHGSEHTVSGQHFAAELHIVHYNSDLYPDASTASNKSEGLAVLAVLIEMGSFNPSYDKIFSHLQHVKYKGQEAFVPGFNIEELLPERTAEYYRYRGSLTTPPCNPTVLWTVFRNPVQISQEQLLALETALYCTHMDDPSPREMINNFRQVQKFDERLVYTSFSQVQVCTAAGLSLGIILSLALAGILGICIVVVVSIWLFRRKSIKKGDNKGVIYKPATKMETEAHA

SEQ ID NO: 886012 - protein, 407 aa, Homo sapiens; identical to SEQ ID NO: 886011

SEQ ID NO: 886013 - protein, 255 aa, Homo sapiens
SIKAARGSQESEGRTYSPRHPGCAHAVPVCSWRASGHREPPAQPAPAPQEPAKMPRRSLHAAAVLLLVILKEQPSSPAPVNGSKWTYFGPDGENSWSKKYPSCGGLLQSPIDLHSDILQYDASLTPLEFQGYNLSANKQFLLTNNGHSVKLNLPSDMHIQGLQSRYSATQLHLHWGNPNDPHGSEHTVSGQHFAAELHIVHYNSDLYPDASTASNKSEGLAVLAVLIEMGSFNPSYDKIFSHLQHVKYKAQVALV

SEQ ID NO: 886014 - protein, 130 aa, Homo sapiens
MGMGWKTAMSATWCSPEGQGMGQGPGREVGGNSAASGPASPIRDPCLSEAGLKGPPSAHPLRLCLLHRLVCFSGGLTSIQLSPRTCCSHQWAQLFSPACFPQWRAPGCSLDDSRSLTRIRPVHLPGPSLD

SEQ ID NO: 886015 - protein, 130 aa, Homo sapiens; identical to SEQ ID NO: 886014

SEQ ID NO: 886016 - protein, 130 aa, Homo sapiens; identical to SEQ ID NO: 886014

SEQ ID NO: 886017 - protein, 130 aa, Homo sapiens; identical to SEQ ID NO: 886014

SEQ ID NO: 886018 - protein, 130 aa, Homo sapiens; identical to SEQ ID NO: 886014

SEQ ID NO: 886019 - protein, 115 aa, Homo sapiens
  misc_feature (102)..(102): Xaa can be any naturally occurring amino acid
MASSVGNVADSTEPTKRMLSFQGLAELAHREYQAGDFEAAERHCMQLWRQEPDNTGVLLLLSSIHFQCRRLDRSAHFSTLAIKQNPLLAEAYSNSAPARPYXSPSRAPPRPLSPP

SEQ ID NO: 886020 - protein, 1219 aa, Homo sapiens
MSNLIDWLPQSYSVAFLDKIGFEHTSSPTNLIKQIFSMGLSSRLMDLVGRLLRLGVFYVAQQFAAIAQCDAVRLRKRCLRSHYRDLNLGAILSCEVSASVLLGRRGIVRMKLKAWLYDDPTWQKDIFLLSSIVLMLVRNIVEEQHFPKCVSEYSNKMPNERRVPWSTKFREPCYTIKGLGKSSKETYFPNLFDHELLFFQPYLLTPHRTHFGNSGGRKTRPQVAPSEVALENMTRARSCLDKRTPAESLIATDFPVKSQCKGWSLVGRTEHGGLHLGSGGAGAGSSQLWQRISFGASEPMLQGHFWLVREGIMISPSSPPPPNLFFFPLQIFPFPFTSFPSHLLSLTPPKACYLKAIETQPNFAVAWSNLGCVFNAQGEIWLAIHHFEKAVTLDPNFLDAYINLGNVLKEARIFDRAVAAYLRALSLSPNHAVVHGNLACVYYEQGLIDLAIDTYRRAIELQPHFPDAYCNLANALKEKGSVAEAEDCYNTALRLCPTHADSLNNLANIKREQGNIEEAVRLYRKALEVFPEFAAAHSNLASVLQQQGKLQEALMHYKEAIRISPTFADAYSNMGNTLKEMQDVQGALQCYTRAIQINPAFADAHSNLASIHKDSGNIPEAIASYRTALKLKPDFPDAYCNLAHCLQIVCDWTDYDERMKKLVSIVADQLEKNRLPSVHPHHSMLYPLSHGFRKAIAERHGNLCLDKINVLHKPPYEHPKDLKLSDGRLRVGYVSSDFGNHPTSHLMQSIPGMHNPDKFEVFCYALSPDDGTNFRVKVMAEANHFIDLSQIPCNGKAADRIHQDGIHILVNMNGYTKGARNELFALRPAPIQAMWLGYPGTSGALFMDYIITDQETSPAEVAEQYSEKLAYMPHTFFIGDHANMFPHLKKKAVIDFKSNGHIYDNRIVLNGIDLKAFLDSLPDVKIVKMKCPDGGDNADSSNTALNMPVIPMNTIAEAVIEMINRGQIQITINGFSISNGLATTQINNKAATGEEVPRTIIVTTRSQYGLPEDAIVYCNFNQLYKIDPSTLQMWANILKRVPNSVLWLLRFPAVGEPNIQQYAQNMGLPQNRIIFSPVAPKEEHVRRGQLADVCLDTPLCNGHTTGMDVLWAGTPMVTMPGETLASRVAASQLTCLGCLELIAKNRQEYEDIAVKLGTDLEYLKKVRGKVWKQRISSPLFNTKQYTMELERLYLQMWEHYAAGNKPDHMIKPVEVTESA

SEQ ID NO: 886021 - protein, 1175 aa, Homo sapiens
MDLVGRLLRLGVFYVAQQFAAIAQCDAVRLRKRCLRSHYRDLNLGAILSCEVSASVLLGRRGIVRMKLKAWLYDDPTWQKDIFLLSSIVLMLVRNIVEEQHFPKCVSEYSNKMPNERRVPWSTKFREPCYTIKGLGKSSKETYFPNLFDHELLFFQPYLLTPHRTHFGNSGGRKTRPQVAPSEVALENMTRARSCLDKRTPAESLIATDFPVKSQCKGWSLVGRTEHGGLHLGSGGAGAGSSQLWQRISFGASEPMLQGHFWLVREGIMISPSSPPPPNLFFFPLQIFPFPFTSFPSHLLSLTPPKACYLKAIETQPNFAVAWSNLGCVFNAQGEIWLAIHHFEKAVTLDPNFLDAYINLGNVLKEARIFDRAVAAYLRALSLSPNHAVVHGNLACVYYEQGLIDLAIDTYRRAIELQPHFPDAYCNLANALKEKGSVAEAEDCYNTALRLCPTHADSLNNLANIKREQGNIEEAVRLYRKALEVFPEFAAAHSNLASVLQQQGKLQEALMHYKEAIRISPTFADAYSNMGNTLKEMQDVQGALQCYTRAIQINPAFADAHSNLASIHKDSGNIPEAIASYRTALKLKPDFPDAYCNLAHCLQIVCDWTDYDERMKKLVSIVADQLEKNRLPSVHPHHSMLYPLSHGFRKAIAERHGNLCLDKINVLHKPPYEHPKDLKLSDGRLRVGYVSSDFGNHPTSHLMQSIPGMHNPDKFEVFCYALSPDDGTNFRVKVMAEANHFIDLSQIPCNGKAADRIHQDGIHILVNMNGYTKGARNELFALRPAPIQAMWLGYPGTSGALFMDYIITDQETSPAEVAEQYSEKLAYMPHTFFIGDHANMFPHLKKKAVIDFKSNGHIYDNRIVLNGIDLKAFLDSLPDVKIVKMKCPDGGDNADSSNTALNMPVIPMNTIAEAVIEMINRGQIQITINGFSISNGLATTQINNKAATGEEVPRTIIVTTRSQYGLPEDAIVYCNFNQLYKIDPSTLQMWANILKRVPNSVLWLLRFPAVGEPNIQQYAQNMGLPQNRIIFSPVAPKEEHVRRGQLADVCLDTPLCNGHTTGMDVLWAGTPMVTMPGETLASRVAASQLTCLGCLELIAKNRQEYEDIAVKLGTDLEYLKKVRGKVWKQRISSPLFNTKQYTMELERLYLQMWEHYAAGNKPDHMIKPVEVTESA

SEQ ID NO: 886022 - protein, 1219 aa, Homo sapiens; identical to SEQ ID NO: 886020

SEQ ID NO: 886023 - protein, 1036 aa, Homo sapiens
MASSVGNVADSTGLAELAHREYQAGDFEAAERHCMQLWRQEPDNTGVLLLLSSIHFQCRRLDRSAHFSTLAIKQNPLLAEAYSNLGNVYKERGQLQEAIEHYRHALRLKPDFIDGYINLAAALVAAGDMEGAVQAYVSALQYNPDLYCVRSDLGNLLKALGRLEEAKACYLKAIETQPNFAVAWSNLGCVFNAQGEIWLAIHHFEKAVTLDPNFLDAYINLGNVLKEARIFDRAVAAYLRALSLSPNHAVVHGNLACVYYEQGLIDLAIDTYRRAIELQPHFPDAYCNLANALKEKGSVAEAEDCYNTALRLCPTHADSLNNLANIKREQGNIEEAVRLYRKALEVFPEFAAAHSNLASVLQQQGKLQEALMHYKEAIRISPTFADAYSNMGNTLKEMQDVQGALQCYTRAIQINPAFADAHSNLASIHKDSGNIPEAIASYRTALKLKPDFPDAYCNLAHCLQIVCDWTDYDERMKKLVSIVADQLEKNRLPSVHPHHSMLYPLSHGFRKAIAERHGNLCLDKINVLHKPPYEHPKDLKLSDGRLRVGYVSSDFGNHPTSHLMQSIPGMHNPDKFEVFCYALSPDDGTNFRVKVMAEANHFIDLSQIPCNGKAADRIHQDGIHILVNMNGYTKGARNELFALRPAPIQAMWLGYPGTSGALFMDYIITDQETSPAEVAEQYSEKLAYMPHTFFIGDHANMFPHLKKKAVIDFKSNGHIYDNRIVLNGIDLKAFLDSLPDVKIVKMKCPDGGDNADSSNTALNMPVIPMNTIAEAVIEMINRGQIQITINGFSISNGLATTQINNKAATGEEVPRTIIVTTRSQYGLPEDAIVYCNFNQLYKIDPSTLQMWANILKRVPNSVLWLLRFPAVGEPNIQQYAQNMGLPQNRIIFSPVAPKEEHVRRGQLADVCLDTPLCNGHTTGMDVLWAGTPMVTMPGETLASRVAASQLTCLGCLELIAKNRQEYEDIAVKLGTDLEYLKKVRGKVWKQRISSPLFNTKQYTMELERLYLQMWEHYAAGNKPDHMIKPVEVTESA

SEQ ID NO: 886024 - protein, 1154 aa, Homo sapiens
MSNLIDWLPQSYSVAFLDKIGFEHTSSPTNLIKQIFSMGLSSRLMDLVGRLLRLGVFYVAQQFAAIAQCDAVRLRKRCLRSHYRDLNLGAILSCEVSASVLLGRRGIVRMKLKAWLYDDPTWQKDIFLLSSIVLMLVRNIVEEQHFPKCVSEYSNKMPNERRVPWSTKFREPCYTIKGLGKSSKETYFPNLFDHELLFFQPYLLTPHRTHFGNSGGRKTRPQVAPSEVALENMTRARSCLDKRTPAESLIATDFPVKSQCKGWSLVGRTEHGGLHLGSGGAGAGSSQLWQRISFGASEPMLQGHFWLVREGIMISPSSPPPPNLFFFPLQIFPFPFTSFPSHLLSLTPPKACYLKAIETQPNFAVAWSNLGCVFNAQGEIWLAIHHFEKAVTLDPNFLDAYINLGNVLKEARIFDKVAEAEDCYNTALRLCPTHADSLNNLANIKREQGNIEEAVRLYRKALEVFPEFAAAHSNLASVLQQQGKLQEALMHYKEAIRISPTFADAYSNMGNTLKEMQDVQGALQCYTRAIQINPAFADAHSNLASIHKDSGNIPEAIASYRTALKLKPDFPDAYCNLAHCLQIVCDWTDYDERMKKLVSIVADQLEKNRLPSVHPHHSMLYPLSHGFRKAIAERHGNLCLDKINVLHKPPYEHPKDLKLSDGRLRVGYVSSDFGNHPTSHLMQSIPGMHNPDKFEVFCYALSPDDGTNFRVKVMAEANHFIDLSQIPCNGKAADRIHQDGIHILVNMNGYTKGARNELFALRPAPIQAMWLGYPGTSGALFMDYIITDQETSPAEVAEQYSEKLAYMPHTFFIGDHANMFPHLKKKAVIDFKSNGHIYDNRIVLNGIDLKAFLDSLPDVKIVKMKCPDGGDNADSSNTALNMPVIPMNTIAEAVIEMINRGQIQITINGFSISNGLATTQINNKAATGEEVPRTIIVTTRSQYGLPEDAIVYCNFNQLYKIDPSTLQMWANILKRVPNSVLWLLRFPAVGEPNIQQYAQNMGLPQNRIIFSPVAPKEEHVRRGQLADVCLDTPLCNGHTTGMDVLWAGTPMVTMPGETLASRVAASQLTCLGCLELIAKNRQEYEDIAVKLGTDLEYLKKVRGKVWKQRISSPLFNTKQYTMELERLYLQMWEHYAAGNKPDHMIKPVEVTESA

SEQ ID NO: 886025 - protein, 665 aa, Homo sapiens
MHYKEAIRISPTFADAYSNMGNTLKEMQDVQGALQCYTRAIQINPAFADAHSNLASIHKDSGNIPEAIASYRTALKLKPDFPDAYCNLAHCLQIVCDWTDYDERMKKLVSIVADQLEKNRLPSVHPHHSMLYPLSHGFRKAIAERHGNLCLDKINVLHKPPYEHPKDLKLSDGRLRVGYVSSDFGNHPTSHLMQSIPGMHNPDKFEVFCYALSPDDGTNFRVKVMAEANHFIDLSQIPCNGKAADRIHQDGIHILVNMNGYTKGARNELFALRPAPIQAMWLGYPGTSGALFMDYIITDQETSPAEVAEQYSEKLAYMPHTFFIGDHANMFPHLKKKAVIDFKSNGHIYDNRIVLNGIDLKAFLDSLPDVKIVKMKCPDGGDNADSSNTALNMPVIPMNTIAEAVIEMINRGQIQITINGFSISNGLATTQINNKAATGEEVPRTIIVTTRSQYGLPEDAIVYCNFNQLYKIDPSTLQMWANILKRVPNSVLWLLRFPAVGEPNIQQYAQNMGLPQNRIIFSPVAPKEEHVRRGQLADVCLDTPLCNGHTTGMDVLWAGTPMVTMPGETLASRVAASQLTCLGCLELIAKNRQEYEDIAVKLGTDLEYLKKVRGKVWKQRISSPLFNTKQYTMELERLYLQMWEHYAAGNKPDHMIKPVEVTESA

SEQ ID NO: 886026 - protein, 678 aa, Homo sapiens
RTRGSTHAIAHASGIIMEAIRISPTFADAYSNMGNTLKEMQDVQGALQCYTRAIQINPAFADAHSNLASIHKDSGNIPEAIASYRTALKLKPDFPDAYCNLAHCLQIVCDWTDYDERMKKLVSIVADQLEKNRLPSVHPHHSMLYPLSHGFRKAIAERHGNLCLDKINVLHKPPYEHPKDLKLSDGRLRVGYVSSDFGNHPTSHLMQSIPGMHNPDKFEVFCYALSPDDGTNFRVKVMAEANHFIDLSQIPCNGKAADRIHQDGIHILVNMNGYTKGARNELFALRPAPIQAMWLGYPGTSGALFMDYIITDQETSPAEVAEQYSEKLAYMPHTFFIGDHANMFPHLKKKAVIDFKSNGHIYDNRIVLNGIDLKAFLDSLPDVKIVKMKCPDGGDNADSSNTALNMPVIPMNTIAEAVIEMINRGQIQITINGFSISNGLATTQINNKAATGEEVPRTIIVTTRSQYGLPEDAIVYCNFNQLYKIDPSTLQMWANILKRVPNSVLWLLRFPAVGEPNIQQYAQNMGLPQNRIIFSPVAPKEEHVRRGQLADVCLDTPLCNGHTTGMDVLWAGTPMVTMPGETLASRVAASQLTCLGCLELIAKNRQEYEDIAVKLGTDLEYLKKVRGKVWKQRISSPLFNTKQYTMELERLYLQMWEHYAAGNKPDHMIKPVEVTESA

SEQ ID NO: 886027 - protein, 632 aa, Homo sapiens
TGLLRPDSGKAWLWMDGTPFTSELFHIIIDVTSPRSRDCVAILNGPDFPDAYCNLAHCLQIVCDWTDYDERMKKLVSIVADQLEKNRLPSVHPHHSMLYPLSHGFRKAIAERHGNLCLDKINVLHKPPYEHPKDLKLSDGRLRVGYVSSDFGNHPTSHLMQSIPGMHNPDKFEVFCYALSPDDGTNFRVKVMAEANHFIDLSQIPCNGKAADRIHQDGIHILVNMNGYTKGARNELFALRPAPIQAMWLGYPGTSGALFMDYIITDQETSPAEVAEQYSEKLAYMPHTFFIGDHANMFPHLKKKAVIDFKSNGHIYDNRIVLNGIDLKAFLDSLPDVKIVKMKCPDGGDNADSSNTALNMPVIPMNTIAEAVIEMINRGQIQITINGFSISNGLATTQINNKAATGEEVPRTIIVTTRSQYGLPEDAIVYCNFNQLYKIDPSTLQMWANILKRVPNSVLWLLRFPAVGEPNIQQYAQNMGLPQNRIIFSPVAPKEEHVRRGQLADVCLDTPLCNGHTTGMDVLWAGTPMVTMPGETLASRVAASQLTCLGCLELIAKNRQEYEDIAVKLGTDLEYLKKVRGKVWKQRISSPLFNTKQYTMELERLYLQMWEHYAAGNKPDHMIKPVEVTESA

SEQ ID NO: 886028 - protein, 1219 aa, Homo sapiens; identical to SEQ ID NO: 886020

SEQ ID NO: 886029 - protein, 1219 aa, Homo sapiens; identical to SEQ ID NO: 886020

SEQ ID NO: 886030 - protein, 1201 aa, Homo sapiens
MSNLIDWLPQSYSVAFLDKIGFEHTSSPTNLIKQIFSMGLSSRLMDLVGRLLRLGVFYVAQQFAAIAQCDAVRLRKRCLRSHYRDLNLGAILSCEVSASVLLGRRGIVRMKLKAWLYDDPTWQKDIFLLSSIVLMLVRNIVEEQHFPKCVSEYSNKMPNERRVPWSTKFREPCYTIKGLGKSSKETYFPNLFDHELLFFQPYLLTPHRTHFGNSGGRKTRPQVAPSEVALENMTRARSCLDKRTPAESLIATDFPVKSQCKGWSLVGRTEHGGLHLGSGGAGAGSSQLWQRISFGASEPMLQGHFWLVREGIMISPSSPPPPNLFFFPLQIFPFPFTSFPSHLLSLTPPKACYLKAIETQPNFAVAWSNLGCVFNAQGEIWLAIHHFEKAVTLDPNFLDAYINLGNVLKEARIFDRAVAAYLRALSLSPNHAVVHGNLACVYYEQGLIDLAIDTYRRAIELQPHFPDAYCNLANALKEKGSVAEAEDCYNTALRLCPTHADSLNNLANIKREQGNIEEAVRLYRKALEVFPEFAAAHSNLASVLQQQGKLQEALMHYKEAIRISPTFADAYSNMGNTLKEMQDVQGALQCYTRAIQINPAFADAHSNLASIHKDSGNIPEAIASYRTALKLKPDFPDAYCNLAHCLQIVCDWTDYDERMKKLVSIVADQLEKNRLPSVHPHHSMLYPLSHGFRKAIAERHGNLCLDKINVLHKPPYEHPKDLKLSDGRLRVGYVSSDFGNHPTSHLMQSIPGMHNPDKFEVFCYALSPDDGTNFRVKVMAEANHFIDLSQIPCNGKAADRIHQDGIHILVNMNGYTKGARNELFALRPAPIQAMWLGYPGTSGALFMDYIITDQETSPAEVAEQYSEKLAYMPHTFFIGDHANMFPHLKKKAVIDFKSNGHIYDNRIVLNGIDLKAFLDSLPDVKIVKMKCPDGGDNADSSNTALNMPVIPMNTIAEAVIEMINRGQIQITINGFSISNGLATTQINNKAATGEEVPRTIIVTTRSQYGLPEDAIVYCNFNQLYKIDPSTLQMWANILKRVPNSVLWLLRFPAVGEPNIQQYAQNMGLPQNRIIFSPVAPKEEHVRRGQLADVCLDTPLCNGHTTGMDVLWAGTPMVTMPGETLASRVAASQLTCLGCLELIANLKKVRGKVWKQRISSPLFNTKQYTMELERLYLQMWEHYAAGNKPDHMIKPVEVTESA

SEQ ID NO: 886031 - protein, 113 aa, Homo sapiens
PRGPQTADPLVTMPGETLASRVAASQLTCLGCLELIAKNRQEYEDIAVKLGTDLEYLKKVRGKVWKQRISSPLFNTKQYTMELERLYLQMWEHYAAGNKPDHMIKPVEVTESA

SEQ ID NO: 886032 - protein, 118 aa, Homo sapiens
SVEDLRGPLLLVTPMVTMPGETLASRVAASQLTCLGCLELIAKNRQEYEDIAVKLGTDLEYLKKVRGKVWKQRISSPLFNTKQYTMELERLYLQMWEHYAAGNKPDHMIKPVEVTESA

SEQ ID NO: 886033 - protein, 1219 aa, Homo sapiens; identical to SEQ ID NO: 886020

SEQ ID NO: 886034 - protein, 1219 aa, Homo sapiens; identical to SEQ ID NO: 886020

SEQ ID NO: 886035 - protein, 165 aa, Homo sapiens
MASSVGNVADSTEPTKRMLSFQGLAELAHREYQAGDFEAAERHCMQLWRQEPDNTGVLLLLSSIHFQCRRLDRSAHFSTLAIKQNPLLAEAYSNLGNVYKERGQLQEAIEHYRHALRLKPDFIDGYINLAAALVAAGDMEGAVQAYVSALQYNPVSKILMVTFPS

SEQ ID NO: 886036 - protein, 170 aa, Homo sapiens
MASSVGNVADSTGLAELAHREYQAGDFEAAERHCMQLWRQEPDNTGVLLLLSSIHFQCRRLDRSAHFSTLAIKQNPLLAEAYSNLGNVYKERGQLQEAIEHYRHALRLKPDFIDGYINLAAALVAAGDMEGAVQAYVSALQYNPDLYCVRSDLGNLLKALGRLEEAKVGV

SEQ ID NO: 886037 - protein, 1219 aa, Homo sapiens; identical to SEQ ID NO: 886020

SEQ ID NO: 886038 - protein, 907 aa, Homo sapiens [sequence omitted]

SEQ ID NO: 886039 - protein, 1219 aa, Homo sapiens; identical to SEQ ID NO: 886020

SEQ ID NO: 886040 - protein, 1219 aa, Homo sapiens; identical to SEQ ID NO: 886020

SEQ ID NO: 886041 - protein, 646 aa, Homo sapiens
MGNTLKEMQDVQGALQCYTRAIQINPAFADAHSNLASIHKDSGNIPEAIASYRTALKLKPDFPDAYCNLAHCLQIVCDWTDYDERMKKLVSIVADQLEKNRLPSVHPHHSMLYPLSHGFRKAIAERHGNLCLDKINVLHKPPYEHPKDLKLSDGRLRVGYVSSDFGNHPTSHLMQSIPGMHNPDKFEVFCYALSPDDGTNFRVKVMAEANHFIDLSQIPCNGKAADRIHQDGIHILVNMNGYTKGARNELFALRPAPIQAMWLGYPGTSGALFMDYIITDQETSPAEVAEQYSEKLAYMPHTFFIGDHANMFPHLKKKAVIDFKSNGHIYDNRIVLNGIDLKAFLDSLPDVKIVKMKCPDGGDNADSSNTALNMPVIPMNTIAEAVIEMINRGQIQITINGFSISNGLATTQINNKAATGEEVPRTIIVTTRSQYGLPEDAIVYCNFNQLYKIDPSTLQMWANILKRVPNSVLWLLRFPAVGEPNIQQYAQNMGLPQNRIIFSPVAPKEEHVRRGQLADVCLDTPLCNGHTTGMDVLWAGTPMVTMPGETLASRVAASQLTCLGCLELIAKNRQEYEDIAVKLGTDLEYLKKVRGKVWKQRISSPLFNTKQYTMELERLYLQMWEHYAAGNKPDHMIKPVEVTESA

SEQ ID NO: 886042 - protein, 646 aa, Homo sapiens; identical to SEQ ID NO: 886041

SEQ ID NO: 886043 - protein, 527 aa, Homo sapiens
KNIILSKHGNLCLDKINVLHKPPYEHPKDLKLSDGRLRVGYVSSDFGNHPTSHLMQSIPGMHNPDKFEVFCYALSPDDGTNFRVKVMAEANHFIDLSQIPCNGKAADRIHQDGIHILVNMNGYTKGARNELFALRPAPIQAMWLGYPGTSGALFMDYIITDQETSPAEVAEQYSEKLAYMPHTFFIGDHANMFPHLKKKAVIDFKSNGHIYDNRIVLNGIDLKAFLDSLPDVKIVKMKCPDGGDNADSSNTALNMPVIPMNTIAEAVIEMINRGQIQITINGFSISNGLATTQINNKAATGEEVPRTIIVTTRSQYGLPEDAIVYCNFNQLYKIDPSTLQMWANILKRVPNSVLWLLRFPAVGEPNIQQYAQNMGLPQNRIIFSPVAPKEEHVRRGQLADVCLDTPLCNGHTTGMDVLWAGTPMVTMPGETLASRVAASQLTCLGCLELIAKNRQEYEDIAVKLGTDLEYLKKVRGKVWKQRISSPLFNTKQYTMELERLYLQMWEHYAAGNKPDHMIKPVEVTESA

SEQ ID NO: 886044 - protein, 1219 aa, Homo sapiens; identical to SEQ ID NO: 886020

SEQ ID NO: 886045 - protein, 1154 aa, Homo sapiens; identical to SEQ ID NO: 886024

SEQ ID NO: 886046 - protein, 1219 aa, Homo sapiens; identical to SEQ ID NO: 886020

SEQ ID NO: 886047 - protein, 180 aa, Homo sapiens
MASSVGNVADSTEPTKRMLSFQGLAELAHREYQAGDFEAAERHCMQLWRQEPDNTGVLLLLSSIHFQCRRLDRSAHFSTLAIKQNPLLAEAYSNLGNVYKERGQLQEAIEHYRHALRLKPDFIDGYINLAAALVAAGDMEGAVQAYVSALQYNPDLYCVRSDLGNLLKALGRLEEAKVGV

SEQ ID NO: 886048 - protein, 1180 aa, Homo sapiens
MSNLIDWLPQSYSVAFLDKIGFEHTSSPTNLIKQIFSMGLSSRLMDLVGRLLRLGVFYVAQQFAAIAQCDAVRLRKRCLRSHYRDLNLGAILSCEVSASVLLGRRGIVRMKLKAWLYDDPTWQKDIFLLSSIVLMLVRNIVEEQHFPKCVSEYSNKMPNERRVPWSTKFREPCYTIKGLGKSSKETYFPNLFDHELLFFQPYLLTPHRTHFGNSGGRKTRPQVAPSEVALENMTRARSCLDKRTPAESLIATDFPVKSQCKGWSLVGRTEHGGLHLGSGGAGAGSSQLWQRISFGASEPMLQGHFWLVREGIMISPSSPPPPNLFFFPLQIFPFPFTSFPSHLLSLTPPKACYLKAIETQPNFAVAWSNLGCVFNAQGEIWLAIHHFEKAVTLDPNFLDAYINLGNVLKEARIFDRAVAAYLRALSLSPNHAVVHGNLACVYYEQGLIDLAIDTYRRAIELQPHFPDAYCNLANALKEKGSVAEAEDCYNTALRLCPTHADSLNNLANIKREQGNIEEAVRLYRKALEVFPEFAAAHSNLASVLQQQGKLQEALMHYKEAIRISPTFADAYSNMGNTLKEMQDVQGALQCYTRAIQINPAFADAHSNLASIHKDSGNIPEAIASYRTALKLKPDFPDAYCNLAHCLQIVCDWTDYDERMKKLVSIVADQLEKNRLPSVHPHHSMLYPLSHGFRKAIAERHGNLCLDKINVLHKPPYEHPKDLKLSDGRLRVGYVSSDFGNHPTSHLMQSIPGMHNPDKFEVFCYALSPDDGTNFRVKVMAEANHFIDLSQIPCNGKAADRIHQDGIHILVNMNGYTKGARNELFALRPAPIQAMWLGYPGTSGALFMDYIITDQETSPAEVAEQYSEKLAYMPHTFFIGDHANMFPHLKKKAVIDFKSNGHIYDNRIVLNGIDLKAFLDSLPDVKIVKMKCPDGGDNADSSNTALNMPVIPMNTIAEAVIEMINRGQIQITINGFSISNGLATTQINNKAATGEEVPRTIIVTTRSQYGLPEDAIVYCNFNQLYKIDPSTLQMWANILKRVPNSVLWLLRFPAVGEPNIQQYAQNMGLPQNRIIFSPVAPKEEHVRRGQLADVCLDTPLCNGHTTGMDVLWAGTPMVTMPGETLASRVAASQLTCLGCLELIAKNRQEYEDIAVKLGTDLEYLKKVRGKVWKQRISSPSG

SEQ ID NO: 886049 - protein, 263 aa, Homo sapiens
ESTAPAQVSTLPQSPAALSSSNRAAVWGAQGQNCTQVPVSSASELTRKTTGSAQYSLSDVTSTTSSRVDDHDSEEICLDHLCKGCPLNGSCSKVHFHLPYRWQMLIGKTWTDFEHMETIEKGYCNPGIHLCSVGSYTINFRVMSCDSFPIRRLSTPSSVTKPANSVFTTKWIWYWKNESGTWIQYGEEKDKRKNSNVDSSYLESLYQSCPRGVVPFQAGSRNYELSFQGMIQTNIASKTQKDVIRRPTFVPQWYVQQMKRGPE

SEQ ID NO: 886050 - protein, 637 aa, Homo sapiens
ASAERSCTPSPDQISHRASLEDAPVDDLTRKFTYLGSQDRARPPSGSSKATDLGGTSQAGTSQRFLENGSQEDLLHGNPGSTYLASNSTSAPNWKSLTSWTNDQGARRKTVFSPTLPAARSSLGSLQTPEAVTTRKGTGLLSSDYRIINGKSGTQDIQPGPLFNNNADGVATDITSTRSLNYKSTSSGHREISSPRIQDAGPASRDVQATGRIADDADPRVALVNDSLSDVTSTTSSRVDDHDSEEICLDHLCKGCPLNGSCSKVHFHLPYRWQMLIGKTWTDFEHMETIEKGYCNPGIHLCSVGSYTINFRVMSCDSFPIRRLSTPSSVTKPANSVFTTKWIWYWKNESGTWIQYGEEKDKRKNSNVDSSYLESLYQSCPRGVVPFQAGSRNYELSFQGMIQTNIASKTQKDVIRRPTFVPQWYVQQMKRGPDHEPAKTSSVSLTATFRPQEDFCFLSSKKYKLSEIHHLHPEYVRVSEHFKASMKNFKIEKIKKIENSELLDKFTWKKSQMKEEGKLLFYATSRAYVESICSNNFDSFLHETHENKYGKGIYFAKDAIYSHKNCPYDAKNVVMFVAQVLVGKFTEGNITYTSPPPQFDSCVDTRSNPSVFVIFQKDQVYPQYVIEYTEDKACVIS

SEQ ID NO: 886051 - protein, 637 aa, Homo sapiens; identical to SEQ ID NO: 886050

SEQ ID NO: 886052 - protein, 466 aa, Homo sapiens
ESTAPAQVSTLPQSPAALSSSNRAAVWGAQGQNCTQVPVSSASELTRKTTGSAQYSLSDVTSTTSSRVDDHDSEEICLDHLCKGCPLNGSCSKVHFHLPYRWQMLIGKTWTDFEHMETIEKGYCNPGIHLCSVGSYTINFRVMSCDSFPIRRLSTPSSVTKPANSVFTTKWIWYWKNESGTWIQYGEEKDKRKNSNVDSSYLESLYQSCPRGVVPFQAGSRNYELSFQGMIQTNIASKTQKDVIRRPTFVPQWYVQQMKRGPDHEPAKTSSVSLTATFRPQEDFCFLSSKKYKLSEIHHLHPEYVRVSEHFKASMKNFKIEKIKKIENSELLDKFTWKKSQMKEEGKLLFYATSRAYVESICSNNFDSFLHETHENKYGKGIYFAKDAIYSHKNCPYDAKNVVMFVAQVLVGKFTEGNITYTSPPPQFDSCVDTRSNPSVFVIFQKDQVYPQYVIEYTEDKACVIS

SEQ ID NO: 886053 - protein, 637 aa, Homo sapiens; identical to SEQ ID NO: 886050

SEQ ID NO: 886054 - protein, 154 aa, Homo sapiens
VCLWLSFFFCWFAAGLFLVVFVVVVCSSCVVVCRGCVLLFLRLFCVVVFLARFFCCLFRVCVCRCVCCVLCVGAAVCCESCVDPFSSAAMVGWSCVSLVCFVLSASILRGCVASVFARPEVVRVHVSARLVFVPSRFFLYACCPPVSCLARFLF

SEQ ID NO: 886055 - protein, 637 aa, Homo sapiens; identical to SEQ ID NO: 886050

SEQ ID NO: 886056 - protein, 434 aa, Homo sapiens
ASAERSCTPSPDQISHRASLEDAPVDDLTRKFTYLGSQDRARPPSGSSKATDLGGTSQAGTSQRFLENGSQEDLLHGNPGSTYLASNSTSAPNWKSLTSWTNDQGARRKTVFSPTLPAARSSLGSLQTPEAVTTRKGTGLLSSDYRIINGKSGTQDIQPGPLFNNNADGVATDITSTRSLNYKSTSSGHREISSPRIQDAGPASRDVQATGRIADDADPRVALVNDSLSDVTSTTSSRVDDHDSEEICLDHLCKGCPLNGSCSKVHFHLPYRWQMLIGKTWTDFEHMETIEKGYCNPGIHLCSVGSYTINFRVMSCDSFPIRRLSTPSSVTKPANSVFTTKWIWYWKNESGTWIQYGEEKDKRKNSNVDSSYLESLYQSCPRGVVPFQAGSRNYELSFQGMIQTNIASKTQKDVIRRPTFVPQWYVQQMKRGPE

SEQ ID NO: 886057 - protein, 656 aa, Homo sapiens
ASAERSCTPSPDQISHRASLEDAPVDDLTRKFTYLGSQDRARPPSGSSKATDLGGTSQAGTSQRFLENGSQEDLLHGNPGSTYLASNSTSAPNWKSLTSWTNDQGARRKTVFSPTLPAARSSLGSLQTPEAVTTRKGTGLLSSDYRIINGKSGTQDIQPGPLFNNNADGVATDITSTRSLNYKSTSSGHREISSPRIQDAGPASRDVQATGRIADDADPRVALVNDSLSDVTSTTSSRVDDHDSEEICLDHLCKGCPLNGSCSKVHFHLPYRWQMLIGKTWTDFEHMETIEKGYCNPGIHLCSVGSYTINFRVMSCDSFPIRRLSTPSSVTKPANSVFTTKWIWYWKNESGTWIQYGEEKDKRKNSNVDSSYLESLYQSCPRGVVPFQAGSRNYELSFQGMIQTNIASKTQKDVIRRPTFVPQWYVQQMKRGPDHEPAKTSSVSLTATFRPQEDFCFLSSKKYKLSEIHHLHPEYVRVSEHFKASMKNFKIEKIKKIENSELLDKFTCKKSQMKKKENSELLDKFTWKKSQMKEEGKLLFYATSRAYVESICSNNFDSFLHETHENKYGKGIYFAKDAIYSHKNCPYDAKNVVMFVAQVLVGKFTEGNITYTSPPPQFDSCVDTRSNPSVFVIFQKDQVYPQYVIEYTEDKACVIS

SEQ ID NO: 886058 - protein, 237 aa, Homo sapiens
MIQTNIASKTQKDVIRRPTFVPQWYVQQMKRGPDHEPAKTSSVSLTATFRPQEDFCFLSSKKYKLSEIHHLHPEYVRVSEHFKASMKNFKIEKIKKIENSELLDKFTWKKSQMKEEGKLLFYATSRAYVESICSNNFDSFLHETHENKYGKGIYFAKDAIYSHKNCPYDAKNVVMFVAQVLVGKFTEGNITYTSPPPQFDSCVDTRSNPSVFVIFQKDQVYPQYVIEYTEDKACVIS

SEQ ID NO: 886059 - protein, 147 aa, Homo sapiens
MTTLFETDRCLLFLVMSRFGFKSRLEATSCKQVQENETRRVGDTRMKTSVRDKDKTDYVHNLYMGKERAKLPYLRIIGQDKLQIVSEKTNELLSRTSCRSYLNVQQDIRQSYRVQNNSSLCGTNPHTAGHRSPWLHPLSAGSSPQLL

SEQ ID NO: 886060 - protein, 149 aa, Homo sapiens
MPALREGNQHQRDNRGTSQVTGQEQGRAPGKGMILAILAPRVLDIGVRAPHGVWTNSGNRMGDSHPRKELRSTRHFTSQDRIILGSGMSLSQQALRLWGQEKGSWAGGGREREAWLGCLWPYKIAKSLKKGISVFENERFITDEYSSTS

SEQ ID NO: 886061 - protein, 319 aa, Homo sapiens [sequence omitted]

SEQ ID NO: 886062 - protein, 93 aa, Homo sapiens
KVLSDLLGHENHEIQPYVNGALYSILSVSTRENVLGALQKFSLRRPLQTAMIQDGLIFWLVDVLKDPDCLSDYTLEYSVDHDQHGEDKAEGAG

SEQ ID NO: 886063 - protein, 665 aa, Homo sapiens
MGDILAHESELLGLVKEYLDFAEFEDTLKTFSKECKIKGKPLCKTVGGSFRDSKSLTIQKDLVAAFDNGDQKVFFDLWEEHISSSIRDGDSFAQKLEFYLHIHFAIYLLKYSVGRPDKEELDEKISYFKTYLETKGAALSQTTEFLPFYALPFVPNPMVHPSFKELFQDSWTPELKLKLEKFLALISKASNTPKLLTIYKENGQSNKEILQQLHQQLVEAERRSVTYLKRYNKIQADYHNLIGVTAELVDSLEATVSGKMITPEYLQSVCVRLFSNQMRQSLAHSVDFTRPGTASTMLRASLAPVKLKDVPLLPSLDYEKLKKDLILGSDRLKAFLLQALRWRLTTSHPGEQRETVLQAYISNDLLDCYSHNQRSVLQLLHSTSDVVRQYMARLINAFASLAEGRLYLAQNTKVLQMLEGRLKEEDKDIITRENVLGALQKFSLRRPLQTAMIQDGLIFWLVDVLKDPDCLSDYTLEYSVALLMNLCLRSTGKNMCAKVAGLVLKVLSDLLGHENHEIQPYVNGALYSILSVPSIREEARAMGMEDILRCFIKEGNAEMIRQIEFIIKQLNSEELPDGVLESDDDEDEDDEEDHDIMEADLDKDELIQPQLGELSGEKLLTTEYLGIMTNTGKTRRKGLANVQWSGDEPLQRPVTPGGHRNGYPV

SEQ ID NO: 886064 - protein, 665 aa, Homo sapiens; identical to SEQ ID NO: 886063

SEQ ID NO: 886065 - protein, 665 aa, Homo sapiens; identical to SEQ ID NO: 886063

SEQ ID NO: 886066 - protein, 966 aa, Homo sapiens
MGDILAHESELLGLVKEYLDFAEFEDTLKTFSKECKIKGKPLCKTVGGSFRDSKSLTIQKDLVAAFDNGDQKVFFDLWEEHISSSIRDGDSFAQKLEFYLHIHFAIYLLKYSVGRPDKEELDEKISYFKTYLETKGAALSQTTEFLPFYALPFVPNPMVHPSFKELFQDSWTPELKLKLEKFLALISKASNTPKLLTIYKENGQSNKEILQQLHQQLVEAERRSVTYLKRYNKIQADYHNLIGVTAELVDSLEATVSGKMITPEYLQSVCVRLFSNQMRQSLAHSVDFTRPGTASTMLRASLAPVKLKDVPLLPSLDYEKLKKDLILGSDRLKAFLLQALRWRLTTSHPGEQRETVLQAYISNDLLDCYSHNQRSVLQLLHSTSDVVRQYMARLINAFASLAEGRLYLAQNTKVLQMLEGRLKEEDKDIITRENVLGALQKFSLRRPLQTAMIQDGLIFWLVDVLKDPDCLSDYTLEYSVALLMNLCLRSTGKNMCAKVAGLVLKVLSDLLGHENHEIQPYVNGALYSILSVPSIREEARAMGMEDILRCFIKEGNAEMIRQIEFIIKQLNSEELPDGVLESDDDEDEDDEEDHDIMEADLDKDELIQPQLGELSGEKLLTTEYLGIMTNTGKTRRKGLANVQWSGDEPLQRPVTPGGHRNGYPVVEDQHTPPQTAQHARNGHPQALPAAHEAVYREGKPSTPESCVSSSSAIIAKPGEWLPRGRQEEPRPAPTGTPRQPREAPQDPGNGVTTRECASAFTCKPRAPCTPEMLELEPTQGKGVSSGPSVLFVWPPAGQPPRLHSVLHKGPAEQPVSQEVRMSPGVPITLPEDQPASRSQLAAAAGDGCEGTVVHKTLGAEGRPALQAAPEQGHRSPASRVTFSQGRATKEGWGEPGIALLERGISCSPFTHRGEGWLLPAGDLLAPETAGAGFAALALQAPTGRQCRASLEQGFSKAAEASPPHLG

SEQ ID NO: 886067 - protein, 319 aa, Homo sapiens [sequence omitted]

SEQ ID NO: 886068 - protein, 230 aa, Homo sapiens
MGDILAHESELLGLVKEYLDFAEFEDTLKTFSKECKIKGKPLCKTVGGSFRDSKSLTIQKDLVAAFDNGDQKVFFDLWEEHISSSIRDGDSFAQKLEFYLHIHFAIYLLKYSVGRPDKEELDEKISYFKTYLETKGAALSQTTEFLPFYALPFVPNPMVHPSFKELFQDSWTPELKLKLEKFLALISKASNTPKLLTIYQGECSWGPAEVQSQAPAADSDDSRRPHLLAG

SEQ ID NO: 886069 - protein, 149 aa, Homo sapiens
MGDILAHESELLGLVKEYLDFAEFEDTLKTFSKECKIKGKPLCKTVGGSFRDSKSLTIQKDLVAAFDNGDQKVFFDLWEEHISSSIRDGDSFAQKLEFYLHIHFAIYLLKYSVGRPKSYQMVFLNLMMMKMKMMKRTMTSWKPIWTKTN

SEQ ID NO: 886070 - protein, 146 aa, Homo sapiens [sequence omitted]

SEQ ID NO: 886071 - protein, 373 aa, Homo sapiens
MSSPLCVIPFVCHPLRVSSPFVVRSFCPRSTWVIMTNTGKTRRKGLANVQWSGDEPLQRPVTPGGHRNGYPVVEDQHTPPQTAQHARNGHPQALPAAHEAVYREGKPSTPESCVSSSSAIIAKPGEWLPRGRQEEPRPAPTGTPRQPREAPQDPGNGVTTRECASAFTCKPRAPCTPEMLELEPTQGKGVSSGPSVLFVWPPAGQPPRLHSVLHKGPAEQPVSQEVRMSPGVPITLPEDQPASRSQLAAAAGDGCEGTVVHKTLGAEGRPALQAAPEQGHRSPASRVTFSQGRATKEGWGEPGIALLERGISCSPFTHRGEGWLLPAGDLLAPETAGAGFAALALQAPTGRQCRASLEQGFSKAAEASPPHLG

SEQ ID NO: 886072 - protein, 84 aa, Homo sapiens
MEDILRCFIKEGNAEMIRQIEFIIKQLNSGQFDARIFDLSFELFTFARKTHGISFKRPLGSRARWLVLIIPALWEAEVGGSRGQ

SEQ ID NO: 886073 - protein, 337 aa, Homo sapiens
MGKDYYCILGIEKGASDEDIKKAYRKQALKFHPDKNKSPQAEEKFKEVAEAYEVLSDPKKREIYDQFGEEGLKGGAGGTDGQGGTFRYTFHGDPHATFAAFFGGSNPFEIFFGRRMGGGRDSEEMEIDGDPFSAFGFSMNGYPRDRNSVGPSRLKQDPPVIHELRVSLEEIYSGCTKRMKISRKRLNADGRSYRSEDKILTIEIKKGWKEGTKITFPREGDETPNSIPADIVFIIKDKDHPKFKRDGSNIIYTAKISLREALCGCSINVPTLDGRNIPMSVNDIVKPGMRRRIIGYGLPFPKNPDQRGDLLIEFEVSFPDTISSSSKEVLRKHLPAS

SEQ ID NO: 886074 - protein, 337 aa, Homo sapiens; identical to SEQ ID NO: 886073

SEQ ID NO: 886075 - protein, 337 aa, Homo sapiens; identical to SEQ ID NO: 886073

SEQ ID NO: 886076 - protein, 306 aa, Homo sapiens
RWCGLGLRKNDRNRDVARIKFKTSREQNFFWHLLSARSWGLKGGAGGTDGQGGTFRYTFHGDPHATFAAFFGGSNPFEIFFGRRMGGGRDSEEMEIDGDPFSAFGFSMNGYPRDRNSVGPSRLKQDPPVIHELRVSLEEIYSGCTKRMKISRKRLNADGRSYRSEDKILTIEIKKGWKEGTKITFPREGDETPNSIPADIVFIIKDKDHPKFKRDGSNIIYTAKISLREALCGCSINVPTLDGRNIPMSVNDIVKPGMRRRIIGYGLPFPKNPDQRGDLLIEFEVSFPDTISSSSKEVLRKHLPAS

SEQ ID NO: 886077 - protein, 337 aa, Homo sapiens; identical to SEQ ID NO: 886073

SEQ ID NO: 886078 - protein, 335 aa, Homo sapiens
MGKDYYCILGIEKGASDEDIKKAYRKQALKFHPDKNKSPQAEEKFKEVAEAYEVLSDPKKREIYDQFGEEGLKGGAGGTDGQGGTFRYTFHGDPHATFAAFFGGSNPFEIFFGRRMGGGRDSEEMEIDGDPFSAFGFSMNGYPRDRNSVGPSRLKQDPPVIHELRVSLEEIYSGCTKRMKISRKRLNADGRSYRSEDKILTIEIKKGWKEGTKITFPREGDETPNSIPADIVFIIKDKDHPKFKRDGSNIIYTAKISLREALCGCSINVPTLDGRNIPMSVNDIVKPGMRRRIIGYGLPFPKNPDQHLLHPKKYLGNIFLPHRMKNFVTHILIRH

SEQ ID NO: 886079 - protein, 564 aa, Homo sapiens
TSAGSAAAGGGRAHLSLPVSRRPRPLGRAQSRPPPLPPRAPANMTSAFKLDFLPDMMVEGRLLVPDRINGTANKMNGALDHSDQPDPDAIKMFVGQIPRSWSEKELKELFEPYGAVYQINVLRDRSQNPPQSKGCCFVTFYTRKAALEAQNALHNIKTLPGMHHPIQMKPADSEKSNAVEDRKLFIGMVSKKCNENDIRVMFSPFGQIEECRILRGPDGLSRGCAFVTFSTRAMAQNAIKAMHQSQTMEGCSSPIVVKFADTQKDKEQRRLQQQLAQQMQQLNTATWGNLTGLGGLTPQYLALLQQATSSSNLGAFSGIQQMAGMNALQLQNLATLAAAAAAAQTSATSTNANPLSTTSSALGALTSPVAASTPNSTAGAAMNSLTSLGTLQGLAGATVGLNNINALAVAQMLSGMAALNGGLGATGLTNGTAGTMDALTQAYSGIQQYAAAALPTLYSQSLLQQQSAAGSQKEGPEGANLFIYHLPQEFGDQDILQMFMPFGNVISAKVFIDKQTNLSKCFGFVSYDNPVSAQAAIQAMNGFQIGMKRLKVQLKRSKNDSKPY

SEQ ID NO: 886080 - protein, 508 aa, Homo sapiens
MRCPKSAVTMRNEELLLSNGTANKMNGALDHSDQPDPDAIKMFVGQIPRSWSEKELKELFEPYGAVYQINVLRDRSQNPPQSKGCCFVTFYTRKAALEAQNALHNIKTLPGMHHPIQMKPADSEKSNAVEDRKLFIGMVSKKCNENDIRVMFSPFGQIEECRILRGPDGLSRGCAFVTFSTRAMAQNAIKAMHQSQTMEGCSSPIVVKFADTQKDKEQRRLQQQLAQQMQQLNTATWGNLTGLGGLTPQYLALLQQATSSSNLGAFSGIQQMAGMNALQLQNLATLAAAAAAAQTSATSTNANPLSTTSSALGALTSPVAASTPNSTAGAAMNSLTSLGTLQGLAGATVGLNNINALAGMAALNGGLGATGLTNGTAGTMDALTQAYSGIQQYAAAALPTLYSQSLLQQQSAAGSQKEGPEGANLFIYHLPQEFGDQDILQMFMPFGNVISAKVFIDKQTNLSKCFGFVSYDNPVSAQAAIQAMNGFQIGMKRLKVQLKRSKNDSKPY

SEQ ID NO: 886081 - protein, 490 aa, Homo sapiens
MNGALDHSDQPDPDAIKMFVGQIPRSWSEKELKELFEPYGAVYQINVLRDRSQNPPQSKGCCFVTFYTRKAALEAQNALHNIKTLPGMHHPIQMKPADSEKSNAVEDRKLFIGMVSKKCNENDIRVMFSPFGQIEECRILRGPDGLSRGCAFVTFSTRAMAQNAIKAMHQSQTMEGCSSPIVVKFADTQKDKEQRRLQQQLAQQMQQLNTATWGNLTGLGGLTPQYLALLQQATSSSNLGAFSGIQQMAGMNALQLQNLATLAAAAAAAQTSATSTNANPLSTTSSALGALTSPVAASTPNSTAGAAMNSLTSLGTLQGLAGATVGLNNINALAVAQMLSGMAALNGGLGATGLTNGTAGTMDALTQAYSGIQQYAAAALPTLYSQSLLQQQSAAGSQKEGPEGANLFIYHLPQEFGDQDILQMFMPFGNVISAKVFIDKQTNLSKCFGFVSYDNPVSAQAAIQAMNGFQIGMKRLKVQLKRSKNDSKPY

SEQ ID NO: 886082 - protein, 138 aa, Homo sapiens
MFFVDKTSLELVYLIQKKKKEFQKKKLFALKKISCEGKEKKTYSRISFVLACEALMSFFLIVDYLDVFVFSKMDLFFSFKEKKVKIYSAKFQRYFLPESFSVFLVRSNLITWVFYYVFCINPLIFKKKNKTKKGYKVC

SEQ ID NO: 886083 - protein, 487 aa, Homo sapiens
TSAGSAAAGGGRAHLSLPVSRRPRPLGRAQSRPPPLPPRAPANMTSAFKLDFLPDMMVEGRLLVPDRINGTANKMNGALDHSDQPDPDAIKMFVGQIPRSWSEKELKELFEPYGAVYQINVLRDRSQNPPQSKGCCFVTFYTRKAALEAQNALHNIKTLPGMHHPIQMKPADSEKSNAVEDRKLFIGMVSKKCNENDIRVMFSPFGQIEECRILRGPDGLSRGCAFVTFSTRAMAQNAIKAMHQSQTMEGCSSPIVVKFADTQKDKEQRRLQQQLAQQMQQLNTATWGNLTGLGGLTPQYLALLQQATSSSNLGAFSGIQQMAGMNALQLQNLATLAAAAAAAQTSATSTNANPLSTTSSALGALTSPVAASTPNSTAGAAMNSLTSLGTLQGLDGGSEWRTWRHRLDEWHGWHHGRPHPGLLRNSTVRSRRAAHSVQPEPAAAAERCRQPEGRSRGGKPLYLPPSTGIWRPGHSADVHAFWKCYLC

SEQ ID NO: 886084 - protein, 501 aa, Homo sapiens
TSAGSAAAGGGRAHLSLPVSRRPRPLGRAQSRPPPLPPRAPANMTSAFKLDFLPDMMVEGRLLVPDRINGTANKMNGALDHSDQPDPDAIKMFVGQIPRSWSEKELKELFEPYGAVYQINVLRDRSQNPPQSKGCCFVTFYTRKAALEAQNALHNIKTLPGMHHPIQMKPADSEKSNAVEDRKLFIGMVSKKCNENDIRVMFSPFGQIEECRILRGPDGLSRGCAFVTFSTRAMAQNAIKAMHQSQTMEGCSSPIVVKFADTQKDKEQRRLQQQLAQQMQQLNTATWGNLTGLGGLTPQYLALLQQATSSSNLGAFSGIQQMAGMNALQLQNLATLAAAAAAAQTSATSTNANPLSTTSSALGALTSPVAASTPNSTAGAAMNSLTSLGTLQGLAGATVGLNNINALADGGSEWRTWRHRLDEWHGWHHGRPHPGLLRNSTVRSRRAAHSVQPEPAAAAERCRQPEGRSRGGKPLYLPPSTGIWRPGHSADVHAFWKCYLC

SEQ ID NO: 886085 - protein, 468 aa, Homo sapiens
TSAGSAAAGGGRAHLSLPVSRRPRPLGRAQSRPPPLPPRAPANMTSAFKLDFLPDMMVEGRLLVPDRINGTANKMNGALDHSDQPDPDAIKMFVGQIPRSWSEKELKELFEPYGAVYQINVLRDRSQNPPQSKGCCFVTFYTRKAALEAQNALHNIKTLPGMHHPIQMKPADSEKSNAVEDRKLFIGMVSKKCNENDIRVMFSPFGQIEECRILRGPDGLSRGCAFVTFSTRAMAQNAIKAMHQSQTMEGCSSPIVVKFADTQKDKEQRRLQQQLAQQMQQLNTATWGNLTGLGGLTPQYLALLQQATSSSNLGAFSGIQQMAGMNALQLQNLATLAAAAAAAQTSATSTNANPLSTTSSALGALTSPVAASTPNSTAGAAMNSLTSLGTLQGLAGATVGLNNINALADGGSEWRTWRHRLDEWHGWHHGRPHPGLLRNSTVRSRRAAHSVQPEPAAAAERCRQPEGR

SEQ ID NO: 886086 - protein, 501 aa, Homo sapiens; identical to SEQ ID NO: 886084

SEQ ID NO: 886087 - protein, 161 aa, Homo sapiens
MNGALDHSDQPDPDAIKMFVGQIPRSWSEKELKELFEPYGAVYQINVLRDRSQNPPQSKGCCFVTFYTRKAALEAQNALHNIKTLPGMHHPIQMKPADSEKSNAVEDRKLFIGMVSKKCNENDIRVMFSPFGQIEECRILRGPDGLSRGECAVWKASPLQC

SEQ ID NO: 886088 - protein, 71 aa, Homo sapiens
MLALQPSPELQPPFLFSAGLPLQADSLSRYFPGFVSYDNPVSAQAAIQAMNGFQIGMKRLKVQLKRSKNDS

SEQ ID NO: 886089 - protein, 110 aa, Homo sapiens
WRPGSRLRGVTVMLRRGHLAFRDVAIEFPQEEWKCLDPAQRTLYREVMVENYRNLVFLGICLPDLSVISMLEQRRDPRNLQSEVKIANNPGSCSVTQAVVEWQSSVAIVA

SEQ ID NO: 886090 - protein, 392 aa, Homo sapiens
WRPGSRLRGVTVMLRRGHLAFRDVAIEFPQEEWKCLDPAQRTLYREVMVENYRNLVFLGICLPDLSVISMLEQRRDPRNLQSEVKIANNPGGRECIKGVNAESSSKLGSNAGNKSLKINLDYTFQLHLSELQLFQAERNISGCKHVEKPINKQFLSFTTFKKFILVSEIPHFRINTEVIWMILHFSQKNKKHKSGKNRVKYEHGKAFRVSSSLANHPVIHTADNLYNVTACDEGPISNQLRNLLPPSREFIPWERKPLHSVLDCGKALQANLIPGRTESNNYWEETLHTVRFATLSSRRNRESLRTAQRGEKTVNVTGEQEVHEEASWDEEKSKRGKQQRDDEHTSGTEGNHRQQNKLEQGSKETQTRRQTGSDRTASVELASTPAYGQNRE

SEQ ID NO: 886091 - protein, 129 aa, Homo sapiens
WRPGSRLRGVTVMLRRGHLAFRDVAIEFPQEEWKCLDPAQRTLYREVMVENYRNLVFLGICLPDLSVISMLEQRRDPRNLQSEVKIANNPGGRECIKGVNAGKSLDGQSGGPIIFFFFKQGLALSPRLS

SEQ ID NO: 886092 - protein, 102 aa, Homo sapiens
WSIIDLLEKLVNGFPLVGGSTVEQVEDRTQLAPGPAPDCMVCAQQGCIPLQPPPPHFLPELVCPSHQAMWSRWLHPPLDSCPPPMKGGRGFRVSLGDPGSLR

SEQ ID NO: 886093 - protein, 2080 aa, Homo sapiens
MGSGAICWFNLRDVGSQAPEDRWYEAEKVWLAQKDGFTLATVLKPDEGTADLPAGRVRLWIDADKTITEVDEEHVHRANPPELDQVEDLASLISVNESSVLNTLLQRYKAQLLHTCTGPDLIVLQPRGPSVPSAGKVPKGRRDGLPAHIGSMAQRAYWALLNQRRDQSIVALGWSGAGKTTCCEQVLEHLVGMAGSVDGRVSVEKIRATFTVLRAFGSVSMAHSRSATRFSMVMSLDFNATGRITAAQLQTMLLEKSRVARQPEGESNFLVFSQMLAGLDLDLRTELNLHQMADSSSFGMGVWSKPEDKQKAAAAFAQLQGAMEMLGISESEQRAVWRVLAAIYHLGAAGACKVGRKQFMRFEWANYAAEALGCEYEELNTATFKHHLRQIIQQMTFGPSRWGLEDEETSSGLKMTGVDCVEGMASGLYQELFAAVVSLINRSFSSHHLSMASIMVVDSPGFQNPRHQGKDRAATFEELCHNYAHERLQLLFYQRTFVSTLQRYQEEGVPVQFDLPDPSPGTTVAVVDQNPSQVRLPAGGGAQDARGLFWVLDEEVHVEGSSDSVVLERLCAAFEKKGAGTEGSSALRTCEQPLQCEIFHQLGWDPVRYDLTGWLHRAKPNLSALDAPQVLHQSKREELRSLFQARAKLPPVCRAVAGLEGTSQQALQRSRMVRRTFASSLAAVRRKAPCSQIKLQMDALTSMIKRSRLHFIHCLVPNPVVESRSGQESPPPPQPGRDKPGAGGPLALDIPALRVQLAGFHILEALRLHRTGYADHMGLTRFRRQFQVLDAPLLKKLMSTSEGIDERKAVEELLETLDLEKKAVAVGHSQVFLKAGVISRLEKQREKLVSQSIVLFQAACKGFLSRQEFKKLKIRRLAAQCIQKNVAVFLAVKDWPWWQLLGSLQPLLSATIGTEQLRAKEEELTTLRRKLEKSEKLRNELRQNTDLLESKIADLTSDLADERFKGDVACQVLESERAERLQAFREVQELKSKHEQVQKKLGDVNKQLEEAQQKIQLNDLERNPTGGADEWQMRFDCAQMENEFLRKRLQQCEERLDSELTARKELEQKLGELQSAYDGAKKMAHQLKRKCHHLTCDLEDTCVLLENQQSRNHELEKKQKKFDLQLAQALGESVFEKGLREKVTQENTSVRWELGQLQQQLKQKEQEASQLKQQVEMLQDHKRELLGSPSLGENCVAGLKERLWKLESSALEQQKIQSQQENTIKQLEQLRQRFELEIERMKQMHQKDREDQEEELEDVRQSCQKRLHQLEMQLEQEYEEKQMVLHEKQDLEGLIGTLCDQIGHRDFDVEKRLRRDLRRTHALLSDVQLLLGTMEDGKTSVSKEELEKVHSQLEQSEAKCEEALKTQKVLTADLESMHSELENMTRNKSLVDEQLYRLQFEKADLLKRIDEDQDDLNELMQKHKDLIAQSAADIGQIQELQLQLEEAKKEKHKLQEQLQVAQMRIEYLEQSTVDRAIVSRQEAVICDLENKTEFQKVQIKRFEVLVIRLRDSLIKMGEELSQAATSESQQRESSQYYQRRLEELKADMEELVQREAEASRRCMELEKYVEELAAVRQTLQTDLETSIRRIADLQAALEEVASSDSDTESVQTAVDCGSSGRKEMDNVSILSSQPEGSLQSWLSCTLSLATDTMRTPSRQSATSSRILSPRINEEAGDTERTQSALALSRARSTNVHSKTSGDKPVSPHFVRRQKYCHFGDGEVLAVQRKSTERLEPASSPLASRSTNTSPLSREKLPSPSAALSEFVEGLRRKRAQRGQGSTLGLEDWPTLPIYQTTGASTLRRGRAGSDEGNLSLRVGAKSPLEIEGAAGGLLRSTSLKCISSDGVGGTTLLPEKSKTQFSSCESLLESRPSMGRKLSSPTTPRDMLLSPTLRPRRRCLESSVDDAGCPDLGKEPLVFQNRQFAHLMEEPLGSDPFSWKLPSLDYERKTKVDFDDFLPAIRKPQTPTSLAGSAKGGQDGSQRSSIHFETEEANRSFLSGIKTILKKSPEPKEDPAHLSDSSSSSGSIVSFKSADSIKSRPGIPRLAGDGGERTSPERREPGTGRKDDDVASIMKKYLQK

SEQ ID NO: 886094 - protein, 2651 aa, Homo sapiens
RGRDVCRCVWRGCSFAPAFPARWGPFAATRGDVLDSRGSCDLCPLCRSSVSISCAACVCKASFRAVWQEAPSHLIISRPWHCLSMAISSRLALWEQKIREEDKSPPPSSPPPLFSVIPGGFIKQLVRGTEKEAKEARQRKQLAVASPEREIPEISISQPNSKSSSGTRSGSQQISQDDQSSSPGSSDILGKESEGSRSPDPEQMTSINGEKAQELGSSATPTKKTVPFKRGVRRGDVLLMVAKLDPDSAKPEKTHPHDAPPCKTSPPATDTGKEKKGETSRTPCGSQASTEILAPKAEKTRTGGLGDPGQGTVALKKGEEGQSIVGKGLGTPKTTELKEAEPQGKDRQGTRPQAQGPGEGVRPGKAEKEGAEPTNTVEKGNVSKDVGSEGKHVRPQIPGRKWGGFLGRRSKWDGPQNKKDKEGVLLSKAEKTGEPQTQMEKTSQVQGELGDDLRMGEKAGELRSTTGKAGESWDKKEKMGQPQGKSGNAGEARSQTEKGCEAPKEVSTMVESPAAPGKGGWPGSRGQEAEEPCSRAGDGAGALETELEGPSQPALEKDAERPRIRKENQDGPAPQEEGKGGQSRDSDQAPEDRWYEAEKVWLAQKDGFTLATVLKPDEGTADLPAGRVRLWIDADKTITEVDEEHVHRANPPELDQVEDLASLISVNESSVLNTLLQRYKAQLLHTCTGPDLIVLQPRGPSVPSAGKVPKGRRDGLPAHIGSMAQRAYWALLNQRRDQSIVALGWSGAGKTTCCEQVLEHLVGMAGSVDGRVSVEKIRATFTVLRAFGSVSMAHSRSATRFSMVMSLDFNATGRITAAQLQTMLLEKSRVARQPEGESNFLVFSQMLAGLDLDLRTELNLHQMADSSSFGMGVWSKPEDKQKAAAAFAQLQGAMEMLGISESEQRAVWRVLAAIYHLGAAGACKVGRKQFMRFEWANYAAEALGCEYEELNTATFKHHLRQIIQQMTFGPSRWGLEDEETSSGLKMTGVDCVEGMASGLYQELFAAVVSLINRSFSSHHLSMASIMVVDSPGFQNPRHQGKDRAATFEELCHNYAHERLQLLFYQRTFVSTLQRYQEEGVPVQFDLPDPSPGTTVAVVDQNPSQVRLPAGGGAQDARGLFWVLDEEVHVEGSSDSVVLERLCAAFEKKGAGTEGSSALRTCEQPLQCEIFHQLGWDPVRYDLTGWLHRAKPNLSALDAPQVLHQSKREELRSLFQARAKLPPVCRAVAGLEGTSQQALQRSRMVRRTFASSLAAVRRKAPCSQIKLQMDALTSMIKRSRLHFIHCLVPNPVVESRSGQESPPPPQPGRDKPGAGGPLALDIPALRVQLAGFHILEALRLHRTGYADHMGLTRFRRQFQVLDAPLLKKLMSTSEGIDERKAVEELLETLDLEKKAVAVGHSQVFLKAGVISRLEKQREKLVSQSIVLFQAACKGFLSRQEFKKLKIRRLAAQCIQKNVAVFLAVKDWPWWQLLGSLQPLLSATIGTEQLRAKEEELTTLRRKLEKSEKLRNELRQNTDLLESKIADLTSDLADERFKGDVACQVLESERAERLQAFREVQELKSKHEQVQKKLGDVNKQLEEAQQKIQLNDLERNPTGGADEWQMRFDCAQMENEFLRKRLQQCEERLDSELTARKELEQKLGELQSAYDGAKKMAHQLKRKCHHLTCDLEDTCVLLENQQSRNHELEKKQKKFDLQLAQALGESVFEKGLREKVTQENTSVRWELGQLQQQLKQKEQEASQLKQQVEMLQDHKRELLGSPSLGENCVAGLKERLWKLESSALEQQKIQSQQENTIKQLEQLRQRFELEIERMKQMHQKDREDQEEELEDVRQSCQKRLHQLEMQLEQEYEEKQMVLHEKQDLEGLIGTLCDQIGHRDFDVEKRLRRDLRRTHALLSDVQLLLGTMEDGKTSVSKEELEKVHSQLEQSEAKCEEALKTQKVLTADLESMHSELENMTRNKSLVDEQLYRLQFEKADLLKRIDEDQDDLNELMQKHKDLIAQSAADIGQIQELQLQLEEAKKEKHKLQEQLQVAQMRIEYLEQSTVDRAIVSRQEAVICDLENKTEFQKVQIKRFEVLVIRLRDSLIKMGEELSQAATSESQQRESSQYYQRRLEELKADMEELVQREAEASRRCMELEKYVEELAAVRQTLQTDLETSIRRIADLQAALEEVASSDSDTESVQTAVDCGSSGRKEMDNVSILSSQPEGSLQSWLSCTLSLATDTMRTPSRQSATSSRILSPRINEEAGDTERTQSALALSRARSTNVHSKTSGDKPVSPHFVRRQKYCHFGDGEVLAVQRKSTERLEPASSPLASRSTNTSPLSREKLPSPSAALSEFVEGLRRKRAQRGQGSTLGLEDWPTLPIYQTTGASTLRRGRAGSDEGNLSLRVGAKSPLEIEGAAGGLLRSTSLKCISSDGVGGTTLLPEKSKTQFSSCESLLESRPSMGRKLSSPTTPRDMLLSPTLRPRRRCLESSVDDAGCPDLGKEPLVFQNRQFAHLMEEPLGSDPFSWKLPSLDYERKTKVDFDDFLPAIRKPQTPTSLAGSAKGGQDGSQRSSIHFETEEANRSFLSGIKTILKKSPEPKEDPAHLSDSSSSSGSIVSFKSADSIKSRPGIPRLAGDGGERTSPERREPGTGRKDDDVASIMKKYLQK

SEQ ID NO: 886095 - protein, 140 aa, Homo sapiens
SERLSSLPEVTQPVRGELGFETSSAGGLDQCAPRFHAISDIPPLSSLPRSFSSHHLSMASIMVVDSPGFQNPRHQGKDRAATFEELCHNYAHERLQLLFYQRTFVSTLQRYQEEGVPVQFDLSRPHPQMHLLEIIKFFLS

SEQ ID NO: 886096 - protein, 967 aa, Homo sapiens
MNSLDDFQFDLQLAQALGESVFEKGLREKVTQENTSVRWELGQLQQQLKQKEQEASQLKQQVEMLQDHKRELLGSPSLGENCVAGLKERLWKLESSALEQQKIQSQQENTIKQLEQLRQRFELEIERMKQMHQKDREDQEEELEDVRQSCQKRLHQLEMQLEQEYEEKQMVLHEKQDLEGLIGTLCDQIGHRDFDVEKRLRRDLRRTHALLSDVQLLLGTMEDGKTSVSKEELEKVHSQLEQSEAKCEEALKTQKVLTADLESMHSELENMTRNKSLVDEQLYRLQFEKADLLKRIDEDQDDLNELMQKHKDLIAQSAADIGQIQELQLQLEEAKKEKHKLQEQLQVAQMRIEYLEQSTVDRAIVSRQEAVICDLENKTEFQKVQIKRFEVLVIRLRDSLIKMGEELSQAATSESQQRESSQYYQRRLEELKADMEELVQREAEASRRCMELEKYVEELAAVRQTLQTDLETSIRRIADLQAALEEVASSDSDTESVQTAVDCGSSGRKEMDNVSILSSQPEGSLQSWLSCTLSLATDTMRTPSRQSATSSRILSPRINEEAGDTERTQSALALSRARSTNVHSKTSGDKPVSPHFVRRQKYCHFGDGEVLAVQRKSTERLEPASSPLASRSTNTSPLSREKLPSPSAALSEFVEGLRRKRAQRGQGSTLGLEDWPTLPIYQTTGASTLRRGRAGSDEGNLSLRVGAKSPLEIEGAAGGLLRSTSLKCISSDGVGGTTLLPEKSKTQFSSCESLLESRPSMGRKLSSPTTPRDMLLSPTLRPRRRCLESSVDDAGCPDLGKEPLVFQNRQFAHLMEEPLGSDPFSWKLPSLDYERKTKVDFDDFLPAIRKPQTPTSLAGSAKGGQDGSQRSSIHFETEEANRSFLSGIKTILKKSPEPKEDPAHLSDSSSSSGSIVSFKSADSIKSRPGIPRLAGDGGERTSPERREPGTGRKDDDVASIMKKYLQK

SEQ ID NO: 886097 - protein, 122 aa, Homo sapiens
QARAKLPPVCRAVAGLEGTSQQALQRSRMVRRTFASSLAAVRRKAPCSQIKLQMVSGHPVSWCPGLHCLHPHLLWAESCAYIISNLPSKARGASVTPRSTEEEMGAPSSNETWPWSHPQEVT

SEQ ID NO: 886098 - protein, 217 aa, Homo sapiens
MASQKQMEVVTKGTGFRRRPKTITYTPGTCELLRVMMKESKLTNIQQRHIMDIMKRGDALPLQCSPTSSQRVLPSKQIASPIYLPPILAARPHLRPANMCQANGAYSREQFKPQATRDLEKEKQRLQNIFATGKDMEERKRKAPPARQKAPAPELDRFEELVKEIQERKEFLADMEALGQGKQYRGIILAEISQKLREMEDIDHRRSEELRKGLATT

SEQ ID NO: 886099 - protein, 217 aa, Homo sapiens; identical to SEQ ID NO: 886098

SEQ ID NO: 886100 - protein, 217 aa, Homo sapiens; identical to SEQ ID NO: 886098

SEQ ID NO: 886101 - protein, 227 aa, Homo sapiens
MASQKQMEVVTKGTGFRRRPKTITYTPGTCELLRVMMKESKLTNIQQRHIMDIMKRGDALPLQCSPTSSQRVLPSKQIASPIYLPPILAARPHLRPANMCQANGAYSREQFKPQATRDLEKEKQRLQNIFATGKDMEERKRKAPPARQKAPAPELDRFEELVKEIQERKEFLADMEALGQGKQYRGIILAEISQVGETTRKVGRGRAQRQVRMEIQGLLWQGSGVRL

SEQ ID NO: 886102 - protein, 206 aa, Homo sapiens
MASQKQMEVVTKGTGFRRRPKTITYTPGTCELLRGGDALPLQCSPTSSQRVLPSKQIASPIYLPPILAARPHLRPANMCQANGAYSREQFKPQATRDLEKEKQRLQNIFATGKDMEERKRKAPPARQKAPAPELDRFEELVKEIQERKEFLADMEALGQGKQYRGIILAEISQVGETTRKVGRGRAQRQVRMEIQGLLWQGSGVRL

SEQ ID NO: 886103 - protein, 196 aa, Homo sapiens
MASQKQMEVVTKGTGFRRRPKTITYTPGTCELLRGGDALPLQCSPTSSQRVLPSKQIASPIYLPPILAARPHLRPANMCQANGAYSREQFKPQATRDLEKEKQRLQNIFATGKDMEERKRKAPPARQKAPAPELDRFEELVKEIQERKEFLADMEALGQGKQYRGIILAEISQKLREMEDIDHRRSEELRKGLATT

SEQ ID NO: 886104 - protein, 77 aa, Homo sapiens
WEPDSPLLCPVVKEIQERKEFLADMEALGQGKQYRGIILAEISQVGETTRKVGRGRAQRQVRMEIQGLLWQGSGVRL

SEQ ID NO: 886105 - protein, 327 aa, Homo sapiens
MTALELARRGARVVLACRSQERGEAAAFDLRQESGNNEVIFMALDLASLASVRAFATAFLSSEPRLDILIHNAGISSCGRTREAFNLLLRVNHIGPFLLTHLLLPCLKACAPSRVVVVASAAHCRGRLDFKRLDRPVVGWRQELRAYADTKLANVLFARELANQLEATGVTCYAAHPGPVNSELFLRHVPGWLRPLLRPLAWLVLRAPRGGAQTPLYCALQEGIEPLSGRYFANCHVEEVPPAARDDRAAHRLWEASKRLAGLGPGEDAEPDEDPQSEDSEAPSSLSTPHPEEPTVSQPYPSPQSSPDLSKMTHRIQAKVEPEIQLS

SEQ ID NO: 886106 - protein, 377 aa, Homo sapiens
MEALLLGAGLLLGAYVLVYYNLVKAPPCGGMGNLRGRTAVVTGANSGIGKMTALELARRGARVVLACRSQERGEAAAFDLRQESGNNEVIFMALDLASLASVRAFATAFLSSEPRLDILIHNAGISSCGRTREAFNLLLRVNHIGPFLLTHLLLPCLKACAPSRVVVVASAAHCRGRLDFKRLDRPVVGWRQELRAYADTKLANVLFARELANQLEATGVTCYAAHPGPVNSELFLRHVPGWLRPLLRPLAWLVLRAPRGGAQTPLYCALQEGIEPLSGRYFANCHVEEVPPAARDDRAAHRLWEASKRLAGLGPGEDAEPDEDPQSEDSEAPSSLSTPHPEEPTVSQPYPSPQSSPDLSKMTHRIQAKVEPEIQLS

SEQ ID NO: 886107 - protein, 383 aa, Homo sapiens
MVLPRVILLLLLGAGLLLGAYVLVYYNLVKAPPCGGMGNLRGRTAVVTGANSGIGKMTALELARRGARVVLACRSQERGEAAAFDLRQESGNNEVIFMALDLASLASVRAFATAFLSSEPRLDILIHNAGISSCGRTREAFNLLLRVNHIGPFLLTHLLLPCLKACAPSRVVVVASAAHCRGRLDFKRLDRPVVGWRQELRAYADTKLANVLFARELANQLEATGVTCYAAHPGPVNSELFLRHVPGWLRPLLRPLAWLVLRAPRGGAQTPLYCALQEGIEPLSGRYFANCHVEEVPPAARDDRAAHRLWEASKRLAGLGPGEDAEPDEDPQSEDSEAPSSLSTPHPEEPTVSQPYPSPQSSPDLSKMTHRIQAKVEPEIQLS

SEQ ID NO: 886108 - protein, 286 aa, Homo sapiens
MALDLASLASVRAFATAFLSSEPRLDILIHNAGISSCGRTREAFNLLLRVNHIGPFLLTHLLLPCLKACAPSRVVVVASAAHCRGRLDFKRLDRPVVGWRQELRAYADTKLANVLFARELANQLEATGVTCYAAHPGPVNSELFLRHVPGWLRPLLRPLAWLVLRAPRGGAQTPLYCALQEGIEPLSGRYFANCHVEEVPPAARDDRAAHRLWEASKRLAGLGPGEDAEPDEDPQSEDSEAPSSLSTPHPEEPTVSQPYPSPQSSPDLSKMTHRIQAKVEPEIQLS

SEQ ID NO: 886109 - protein, 274 aa, Homo sapiens
MPRNLLYSLLSSHLSPHFGTSVTSAKVAVNGVQLHYQQTGEGDHAVLLLPGMLGSGETDFGPQLKNLNKKLFTVVAWDPRGYGHSRPPDRDFPADFFERDAKDAVDLMKALKFKKVSLLGWSDGGITALIAAAKYPSYIHKMVIWGANAYVTDEDSMIYEGIRDVSKWSERTRKPLEALYGYDYFARTCEKWVDGIRQFKHLPDGNICRHLLPRVQCPALIVHGEKDPLVPRFHADFIHKHVKGSRLHLMPEGKHNLHLRFADEFNKLAEDFLQ

SEQ ID NO: 886110 - protein, 96 aa, Homo sapiens
GSPSFASSDRVEWLHYKQIPRAVYPSGNICRHLLPRVQCPALIVHGEKDPLVPRFHADFIHKHVKGSRLHLMPEGKHNLHLRFADEFNKLAEDFLQ

SEQ ID NO: 886111 - protein, 414 aa, Homo sapiens
ADAARALWLAASPPGKAMVAEATSEGGGSADGDTHPGSQSQHREGTVYAGAGGSRTAKPRAEFRSPMGKHPAGRGFGAGRAEGGAGWRGEVGGAEGVASGQSGPGTALGLSACALPAATRPVTMVAVLGGRGVLRLRLLLSALKPGIHVPRAGPAAAFGTSVTSAKVAVNGVQLHYQQTGEGDHAVLLLPGMLGSGETDFGPQLKNLNKKLFTVVAWDPRGYGHSRPPDRDFPADFFERDAKDAVDLMKALKFKKVSLLGWSDGGITALIAAAKYPSYIHKMVIWGANAYVTDEDSMIYEGIRDVSKWSERTRKPLEALYGYDYFARTCEKWVDGIRQFKHLPDGNICRHLLPRVQCPALIVHGEKDPLVPRFHADFIHKHVKGSRLHLMPEGKHNLHLRFADEFNKLAEDFLQ

SEQ ID NO: 886112 - protein, 276 aa, Homo sapiens
  misc_feature (4)..(4): Xaa can be any naturally occurring amino acid
  misc_feature (8)..(8): Xaa can be any naturally occurring amino acid
  misc_feature (12)..(12): Xaa can be any naturally occurring amino acid
HIDXSRIXLVAXALEPAAAFGTSVTSAKVAVNGVQLHYQQTGEGDHAVLLLPGMLGSGETDFGPQLKNLNKKLFTVVAWDPRGYGHSRPPDRDFPADFFERDAKDAVDLMKALKFKKVSLLGWSDGGITALIAAAKYPSYIHKMVIWGANAYVTDEDSMIYEGIRDVSKWSERTRKPLEALYGYDYFARTCEKWVDGIRQFKHLPDGNICRHLLPRVQCPALIVHGEKDPLVPRFHADFIHKHVKGSRLHLMPEGKHNLHLRFADEFNKLAEDFLQ

SEQ ID NO: 886113 - protein, 223 aa, Homo sapiens
RPRVRPVGRGSRASALREAAAGATRPGRPAQPPWSQPDRDFPADFFERDAKDAVDLMKALKFKKVSLLGWSDGGITALIAAAKYPSYIHKMVIWGANAYVTDEDSMIYEGIRDVSKWSERTRKPLEALYGYDYFARTCEKWVDGIRQFKHLPDGNICRHLLPRVQCPALIVHGEKDPLVPRFHADFIHKHVKGSRLHLMPEGKHNLHLRFADEFNKLAEDFLQ

SEQ ID NO: 886114 - protein, 206 aa, Homo sapiens
MLWSFLVSPERFSHASYFPPDRDFPADFFERDAKDAVDLMKALKFKKVSLLGWSDGGITALIAAAKYPSYIHKMVIWGANAYVTDEDSMIYEGIRDVSKWSERTRKPLEALYGYDYFARTCEKWVDGIRQFKHLPDGNICRHLLPRVQCPALIVHGEKDPLVPRFHADFIHKHVKGSRLHLMPEGKHNLHLRFADEFNKLAEDFLQ

SEQ ID NO: 886115 - protein, 256 aa, Homo sapiens
MPRNLLYSLLSSHLSPHFGTSVTSAKVAVNGVQLHYQQTGEGDHAVLLLPGMLGSGETDFGPQLKNLNKKLFTVVAWDPRGYGHSRPPDRDFPADFFERDAKDAVDLMKALKFKKVSLLGWSDGGITALIAAVTDEDSMIYEGIRDVSKWSERTRKPLEALYGYDYFARTCEKWVDGIRQFKHLPDGNICRHLLPRVQCPALIVHGEKDPLVPRFHADFIHKHVKGSRLHLMPEGKHNLHLRFADEFNKLAEDFLQ

SEQ ID NO: 886116 - protein, 133 aa, Homo sapiens [sequence omitted]

SEQ ID NO: 886117 - protein, 592 aa, Homo sapiens
MAPGQLALFSVSDKTGLVEFARNLTALGLNLVASGGTAKALRDAGLAVRDVSELTGFPEMLGGRVKTLHPAVHAGILARNIPEDNADMARLDFNLIRVVACNLYPFVKTVASPGVTVEEAVEQIDIGGVTLLRAAAKNHARVTVVCEPEDYVVVSTEMQSSESKDTSLETRRQLALKAFTHTAQYDEAISDYFRKQYSKGVSQMPLRYGMNPHQTPAQLYTLQPKLPITVLNGAPGFINLCDALNAWQLVKELKEALGIPAAASFKHVSPAGAAVGIPLSEDEAKVCMVYDLYKTLTPISAAYARARGADRMSSFGDFVALSDVCDVPTAKIISREVSDGIIAPGYEEEALTILSKKKNGNYCVLQMDQSYKPDENEVRTLFGLHLSQKRNNGVVDKSLFSNVVTKNKDLPESALRDLIVATIAVKYTQSNSVCYAKNGQVIGIGAGQQSRIHCTRLAGDKANYWWLRHHPQVLSMKFKTGVKRAEISNAIDQYVTGTIGEDEDLIKWKALFEEVPELLTEAEKKEWVEKLTEVSISSDAFFPFRDNVDRAKRSGVAYIAAPSGSAADKVVIEACDELGIILAHTNLRLFHH

SEQ ID NO: 886118 - protein, 102 aa, Homo sapiens
MPIIPALWEAEDEDLIKWKALFEEVPELLTEAEKKEWVEKLTEVSISSDAFFPFRDNVDRAKRSGVAYIAAPSGSAADKVVIEACDELGIILAHTNLRLFHH

SEQ ID NO: 886119 - protein, 174 aa, Homo sapiens
RALGYQEDALNIPFHYNERNVYYMGPSDCPISTDQMILKYRRLLLCVFILRPEPVNNEVSLALDTPLWADVVTKNKDLPESALRDLIVATIAVKYTQSNSVCYAKNGQVIGIGAGQQSRIHCTRLAGDKANYWWLRHHPQVLSMKFKTGVKRAEISNAIDQYVTGTIGEEQEST

SEQ ID NO: 886120 - protein, 75 aa, Homo sapiens
DRNFSQFLSELKKLQSVSISSDAFFPFRDNVDRAKRSGVAYIAAPSGSAADKVVIEACDELGIILAHTNLRLFHH

SEQ ID NO: 886121 - protein, 592 aa, Homo sapiens; identical to SEQ ID NO: 886117

SEQ ID NO: 886122 - protein, 638 aa, Homo sapiens
  misc_feature (2)..(2): Xaa can be any naturally occurring amino acid
GXRGGEKTIGAKVEGWFEIRQRAPSYLRTWCRRCCLPLALNPVPAAMAPGQLALFSVSDKTGLVEFARNLTALGLNLVASGGTAKALRDAGLAVRDVSELTGFPEMLGGRVKTLHPAVHAGILARNIPEDNADMARLDFNLIRVVACNLYPFVKTVASPGVTVEEAVEQIDIGGVTLLRAAAKNHARVTVVCEPEDYVVVSTEMQSSESKDTSLETRRQLALKAFTHTAQYDEAISDYFRKQYSKGVSQMPLRYGMNPHQTPAQLYTLQPKLPITVLNGAPGFINLCDALNAWQLVKELKEALGIPAAASFKHVSPAGAAVGIPLSEDEAKVCMVYDLYKTLTPISAAYARARGADRMSSFGDFVALSDVCDVPTAKIISREVSDGIIAPGYEEEALTILSKKKNGNYCVLQMDQSYKPDENEVRTLFGLHLSQKRNNGVVDKSLFSNVVTKNKDLPESALRDLIVATIAVKYTQSNSVCYAKNGQVIGIGAGQQSRIHCTRLAGDKANYWWLRHHPQVLSMKFKTGVKRAEISNAIDQYVTGTIGEDEDLIKWKALFEEVPELLTEAEKKEWVEKLTEVSISSDAFFPFRDNVDRAKRSGVAYIAAPSGSAADKVVIEACDELGIILAHTNLRLFHH

SEQ ID NO: 886123 - protein, 592 aa, Homo sapiens; identical to SEQ ID NO: 886117

SEQ ID NO: 886124 - protein, 592 aa, Homo sapiens; identical to SEQ ID NO: 886117

SEQ ID NO: 886125 - protein, 512 aa, Homo sapiens
MAPGQLALFSVSDKTGLVEFARNLTALGLNLVASGGTAKALRDAGLAVRDVSELTGFPEMLGGRVKTLHPAVHAGILARNIPEDNADMARLDFNLIRVVACNLYPFVKTVASPGVTVEEAVEQIDIGGVTLLRAAAKNHARVTVVCEPEDYVVVSTEMQSSESKDTSLETRRQLALKAFTHTAQYDEAISDYFRKQYSKGVSQMPLRYGMNPHQTPAQLYTLQPKLPITVLNGAPGFINLCDALNAWQLVKELKEALGIPAAASFKHVSPAGAAVGIPLSEDEAKVCMVYDLYKTLTPISAAYARARGADRMSSFGDFVALSDVCDVPTAKIISREVSDGIIAPGYEEEALTILSKKKNGNYCVLQMDQSYKPDENEVRTLFGLHLSQKRNNGVVDKSLFSNVVTKNKDLPESALRDLIVATIAVKYTQSNSVCYAKNGQVIGIGAGQQSRIHCTRLAGDKANYWWLRHHPQVLSMKFKTGVKRAEISNAIDQYVTGTIGEVKDLALGSRLC

SEQ ID NO: 886126 - protein, 591 aa, Homo sapiens
MSSLSALFSVSDKTGLVEFARNLTALGLNLVASGGTAKALRDAGLAVRDVSELTGFPEMLGGRVKTLHPAVHAGILARNIPEDNADMARLDFNLIRVVACNLYPFVKTVASPGVTVEEAVEQIDIGGVTLLRAAAKNHARVTVVCEPEDYVVVSTEMQSSESKDTSLETRRQLALKAFTHTAQYDEAISDYFRKQYSKGVSQMPLRYGMNPHQTPAQLYTLQPKLPITVLNGAPGFINLCDALNAWQLVKELKEALGIPAAASFKHVSPAGAAVGIPLSEDEAKVCMVYDLYKTLTPISAAYARARGADRMSSFGDFVALSDVCDVPTAKIISREVSDGIIAPGYEEEALTILSKKKNGNYCVLQMDQSYKPDENEVRTLFGLHLSQKRNNGVVDKSLFSNVVTKNKDLPESALRDLIVATIAVKYTQSNSVCYAKNGQVIGIGAGQQSRIHCTRLAGDKANYWWLRHHPQVLSMKFKTGVKRAEISNAIDQYVTGTIGEDEDLIKWKALFEEVPELLTEAEKKEWVEKLTEVSISSDAFFPFRDNVDRAKRSGVAYIAAPSGSAADKVVIEACDELGIILAHTNLRLFHH

SEQ ID NO: 886127 - protein, 533 aa, Homo sapiens
MLGGRVKTLHPAVHAGILARNIPEDNADMARLDFNLIRVVACNLYPFVKTVASPGVTVEEAVEQIDIGGVTLLRAAAKNHARVTVVCEPEDYVVVSTEMQSSESKDTSLETRRQLALKAFTHTAQYDEAISDYFRKQYSKGVSQMPLRYGMNPHQTPAQLYTLQPKLPITVLNGAPGFINLCDALNAWQLVKELKEALGIPAAASFKHVSPAGAAVGIPLSEDEAKVCMVYDLYKTLTPISAAYARARGADRMSSFGDFVALSDVCDVPTAKIISREVSDGIIAPGYEEEALTILSKKKNGNYCVLQMDQSYKPDENEVRTLFGLHLSQKRNNGVVDKSLFSNVVTKNKDLPESALRDLIVATIAVKYTQSNSVCYAKNGQVIGIGAGQQSRIHCTRLAGDKANYWWLRHHPQVLSMKFKTGVKRAEISNAIDQYVTGTIGEDEDLIKWKALFEEVPELLTEAEKKEWVEKLTEVSISSDAFFPFRDNVDRAKRSGVAYIAAPSGSAADKVVIEACDELGIILAHTNLRLFHH

SEQ ID NO: 886128 - protein, 606 aa, Homo sapiens
LLTSTRLGLQCLQPWLPALLALFSVSDKTGLVEFARNLTALGLNLVASGGTAKALRDAGLAVRDVSELTGFPEMLGGRVKTLHPAVHAGILARNIPEDNADMARLDFNLIRVVACNLYPFVKTVASPGVTVEEAVEQIDIGGVTLLRAAAKNHARVTVVCEPEDYVVVSTEMQSSESKDTSLETRRQLALKAFTHTAQYDEAISDYFRKQYSKGVSQMPLRYGMNPHQTPAQLYTLQPKLPITVLNGAPGFINLCDALNAWQLVKELKEALGIPAAASFKHVSPAGAAVGIPLSEDEAKVCMVYDLYKTLTPISAAYARARGADRMSSFGDFVALSDVCDVPTAKIISREVSDGIIAPGYEEEALTILSKKKNGNYCVLQMDQSYKPDENEVRTLFGLHLSQKRNNGVVDKSLFSNVVTKNKDLPESALRDLIVATIAVKYTQSNSVCYAKNGQVIGIGAGQQSRIHCTRLAGDKANYWWLRHHPQVLSMKFKTGVKRAEISNAIDQYVTGTIGEDEDLIKWKALFEEVPELLTEAEKKEWVEKLTEVSISSDAFFPFRDNVDRAKRSGVAYIAAPSGSAADKVVIEACDELGIILAHTNLRLFHH

SEQ ID NO: 886129 - protein, 615 aa, Homo sapiens
MAPGQLALFSVSDKTGLVEFARNLTALGLNLVASGGTAKALRDAGLAVRDVSELTGFPEMLGGRVKTLHPAVHAGILARNIPEDNADMARLDFNLIRVVACNLYPFVKTVASPGVTVEEAVEQIDIGGVTLLRAAAKNHARVTVVCEPEDYVVVSTEMQSSESKDTSLETRRQLALKAFTHTAQYDEAISDYFRKQYSKGVSQMPLRYGMNPHQTPAQLYTLQPKLPITVLNGAPGFINLCDALNAWQLVKELKEALGIPAAASFKHVSPAGAAVGIPLSEDEAKVCMVYDLYKTLTPISAAYARARGADRMSSFGDFVALSDVCDVPTAKIISREVSDGIIAPGYEEEALTILSKKKNGNYCVLQMDQSYKPDENEVRTLFGLHLSQKRNNGVVDKSLFSNVVTKNKDLPESALRDLIVATIAVKYTQSNSVCYAKNGQVIGIGAGQQSRIHCTRLAGDKANYWWLRHHPQVLSMKFKTGVKRAEISNAIDQYVTGTIGEDEDLIKWKALFEEVPELLTEAEKKEWVEKLTEVSISSDAFFPFRDNVDRAKRIGVAYIAAPPFFLLTSFFFGPFPLCAFLPYSLFPSFSSPLFFSPLFFFWWSFLFCASVNSHA

SEQ ID NO: 886130 - protein, 531 aa, Homo sapiens
MAPGQLALFSVSDKTGLVEFARNLTALGLNLVASGGTAKALRDAGLAVRDVSELTGFPEMLGGRVKTLHPAVHAGILARNIPEDNADMARLDFNLIRVVACNLYPFVKTVASPGVTVEEAVEQIDIGGVTLLRAAAKNHARVTVVCEPEDYVVVSTEMQSSESKDTSLETRRQLALKAFTHTAQYDEAISDYFRKQYSKGVSQMPLRYGMNPHQTPAQLYTLQPKLPITVLNGAPGFINLCDALNAWQLVKELKEALGIPAAASFKHVSPAGAAVGIPLSEDEAKVCMVYDLYKTLTPISAAYARARGADRMSSFGDFVALSDVCDVPTAKIISREVSDGIIAPGYEEEALTILSKKKNGNYCVLQMDQSYKPDENEVRTLFGLHLSQKRNNGVVDKSLFSNVVTKNKDLPESALRDLIVATIAVKYTQSNSVCYAKNGQDEDLIKWKALFEEVPELLTEAEKKEWVEKLTEVSISSDAFFPFRDNVDRAKRSGVAYIAAPSGSAADKVVIEACDELGIILAHTNLRLFHH

SEQ ID NO: 886131 - protein, 479 aa, Homo sapiens
  misc_feature (6)..(7): Xaa can be any naturally occurring amino acid
  misc_feature (10)..(10): Xaa can be any naturally occurring amino acid
  misc_feature (15)..(16): Xaa can be any naturally occurring amino acid
  misc_feature (18)..(18): Xaa can be any naturally occurring amino acid
KTKDLXXFGXEVKPXXVXGKPLAALTARVTVVCEPEDYVVVSTEMQSSESKDTSLETRRQLALKAFTHTAQYDEAISDYFRKQYSKGVSQMPLRYGMNPHQTPAQLYTLQPKLPITVLNGAPGFINLCDALNAWQLVKELKEALGIPAAASFKHVSPAGAAVGIPLSEDEAKVCMVYDLYKTLTPISAAYARARGADRMSSFGDFVALSDVCDVPTAKIISREVSDGIIAPGYEEEALTILSKKKNGNYCVLQMDQSYKPDENEVRTLFGLHLSQKRNNGVVDKSLFSNVVTKNKDLPESALRDLIVATIAVKYTQSNSVCYAKNGQVIGIGAGQQSRIHCTRLAGDKANYWWLRHHPQVLSMKFKTGVKRAEISNAIDQYVTGTIGEDEDLIKWKALFEEVPELLTEAEKKEWVEKLTEVSISSDAFFPFRDNVDRAKRSGVAYIAAPSGSAADKVVIEACDELGIILAHTNLRLFHH

SEQ ID NO: 886132 - protein, 325 aa, Homo sapiens
AAAYYYYYCSEFKLLTMYGDMVYDLYKTLTPISAAYARARGADRMSSFGDFVALSDVCDVPTAKIISREVSDGIIAPGYEEEALTILSKKKNGNYCVLQMDQSYKPDENEVRTLFGLHLSQKRNNGVVDKSLFSNVVTKNKDLPESALRDLIVATIAVKYTQSNSVCYAKNGQVIGIGAGQQSRIHCTRLAGDKANYWWLRHHPQVLSMKFKTGVKRAEISNAIDQYVTGTIGEDEDLIKWKALFEEVPELLTEAEKKEWVEKLTEVSISSDAFFPFRDNVDRAKRSGVAYIAAPSGSAADKVVIEACDELGIILAHTNLRLFHH

SEQ ID NO: 886133 - protein, 173 aa, Homo sapiens
MVDNCPDTFQLCRYMNYSFCLVFSMGASGTFTYFPASGDRLPRITGICPRGRGVASLWGRGQIAGSHAWTSGSQAGSLPAQALRPGAPGRAPPHPAVPFSPGARILHLKLSRAGRRAGPAGHVISPETAPPPRFLSRHIPAALLPAHVVPPLLPPARPEPSACSHGSRPARLI

SEQ ID NO: 886134 - protein, 592 aa, Homo sapiens; identical to SEQ ID NO: 886117

SEQ ID NO: 886135 - protein, 461 aa, Homo sapiens
MAPGQLALFSVSDKTGLVEFARNLTALGLNLVASGGTAKALRDAGLAVRDVSELTGFPEMLGGRVKTLHPAVHAGILARNIPEDNADMARLDFNLIRVVACNLYPFVKTVASPGVTVEEAVEQIDIGGVTLLRAAAKNHARVTVVCEPEDYVVVSTEMQSSESKDTSLETRRQLALKAFTHTAQYDEAISDYFRKQYSKGVSQMPLRYGMNPHQTPAQLYTLQPKLPITVLNGAPGFINLCDALNAWQLVKELKEALGIPAAASFKHVSPAGAAVGIPLSEDEAKVCMVYDLYKTLTPISAAYARARGADRMSSFGDFVALSDVCDVPTAKIISREVSDGIIAPGYEEEALTILSKKKNGNYCVLQMDQSYKPDENEVRTLFGLHLSQKRNNGVVDKSLFSNVVTKNKDLSSTLSLTLCATPRTGRLSALEQDSSLVYTALALQEIRQTIGGLDTIHKCFR

SEQ ID NO: 886136 - protein, 568 aa, Homo sapiens
MAPGQLALFSVSDKTGLVEFARNLTALGLNLVASGGTAKALRDAGLAVRDVSELTGFPEMLGGRVKTLHPAVHAGILARNIPEDNADMARLDFNLIRVVACNLYPFVKTVASPGVTVEEAVEQIDIGGVTLLRAAAKNHARVTVVCEPEDYVVVSTEMQSSESKDTSLETRRQLALKAFTHTAQYDEAISDYFRKQYSKGVSQMPLRYGMNPHQTPAQLYTLQPKLPITVLNGAPGFINLCDALNAWQLVKELKEALGIPAAASFKHVSPAGAAVGIPLSEDEAKVCMVYDLYKTLTPISAAYARARGADRMSSFGDFVALSDVCDVPTAKIISREVSDGIIAPGYEEEALTILSKKKNGNYCVLQMDQSYKPDENEVRTLFGLHLSQKRNNGVVDKSLFSNVVTKNKDLPESALRDLIVATIAVKYTQSNSVCYAKNGQVIGIGAGQQSRIHCTRLAGDKANYWWLRHHPQVLSMKFKTGVKRAEISNAIDQYVTGTIGEDEDLIKWKALFEEVPELLTEAEKKEWVEKLTEVSISSDAFFPFRDNVDRAKRGKYGIGCICLELSIM

SEQ ID NO: 886137 - protein, 533 aa, Homo sapiens; identical to SEQ ID NO: 886127

SEQ ID NO: 886138 - protein, 567 aa, Homo sapiens
MAPGQLALFSVSDKTGLVEFARNLTALGLNLVASGGTAKALRDAGLAVRDVSELTGFPEMLGGRVKTLHPAVHAGILARNIPEDNADMARLDFNLIRVVACNLYPFVKTVASPGVTVEEAVEQIDIGGVTLLRAAAKNHARVTVVCEPEDYVVVSTEMQSSESKDTSLETRRQLALKAFTHTAQYDEAISDYFRKQYSKGVSQMPLRYGMNPHQTPAQLYTLQPKLPITVLNGAPGFINLCDALNAWQLVKELKEALGIPAAASFKHVSPAGAAVGIPLSEDEAKVCMVYDLYKTLTPISAAYARARGADRMSSFGDFVALSDVCDVPTAKIISREVSDGIIAPGYEEEALTILSKKKNGNYCVLQMDQSYKPDENEVRTLFGLHLSQKRNNGVVDKSLFSNVVTKNKDLPESALRDLIVATIAVKYTQSNSVCYAKNGQVIGIGAGQQSRIHCTRLAGDKANYWWLRHHPQVLSMKFKTGVKRAEISNAIDQYVTGTIGEDEDLIKWKALFEEVPELLTEAEKKEWVEKLTEVSISSDAFFPFRDNVDRAKRGRGGGDIAGSSGLL

SEQ ID NO: 886139 - protein, 435 aa, Homo sapiens
MQSSESKDTSLETRRQLALKAFTHTAQYDEAISDYFRKQYSKGVSQMPLRYGMNPHQTPAQLYTLQPKLPITVLNGAPGFINLCDALNAWQLVKELKEALGIPAAASFKHVSPAGAAVGIPLSEDEAKVCMVYDLYKTLTPISAAYARARGADRMSSFGDFVALSDVCDVPTAKIISREVSDGIIAPGYEEEALTILSKKKNGNYCVLQMDQSYKPDENEVRTLFGLHLSQKRNNGVVDKSLFSNVVTKNKDLPESALRDLIVATIAVKYTQSNSVCYAKNGQVIGIGAGQQSRIHCTRLAGDKANYWWLRHHPQVLSMKFKTGVKRAEISNAIDQYVTGTIGEDEDLIKWKALFEEVPELLTEAEKKEWVEKLTEVSISSDAFFPFRDNVDRAKRSGVAYIAAPSGSAADKVVIEACDELGIILAHTNLRLFHH

SEQ ID NO: 886140 - protein, 391 aa, Homo sapiens
MAPGQLALFSVSDKTGLVEFARNLTALGLNLVASGGTAKALRDAGLAVRDVSELTGFPEMLGGRVKTLHPAVHAGILARNIPEDNADMARLDFNLIRVVACNLYPFVKTVASPGVTVEEAVEQIDIGGVTLLRAAAKNHARVTVVCEPEDYVVVSTEMQSSESKDTSLETRRQLALKAFTHTAQYDEAISDYFRKQYSKGVSQMPLRYGMNPHQTPAQLYTLQPKLPITVLNGAPGFINLCDALNAWQLVKELKEALGIPAAASFKHVSPAGAAVGIPLSEDEAKVCMVYDLYKTLTPISAAYARARGADRMSSFGDFVALSDVCDVPTAKIISREVSDGIIAPGYEEEALTILSKKKNGNYCVLQMDNLTTDEMSSNSLGLIKRKKPGPP

SEQ ID NO: 886141 - protein, 112 aa, Homo sapiens
ASSAAVRLAEPSSQYVTEPGEDEDLIKWKALFEEVPELLTEAEKKEWVEKLTEVSISSDAFFPFRDNVDRAKRSGVAYIAAPSGSAADKVVIEACDELGIILAHTNLRLFHH

SEQ ID NO: 886142 - protein, 1045 aa, Homo sapiens
EQVECVQEGVTMETAYSPGNQNGVLDFFFQKPSGFLTLLDEESQMIWSVESNFPKKLQSLLESSNTNAVYSPMKDGNGNVALKDHGTAFTIMHYAGRVMYDVVGAIEKNKDSLSQNLLFVMKTSENVVINHLFQSKLSQTGSLVSAYPSFKFRGHKSALLSKKMTASSIIGENKNYLELSKLLKKKGTSTFLQRLERGDPVTIASQLRKSLMDIIGKLQKCTPHFIHCIRPNNSKLPDTFDNFYVSAQLQYIGVLEMVKIFRYGYPVRLSFSDFLSRYKPLADTFLREKKEQSAAERCRLVLQQCKLQGWQMGVRKVFLKYWHADQLNDLCLQLQRKIITCQKVIRGFLARQHLLQRISIRQQEVTSINSFLQNTEDMGLKTYDALVIQNASDIARENDRLRSEMNAPYHKEKLEVRNMQEEGSKRTDDKSGPRHFHPSSMSVCAAVDGLGQCLVGPSIWSPSLHSVFSMDDSSSLPSPRKQPPPKPKRDPNTRLSASYEAVSACLSAAREAANEALARPRPHSDDYSTMKKIPPRKPKRSPNTKLSGSYEEISGSRPGDARPAGAPGAAARVLTPGTPQCALPPAAPPGDEDDSEPVYIEMLGHAARPDSPDPGESVYEEMKCCLPDDGGPGAGSFLLHGASPPLLHRAPEDEAAGPPGDACDIPPPFPNLLPHRPPLLVFPPTPVTCSPASDESPLTPLEVKKLPVLETNLKYPVQPEGSSPLSPQYSKSQKGDGDRPASPGLALFNGSGRASPPSTPPPPPPPPGPPPAPYRPCAHLAFPPEPAPVNAGKAGPSAEAPKVHPKPNSAPVAGPCSSFPKIPYSPVKATRADARKAGSSASPPAPYSPPSSRPLSSPLDELASLFNSGRSVLRKSAAGRKIREAEGFETNMNISSRDDPSTSEITSETQDRNANNHGIQLSNSLSSAITAENGNSISNGLPEEDGYSRLSISGTGTSTFQRHRDSHTTQVIHQLRLSENESVALQELLDWRRKLCEEGQDWQQILHHAEPRVPPPPPCKKPSLLKKPEGASCNRLPSELWDTTI

SEQ ID NO: 886143 - protein, 532 aa, Homo sapiens
EQVECVQEGVTMETAYSPGNQNGVLDFFFQKPSGFLTLLDEESQMIWSVESNFPKKLQSLLESSNTNAVYSPMKDGNGNVALKDHGTAFTIMHYAGRVMYDVVGAIEKNKDSLSQNLLFVMKTSENVVINHLFQSKLSQTGSLVSAYPSFKFRGHKSALLSKKMTASSIIGENKNYLELSKLLKKKGTSTFLQRLERGDPVTIASQLRKSLMDIIGKLQKCTPHFIHCIRPNNSKLPDTFDNFYVSAQLQYIGVLEMVKIFRYGYPVRLSFSDFLSRYKPLADTFLREKKEQSAAERCRLVLQQCKLQGWQMGVRKVFLKYWHADQLNDLCLQLQRKIITCQKVIRGFLARQHLLQRISIRQQEVTSINSFLQNTEDMGLKTYDALVIQNASDIARENDRLRSEMNAPYHKEKLEVRNMQEEGSKRTDDKSGPRHFHPSSMSVCAAVDGLGQCLVGPSIWSPSLHSVFSMDDSSSLPSPRKQPPPKPKRDPNTRLSASYEAVSACLSAAREAANEGQPWGGTQPRVPGSRML

SEQ ID NO: 886144 - protein, 213 aa, Homo sapiens
SQRPPLYRITWPESHKNNSFGQDRDFSKGNPGLSQPALLPMEDSFLQSFGRLSLQPQQQQQRQRPPRPPPRGTPPRRHSFRKHLYLLRGLPGSGKTTLARQLQHDFPRALIFSTDDFFFREDGAYEFNPDFLEEAHEWNQKRARKAMRNGISPIIIDNTNLHAWEMKPYAVMVFQTEQKNLFRLEMDMVVFRPEMKKHSWCLKRKNPPNERTV

SEQ ID NO: 886145 - protein, 137 aa, Homo sapiens
MRNGISPIIIDNTNLHAWEMKPYAVMALENNYEVIFREPDTRWKFNVQELARRNIHGVSREKIHRMKERYEHDVTFHSVLHAEKPSRMNRNQDRNNALPSNNARYWNSYTEFPNRRAHGGFTNESSYHRRGGCHHGY

SEQ ID NO: 886146 - protein, 228 aa, Homo sapiens
SQRPPLYRITWPESHKNNSFGQDRDFSKGNPGLSQPALLPMEDSFLQSFGRLSLQPQQQQQRQRPPRPPPRGTPPRRHSFRKHLYLLRGLPGSGKTTLARQLQHDFPRALIFSTDDFFFREDGAYEFNPDFLEEAHEWNQKRARKAMRNGISPIIIDNTNLHAWEMKPYAVMALENNYEVIFREPDTRWKFNVQELARQIVSSKWICGLLHQNCLRWLLKSEFMDPIQ

SEQ ID NO: 886147 - protein, 179 aa, Homo sapiens
SQRPPLYRITWPESHKNNSFGQDRDFSKGNPGLSQPALLPMEDSFLQSFGRLSLQPQQQQQRQRPPRPPPRGTPPRRHSFRKHLYLLRGLPGSGKTTLARQLQHDFPRALIFSTDDFFFREDGAYEFNPDFLEEAHEWNQKRGISDRTKESFQAGNGHGSFQARNEETFMVSQEKKSTE

SEQ ID NO: 886148 - protein, 283 aa, Homo sapiens
SQRPPLYRITWPESHKNNSFGQDRDFSKGNPGLSQPALLPMEDSFLQSFGRLSLQPQQQQQRQRPPRPPPRGTPPRRHSFRKHLYLLRGLPGSGKTTLARQLQHDFPRALIFSTDDFFFREDGAYEFNPDFLEEAHEWNQKRARKAMRNGISPIIIDNTNLHAWEMKPYAVMALENNYEVIFREPDTRWKFNVQELARRNIHGVSREKIHRMKERYEHDVTFHSVLHAEKPSRMNRNQDRNNALPSNNARYWNSYTEFPNRRAHGGFTNESSYHRRGGCHHGY

SEQ ID NO: 886149 - protein, 141 aa, Homo sapiens
SQRPPLYRITWPESHKNNSFGQDRDFSKGNPGLSQPALLPMEDSFLQSFGRLSLQPQQQQQRQRPPRPPPRGTPPRRHSFRKHLYLLRGLPGSGKTTLARDDWSEHWPGSLKIVPSDLLRHLLAGDFGQSSSFSGPYVPYM

SEQ ID NO: 886150 - protein, 283 aa, Homo sapiens; identical to SEQ ID NO: 886148

SEQ ID NO: 886151 - protein, 73 aa, Homo sapiens
SQRPPLYRITWPESHKNNSFGQDRDFSKGNPGLSQPALLPMEDSFLQSFGRLSLQPQQQQQRPWQWPGAGSPL

SEQ ID NO: 886152 - protein, 283 aa, Homo sapiens; identical to SEQ ID NO: 886148

SEQ ID NO: 886153 - protein, 283 aa, Homo sapiens; identical to SEQ ID NO: 886148

SEQ ID NO: 886154 - protein, 73 aa, Homo sapiens; identical to SEQ ID NO: 886151

SEQ ID NO: 886155 - protein, 205 aa, Homo sapiens
SQRPPLYRITWPESHKNNSFGQDRDFSKGNPGLSQPALLPMEDSFLQSFGRLSLQPQQQQQRQRPPRPPPRGTPPRRHSFRKHLYLLRGLPGSGKTTLARQLQHDFPRALIFSTDDFFFREDGAYEFNPDFLEEAHEWNQKRGDKFLPKLLGNPDVHIDCSCCRMNKFYGRSLTESSANFSPKTEHQSITSLDSRERKLLIDSGL

SEQ ID NO: 886156 - protein, 220 aa, Homo sapiens
SQRPPLYRITWPESHKNNSFGQDRDFSKGNPGLSQPALLPMEDSFLQSFGRLSLQPQQQQQRQRPPRPPPRGTPPRRHSFRKHLYLLRGLPGSGKTTLARQLQHDFPRALIFSTDDFFFREDGAYEFNPDFLEEAHEWNQKRARKAMRNGISPIIIDNTNLHAWEMKPYAVMALENNYEVIFREPDTRWKFNVQELARRNIHGVSREKIHRMKERESDLM

SEQ ID NO: 886157 - protein, 73 aa, Homo sapiens
RPSCWHAQMWISKQEYDESGPSIVHRKCTKYGLSRCVAFAAWVNLEWKFAPGKCTHLMLASRNWNKPSKRNCP

SEQ ID NO: 886158 - protein, 73 aa, Homo sapiens; identical to SEQ ID NO: 886157

SEQ ID NO: 886159 - protein, 523 aa, Homo sapiens
ITVDQAECGEVSNCTLTGKDCINGFKRDHNGCRTCQCINTEELCSERKQGCTLNCPFGFLTDAQNCEICECRPRPKKCRPIICDKYCPLGLLKNKHGCDICRCKKCPELSCSKICPLGFQQDSHGCLICKCREASASAGPPILSGTCLTVDGHHHKNEESWHDGCRECYCLNGREMCALITCPVPACGNPTIHPGQCCPSCADDFVVQKPELSTPSICHAPGGEYFVEGETWNIDSCTQCTCHSGRVLCETEVCPPLLCQNPSRTQDSCCPQCTDQPFRPSLSRNNSVPNYCKNDEGDIFLAAESWKPDVCTSCICIDSVISCFSESCPSVSCERPVLRKGQCCPYCIEDTIPKKVVCHFSGKAYADEERWDLDSCTHCYCLQGQTLCSTVSCPPLPCVEPINVEGSCCPMCPEMYVPEPTNIPIEKTNHRGEVDLEVPLWPTPSENDIVHLPRDMGHLQVDYRDNRLHPSEDSSLDSIASVVVPIIICLSIIIAFLFINQKKQWIPLLCWYRTPTKVLSCKS

SEQ ID NO: 886160 - protein, 575 aa, Homo sapiens
ITVDQAECGEVSNCTLTGKDCINGFKRDHNGCRTCQCINTEELCSERKQGCTLNCPFGFLTDAQNCEICECRPRPKKCRPIICDKYCPLGLLKNKHGCDICRCKKCPELSCSKICPLGFQQDSHGCLICKCREASASAGPPILSGTCLTVDGHHHKNEESWHDGCRECYCLNGREMCALITCPVPACGNPTIHPGQCCPSCADDFVVQKPELSTPSICHAPGGEYFVEGETWNIDSCTQCTCHSGRVLCETEVCPPLLCQNPSRTQDSCCPQCTDQPFRPSLSRNNSVPNYCKNDEGDIFLAAESWKPDVCTSCICIDSVISCFSESCPSVSCERPVLRKGQCCPYCIEDTIPKKVVCHFSGKAYADEERWDLDSCTHCYCLQGQTLCSTVSCPPLPCVEPINVEGSCCPMCPEMYVPEPTNIPIEKTNHRGEVDLEVPLWPTPSENDIVHLPRDMGHLQVDYRDNRLHPSEDSSLDSIASVVVPIIICLSIIIAFLFINQKKQWIPLLCWYRTPTKPSSLNNQLVSVDCKKGTRVQVDSSQRMLRIAEPDARFSGFYSMQKQNHLQADNFYQTV

SEQ ID NO: 886161 - protein, 278 aa, Homo sapiens
MTGCALKHTMLHSCWPTASSLLTYMFIFPDQPFRPSLSRNNSVPNYCKNDEGDIFLAAESWKPDVCTSCICIDSVISCFSESCPSVSCERPVLRKGQCCPYCIEDTIPKKVVCHFSGKAYADEERWDLDSCTHCYCLQGQTLCSTVSCPPLPCVEPINVEGSCCPMCPEMYVPEPTNIPIEKTNHRGEVDLEVPLWPTPSENDIVHLPRDMGHLQVDYRDNRLHPSEDSSLDSIASVVVPIIICLSIIIAFLFINQKKQWIPLLCWYRTPTKVLSCKS

SEQ ID NO: 886162 - protein, 510 aa, Homo sapiens
ITVDQAECGEVSNCTLTGKDCINGFKRDHNGCRTCQCINTEELCSERKQGCTLNCPFGFLTDAQNCEICECRPRPKKCRPIICDKYCPLGLLKNKHGCDICRCKKCPELSCSKICPLGFQQDSHGCLICKCREASASAGPPILSGTCLTVDGHHHKNEESWHDGCRECYCLNGREMCALITCPVPACGNPTIHPGQCCPSCADDFVVQKPELSTPSICHAPGGEYFVEGETWNIDSCTQCTCHSGRVLCETEVCPPLLCQNPSRTQDSCCPQCTDQPFRPSLSRNNSVPNYCKNDEGDIFLAAESWKPDVCTSCICIDSVISCFSESCPSVSCERPVLRKGQCCPYCIEMYVPEPTNIPIEKTNHRGEVDLEVPLWPTPSENDIVHLPRDMGHLQVDYRDNRLHPSEDSSLDSIASVVVPIIICLSIIIAFLFINQKKQWIPLLCWYRTPTKPSSLNNQLVSVDCKKGTRVQVDSSQRMLRIAEPDARFSGFYSMQKQNHLQADNFYQTV

SEQ ID NO: 886163 - protein, 555 aa, Homo sapiens
MAAAGAAATHLEVARGKRAALFFAAVAIVLGLPLWWKTTETYRASLPYSQISGLNALQLRLMVPVTVVFTRESVPLDDQEKLPFTVVHEREIPLKYKMKIKCRFQKAYRRALDHEEEALSSGSVQEAEAMLDEPQEQAEGSLTVYVISEHSSLLPQDMMSYIGPKRTAVVRGIMHREAFNIIGRRIVQVAQAMSLTEDVLAAALADHLPEDKWSAEKRRPLKSSLGYEITFSLLNPDPKSHDVYWDIEGAVRRYVQPFLNALGAAGNFSVDSQILYYAMLGVNPRFDSASSSYYLDMHSLPHVINPVESRLGSSAASLYPVLNFLLYVPELAHSPLYIQDKDGAPVATNAFHSPRWGGIMVYNVDSKTYNASVLPVRVEVDMVRVMEVFLAQLRLLFGIAQPQLPPKCLLSGPTSEGLMTWELDRLLWARSVENLATATTTLTSLAQLLGKISNIVIKDDVASEVYKAVAAVQKSAEELASGHLASAFVASQEAVTSSELAFFDPSLLHLLYFPDDQKFAIYIPLFLPMAVPILLSLVKIFLETRKSWRKPEKTD

SEQ ID NO: 886164 - protein, 547 aa, Homo sapiens
MPSEVARGKRAALFFAAVAIVLGLPLWWKTTETYRASLPYSQISGLNALQLRLMVPVTVVFTRESVPLDDQEKLPFTVVHEREIPLKYKMKIKCRFQKAYRRALDHEEEALSSGSVQEAEAMLDEPQEQAEGSLTVYVISEHSSLLPQDMMSYIGPKRTAVVRGIMHREAFNIIGRRIVQVAQAMSLTEDVLAAALADHLPEDKWSAEKRRPLKSSLGYEITFSLLNPDPKSHDVYWDIEGAVRRYVQPFLNALGAAGNFSVDSQILYYAMLGVNPRFDSASSSYYLDMHSLPHVINPVESRLGSSAASLYPVLNFLLYVPELAHSPLYIQDKDGAPVATNAFHSPRWGGIMVYNVDSKTYNASVLPVRVEVDMVRVMEVFLAQLRLLFGIAQPQLPPKCLLSGPTSEGLMTWELDRLLWARSVENLATATTTLTSLAQLLGKISNIVIKDDVASEVYKAVAAVQKSAEELASGHLASAFVASQEAVTSSELAFFDPSLLHLLYFPDDQKFAIYIPLFLPMAVPILLSLVKIFLETRKSWRKPEKTD

SEQ ID NO: 886165 - protein, 535 aa, Homo sapiens
LGTPTATTTLTSLAQLLGKISNIVIKDDVASEVYKAVAAVQKSAEELASGHLASAFVASQEAVTSSELAFFDPSLHHLLYFPDDQKFAIYIPLFLPMVCHPPVPGQDLPGDPQVLEKALRRQTVYVISEHSSLLPQDMMSYIGPKRTAVVRGIMHREAFNIIGRRIVQVAQAMSLTEDVLAAALADHLPEDKWSAEKRRPLKSSLGYEITFSLLNPDPKSHDVYWDIEGAVRRYVQPFLNALGAAGNFSVDSQILYYAMLGVNPRFDSASSSYYLDMHSLPHVINPVESRLGSSAASLYPVLNFLLYVPELAHSPLYIQDKDGAPVATNAFHSPRWGGIMVYNVDSKTYNASVLPVRVEVDMVRVMEVFLAQLRLLFGIAQPQLPPKCLLSGPTSEGLMTWELDRLLWARSVENLATATTTLTSLAQLLGKISNIVIKDDVASEVYKAVAAVQKSAEELASGHLASAFVASQEAVTSSELAFFDPSLLHLLYFPDDQKFAIYIPLFLPMAVPILLSLVKIFLETRKSWRKPEKTD

SEQ ID NO: 886166 - protein, 397 aa, Homo sapiens [sequence omitted]

SEQ ID NO: 886167 - protein, 382 aa, Homo sapiens
QCSSSQFCPPFGSMMESSPIPEEKQVQLSWEYRLPLFFDPQEPLTSLTPVSVGYEITFSLLNPDPKSHDVYWDIEGAVRRYVQPFLNALGAAGNFSVDSQILYYAMLGVNPRFDSASSSYYLDMHSLPHVINPVESRLGSSAASLYPVLNFLLYVPELAHSPLYIQDKDGAPVATNAFHSPRWGGIMVYNVDSKTYNASVLPVRVEVDMVRVMEVFLAQLRLLFGIAQPQLPPKCLLSGPTSEGLMTWELDRLLWARSVENLATATTTLTSLAQLLGKISNIVIKDDVASEVYKAVAAVQKSAEELASGHLASAFVASQEAVTSSELAFFDPSLLHLLYFPDDQKFAIYIPLFLPMAVPILLSLVKIFLETRKSWRKPEKTD

SEQ ID NO: 886168 - protein, 555 aa, Homo sapiens; identical to SEQ ID NO: 886163

SEQ ID NO: 886169 - protein, 555 aa, Homo sapiens; identical to SEQ ID NO: 886163

SEQ ID NO: 886170 - protein, 555 aa, Homo sapiens; identical to SEQ ID NO: 886163

SEQ ID NO: 886171 - protein, 555 aa, Homo sapiens; identical to SEQ ID NO: 886163

SEQ ID NO: 886172 - protein, 277 aa, Homo sapiens
MLGVNPRFDSASSSYYLDMHSLPHVINPVESRLGSSAASLYPVLNFLLYVPELAHSPLYIQDKDGAPVATNAFHSPRWGGIMVYNVDSKTYNASVLPVRVEVDMVRVMEVFLAQLRLLFGIAQPQLPPKCLLSGPTSEGLMTWELDRLLWARSVENLATATTTLTSLAQLLGKISNIVIKDDVASEVYKAVAAVQKSAEELASGHLASAFVASQEAVTSSELAFFDPSLLHLLYFPDDQKFAIYIPLFLPMAVPILLSLVKIFLETRKSWRKPEKTD

SEQ ID NO: 886173 - protein, 555 aa, Homo sapiens; identical to SEQ ID NO: 886163

SEQ ID NO: 886174 - protein, 203 aa, Homo sapiens
MSRWGGIMVYNVDSKTYNASVLPVRVEVDMVRVMEVFLAQLRLLFGIAQPQLPPKCLLSGPTSEGLMTWELDRLLWARSVENLATATTTLTSLAQLLGKISNIVIKDDVASEVYKAVAAVQKSAEELASGHLASAFVASQEAVTSSELAFFDPSLLHLLYFPDDQKFAIYIPLFLPMAVPILLSLVKIFLETRKSWRKPEKTD

SEQ ID NO: 886175 - protein, 479 aa, Homo sapiens
SPAPARQRMKRARREGARSGGWGRAWGSLPGSATAGRTPGRAAAGGARTRAEAAQAMRSLGANMAAALRAAGVLLRDPLASSSWRVCQPWRWKSGAAAAAVTTETAQHAQGAKPQVQPQKRKPKTGILMLNMGGPETLGDVHDFLLRLFLDRDLMTLPIQNKLAPFIAKRRTPKIQEQYRRIGGGSPIKIWTSKQGEGMVKLLDELSPNTAPHKYYIGFRYVHPLTEEAIEEMERDGLERAIAFTQYPQYSCSTTGSSLNAIYRYYNQVGRKPTMKWSTIDRWPTHHLLIQCFADHILKELDHFPLEKRSEVVILFSAHSLPMSVVNRGDPYPQEVSATVQKVMERLEYCNPYRLVWQSKVGPMPWLGPQTDESIKGLCERGRKNILLVPIAFTSDHIETLYELDIEYSQVLAKECGVENIRRAESLNGNPLFSKALADLVHSHIQSNELCSKQLTLSCPLCVNPVCRETKSFFTSQQL

SEQ ID NO: 886176 - protein, 446 aa, Homo sapiens
SPAPARQRMKRARREGARSGGWGRAWGSLPGSATAGRTPGRAAAGGARTRAEAAQAMRSLGANMAAALRAAGVLLRDPLASSSWRVCQPWRWKSGAAAAAVTTETAQHAQGAKPQVQPQKRKPKTGILMLNMGGPETLGDVHDFLLRLFLDRDLMTLPIQNKLAPFIAKRRTPKIQEQYRRIGGGSPIKIWTSKQGEGMVKLLDELSPNTAPHKYYIGFRYVHPLTEEAIEEMERDGLERAIAFTQYPQYSCSTTGSSLNAIYRYYNQVGRKPTMKWSTIDRWPTHHLLIQVVNRGDPYPQEVSATVQKVMERLEYCNPYRLVWQSKVGPMPWLGPQTDESIKGLCERGRKNILLVPIAFTSDHIETLYELDIEYSQVLAKECGVENIRRAESLNGNPLFSKALADLVHSHIQSNELCSKQLTLSCPLCVNPVCRETKSFFTSQQL

SEQ ID NO: 886177 - protein, 371 aa, Homo sapiens
MARYEAGWFLRLFLEQTHDTSYSEGSREHLQEFQAFLLRLFLDRDLMTLPIQNKLAPFIAKRRTPKIQEQYRRIGGGSPIKIWTSKQGEGMVKLLDELSPNTAPHKYYIGFRYVHPLTEEAIEEMERDGLERAIAFTQYPQYSCSTTGSSLNAIYRYYNQVGRKPTMKWSTIDRWPTHHLLIQCFADHILKELDHFPLEKRSEVVILFSAHSLPMSVVNRGDPYPQEVSATVQKVMERLEYCNPYRLVWQSKVGPMPWLGPQTDESIKGLCERGRKNILLVPIAFTSDHIETLYELDIEYSQVLAKECGVENIRRAESLNGNPLFSKALADLVHSHIQSNELCSKQLTLSCPLCVNPVCRETKSFFTSQQL

SEQ ID NO: 886178 - protein, 355 aa, Homo sapiens
SPAPARQRMKRARREGARSGGWGRAWGSLPGSATAGRTPGRAAAGGARTRAEAAQAMRSLGANMAAALRAAGVLLRDPLDELSPNTAPHKYYIGFRYVHPLTEEAIEEMERDGLERAIAFTQYPQYSCSTTGSSLNAIYRYYNQVGRKPTMKWSTIDRWPTHHLLIQCFADHILKELDHFPLEKRSEVVILFSAHSLPMSVVNRGDPYPQEVSATVQKVMERLEYCNPYRLVWQSKVGPMPWLGPQTDESIKGLCERGRKNILLVPIAFTSDHIETLYELDIEYSQVLAKECGVENIRRAESLNGNPLFSKALADLVHSHIQSNELCSKQLTLSCPLCVNPVCRETKSFFTSQQL

SEQ ID NO: 886179 - protein, 435 aa, Homo sapiens
MKRARREGARSGGWGRAWGSLPGSATAGRTPGRAAAGGARTRAEAAQAMRSLGANMAAALRAAGVLLRDPLASSSWRVCQPWRWKSGAAAAAVTTETAQHAQGAKPQVQPQKRKPKTGILMLNMGGPETLGDVHDFLLRLFLDRDLMTLPIQNKLAPFIAKRRTPKIQEQYRRIGGGSPIKIWTSKQGEGMVKLLDELSPNTAPHKYYIGFRYVHPLTEEAIEEMERDGLERAIAFTQYPQYSCSTTGSSLNAIYRYYNQVGRKPTMKWSTIDRWPTHHLLIQCFADHILKELDHFPLEKRSEVVILFSAHSLPMSVVNRGDPYPQEVSATVQKVMERLEYCNPYRLVWQSKVGPMPWLGPQTDESIKGLCERGRKNILLVPIAFTSDHIETLYELDIEYSQVLAKECGVENIRRAESLNGNPLFSKVSTVLQSF

SEQ ID NO: 886180 - protein, 153 aa, Homo sapiens
MKRARREGARSGGWGRAWGSLPGSATAGRTPGRAAAGGARTRAEAAQAMRSLGANMAAALRAAGVLLRDPLASSSWRVCQPWRWKSGAAAAAVTTETAQHAQGAKPQVQPQKRKPKTGILMLNMGGPETLGDVHDFLLRLFLDRDLMTLPIQK

SEQ ID NO: 886181 - protein, 479 aa, Homo sapiens; identical to SEQ ID NO: 886175

SEQ ID NO: 886182 - protein, 492 aa, Homo sapiens
MKRARREGARSGGWGRAWGSLPGSATAGRTPGRAAAGGARTRAEAAQAMRSLGANMAAALRAAGVLLRDPLASSSWRVCQPWRWKSGAAAAAVTTETAQHAQGAKPQVQPQKRKPKTGILMLNMGGPETLGDVHDFLLRLFLDRDLMTLPIQKKHFSGCQAGIKSTYLYVKWFSKLAPFIAKRRTPKIQEQYRRIGGGSPIKIWTSKQGEGMVKLLDELSPNTAPHKYYIGFRYVHPLTEEAIEEMERDGLERAIAFTQYPQYSCSTTGSSLNAIYRYYNQVGRKPTMKWSTIDRWPTHHLLIQCFADHILKELDHFPLEKRSEVVILFSAHSLPMSVVNRGDPYPQEVSATVQKVMERLEYCNPYRLVWQSKVGPMPWLGPQTDESIKGLCERGRKNILLVPIAFTSDHIETLYELDIEYSQVLAKECGVENIRRAESLNGNPLFSKALADLVHSHIQSNELCSKQLTLSCPLCVNPVCRETKSFFTSQQL

SEQ ID NO: 886183 - protein, 393 aa, Homo sapiens
PAETSPADPGGLEASALLPDGGAAGPNLKFNLQKRKPKTGILMLNMGGPETLGDVHDFLLRLFLDRDLMTLPIQNKLAPFIAKRRTPKIQEQYRRIGGGSPIKIWTSKQGEGMVKLLDELSPNTAPHKYYIGFRYVHPLTEEAIEEMERDGLERAIAFTQYPQYSCSTTGSSLNAIYRYYNQVGRKPTMKWSTIDRWPTHHLLIQCFADHILKELDHFPLEKRSEVVILFSAHSLPMSVVNRGDPYPQEVSATVQKVMERLEYCNPYRLVWQSKVGPMPWLGPQTDESIKGLCERGRKNILLVPIAFTSDHIETLYELDIEYSQVLAKECGVENIRRAESLNGNPLFSKALADLVHSHIQSNELCSKQLTLSCPLCVNPVCRETKSFFTSQQL

SEQ ID NO: 886184 - protein, 157 aa, Homo sapiens [sequence omitted]

SEQ ID NO: 886185 - protein, 437 aa, Homo sapiens
SPAPARQRMKRARREGARSGGWGRAWGSLPGSATAGRTPGRAAAGGARTRAEAAQAMRSLGANMAAALRAAGVLLRDPLASSSWRVCQPWRWKSGAAAAAVTTETAQHAQGAKPQVQPQKRKPKTGILMLNMGGPETLGDVHDFLLRLFLDRDLMTLPIQNKLAPFIAKRRTPKIQEQYRRIGGGSPIKIWTSKQGEGMVKLLDELSPNTAPHKYYIGFRYVHPLTEEAIEEMERDGLERAIAFTQYPQYSCSTTGSSLNAIYRYYNQVGRKPTMKWSTIDRWPTHHLLIQCFADHILKELDHFPLEKRSEVVILFSAHSLPMSVVNRGDPYPQEVSATVQKVMERLEYCNPYRLVWQSKVGPMPWLGPQTDESIKGLCERGRKNILLVPIAFTSDHIETLYELDIEYSQVLAKECGVENIRRAESLNGNPLFSKFL

SEQ ID NO: 886186 - protein, 431 aa, Homo sapiens
DLRSAAYLPKLEVGACGNMKRVNSCVKSDEHVLEELETEGERQLKSLLQHQLDTSVSIEECMSKKESFAPGTMYKPFGKEAAGTMTLSQFQTLHEKDQETASLRELGLNETEILIWKSHVSGEKKTKLRATPEAIQNRLQDIEERISERQRILCLPQRFAKSKQLTRREMEIEKSLFQGADRHSFLKALYYQDEPQKKNKGDPMNNLESFYQEMIMKKRLEEFQLMRGEPFASHSLVSATSVGDSGTAESPSLLQDKGKQAAQGKGPSLHVANVIDFSPEQCWTGPKKLTQPIEFVPEDEIQRNRLSEEEIRKIPMFSSYNPGEPNKVLYLKNLSPRVTERDLVSLFARFQEKKGPPIQFRMMTGRMRGQAFITFPNKEIAWQALHLVNGYKLHGKILVIEFGKNKKQRSNLQATSLISCATGSTTEISGS

SEQ ID NO: 886187 - protein, 423 aa, Homo sapiens
DLRSAAYLPKLEVGACGNMKRVNSCVKSDEHVLEELETEGERQLKSLLQHQLDTSVSIEECMSKKESFAPGTMYKPFGKEAAGTMTLSQFQTLHEKDQETASLRELGLNETEILIWKSHVSGEKKTKLRATPEAIQNRLQDIEERISERQRILCLPQRFAKSKQLTRREMEIEKSLFQGADRHSFLKALYYQDEPQKKNKGDPMNNLESFYQEMIMKKRLEEFQLMRGEPFASHSLVSATSVGDSGTAESPSLLQDKGKQAAQGKGPSLHVANVIDFSPEQCWTGPKKLTQPIEFVPEDEIQRNRLSEEEIRKIPMFSSYNPGEPNKVLYLKNLSPRVTERDLVSLFARFQEKKGPPIQFRMMTGRMRGQAFITFPNKEIAWQALHLVNGYKLHGKILVIEFGKNKKQRSNLQATSLISCATG

SEQ ID NO: 886188 - protein, 423 aa, Homo sapiens; identical to SEQ ID NO: 886187

SEQ ID NO: 886189 - protein, 447 aa, Homo sapiens
DLRSAAYLPKLEVGACGNMKRVNSCVKSDEHVLEELETEGERQLKSLLQHQLDTSVSIEECMSKKESFAPGTMYKPFGKEAAGTMTLSQFQTLHEKDQETASLRELGLNETEILIWKSHVSGEKKTKLRATPEAIQNRLQDIEERISERQRILCLPQRFAKSKQLTRREMEIEKSLFQGADRHSFLKALYYQAYHKKTSADKYMTSMKRKIKLGTKDEPQKKNKGDPMNNLESFYQEMIMKKRLEEFQLMRGEPFASHSLVSATSVGDSGTAESPSLLQDKGKQAAQGKGPSLHVANVIDFSPEQCWTGPKKLTQPIEFVPEDEIQRNRLSEEEIRKIPMFSSYNPGEPNKVLYLKNLSPRVTERDLVSLFARFQEKKGPPIQFRMMTGRMRGQAFITFPNKEIAWQALHLVNGYKLHGKILVIEFGKNKKQRSNLQATSLISCATG

SEQ ID NO: 886190 - protein, 1089 aa, Homo sapiens
MQKKSTGKNNYVEEAEWKQNCLVLKNCLQMVRQIHRNKWREREIGNKFNIKNYKHILTLLSASFKDVKLYEVIIIMCVGFVMYRNNIYNNNTTKRGMGLYRNRVVTLELSECLSEAYVCLVKMCMVSPRATTEEITFKKSKILLNVNITFEIMQKKEWRSKKLEAYQKQYNGSHKSSYIKITMCMDYSNTIKGRDVRNKSDSTSCHLFETHFRRKKEIKGKRMENKYITQTTAIRKLEWYSNTRQNRLKKMLLEIRVKCYNDKRVNTSGRCNNYEIYMHLTVEPKIHEAKTERKGETDEVHKKSWNIQYPFFNNRAPRQKINQEIEDLNNIIRQIDLKDIYRTFHPTSEYIFFSSAYENISKIGHKLKHKTSLNKYKRLKSCKACPLTTWDEVRKQGKVGKLTNMWKSDTLVSDLAGCSSSRLKSQHFGRPKWEDSLDPLRPGIQDQPGQHSKTLSLPKKKKNVSKKKIIREITKPFEMSDNEDTTNQNLQDAAKAVFTGKSIGTNACTSEEKRPGTVAYACNPSTLGGRGGWRSWGQEIETILGNMVKTLSLLKIQKISQAWSWAPVVPATREAEAGEWREPGRQSLQCAKIAPLHSSLGSRARLHLKKKKKKKRKTIALTSLYTLRPWKKKSKLNLEPGERRKYKRLDENKGNRVKKSREKSMQPKVDSIKRSVKLTHLLLDCPGKKENQITKIRNEGGNISTELVEIKKIMKAYYEEFYVNKLSMKWTNSKEDTNYQNQLRSRKLEYNLYQVNRLNEFLKRYPQRRAQAEISFLNEFYKTFNEKLIQILHKLFQKVEEWWTLLTHTTTWKNSEYAQCKKPVTKDYILYDTIYMKCPEWQIYRDRKWISGCLGLAQSWGEWEGLGVTVEVYEVSLEVDESVLKLVVVVIYNSEYTKKPGIVHVKWVNCVVYELYLNKTHKSEGCPSIGKWVNNLWYIYLVQYYAAIKIVKCIYEYIMTYTHVQELCIKLINKMRNMYSMNTFLCKSIHLCIVCMYIDISEVNLRKSWEIDIESYKPLEVGLNRLKEDFHFVKFLKWCDFGVIFTFFIFFLTKKFFKKYSANGMASRIFVRPTLGISSDYTQDKLLFL

SEQ ID NO: 886191 - protein, 198 aa, Homo sapiens
DLRSAAYLPKLEVGACGNMKRVNSCVKSDEHVLEELETEGERQLKSLLQHQLDTSVSIEECMSKKESFAPGTMYKPFGKEAAGTMTLSQFQTLHEKDQETASLRELGLNETEILIWKSHVSGEKKTKLRATPEAIQNRLQDIEERISERQRILCLPQRFAKSKQLTRREMEIENIPQKDKCRQVHDLNEEEDKIRHKR

SEQ ID NO: 886192 - protein, 431 aa, Homo sapiens; identical to SEQ ID NO: 886186

SEQ ID NO: 886193 - protein, 269 aa, Homo sapiens
DLRSAAYLPKLEVGACGNMKRVNSCVKSDEHVLEELETEGERQLKSLLQHQLDTSVSIEECMSKKESFAPGTMYKPFGKEAAGTMTLSQFQTLHEKDQETASLRELGLNETEILIWKSHVSGEKKTKLRATPEAIQNRLQDIEERISERQRILCLPQRFAKSKQLTRREMEIEKSLFQGADRHSFLKALYYQESTVSPRLKCRGMISAHCNLHFPGSSNSRASAFRVAGITDVCHHPWLIFIFLVQTRNTKYSPGTVAHAMLAKLVWNS

SEQ ID NO: 886194 - protein, 329 aa, Homo sapiens
DLRSAAYLPKLEVGACGNMKRVNSCVKSDEHVLEELETEGERQLKSLLQHQLDTSVSIEECMSKKESFAPGTMYKPFGKEAAGTMTLSQFQTLHEKDQETASLRELGLNETEILIWKSHVSGEKKTKLRATPEAIQNRLQDIEERISERQRILCLPQRFAKSKQLTRREMEIEKSLFQGADRHSFLKALYYQAYHKKTSADKYMTSMKRKIKLGTKDEPQKKNKGDPMNNLESFYQEMIMKKRLEEFQLMRGLTSFPREDFQNLSYEGTTSVLGAKWQKRTGRTSTFSILLVSLLSETVFTSSAMYGIPHLLTMSLKFSTRIGKLSFTP

SEQ ID NO: 886195 - protein, 423 aa, Homo sapiens; identical to SEQ ID NO: 886187

SEQ ID NO: 886196 - protein, 424 aa, Homo sapiens
DLRSAAYLPKLEVGACGNMKRVNSCVKSDEHVLEELETEGERQLKSLLQHQLDTSVSIEECMSKKESFAPGTMYKPFGKEAAGTMTLSQFQTLHEKDQETASLRELGLNETEILIWKSHVSGEKKTKLRATPEAIQNRLQDIEERISERQRILCLPQRFAKSKQLTRREMEIEKSLFQGADRHSFLKALYYQDEPQKKNKGDPMNNLESFYQEMIMKKRLEEFQLMRGEPFASHSLVSATSVGDSGTAESPSLLQDKGKQAAQGKGPSLHVANVIDFSPEQCWTGPKKLTQPIEFVPEDEIQRNRLSEEEIRKIPMFSSYNPGEPNKVLYLKNLSPRVTERDLVSLFARFQEKKGPPIQFRMMTGRMRGQAFITFPNKEIAWQALHLVNGYKLHGKILVIEFGKNKKQRSNLQATSLISCATGI

SEQ ID NO: 886197 - protein, 1013 aa, Homo sapiens
MKTSHIIKNQENLLLADLTCWKYKRKFFSLKASDHRQKSESTHMQKKSTGKNNYVEEAEWKQNCLVLKNCLQMVRQIHRNKWREREIGNKFNIKNYKHILTLLSASFKDVKLYEVIIIMCVGFVMYRNNIYNNNTTKRGMGLYRNEGCYIGIKLVFIGSLFCLVKMCMVSPRATTEEITFKKSKILLNVNITFEIMQKKEWRSKKLEAYQKQENGSHKSSYIKITMCMDYSNTIKGRDVRNKSDSTSCHLFETHFRRKKEIKGKRMENKYITQTTAIRKLEWYSNTRQNRLKKMLLEIKSKMFNDKRVNTSGRCNNYTIYMHLTVEPKIHEAKTERKGETDEVHKKSWNIQYPFFNNRAPRQKINQEIEDLNNIIRQIDLKDIYRTFHPTSEYIFFSSAYENISKIGHKLKHKTSLNKYKRLKSCKACPLTTWDEVRKQGKVGKLTNMWKSDTLVSDLAGCSSSRLKSQHFGRPKWEDSLDPLRPGIQDQPGQHSKTLSLPKKKKNVSKKKIIREITKPFEMSDNEDTTNQNLQDAAKAVFTGKSIGTNACTEEEKRPGTVAYACNPSTLGGRGGWRSWGQEIETILGNMVKTLSLLKIQKISQAWSWAPVVPATREAEAGEWREPGRQSLQGAKIAPLHSSLGSRARLHLKKKKKKKRKTIALTSLYTLRPWKKKSKLNLEPGERRKYKRLDENKGNRVKKSREKSMQPKVDSIKRSVKLTHLLLDCPGKKENQITKIRNEGGNISTELVEIKKIMKAYYEEFYVNKLSMKWTNSKEDTNYQNQLRSRKLEYNLYQVNRLNEFLKRYPQRRAQAEISFLNEFYKTFNEKLIQILHKLFQKVEEWGTLLTHTTTWKNSEYAQCKKPVTKDYILYDTIYMKCPEWQIYRDRKWISGCLGLAQSWGEWEGLGVTVEVYEVSLEVDESVLKLVVVVIYNSEYTKKPGIVHVKWVNCVVYELYLNKTHKSEGCPSIGKWVNNLWYIYLVQYYAAIKIVKCIYEYIMTYTHVQGCVLS

SEQ ID NO: 886198 - protein, 424 aa, Homo sapiens; identical to SEQ ID NO: 886196

SEQ ID NO: 886199 - protein, 328 aa, Homo sapiens
DLRSAAYLPKLEVGACGNMKRVNSCVKSDEHVLEELETEGERQLKSLLQHQLDTSVSIEECMSKKESFAPGTMYKPFGKEAAGTMTLSQFQTLHEKDQETASLRELGLNETEILIWKSHVSGEKKTKLRATPEAIQNRLQDIEERISERQRILCLPQRFAKSKQLTRREMEIEKSLFQGADRHSFLKALYYQDEPQKKNKGDPMNNLESFYQEMIMKKRLEEFQLMRGEPFASHSLVSATSVGDSGTAESPSLLQDKGKQAAQGKGPSLHVANVIDFSPEQCWTGPKKLTQPIEFVPEDEIQRNRLSEEEIRKIPMFSSYNPGEPNKV

SEQ ID NO: 886200 - protein, 390 aa, Homo sapiens
GSGRWEPVGPRTQPPRRGRRDRVPGMSLIRKKGFYKQDVNKTAWELPKTYVSPTHVGSGAYGSVCSAIDKRSGEKVAIKKLSRPFQSEIFAKRAYRELLLLKHMQHENVIGLLDVFTPASSLRNFYDFYLVMPFMQTDLQKIMGMEFSEEKIQYLVYQMLKGLKYIHSAGVVHRDLKPGNLAVNEDCELKILDFGLARHADAEMTGYVVTRWYRAPEVILSWMHYNQTVDIWSVGCIMAEMLTGKTLFKGKDYLDQLTQILKVTGVPGTEFVQKLNDKAAKSYIQSLPQTPRKDFTQLFPRASPQAADLLEKMLELDVDKRLTAAQALTHPFFEPFRDPEEETEAQQPFDDSLEHEKLTVDEWKQHIYKEIVNFSPIARKDSRRRSGMKL

SEQ ID NO: 886201 - protein, 83 aa, Homo sapiens
FLRASVPSIPSFEEQRVSLLGPESSMKTDSSGVPGQGLPGVDWGGAAPSEGQHKGRQKWRNSPRKGKPSVHQCPELPDGGTAP

SEQ ID NO: 886202 - protein, 385 aa, Homo sapiens
ASFSVKPPWYPDLRRDRVPGMSLIRKKGFYKQDVNKTAWELPKTYVSPTHVGSGAYGSVCSAIDKRSGEKVAIKKLSRPFQSEIFAKRAYRELLLLKHMQHENVIGLLDVFTPASSLRNFYDFYLVMPFMQTDLQKIMGMEFSEEKIQYLVYQMLKGLKYIHSAGVVHRDLKPGNLAVNEDCELKILDFGLARHADAEMTGYVVTRWYRAPEVILSWMHYNQTVDIWSVGCIMAEMLTGKTLFKGKDYLDQLTQILKVTGVPGTEFVQKLNDKAAKSYIQSLPQTPRKDFTQLFPRASPQAADLLEKMLELDVDKRLTAAQALTHPFFEPFRDPEEETEAQQPFDDSLEHEKLTVDEWKQHIYKEIVNFSPIARKDSRRRSGMKL

SEQ ID NO: 886203 - protein, 390 aa, Homo sapiens; identical to SEQ ID NO: 886200

SEQ ID NO: 886204 - protein, 390 aa, Homo sapiens; identical to SEQ ID NO: 886200

SEQ ID NO: 886205 - protein, 356 aa, Homo sapiens
MSEDVNKTAWELPKTYVSPTHVGSGAYGSVCSAIDKRSGEKVAIKKLSRPFQSEIFAKRAYRELLLLKHMQHENVIGLLDVFTPASSLRNFYDFYLVMPFMQTDLQKIMGMEFSEEKIQYLVYQMLKGLKYIHSAGVVHRDLKPGNLAVNEDCELKILDFGLARHADAEMTGYVVTRWYRAPEVILSWMHYNQTVDIWSVGCIMAEMLTGKTLFKGKDYLDQLTQILKVTGVPGTEFVQKLNDKAAKSYIQSLPQTPRKDFTQLFPRASPQAADLLEKMLELDVDKRLTAAQALTHPFFEPFRDPEEETEAQQPFDDSLEHEKLTVDEWKQHIYKEIVNFSPIARKDSRRRSGMKL

SEQ ID NO: 886206 - protein, 357 aa, Homo sapiens
MDVAAPGAVPLSQLLPGFLLPALRPAAPPYSSSAIDKRSGEKVAIKKLSRPFQSEIFAKRAYRELLLLKHMQHENVIGLLDVFTPASSLRNFYDFYLVMPFMQTDLQKIMGMEFSEEKIQYLVYQMLKGLKYIHSAGVVHRDLKPGNLAVNEDCELKILDFGLARHADAEMTGYVVTRWYRAPEVILSWMHYNQTVDIWSVGCIMAEMLTGKTLFKGKDYLDQLTQILKVTGVPGTEFVQKLNDKAAKSYIQSLPQTPRKDFTQLFPRASPQAADLLEKMLELDVDKRLTAAQALTHPFFEPFRDPEEETEAQQPFDDSLEHEKLTVDEWKQHIYKEIVNFSPIARKDSRRRSGMKL

SEQ ID NO: 886207 - protein, 364 aa, Homo sapiens
GSGRWEPVGPRTQPPRRGRRDRVPGMSLIRKKGFYKQDVNKTAWELPKTYVSPTHVGSGAYGSVCSAIDKRSGEKVAIKKLSRPFQSEIFAKRAYRELLLLKHMQHENVIGLLDVFTPASSLRNFYDFYLVMPFMQTDLQKIMGMEFSEEKIQYLVYQMLKGLKILDFGLARHADAEMTGYVVTRWYRAPEVILSWMHYNQTVDIWSVGCIMAEMLTGKTLFKGKDYLDQLTQILKVTGVPGTEFVQKLNDKAAKSYIQSLPQTPRKDFTQLFPRASPQAADLLEKMLELDVDKRLTAAQALTHPFFEPFRDPEEETEAQQPFDDSLEHEKLTVDEWKQHIYKEIVNFSPIARKDSRRRSGMKL

SEQ ID NO: 886208 - protein, 390 aa, Homo sapiens; identical to SEQ ID NO: 886200

SEQ ID NO: 886209 - protein, 329 aa, Homo sapiens
GSGRWEPVGPRTQPPRRGRRDRVPGMSLIRKKGFYKQDVNKTAWELPKTYVSPTHVGSGAYGSVCSAIDKRSGEKVAIKKLSRPFQSEIFAKRAYRELLLLKHMQHENVIGLLDVFTPASSLRNFYDFYLVMPFMQTDLQKIMGMEFSEEKIQYLVYQMLKGLKYIHSAGVVHRDLKPGNLAVNEDCELKILDFGLARHADAEMTGYVVTRWYRAPEVILSWMHYNQTVDIWSVGCIMAEMLTGKTLFKGKDYLDQLTQILKVTGVPGTEFVQKLNDKAAKSYIQSLPQTPRKDFTQLFPRASPQAIPSLNPSGTLRKRRRPSSRLMIP

SEQ ID NO: 886210 - protein, 282 aa, Homo sapiens
GSGRWEPVGPRTQPPRRGRRDRVPGMSLIRKKGFYKQDVNKTAWELPKTYVSPTHVGSGAYGSVCSAIDKRSGEKVAIKKLSRPFQSEIFAKRAYRELLLLKHMQHENVIGLLDVFTPASSLRNFYDFYLVMPFMQTDLQKIMGMEFSEEKIQYLVYQMLKGLKYIHSAGVVHRDLKPGNLAVNEDCELKILDFGLARHADAEMTGYVVTRWYRAPEVILSWMHYNQTGQILHPVPATDPQEGFHSAVPTGQPPGCGPAGEDAGARRGQAPDGRAGPHPSLL

SEQ ID NO: 886211 - protein, 422 aa, Homo sapiens
AEGKQLRAPFFCAGVAPWGRGRAAPRCASATVGGSGIGRLRGITSSGLKMDNKKRLAYAIIQFLHDQLRHGGLSSDAQESLEVAIQCLETAFGVTVEDSDLALPQTLPEIFEAAATGKEMPQDLRSPARTPPSEEDSAEAERLKTEGNEQMKVENFEAAVHFYGKAIELNPANAVYFCNRAAAYSKLGNYAGAVQDCERAICIDPAYSKAYGRMGLALSSLNKHVEAVAYYKKALELDPDNETYKSNLKIAELKAAGGPQPHGRRGQLRHRRPAEQPWLHEHGFEPNEQSPDSAAHVRHDFGWQQPLGNSRHQPLAERPGQPHPGGPAVCPADAAAEPRVDRAAQEPDPESDAQRQQRRPAGVTLPAPGVTASFPGRPEGSLLVVCHFLLLDCLREGKRETSDLHVKMDFPLLSLPSSTPFL

SEQ ID NO: 886212 - protein, 422 aa, Homo sapiens; identical to SEQ ID NO: 886211

SEQ ID NO: 886213 - protein, 208 aa, Homo sapiens
AEGKQLRAPFFCAGVAPWGRGRAAPRCASATVGGSGIGRLRGITSSGLKMDNKKRLAYAIIQFLHDQLRHGGLSSDAQESLEVAIQCLETAFGVTVEDSDLALPQTLPEIFEAAATGKEMPQDLRSPARTPPSEEDSAEAERLKTEGNEQMKVENFEAAVHFYGKAIELNPANAVYFCNRSRSLQQNSGNYFKPPVQGTFKRGPFLVF

SEQ ID NO: 886214 - protein, 105 aa, Homo sapiens
SSPLLTQGELQEAPSPTGGVGSFDIAGLLNNPGFMSMASNLMNNPQIQQLMSGMISGGNNPLGTPGTSPSQNDLASLIQAGQQFAQQMQQLAPELQLAPELAARP

SEQ ID NO: 886215 - protein, 422 aa, Homo sapiens; identical to SEQ ID NO: 886211

SEQ ID NO: 886216 - protein, 422 aa, Homo sapiens; identical to SEQ ID NO: 886211

SEQ ID NO: 886217 - protein, 391 aa, Homo sapiens
DPRVRIGRLRGITSSGLKMDNKKRLAYAIIQFLHDQLRHGGLSSDAQESLEVAIQCLETAFGVTVEDSDLALPQTLPEIFEAAATGKEMPQDLRSPARTPPSEEDSAEAERLKTEGNEQMKVENFEAAVHFYGKAIELNPANAVYFCNRAAAYSKLGNYAGAVQDCERAICIDPAYSKAYGRMGLALSSLNKHVEAVAYYKKALELDPDNETYKSNLKIAELKAAGGPQPHGRRGQLRHRRPAEQPWLHEHGFEPNEQSPDSAAHVRHDFGWQQPLGNSRHQPLAERPGQPHPGGPAVCPADAAAEPRVDRAAQEPDPESDAQRQQRRPAGVTLPAPGVTASFPGRPEGSLLVVCHFLLLDCLREGKRETSDLHVKMDFPLLSLPSSTPFL

SEQ ID NO: 886218 - protein, 391 aa, Homo sapiens
SVGLGIGRLRGITSSGLKMDNKKRLAYAIIQFLHDQLRHGGLSSDAQESLEVAIQCLETAFGVTVEDSDLALPQTLPEIFEAAATGKEMPQDLRSPARTPPSEEDSAEAERLKTEGNEQMKVENFEAAVHFYGKAIELNPANAVYFCNRAAAYSKLGNYAGAVQDCERAICIDPAYSKAYGRMGLALSSLNKHVEAVAYYKKALELDPDNETYKSNLKIAELKAAGGPQPHGRRGQLRHRRPAEQPWLHEHGFEPNEQSPDSAAHVRHDFGWQQPLGNSRHQPLAERPGQPHPGGPAVCPADAAAEPRVDRAAQEPDPESDAQRQQRRPAGVTLPAPGVTASFPGRPEGSLLVVCHFLLLDCLREGKRETSDLHVKMDFPLLSLPSSTPFL

SEQ ID NO: 886219 - protein, 373 aa, Homo sapiens
MDNKKRLAYAIIQFLHDQLRHGGLSSDAQESLEVAIQCLETAFGVTVEDSDLALPQTLPEIFEAAATGKEMPQDLRSPARTPPSEEDSAEAERLKTEGNEQMKVENFEAAVHFYGKAIELNPANAVYFCNRAAAYSKLGNYAGAVQDCERAICIDPAYSKAYGRMGLALSSLNKHVEAVAYYKKALELDPDNETYKSNLKIAELKAAGGPQPHGRRGQLRHRRPAEQPWLHEHGFEPNEQSPDSAAHVRHDFGWQQPLGNSRHQPLAERPGQPHPGGPAVCPADAAAEPRVDRAAQEPDPESDAQRQQRRPAGVTLPAPGVTASFPGRPEGSLLVVCHFLLLDCLREGKRETSDLHVKMDFPLLSLPSSTPFL

SEQ ID NO: 886220 - protein, 373 aa, Homo sapiens; identical to SEQ ID NO: 886219

SEQ ID NO: 886221 - protein, 427 aa, Homo sapiens
AEGKQLRAPFFCAGVAPWGRGRAAPRCASATVGGSGIGRLRGITSSGLKMDNKKRLAYAIIQFLHDQLRHGGLSSDAQESLEVAIQCLETAFGVTVEDSDLALPQTLPEIFEAAATGKEMPQDLRSPARTPPSEEDSAEAERLKTEGNEQMKVENFEAAVHFYGKAIELNPANAVYFCNRAAAYSKLGNYAGAVQDCERAICIDPAYSKAYGRMGLALSSLNKHVEAVAYYKKALELDPDNETYKSNLKIAELKAAGGPQPHGRRGQLRHRRPAEQPWLHEHGFEPNEQSPDSAAHVRHDFGWQQPLGNSRHQPLAERPGQPHPGGPAVCPADAAAEPRVDRAAQEPDPESDAQRQQRRPAGVTLPAPGVTASFPGRPEGSLLVVCHFLLLDCLREGKRETSDLHVKISSLESRLDCRQRLTRSVKT

SEQ ID NO: 886222 - protein, 378 aa, Homo sapiens
AEGKQLRAPFFCAGVAPWGRGRAAPRCASATVGGSGIGRLRGITSSGLKMDNKKRLAYAIIQFLHDQLRHGGLSSDAQESLEVAIQCLETAFGVTVEDSDLALPQTLPEIFEAAATGKEMPQDLRSPARTPPSEEDSAEAERLKTEGNEQMKVENFEAAVHFYGKAIELNPANAVYFCNRAAAYSKLGNYAGAVQDCERAICIDPAYSKAYGRMGLALSSLNKHVEAVAYYKKALELDPDNETYKSNLKIAELKAAGGPQPHGRRGQLRHRRPAEQPWLHEHGFEPNEQSPDSAAHVRHDFGWQQPLGNSRHQPLAERPGQPHPGGPAVCPADAAAEPRVDRAAQEPDPESDAQRQQRRPAGVTLPAPGVTASFPGRL

SEQ ID NO: 886223 - protein, 286 aa, Homo sapiens
AEGKQLRAPFFCAGVAPWGRGRAAPRCASATVGGSGIGRLRGITSSGLKMDNKKRLAYAIIQFLHDQLRHGGLSSDAQESLEVAIQCLETAFGVTVEDSDLALPQTLPEIFEAAATGKEMPQDLRSPARTPPSEEDSAEAERLKTEGNEQMKVENFEAAVHFYGKAIELNPANAVYFCNRAAAYSKLGNYAGAVQDCERAICIDPAYSKAYGRMGLALSSLNKHVEAVAYYKKALELDPDNETYKSNLKIAELKAAGGPQPHGRRGQLRHRRPAEQPWLHEHACPA

SEQ ID NO: 886224 - protein, 322 aa, Homo sapiens
MTSSGTGASRPMLRRAWKEMPQDLRSPARTPPSEEDSAEAERLKTEGNEQMKVENFEAAVHFYGKAIELNPANAVYFCNRAAAYSKLGNYAGAVQDCERAICIDPAYSKAYGRMGLALSSLNKHVEAVAYYKKALELDPDNETYKSNLKIAELKAAGGPQPHGRRGQLRHRRPAEQPWLHEHGFEPNEQSPDSAAHVRHDFGWQQPLGNSRHQPLAERPGQPHPGGPAVCPADAAAEPRVDRAAQEPDPESDAQRQQRRPAGVTLPAPGVTASFPGRPEGSLLVVCHFLLLDCLREGKRETSDLHVKMDFPLLSLPSSTPFL

SEQ ID NO: 886225 - protein, 414 aa, Homo sapiens
MYHAAFVVFIQWTHESIRAMRTSASVQIPCHGPGSGARVTCLDRECVRKMTLGKLSSSMMSMGVTGVYGDVTVRNDMMDALRHRASRLPGRRVILTELGVAYGGHMEDCRPGPLKEAPEQKRPPSEEDSAEAERLKTEGNEQMKVENFEAAVHFYGKAIELNPANAVYFCNRAAAYSKLGNYAGAVQDCERAICIDPAYSKAYGRMGLALSSLNKHVEAVAYYKKALELDPDNETYKSNLKIAELKAAGGPQPHGRRGQLRHRRPAEQPWLHEHGFEPNEQSPDSAAHVRHDFGWQQPLGNSRHQPLAERPGQPHPGGPAVCPADAAAEPRVDRAAQEPDPESDAQRQQRRPAGVTLPAPGVTASFPGRPEGSLLVVCHFLLLDCLREGKRETSDLHVKMDFPLLSLPSSTPFL

SEQ ID NO: 886226 - protein, 362 aa, Homo sapiens
AEGKQLRAPFFCAGVAPWGRGRAAPRCASATVGGSGIGRLRGITSSGLKMDNKKRLAYAIIQFLHDQLRHGGLSSDAQESLEVAIQCLETAFGVTVEDSDLALPQTLPEIFEAAATGKEMPQDLRSPARTPPSEEDSAEAERLKTEGNEQMKVENFEAAVHFYGKAIELNPANAVYFCNRAAAYSKLGNYAGAVQDCERAICIDPAYSKAYGRMGLALSSLNKHVEAVAYYKKALELDPDNETYKSNLKIAELKAAGGPQPHGRRGQLRHRRPAEQPWLHEHGFEPNEQSPDSAAHVRHDFGWQQPLGNSRHQPLAERPGQPHPGGPAVCPADAAAEPRVDRAAQEPDPDILGLPGSWPSVR

SEQ ID NO: 886227 - protein, 338 aa, Homo sapiens
AEGKQLRAPFFCAGVAPWGRGRAAPRCASATVGGSGIGRLRGITSSGLKMDNKKRLAYAIIQFLHDQLRHGGLSSDAQESLEVAIQCLETAFGVTVEDSDLALPQTLPEIFEAAATGKEMPQDLRSPARTPPSEEDSAEAERLKTEGNEQMKVENFEAAVHFYGKAIELNPANAVYFCNRAAAYSKLGNYAGAVQDCERAICIDPAYSKAYGRMGLALSSLNKHVEAVAYYKKALELDPDNETYKSNLKIAELKAAGGPQPHGRRGQLRHRRPAEQPWLHEHGFEPNEQSPDSAAHVRHDFGWQQPLGNSRHQPLAERPGQPHPGGPAVCPADAAARP

SEQ ID NO: 886228 - protein, 115 aa, Homo sapiens
MTFCPGRLSPGHREGSWAVSVCVPSCCPSVLDVSWARGPPGKLTPPVLGGGHGTPQVPPTLALKQPPGKQPESRTAGSLSGFLRPGGGRRAHGAVVPAAGLSVGASWGSLAPGRL

SEQ ID NO: 886229 - protein, 334 aa, Homo sapiens
AEGKQLRAPFFCAGVAPWGRGRAAPRCASATVGGSGIGRLRGITSSGLKMDNKKRLAYAIIQFLHDQLRHGGLSSDAQESLEVAIQCLETAFGVTVEDSDLALPQTLPEIFEAAATGKEMPQDLRSPARTPPSEEDSAEAERLKTEGNEQMKVENFEAAVHFYGKAIELNPANAVYFCNRAAAYSKLGNYAGAVQDCERAICIDPAYSKAYGRMGLALSSLNKHVEAVAYYKKALELDPDNETYKSNLKIAELKAAGGPQPHGRRGQLRHRRPAEQPWLHEHGFEPNEQSPDSAAPVWVPEAWGWQTSPRRRGPSSRVVSRSILGLPGSWPSVR

SEQ ID NO: 886230 - protein, 77 aa, Homo sapiens
MDNKKRLAYAIIQFLHDQLRHGGLSSDAQESLEVAIQCLETAFGVTVEDSDLALPQTLPEIFEAAATGKVSLDASPA

SEQ ID NO: 886231 - protein, 1234 aa, Homo sapiens
CCRRCCRPRPPRGNGRQVAVEGPPLPSVVCGSWGCLPAQPRRPTPTMVPCWNHGNITRSKAEELLSRTGKDGSFLVRASESISRAYALCVLYRNCVYTYRILPNEDDKFTVQASEGVSMRFFTKLDQLIEFYKKENMGLVTHLQYPVPLEEEDTGDDPEEDTESVVSPPELPPRNIPLTASSCEAKEVPFSNENPRATETSRPSLSETLFQRLQSMDTSGLPEEHLKAIQDYLSTQLAQDSEFVKTGSSSLPHLKKLTTLLCKELYGEVIRTLPSLESLQRLFDQQLSPGLRPRPQVPGEANPINMVSKLSQLTSLLSSIEDKVKALLHEGPESPHRPSLIPPVTFEVKAESLGIPQKMQLKVDVESGKLIIKKSKDGSEDKFYSHKKILQLIKSQKFLNKLVILVETEKEKILRKEYVFADSKKREGFCQLLQQMKNKHSEQPEPDMITIFIGTWNMGNAPPPKKITSWFLSKGQGKTRDDSADYIPHDIYVIGTQEDPLSEKEWLEILKHSLQEITSVTFKTVAIHTLWNIRIVVLAKPEHENRISHICTDNVKTGIANTLGNKGAVGVSFMFNGTSLGFVNSHLTSGSEKKLRRNQNYMNILRFLALGDKKLSPFNITHRFTHLFWFGDLNYRVDLPTWEAETIIQKIKQQQYADLLSHDQLLTERREQKVFLHFEEEEITFAPTYRFERLTRDKYAYTKQKATGMKYNLPSWCDRVLWKSYPLVHVVCQSYGSTSDIMTSDHSPVFATFEAGVTSQFVSKNGPGTVDSQGQIEFLRCYATLKTKSQTKFYLEFHSSCLESFVKSQEGENEEGSEGELVVKFGETLPKLKPIISDPEYLLDQHILISIKSSDSDESYGEGCIALRLEATETQLPIYTPLTHHGELTGHFQGEIKLQTSQGKTREKLYDFVKTERDESSGPKTLKSLTSHDPMKQWEVTSRAPPCSGSSITEIINPNYMGVGPFGPPMPLHVKQTLSPDQQPTAWSYDQPPKDSPLGPCRGESPPTPPGQPPISPKKFLPSTANRGLPPRTQESRPSDLGKNAGDTLPQEDLPLTKPEMFENPLYGSLSSFPKPAPRKDQESPKMPRKEPPPCPEPGILSPSIVLTKAQEADRGEGPGKQVPAPRLRSFTCSSSAEGRAAGGDKSQGKPKTPVSSQAPVPAKRPIKPSRSEINQQTPPTPTPRPPLPVKSPAVLHLQHSKGRDYRDNTELPHHGKHRPEEGPPGPLGRTAMQ

SEQ ID NO: 886232 - protein, 1359 aa, Homo sapiens
LGHGIPRGCQHGRRRTTSLAHPCLLGHASSEVATTLLTSPEPVIPPRGTSAATGHFNCTLRPVARKERAGKKAAAAVAGCMGRWTARAPPSLSFSLSLLLGFCNEEVLRSSVSFSLTERLKQEVSQLSWWQQPRPPRGNGRQVAVEGPPLPSVVCGSWGCLPAQPRRPTPTMVPCWNHGNITRSKAEELLSRTGKDGSFLVRASESISRAYALCVLYRNCVYTYRILPNEDDKFTVQASEGVSMRFFTKLDQLIEFYKKENMGLVTHLQYPVPLEEEDTGDDPEEDTESVVSPPELPPRNIPLTASSCEAKEVPFSNENPRATETSRPSLSETLFQRLQSMDTSGLPEEHLKAIQDYLSTQLAQDSEFVKTGSSSLPHLKKLTTLLCKELYGEVIRTLPSLESLQRLFDQQLSPGLRPRPQVPGEANPINMVSKLSQLTSLLSSIEDKVKALLHEGPESPHRPSLIPPVTFEVKAESLGIPQKMQLKVDVESGKLIIKKSKDGSEDKFYSHKKILQLIKSQKFLNKLVILVETEKEKILRKEYVFADSKKREGFCQLLQQMKNKHSEQPEPDMITIFIGTWNMGNAPPPKKITSWFLSKGQGKTRDDSADYIPHDIYVIGTQEDPLSEKEWLEILKHSLQEITSVTFKTVAIHTLWNIRIVVLAKPEHENRISHICTDNVKTGIANTLGNKGAVGVSFMFNGTSLGFVNSHLTSGSEKKLRRNQNYMNILRFLALGDKKLSPFNITHRFTHLFWFGDLNYRVDLPTWEAETIIQKIKQQQYADLLSHDQLLTERREQKVFLHFEEEEITFAPTYRFERLTRDKYAYTKQKATGMKYNLPSWCDRVLWKSYPLVHVVCQSYGSTSDIMTSDHSPVFATFEAGVTSQFVSKNGPGTVDSQGQIEFLRCYATLKTKSQTKFYLEFHSSCLESFVKSQEGENEEGSEGELVVKFGETLPKLKPIISDPEYLLDQHILISIKSSDSDESYGEGCIALRLEATETQLPIYTPLTHHGELTGHFQGEIKLQTSQGKTREKLYDFVKTERDESSGPKTLKSLTSHDPMKQWEVTSRAPPCSGSSITEIINPNYMGVGPFGPPMPLHVKQTLSPDQQPTAWSYDQPPKDSPLGPCRGESPPTPPGQPPISPKKFLPSTANRGLPPRTQESRPSDLGKNAGDTLPQEDLPLTKPEMFENPLYGSLSSFPKPAPRKDQESPKMPRKEPPPCPEPGILSPSIVLTKAQEADRGEGPGKQVPAPRLRSFTCSSSAEGRAAGGDKSQGKPKTPVSSQAPVPAKRPIKPSRSEINQQTPPTPTPRPPLPVKSPAVLHLQHSKGRDYRDNTELPHHGKHRPEEGPPGPLGRTAMQ

SEQ ID NO: 886233 - protein, 976 aa, Homo sapiens
MFTLSPAPREVIRTLPSLESLQRLFDQQLSPGLRPRPQVPGEANPINMVSKLSQLTSLLSSIEDKVKALLHEGPESPHRPSLIPPVTFEVKAESLGIPQKMQLKVDVESGKLIIKKSKDGSEDKFYSHKKILQLIKSQKFLNKLVILVETEKEKILRKEYVFADSKKREGFCQLLQQMKNKHSEQPEPDMITIFIGTWNMGNAPPPKKITSWFLSKGQGKTRDDSADYIPHDIYVIGTQEDPLSEKEWLEILKHSLQEITSVTFKTVAIHTLWNIRIVVLAKPEHENRISHICTDNVKTGIANTLGNKGAVGVSFMFNGTSLGFVNSHLTSGSEKKLRRNQNYMNILRFLALGDKKLSPFNITHRFTHLFWFGDLNYRVDLPTWEAETIIQKIKQQQYADLLSHDQLLTERREQKVFLHFEEEEITFAPTYRFERLTRDKYAYTKQKATGMKYNLPSWCDRVLWKSYPLVHVVCQSYGSTSDIMTSDHSPVFATFEAGVTSQFVSKNGPGTVDSQGQIEFLRCYATLKTKSQTKFYLEFHSSCLESFVKSQEGENEEGSEGELVVKFGETLPKLKPIISDPEYLLDQHILISIKSSDSDESYGEGCIALRLEATETQLPIYTPLTHHGELTGHFQGEIKLQTSQGKTREKLYDFVKTERDESSGPKTLKSLTSHDPMKQWEVTSRAPPCSGSSITEIINPNYMGVGPFGPPMPLHVKQTLSPDQQPTAWSYDQPPKDSPLGPCRGESPPTPPGQPPISPKKFLPSTANRGLPPRTQESRPSDLGKNAGDTLPQEDLPLTKPEMFENPLYGSLSSFPKPAPRKDQESPKMPRKEPPPCPEPGILSPSIVLTKAQEADRGEGPGKQVPAPRLRSFTCSSSAEGRAAGGDKSQGKPKTPVSSQAPVPAKRPIKPSRSEINQQTPPTPTPRPPLPVKSPAVLHLQHSKGRDYRDNTELPHHGKHRPEEGPPGPLGRTAMQ

SEQ ID NO: 886234 - protein, 1007 aa, Homo sapiens
MVPCWNHGNITRSKAEELLSRTGKDGSFLVRASESISRAYALCVLYRNCVYTYRILPNEDDKFTVQASEGVSMRFFTKLDQLIEFYKKENMGLVTHLQYPVPLEEEDTGDDPEEDTESVVSPPELPPRNIPLTASSCEAKEVPFSNENPRATETSRPSLSETLFQRLQSMDTSGLPEEHLKAIQDYLSTQLAQDSEFVKTGSSSLPHLKKLTTLLCKELYGEVIRTLPSLESLQRLFDQQLSPGLRPRPQVPGEANPINMVSKLSQLTSLLSSIEDKVKALLHEGPESPHRPSLIPPVTFEVKAESLGIPQKMQLKVDVESGKLIIKKSKDGSEDKFYSHKKILQLIKSQKFLNKLVILVETEKEKILRKEYVFADSKKREGFCQLLQQMKNKHSEQPEPDMITIFIGTWNMGNAPPPKKITSWFLSKGQGKTRDDSADYIPHDIYVIGTQEDPLSEKEWLEILKHSLQEITSVTFKTVAIHTLWNIRIVVLAKPEHENRISHICTDNVKTGIANTLGNKGAVGVSFMFNGTSLGFVNSHLTSGSEKKLRRNQNYMNILRFLALGDKKLSPFNITHRFTHLFWFGDLNYRVDLPTWEAETIIQKIKQQQYADLLSHDQLLTERREQKVFLHFEEEEITFAPTYRFERLTRDKYAYTKQKATGMKYNLPSWCDRVLWKSYPLVHVVCQSYGSTSDIMTSDHSPVFATFEAGVTSQFVSKNGPGTVDSQGQIEFLRCYATLKTKSQTKFYLEFHSSCLESFVKSQEGENEEGSEGELVVKFGETLPKLKPIISDPEYLLDQHILISIKSSDSDESYGEGCIALRLEATETQLPIYTPLTHHGELTGHFQGEIKLQTSQGKTREKLYDFVKTERDESSGPKTLKSLTSHDPMKQWEVTSRAPPCSGSSITEIINPNYMGVGPFGPPMPLHVKQTLSPDQQPTAWSYDQPPKDSPLGPCRGESPPTPPGQPPISPKKFLPSTANRGLPPRTQESSEALSELPLSREPRGTA

SEQ ID NO: 886235 - protein, 419 aa, Homo sapiens
MVPCWNHGNITRSKAEELLSRTGKDGSFLVRASESISRAYALCVLYRNCVYTYRILPNEDDKFTVQASEGVSMRFFTKLDQLIEFYKKENMGLVTHLQYPVPLEEEDTGDDPEEDTESVVSPPELPPRNIPLTASSCEAKEVPFSNENPRATETSRPSLSETLFQRLQSMDTSGLPEEHLKAIQDYLSTQLAQDSEFVKTGSSSLPHLKKLTTLLCKELYGEVIRTLPSLESLQRLFDQQLSPGLRPRPQVPGEANPINMVSKLSQLTSLLSSIEDKVKALLHEGPESPHRPSLIPPVTFEVKAESLGIPQKMQLKVDVESGKLIIKKSKDGSEDKFYSHKKILQLIKSQKFLNKLVILVETEKEKILRKEYVFADSKKREGFCQLLQQMKNKHSEQPEPDMITIFIGTWRVGLLVPGS

SEQ ID NO: 886236 - protein, 267 aa, Homo sapiens
TGREGKKRRRCPALATVAWRSGETGTENLSLLGLTVVMSFKREGDDWSQLNVLKKRRVGDLLASYIPEDEALMLRDGRFACAICPHRPVLDTLAMLTAHRAGKKHLSSLQLFYGKKQPGKERKQNPKHQNELRREETKAEAPLLTQTRLITQSALHRAPHYNSCCRRKYRPEAPGPSVSLSPMPPSEVKLQSGKISREPEPAAGPQAEESATVSAPAPMSPTRRRALDHYLTLRSSGWIPDGRGRWVKDENVEFDSDEEEPPDLPLD

SEQ ID NO: 886237 - protein, 251 aa, Homo sapiens
TGREGKKRRRCPALATVAWRSGETGTENLSLLGLTVVMSFKREGDDWSQLNVLKKRRVGDLLASYIPEDEALMLRDGRFACAICPHRPVLDTLAMLTAHRAGKKHLSSLQLFYGKKQPGKERKQNPKHQNELRREETKAEAPLLTQTRLITQSALHRAPHYNSCCRRKYREVKLQSGKISREPEPAAGPQAEESATVSAPAPMSPTRRRALDHYLTLRSSGWIPDGRGRWVKDENVEFDSDEEEPPDLPLD

SEQ ID NO: 886238 - protein, 195 aa, Homo sapiens
MLRDGRFACAICPHRPVLDTLAMLTAHRAGKKHLSSLQLFYGKKQPGKERKQNPKHQNELRREETKAEAPLLTQTRLITQSALHRAPHYNSCCRRKYRPEAPGPSVSLSPMPPSEVKLQSGKISREPEPAAGPQAEESATVSAPAPMSPTRRRALDHYLTLRSSGWIPDGRGRWVKDENVEFDSDEEEPPDLPLD

SEQ ID NO: 886239 - protein, 279 aa, Homo sapiens
GLGREWLKDSWCRFGFSGRIPRSQPFPMAALRSGETGTENLSLLGLTVVMSFKREGDDWSQLNVLKKRRVGDLLASYIPEDEALMLRDGRFACAICPHRPVLDTLAMLTAHRAGKKHLSSLQLFYGKKQPGKERKQNPKHQNELRREETKAEAPLLTQTRLITQSALHRAPHYNSCCRRKYRPEAPGPSVSLSPMPPSEVKLQSGKISREPEPAAGPQAEESATVSAPAPMSPTRRRALDHYLTLRSSGWIPDGRGRWVKDENVEFDSDEEEPPDLPLD

SEQ ID NO: 886240 - protein, 195 aa, Homo sapiens; identical to SEQ ID NO: 886238

SEQ ID NO: 886241 - protein, 173 aa, Homo sapiens
MLTAHRAGKKHLSSLQLFYGKKQPGKERKQNPKHQNELRREETKAEAPLLTQTRLITQSALHRAPHYNSCCRRKYRPEAPGPSVSLSPMPPSEVKLQSGKISREPEPAAGPQAEESATVSAPAPMSPTRRRALDHYLTLRSSGWIPDGRGRWVKDENVEFDSDEEEPPDLPLD

SEQ ID NO: 886242 - protein, 267 aa, Homo sapiens; identical to SEQ ID NO: 886236

SEQ ID NO: 886243 - protein, 267 aa, Homo sapiens; identical to SEQ ID NO: 886236

SEQ ID NO: 886244 - protein, 195 aa, Homo sapiens; identical to SEQ ID NO: 886238

SEQ ID NO: 886245 - protein, 199 aa, Homo sapiens
TGREGKKRRRCPALATVAWRSGETGTENLSLLGLTVVMSFKREGDDWSQLNVLKKRRVGDLLASYIPEDEALMLRDGRFACAICPHRPVLDTLAMLTAHRAGKKHLSSLQLFYGKKQPGKERKQNPKHQNELRREETKAEAPLLTQTRLITQSALHRAPHYNSCCRRKYRPEAPGPSVSLSPMPPSRPRSQQLSQPLHP

SEQ ID NO: 886246 - protein, 220 aa, Homo sapiens
TGREGKKRRRCPALATVAWRSGETGTENLSLLGLTVVMSFKREGDDWSQLNVLKKRRVGDLLASYIPEDEALMLRDGRFACAICPHRPVLDTLAMLTAHRAGKKHLSSLQLFYGKKQPGKERKQNPKHQNELRREETKAEAPLLTQTRLITQSALHRAPHYNSCCRRKYRPEAPGPSVSLSPMPPSPCTHEPHKKTSPGPLSHPSKLWMDPRWTRSMGKR

SEQ ID NO: 886247 - protein, 326 aa, Homo sapiens
  misc_feature (165)..(165): Xaa can be any naturally occurring amino acid
  misc_feature (175)..(175): Xaa can be any naturally occurring amino acid
  misc_feature (177)..(177): Xaa can be any naturally occurring amino acid
  misc_feature (181)..(182): Xaa can be any naturally occurring amino acid
  misc_feature (185)..(185): Xaa can be any naturally occurring amino acid
  misc_feature (212)..(212): Xaa can be any naturally occurring amino acid
  misc_feature (217)..(217): Xaa can be any naturally occurring amino acid
  misc_feature (230)..(230): Xaa can be any naturally occurring amino acid
  misc_feature (237)..(237): Xaa can be any naturally occurring amino acid
  misc_feature (247)..(247): Xaa can be any naturally occurring amino acid
  misc_feature (251)..(251): Xaa can be any naturally occurring amino acid
  misc_feature (253)..(253): Xaa can be any naturally occurring amino acid
  misc_feature (264)..(264): Xaa can be any naturally occurring amino acid
  misc_feature (275)..(275): Xaa can be any naturally occurring amino acid
  misc_feature (289)..(289): Xaa can be any naturally occurring amino acid
  misc_feature (294)..(294): Xaa can be any naturally occurring amino acid
  misc_feature (299)..(299): Xaa can be any naturally occurring amino acid
  misc_feature (304)..(304): Xaa can be any naturally occurring amino acid
  misc_feature (317)..(317): Xaa can be any naturally occurring amino acid
TGREGKKRRRCPALATVAWRSGETGTENLSLLGLTVVMSFKREGDDWSQLNVLKKRRVGDLLASYIPEDEALMLRDGRFACAICPHRPVLDTLAMLTAHRAGKKHLSSLQLFYGKKQPGKERKQNPKHQNELRREETKAEAPLLTQTRLITQSALHRAPPPQKQXCLPARGRYQXPXSPPXXPSXSSPFSPLMPHPSRRVHNLPKGGGRIQXRGNPXNPAGPVPPPEPGXEVQPNLXLQPPLPTPTXAPPXEXRTGAPCGPILXSTPFPEALLGXGDPPGMGTGGVRSXGLKKXWKKLXWRFLXLLLMEGRGPPPLXLLPPCGDLE

SEQ ID NO: 886248 - protein, 69 aa, Homo sapiens
DRKRRKKEKALSRSCYGGLEEWRNRNREFITSGTHSRDVFQEGRRRLESTQCAQKKKSRGPPSQLHSRG

SEQ ID NO: 886249 - protein, 199 aa, Homo sapiens
TGREGKKRRRCPALATVAWRSGETGTENLSLLGLTVVMSFKREGDDWSQLNVLKKRRVGDLLASYIPEDEALMLRDGRFACAICPHRPVLDTLAMLTAHRAGKKHLSSLQLFYGKKQPGKERKQNPKHQNELRREETKAEAPLLTQTRLITQSALHRAPHYNSCCRRKYRYGTGKPEVGRLRRRQMALKEFSSVYSEEY

SEQ ID NO: 886250 - protein, 183 aa, Homo sapiens
TGREGKKRRRCPALATVAWRSGETGTENLSLLGLTVVMSFKREGDDWSQLNVLKKRRVGDLLASYIPEDEALMLRDGRFACAICPHRPVLDTLAMLTAHRAGKKHLSSLQLFYGKKQPGKERKQNPKHQNELRREETKAEAPLLTQTRLITQSALHRAPHYNSCCRRKYSRPRSQQLSQPLHP

SEQ ID NO: 886251 - protein, 560 aa, Homo sapiens
MNRKWEAKLKQIEERASHYERKPLSSVYRPRLSKPEEPPSIWRLFHRQAQAFNFVKSCKEDVHVFALECKVGDGQRIYLVTTYAEFWFYYKSRKNLLHCYEVIPENAVCKLYFDLEFNKPANPGADGKKMVALLIEYVCKALQELYGVNCSAEDVLNLDSSTDEKFSRHLIFQLHDVAFKDNIHVGNFLRKILQPALDLLGSEDDDSAPETTGHGFPHFSEAPARQGFSFNKMFTEKATEESWTSNSKKLERLGSAEQSSPDLSFLVVKNNMGEKHLFVDLGVYTRNRNFRLYKSSKIGKRVALEVTEDNKFFPIQSKDVSDEYQYFLSSLVSNVRFSDTLRILTCEPSQNKQKGVGYFNSIGTSVETIEGFQCSPYPEVDHFVLSLVNKDGIKGGIRRWNYFFPEELLVYDICKYRWCENIGRAHKSNNIMILVDLKNEVWYQKCHDPVCKAENFKSDCFPLPAEVCLLFLFKEEEEFTTDEADETRSNETQNPHKPSPSRLSTGASADAVWDNGIDDAYFLEATEDAELAEAAENSLLSYNSEVDEIPDELIIEVLQE

SEQ ID NO: 886252 - protein, 517 aa, Homo sapiens
MNRKWEAKLKQIEERASHYERKPLSSVYRPRLSKPEEPPSIWRLFHRQAQAFNFVKSCKEDVHVFALECKVGDGQRIYLVTTYAEFWFYYKSSMCVKHFKSYTVLIAQLKMFVNLDSSTDEKFSRHLIFQLHDVAFKDNIHVGNFLRKILQPALDLLGSEDDDSAPETTGHGFPHFSEAPARQGFSFNKMFTEKATEESWTSNSKKLERLGSAEQSSPDLSFLVVKNNMGEKHLFVDLGVYTRNRNFRLYKSSKIGKRVALEVTEDNKFFPIQSKDVSDEYQYFLSSLVSNVRFSDTLRILTCEPSQNKQKGVGYFNSIGTSVETIEGFQCSPYPEVDHFVLSLVNKDGIKGGIRRWNYFFPEELLVYDICKYRWCENIGRAHKSNNIMILVDLKNEVWYQKCHDPVCKAENFKSDCFPLPAEVCLLFLFKEEEEFTTDEADETRSNETQNPHKPSPSRLSTGASADAVWDNGIDDAYFLEATEDAELAEAAENSLLSYNSEVDEIPDELIIEVLQE

SEQ ID NO: 886253 - protein, 431 aa, Homo sapiens
MVALLIEYVCKALQELYGVNCSAEDVLNLDSSTDEKFSRHLIFQLHDVAFKDNIHVGNFLRKILQPALDLLGSEDDDSAPETTGHGFPHFSEAPARQGFSFNKMFTEKATEESWTSNSKKLERLGSAEQSSPDLSFLVVKNNMGEKHLFVDLGVYTRNRNFRLYKSSKIGKRVALEVTEDNKFFPIQSKDVSDEYQYFLSSLVSNVRFSDTLRILTCEPSQNKQKGVGYFNSIGTSVETIEGFQCSPYPEVDHFVLSLVNKDGIKGGIRRWNYFFPEELLVYDICKYRWCENIGRAHKSNNIMILVDLKNEVWYQKCHDPVCKAENFKSDCFPLPAEVCLLFLFKEEEEFTTDEADETRSNETQNPHKPSPSRLSTGASADAVWDNGIDDAYFLEATEDAELAEAAENSLLSYNSEVDEIPDELIIEVLQE

SEQ ID NO: 886254 - protein, 385 aa, Homo sapiens
MLNFGFTINPGNFLRKILQPALDLLGSEDDDSAPETTGHGFPHFSEAPARQGFSFNKMFTEKATEESWTSNSKKLERLGSAEQSSPDLSFLVVKNNMGEKHLFVDLGVYTRNRNFRLYKSSKIGKRVALEVTEDNKFFPIQSKDVSDEYQYFLSSLVSNVRFSDTLRILTCEPSQNKQKGVGYFNSIGTSVETIEGFQCSPYPEVDHFVLSLVNKDGIKGGIRRWNYFFPEELLVYDICKYRWCENIGRAHKSNNIMILVDLKNEVWYQKCHDPVCKAENFKSDCFPLPAEVCLLFLFKEEEEFTTDEADETRSNETQNPHKPSPSRLSTGASADAVWDNGIDDAYFLEATEDAELAEAAENSLLSYNSEVDEIPDELIIEVLQE

SEQ ID NO: 886255 - protein, 530 aa, Homo sapiens
MNRKWEAKLKQIEERASHYERKPLSSVYRPRLSKPEEPPSIWRLFHRQAQAFNFVKSCKEDVHVFALECKVGDGQRIYLVTTYAEFWFYYKSRKNLLHCYEVIPENAVCKLYFDLEFNKPANPGADGKKMVALLIEYVCKALQELYGVNCSAEDVLNLDSSTDEKFSRHLIFQLHDVAFKDNIHVGNFLRKILQPALDLLGSEDDDSAPETTGHGFPHFSEAPARQGFSFNKMFTEKATEESWTSNSKKLERLGSAEQSSPDLSFLVVKNNMGEKHLFVDLGVYTRNRNFRLYKSSKIGKRVAWRLLKITNFFLYSQKMFLTNINIFSLLWSAMSVETIEGFQCSPYPEVDHFVLSLVNKDGIKGGIRRWNYFFPEELLVYDICKYRWCENIGRAHKSNNIMILVDLKNEVWYQKCHDPVCKAENFKSDCFPLPAEVCLLFLFKEEEEFTTDEADETRSNETQNPHKPSPSRLSTGASADAVWDNGIDDAYFLEATEDAELAEAAENSLLSYNSEVDEIPDELIIEVLQE

SEQ ID NO: 886256 - protein, 121 aa, Homo sapiens
TPKLIFNEIGFTEVKNFKSDCFPLPAEVCLLFLFKEEEEFTTDEADETRSNETQNPHKPSPSRLSTGASADAVWDNGIDDAYFLEATEDAELAEAAENSLLSYNSEVDEIPDELIIEVLQE

SEQ ID NO: 886257 - protein, 502 aa, Homo sapiens
MNRKWEAKLKQIEERASHYERKPLSSVYRPRLSKPEEPPSIWRLFHRQAQAFNFVKSCKEDVHVFALECKVGDGQRIYLVTTYAEFWFYYKSRKNLLHCYEVIPENAVCKLYFDLEFNKPANPGADGKKMVALLIEYVCKALQELYGVNCSAEDVLNLDSSTDEKFSRHLIFQLHDVAFKDNIHVGNFLRKILQPALDLLGSEDDDSAPETTGHGFPHFSEAPARQGFSFNKMFTEKATEESWTSNSKKLERLGSAEQSSPDLSFLVVKNNMGEKHLFVDLGVYTRNRNFRLYKSSKIGKRVALEVTEDNKFFPIQSKDVSDEYQYFLSSLVSNVRFSDTLRILTCEPSQNKQKGVGYFNSIGTSVETIEGFQCSPYPEVDHFVLSLVNKDGIKGGIRRWNYFFPEELLVYDICKYRWCENIGRAHKSNNIMILVDLKNEVWYQKCHDPVCKAENFKSDCFPLPAEVCLLFLFKELDCPLVKKLNPPLLFRRGVLKSMCTEL

SEQ ID NO: 886258 - protein, 712 aa, Homo sapiens
MGDYGFGVLVQSNTGNKSAFPVRFHPHLQPPHHHQNATPSPAAFINNNTAANGSSAGSAWLFPAPATHNIQDEILGSEKAKSQQQEQQDPLEKQQLSPSPGQEAGILPETEKAKSEENQGDNSSENGNGKEKIRIESPVLTGFDYQEATGLGTSTQPLTSSASSLTGFSNWSAAIAPSSSTIINEDASFFHQGGVPAASANNGALLFQNFPHHVSPGFGGSFSPQIGPLSQHHPHHPHFQHHHSQHQQQRRSPASPHPPPFTHRNAAFNQLPHLANNLNKPPSPWSSYQSPSPTPSSSWSPGGGGYGGWGGSQGRDHRRGLNGGITPLNSISPLKKNFASNHIQLQKYARPSSAFAPKSWMEDSLNRADNIFPFPDRPRTFDMHSLESSLIDIMRAENDTIKARTYGRRRGQSSLFPMEDGFLDDGRGDQPLHSGLGSPHCFSHQNGERVERYSRKVFVGGLPPDIDEDEITASFRRFGPLIVDWPHKAESKSYFPPKGYAFLLFQDESSVQALIDACIEEDGKLYLCVSSPTIKDKPVQIRPWNLSDSDFVMDGSQPLDPRKTIFVGGVPRPLRAVELAMIMDRLYGGVCYAGIDTDPELKYPKGAGRVAFSNQQSYIAAISARFVQLQHGEIDKRVEVKPYVLDDQLCDECQGARCGGKFAPFFCANVTCLQYYCEYCWAAIHSRAGREFHKPLVKEGGDRPRHISFRWN

SEQ ID NO: 886259 - protein, 410 aa, Homo sapiens [sequence omitted]

SEQ ID NO: 886260 - protein, 376 aa, Homo sapiens [sequence omitted]

SEQ ID NO: 886261 - protein, 721 aa, Homo sapiens
MGDYGFGVLVQSNTGNKSAFPVRFHPHLQPPHHHQNATPSPAAFINNNTAANGSSAGSAWLFPAPATHNIQDEILGSEKAKSQQQEQQDPLEKQQLSPSPGQEAGILPETEKAKSEENQGDNSSENGNGKEKIRIESPVLTGFDYQEATGLGTSTQPLTSSASSLTGFSNWSAAIAPSSSTIINEDASFFHQGGVPAASANNGALLFQNFPHHVSPGFGGSFSPQIGPLSQHHPHHPHFQHHHSQHQQQRRSPASPHPPPFTHRNAAFNQLPHLANNLNKPPSPWSSYQSPSPTPSSSWSPGGGGYGGWGGSQGRDHRRGLNGGITPLNSISPLKKNFASNHIQLQKYARPSSAFAPKSWMEDSLNRADNIFPFPDRPRTFDMHSLESSLIDIMRAENDTIKGRLNYSYPGSDSSLLINGQSSLFPMEDGFLDDGRGDQPLHSGLGSPHCFSHQNGERVERYSRKVFVGGLPPDIDEDEITASFRRFGPLIVDWPHKAESKSYFPPKGYAFLLFQDESSVQALIDACIEEDGKLYLCVSSPTIKDKPVQIRPWNLSDSDFVMDGSQPLDPRKTIFVGGVPRPLRAVELAMIMDRLYGGVCYAGIDTDPELKYPKGAGRVAFSNQQSYIAAISARFVQLQHGEIDKRVEVKPYVLDDQLCDECQGARCGGKFAPFFCANVTCLQYYCEYCWAAIHSRAGREFHKPLVKEGGDRPRHISFRWN

SEQ ID NO: 886262 - protein, 721 aa, Homo sapiens; identical to SEQ ID NO: 886261

SEQ ID NO: 886263 - protein, 721 aa, Homo sapiens; identical to SEQ ID NO: 886261

SEQ ID NO: 886264 - protein, 609 aa, Homo sapiens
MEGKPMRRCTNIRPGETGMDVTSRCTLGDPNKLPEGVPQPARMPYISDKHPRQTLEVINLLRKHRELCDVVLVVGAKKIYAHRVILSACSPYFRAMFTGELAESRQTEVVIRDIDERAMELLIDFAYTSQITVEEGNVQTLLPAACLLQLAEIQEACCEFLKRQLDPSNCLGIRAFADTHSCRELLRIADKFTQHNFQEVMESEEFMLLPANQLIDIISSDELNVRSEEQVFNAVMAWVKYSIQERRPQLPQVLQHVRLPLLSPKFLVGTVGSDPLIKSDEECRDLVDEAKNYLLLPQERPLMQGPRTRPRKPIRCGEVLFAVGGWCSGDAISSVERYDPQTNEWRMVASMSKRRCGVGVSVLDDLLYAVGGHDGSSYLNSVERYDPKTNQWSSDVAPTSTCRTSVGVAVLGGFLYAVGGQDGVSCLNIVERYDPKENKWTRVASMSTRRLGVAVAVLGGFLYAVGGSDGTSPLNTVERYNPQENRWHTIAPMGTRRKHLGCAVYQDMIYAVGGRDDTTELSSAERYNPRTNQWSPVVAMTSRRSGVGLAVVNGQLMAVGGFDGTTYLKTIEVFDPDANTWRLYGGMNYRRLGGGVGVIKMTHCESHIW

SEQ ID NO: 886265 - protein, 273 aa, Homo sapiens
RRLLLLSLRDKLTIFRFVIKASCTLCDLSGSALECGEGYFSWCMEGKPMRRCTNIRPGETGMDVTSRCTLGDPNKLPEGVPQPARMPYISDKHPRQTLEVINLLRKHRELCDVVLVVGAKKIYAHRVILSACSPYFRAMFTGELAESRQTEVVIRDIDERAMELLIDFAYTSQITVEEGNVQTLLPAACLLQLAEIQEACCEFLKRQLDPSNCLGIRAFADTHSCRELLRIADKFTQHNFQEVSCTWCSNAPICWRAIWVHILLNNTCLGISC

SEQ ID NO: 886266 - protein, 467 aa, Homo sapiens
MEGKPMRRCTNIRPGETGMDVTSRCTLGDPNKLPEGVPQPARMPYISDKHPRQTLEVINLLRKHRELCDVVLVVGAKKIYAHRVILSACSPYFRAMFTGELAESRQTEVVIRDIDERAMELLIDFAYTSQITVEEGNVQTLLPAACLLQLAEIQEACCEFLKRQLDPSNCLGIRAFADTHSCRELLRIADKFTQHNFQEVMESEEFMLLPANQLIDIISSDELNVRSEEQVFNAVMAWVKYSIQERRPQLPQVLQHVRLPLLSPKFLVGTVGSDPLIKSDEECRDLVDEAKNYLLLPQERPLMQGPRTRPRKPIRCGEVLFAVGGWCSGDAISSVERYDPQTNEWRMVASMSKRRCGVGVSVLDDLLYAVGGHDGSSYLNSVERYNPRTNQWSPVVAMTSRRSGVGLAVVNGQLMAVGGFDGTTYLKTIEVFDPDANTWRLYGGMNYRRLGGGVGVIKMTHCESHIW

SEQ ID NO: 886267 - protein, 652 aa, Homo sapiens
RRLLLLSLRDKLTIFRFVIKASCTLCDLSGSALECGEGYFSWCMEGKPMRRCTNIRPGETGMDVTSRCTLGDPNKLPEGVPQPARMPYISDKHPRQTLEVINLLRKHRELCDVVLVVGAKKIYAHRVILSACSPYFRAMFTGELAESRQTEVVIRDIDERAMELLIDFAYTSQITVEEGNVQTLLPAACLLQLAEIQEACCEFLKRQLDPSNCLGIRAFADTHSCRELLRIADKFTQHNFQEVMESEEFMLLPANQLIDIISSDELNVRSEEQVFNAVMAWVKYSIQERRPQLPQVLQHVRLPLLSPKFLVGTVGSDPLIKSDEECRDLVDEAKNYLLLPQERPLMQGPRTRPRKPIRCGEVLFAVGGWCSGDAISSVERYDPQTNEWRMVASMSKRRCGVGVSVLDDLLYAVGGHDGSSYLNSVERYDPKTNQWSSDVAPTSTCRTSVGVAVLGGFLYAVGGQDGVSCLNIVERYDPKENKWTRVASMSTRRLGVAVAVLGGFLYAVGGSDGTSPLNTVERYNPQENRWHTIAPMGTRRKHLGCAVYQDMIYAVGGRDDTTELSSAERYNPRTNQWSPVVAMTSRRSGVGLAVVNGQLMAVGGFDGTTYLKTIEVFDPDANTWRLYGGMNYRRLGGGVGVIKMTHCESHIW

SEQ ID NO: 886268 - protein, 417 aa, Homo sapiens
FLPNFEQVMESEEFMLLPANQLIDIISSDELNVRSEEQVFNAVMAWVKYSIQERRPQLPQVLQHVRLPLLSPKFLVGTVGSDPLIKSDEECRDLVDEAKNYLLLPQERPLMQGPRTRPRKPIRCGEVLFAVGGWCSGDAISSVERYDPQTNEWRMVASMSKRRCGVGVSVLDDLLYAVGGHDGSSYLNSVERYDPKTNQWSSDVAPTSTCRTSVGVAVLGGFLYAVGGQDGVSCLNIVERYDPKENKWTRVASMSTRRLGVAVAVLGGFLYAVGGSDGTSPLNTVERYNPQENRWHTIAPMGTRRKHLGCAVYQDMIYAVGGRDDTTELSSAERYNPRTNQWSPVVAMTSRRSGVGLAVVNGQLMAVGGFDGTTYLKTIEVFDPDANTWRLYGGMNYRRLGGGVGVIKMTHCESHIW

SEQ ID NO: 886269 - protein, 164 aa, Homo sapiens
MSTRRLGVAVAVLGGFLYAVGGSDGTSPLNTVERYNPQENRWHTIAPMGTRRKHLGCAVYQDMIYAVGGRDDTTELSSAERYNPRTNQWSPVVAMTSRRSGVGLAVVNGQLMAVGGFDGTTYLKTIEVFDPDANTWRLYGGMNYRRLGGGVGVIKMTHCESHIW

SEQ ID NO: 886270 - protein, 143 aa, Homo sapiens
MVCLASTLLRVERYNPQENRWHTIAPMGTRRKHLGCAVYQDMIYAVGGRDDTTELSSAERYNPRTNQWSPVVAMTSRRSGVGLAVVNGQLMAVGGFDGTTYLKTIEVFDPDANTWRLYGGMNYRRLGGGVGVIKMTHCESHIW

SEQ ID NO: 886271 - protein, 432 aa, Homo sapiens
MEGKPMRRCTNIRPGETGMDVTSRCTLGDPNKLPEGVPQPARMPYISDKHPRQTLEVINLLRKHRELCDVVLVVGAKKIYAHRVILSACSPYFRAMFTGELAESRQTEVVIRDIDERAMELLIDFAYTSQITVEEGNVQTLLPAACLLQLAEIQEACCEFLKRQLDPSNCLGIRAFADTHSCRELLRIADKFTQHNFQEVMESEEFMLLPANQLIDIISSDELNVRSEEQVFNAVMAWVKYSIQERRPQLPQVLQHVRLPLLSPKFLVGTVGSDPLIKSDEECRDLVDEAKNYLLLPQERPLMQGPRTRPRKPIRCGEVLFAVGGWCSGDAISSVERYDPQTNEWRMVASMSKRRCGVGVSVLDDLLYAVGGHDGSSYLNSVERYDPKTNQWSSDVAPTSTCRTSVGVAVLGGFLYAVGGQDGVSCLNIVER

SEQ ID NO: 886272 - protein, 672 aa, Homo sapiens
AGALSEEIRDSSFPGKRRGLSPARVGRAGAGGPRRPPSPAVTLAAGEGLGRCGAVAAARGGSGEELAQLGGAGWGGSAPPRPPPRPPPSPLPRASSPPASLLPWALLPSSPPPPVPVRAHPCPQPRAPAESLSRGCRTGRDRLGWARPPGPAVGMGALARALLLPLLAQWLLRAAPELAPAPFTLPLRVAAATNRVVAPTPGPGTPAERHADGLALALEPALASPAGAANFLAMVDNLQGDSGRGYYLEMLIGTPPQKLQILVDTGSSNFAVAGTPHSYIDTYFDTERSSTYRSKGFDVTVKYTQGSWTGFVGEDLVTIPKGFNTSFLVNIATIFESENFFLPGIKWNGILGLAYATLAKPSSSLETFFDSLVTQANIPNVFSMQMCGAGLPVAGSGTNGGSLVLGGIEPSLYKGDIWYTPIKEEWYYQIEILKLEIGGQSLNLDCREYNADKAIVDSGTTLLRLPQKVFDAVVEAVARASLIPEFSDGFWTGSQLACWTNSETPWSYFPKISIYLRDENSSRSFRITILPQLYIQPMMGAGLNYECYRFGISPSTNALVIGATVMEGFYVIFDRAQKRVGFAASPCAEIAGAAVSEISGPFSTEDVASNCVPAQSLSEPILWIVSYALMSVCGAILLVLIVLLLLPFRCQRRPRDPEVVNDESSLVRHRWK

SEQ ID NO: 886273 - protein, 622 aa, Homo sapiens
AGALSEEIRDSSFPGKRRGLSPARVGRAGAGGPRRPPSPAVTLAAGEGLGRCGAVAAARGGSGEELAQLGGAGWGGSAPPRPPPRPPPSPLPRASSPPASLLPWALLPSSPPPPVPVRAHPCPQPRAPAESLSRGCRTGRDRLGWARPPGPAVGMGALARALLLPLLAQWLLRAAPELAPAPFTLPLRVAAATNRVVAPTPGPGTPAERHADGLALALEPALASPAGAANFLAMVDNLQGDSGRGYYLEMLIGTPPQKLQILVDTGSSNFAVAGTPHSYIDTYFDTERSSTYRSKGFDVTVKYTQGSWTGFVGEDLVTIPKGFNTSFLVNIATIFESENFFLPGIKWNGILGLAYATLAKPSSSLETFFDSLVTQANIPNVFSMQMCGAGLPVAGSGTNGGSLVLGGIEPSLYKGDIWYTPIKEEWYYQIEILKLEIGGQSLNLDCREYNADKAIVDSGTTLLRLPQKVFDAVVEAVARASLLYIQPMMGAGLNYECYRFGISPSTNALVIGATVMEGFYVIFDRAQKRVGFAASPCAEIAGAAVSEISGPFSTEDVASNCVPAQSLSEPILWIVSYALMSVCGAILLVLIVLLLLPFRCQRRPRDPEVVNDESSLVRHRWK

SEQ ID NO: 886274 - protein, 287 aa, Homo sapiens
MCGAGLPVAGSGTNGGSLVLGGIEPSLYKGDIWYTPIKEEWYYQIEILKLEIGGQSLNLDCREYNADKAIVDSGTTLLRLPQKVFDAVVEAVARASLIPEFSDGFWTGSQLACWTNSETPWSYFPKISIYLRDENSSRSFRITILPQLYIQPMMGAGLNYECYRFGISPSTNALVIGATVMEGFYVIFDRAQKRVGFAASPCAEIAGAAVSEISGPFSTEDVASNCVPAQSLSEPILWIVSYALMSVCGAILLVLIVLLLLPFRCQRRPRDPEVVNDESSLVRHRWK

SEQ ID NO: 886275 - protein, 672 aa, Homo sapiens; identical to SEQ ID NO: 886272

SEQ ID NO: 886276 - protein, 672 aa, Homo sapiens; identical to SEQ ID NO: 886272

SEQ ID NO: 886277 - protein, 415 aa, Homo sapiens
MLQILVDTGSSNFAVAGTPHSYIDTYFDTERSSTYRSKGFDVTVKYTQGSWTGFVGEDLVTIPKGFNTSFLVNIATIFESENFFLPGIKWNGILGLAYATLAKPSSSLETFFDSLVTQANIPNVFSMQMCGAGLPVAGSGTNGGSLVLGGIEPSLYKGDIWYTPIKEEWYYQIEILKLEIGGQSLNLDCREYNADKAIVDSGTTLLRLPQKVFDAVVEAVARASLIPEFSDGFWTGSQLACWTNSETPWSYFPKISIYLRDENSSRSFRITILPQLYIQPMMGAGLNYECYRFGISPSTNALVIGATVMEGFYVIFDRAQKRVGFAASPCAEIAGAAVSEISGPFSTEDVASNCVPAQSLSEPILWIVSYALMSVCGAILLVLIVLLLLPFRCQRRPRDPEVVNDESSLVRHRWK

SEQ ID NO: 886278 - protein, 351 aa, Homo sapiens
MKKLSINTRNVCGAWRLHWVTHVYTVSPKRVPLSVALPQPSSSLETFFDSLVTQANIPNVFSMQMCGAGLPVAGSGTNGGSLVLGGIEPSLYKGDIWYTPIKEEWYYQIEILKLEIGGQSLNLDCREYNADKAIVDSGTTLLRLPQKVFDAVVEAVARASLIPEFSDGFWTGSQLACWTNSETPWSYFPKISIYLRDENSSRSFRITILPQLYIQPMMGAGLNYECYRFGISPSTNALVIGATVMEGFYVIFDRAQKRVGFAASPCAEIAGAAVSEISGPFSTEDVASNCVPAQSLSEPILWIVSYALMSVCGAILLVLIVLLLLPFRCQRRPRDPEVVNDESSLVRHRWK

SEQ ID NO: 886279 - protein, 343 aa, Homo sapiens
CSYRSWRTIAWLLVSGINGMNTWLAYAHLTTPSSSLETFFDSLVTQANIPNVFSMQMCGAGLPVAGSGTNGGSLVLGGIEPSLYKGDIWYTPIKEEWYYQIEILKLEIGGQSLNLDCREYNADKAIVDSGTTLLRLPQKVFDAVVEAVARASLIPEFSDGFWTGSQLACWTNSETPWSYFPKISIYLRDENSSRSFRITILPQLYIQPMMGAGLNYECYRFGISPSTNALVIGATVMEGFYVIFDRAQKRVGFAASPCAEIAGAAVSEISGPFSTEDVASNCVPAQSLSEPILWIVSYALMSVCGAILLVLIVLLLLPFRCQRRPRDPEVVNDESSLVRHRWK

SEQ ID NO: 886280 - protein, 263 aa, Homo sapiens
MPSLLVDIWYTPIKEEWYYQIEILKLEIGGQSLNLDCREYNADKAIVDSGTTLLRLPQKVFDAVVEAVARASLIPEFSDGFWTGSQLACWTNSETPWSYFPKISIYLRDENSSRSFRITILPQLYIQPMMGAGLNYECYRFGISPSTNALVIGATVMEGFYVIFDRAQKRVGFAASPCAEIAGAAVSEISGPFSTEDVASNCVPAQSLSEPILWIVSYALMSVCGAILLVLIVLLLLPFRCQRRPRDPEVVNDESSLVRHRWK

SEQ ID NO: 886281 - protein, 669 aa, Homo sapiens
  misc_feature (662)..(662): Xaa can be any naturally occurring amino acid
AGALSEEIRDSSFPGKRRGLSPARVGRAGAGGPRRPPSPAVTLAAGEGLGRCGAVAAARGGSGEELAQLGGAGWGGSAPPRPPPRPPPSPLPRASSPPASLLPWALLPSSPPPPVPVRAHPCPQPRAPAESLSRGCRTGRDRLGWARPPGPAVGMGALARALLLPLLAQWLLRAAPELAPAPFTLPLRVAAATNRVVAPTPGPGTPAERHADGLALALEPALASPAGAANFLAMVDNLQGDSGRGYYLEMLIGTPPQKLQILVDTGSSNFAVAGTPHSYIDTYFDTERSSTYRSKGFDVTVKYTQGSWTGFVGEDLVTIPKGFNTSFLVNIATIFESENFFLPGIKWNGILGLAYATLAKPSSSLETFFDSLVTQANIPNVFSMQMCGAGLPVAGSGTNGGSLVLGGIEPSLYKGDIWYTPIKEEWYYQIEILKLEIGGQSLNLDCREYNADKAIVDSGTTLLRLPQKVFDAVVEAVARASLIPEFSDGFWTGSQLACWTNSETPWSYFPKISIYLRDENSSRSFRITILPQLYIQPMMGAGLNYECYRFGISPSTNALVIGATVMEGFYVIFDRAQKRVGFAASPCAEIAGAAVSEISGPFSTEDVASNCVPAQSLSEPILWIVSYALMSVCGAILLVLIVLLLLPVFPPGGGFGVPPKGXPVSASPP

SEQ ID NO: 886282 - protein, 672 aa, Homo sapiens; identical to SEQ ID NO: 886272

SEQ ID NO: 886283 - protein, 550 aa, Homo sapiens
AGALSEEIRDSSFPGKRRGLSPARVGRAGAGGPRRPPSPAVTLAAGEGLGRCGAVAAARGGSGEELAQLGGAGWGGSAPPRPPPRPPPSPLPRASSPPASLLPWALLPSSPPPPVPVRAHPCPQPRAPAESLSRGCRTGRDRLGWARPPGPAVGMGALARALLLPLLAQWLLRAAPELAPAPFTLPLRVAAATNRVVAPTPGPGTPAERHADGLALALEPALASPAGAANFLAMVDNLQGDSGRGYYLEMLIGTPPQKLQILVDTGSSNFAVAGTPHSYIDTYFDTERSSTYRSKGFDVTVKYTQGSWTGFVGEDLVTIPKGFNTSFLVNIATIFESENFFLPGIKWNGILGLAYATLAKPSSSLETFFDSLVTQANIPNVFSMQMCGAGLPVAGSGTNGGSLVLGGIEPSLYKGDIWYTPIKEEWYYQIEILKLEIGGQSLNLDCREYNADKAIVDSGTTLLRLPQKVFDAVVEAVARASLIPEFSDGFWTGSQLACWTNSETPWSYFPKISIYLRDENSSRSFRITILPQKLQVLQCLKFPGLSQQRM

SEQ ID NO: 886284 - protein, 672 aa, Homo sapiens; identical to SEQ ID NO: 886272

SEQ ID NO: 886285 - protein, 533 aa, Homo sapiens
RRRSCAPRHRNGRQLWAALARALLLPLLAQWLLRAAPELAPAPFTLPLRVAAATNRVVAPTPGPGTPAERHADGLALALEPALASPAGAANFLAMVDNLQGDSGRGYYLEMLIGTPPQKLQILVDTGSSNFAVAGTPHSYIDTYFDTERSSTYRSKGFDVTVKYTQGSWTGFVGEDLVTIPKGFNTSFLVNIATIFESENFFLPGIKWNGILGLAYATLAKPSSSLETFFDSLVTQANIPNVFSMQMCGAGLPVAGSGTNGGSLVLGGIEPSLYKGDIWYTPIKEEWYYQIEILKLEIGGQSLNLDCREYNADKAIVDSGTTLLRLPQKVFDAVVEAVARASLIPEFSDGFWTGSQLACWTNSETPWSYFPKISIYLRDENSSRSFRITILPQLYIQPMMGAGLNYECYRFGISPSTNALVIGATVMEGFYVIFDRAQKRVGFAASPCAEIAGAAVSEISGPFSTEDVASNCVPAQSLSEPILWIVSYALMSVCGAILLVLIVLLLLPFRCQRRPRDPEVVNDESSLVRHRWK

SEQ ID NO: 886286 - protein, 385 aa, Homo sapiens
MSSTYRSKGFDVTVKYTQGSWTGFVGEDLVTIPKGFNTSFLVNIATIFESENFFLPGIKWNGILGLAYATLAKPSSSLETFFDSLVTQANIPNVFSMQMCGAGLPVAGSGTNGGSLVLGGIEPSLYKGDIWYTPIKEEWYYQIEILKLEIGGQSLNLDCREYNADKAIVDSGTTLLRLPQKVFDAVVEAVARASLIPEFSDGFWTGSQLACWTNSETPWSYFPKISIYLRDENSSRSFRITILPQLYIQPMMGAGLNYECYRFGISPSTNALVIGATVMEGFYVIFDRAQKRVGFAASPCAEIAGAAVSEISGPFSTEDVASNCVPAQSLSEPILWIVSYALMSVCGAILLVLIVLLLLPFRCQRRPRDPEVVNDESSLVRHRWK

SEQ ID NO: 886287 - protein, 457 aa, Homo sapiens
GIKSRLLPHQESQLQILVDTGSSNFAVAGTPHSYIDTYFDTERSSTYRSKGFDVTVKYTQGSWTGFVGEDLVTIPKGFNTSFLVNIATIFESENFFLPGIKWNGILGLAYATLAKGRKQRNKSLGWQVAEPVSHRVCFALPPLKKPSSSLETFFDSLVTQANIPNVFSMQMCGAGLPVAGSGTNGGSLVLGGIEPSLYKGDIWYTPIKEEWYYQIEILKLEIGGQSLNLDCREYNADKAIVDSGTTLLRLPQKVFDAVVEAVARASLIPEFSDGFWTGSQLACWTNSETPWSYFPKISIYLRDENSSRSFRITILPQLYIQPMMGAGLNYECYRFGISPSTNALVIGATVMEGFYVIFDRAQKRVGFAASPCAEIAGAAVSEISGPFSTEDVASNCVPAQSLSEPILWIVSYALMSVCGAILLVLIVLLLLPFRCQRRPRDPEVVNDESSLVRHRWK

SEQ ID NO: 886288 - protein, 134 aa, Homo sapiens [sequence omitted]

SEQ ID NO: 886289 - protein, 494 aa, Homo sapiens
AGALSEEIRDSSFPGKRRGLSPARVGRAGAGGPRRPPSPAVTLAAGEGLGRCGAVAAARGGSGEELAQLGGAGWGGSAPPRPPPRPPPSPLPRASSPPASLLPWALLPSSPPPPVPVRAHPCPQPRAPAESLSRGCRTGRDRLGWARPPGPAVGMGALARALLLPLLAQWLLRAAPELAPAPFTLPLRVAAATNRVVAPTPGPGTPAERHADGLALALEPALASPAGAANFLAMVDNLQGDSGRGYYLEMLIGTPPQKLQILVDTGSSNFAVAGTPHSYIDTYFDTERSSTYRSKGFDVTVKYTQGSWTGFVGEDLVTIPKGFNTSFLVNIATIFESENFFLPGIKWNGILGLAYATLAKPSSSLETFFDSLVTQANIPNVFSMQMCGAGLPVAGSGTNGGSLVLGGIEPSLYKGDIWYTPIKEEWYYQIEILKLEIGGQSLNLDCREYNADKAIVDSGTTLLRLPQKVFDAVVEAVARASLVSPRDTHGSPSC

SEQ ID NO: 886290 - protein, 87 aa, Homo sapiens
DFGTRDTQRISLEIMTLQPRCEDVETAEGVALTVTGVAQVKIMTEKELLAVACEQFLGKNVQDIKNVVLQTLEGHLRSILGEALFSL

SEQ ID NO: 886291 - protein, 428 aa, Homo sapiens
MGNCHTVGPNEALVVSGGCCGSDYKQYVFGGWAWAWWCISDTQRISLEIMTLQPRCEDVETAEGVALTVTGVAQVKIMTEKELLAVACEQFLGKNVQDIKNVVLQTLEGHLRSILGTLTVEQIYQDRDQFAKLVREVAAPDVGRMGIEILSFTIKDVYDKVDYLSSLGKTQTAVVQRDADIGVAEAERDAGIREAECKKEMLDVKFMADTKIADSKRAFELQKSAFSEEVNIKTAEAQLAYELQGAREQQKIRQEEIEIEVVQRKKQIAVEAQEILRTDKELIATVRRPAEAEAHRIQQIAEGEKVKQVLLAQAEAEKIRKIGEAEAAVIEAMGKAEAERMKLKAEAYQKYGDAAKMALVLEALPQIAAKIAAPLTKVDEIVVLSGDNSKVTSEVNRLLAELPASVHALTGVDLSKIPLIKKATGVQV

SEQ ID NO: 886292 - protein, 402 aa, Homo sapiens
MGNCHTVGPNEALVVSGGCCGSDYKQYVFGGWAWAWWCISDTQRISLEIMTLQPRCEDVETAEGVALTVTGVAQVKIMTEKELLAVACEQFLGKNVQDIKNVVLQTLEGHLRSILGTLTVEQIYQDRDQFAKLVREVAAPDVGRMGIEILSFTIKDVYDKVDYLSSLGKTQTAVVQRDADIGVAEAERDAGIREAECKKEMLDVKFMADTKIADSKRAFELQKSAFSEEVNIKTAEAQLAYELQGAREQQKIRQEEIEIEVVQRKKQIAVEAQEILRTDKELIATVRRPAEAEAHRIQQIAEGEKVKQVLLAQAEAEKIRKIGEAEAAVIEAMGKAEAERMKLKAEAYQKYGDAAKMALVLEALPQVRLPPKRVLGFKCPCLTSWASARTSLGLASNTGTDG

SEQ ID NO: 886293 - protein, 428 aa, Homo sapiens; identical to SEQ ID NO: 886291

SEQ ID NO: 886294 - protein, 379 aa, Homo sapiens
MTLQPRCEDVETAEGVALTVTGVAQVKIMTEKELLAVACEQFLGKNVQDIKNVVLQTLEGHLRSILGTLTVEQIYQDRDQFAKLVREVAAPDVGRMGIEILSFTIKDVYDKVDYLSSLGKTQTAVVQRDADIGVAEAERDAGIREAECKKEMLDVKFMADTKIADSKRAFELQKSAFSEEVNIKTAEAQLAYELQGAREQQKIRQEEIEIEVVQRKKQIAVEAQEILRTDKELIATVRRPAEAEAHRIQQIAEGEKVKQVLLAQAEAEKIRKIGEAEAAVIEAMGKAEAERMKLKAEAYQKYGDAAKMALVLEALPQIAAKIAAPLTKVDEIVVLSGDNSKVTSEVNRLLAELPASVHALTGVDLSKIPLIKKATGVQV

SEQ ID NO: 886295 - protein, 483 aa, Homo sapiens
MGNCHTVGPNEALVVSGGCCGSDYKQYVFGGWAWAWWCISDTQRLSLEVMTILCRCENIETSEGVPLFVTGVAQVPCPCLLDCKWGNSKGFWKLCQVCQISLEIMTLQPRCEDVETAEGVALTVTGVAQVKIMTEKELLAVACEQFLGKNVQDIKNVVLQTLEGHLRSILGTLTVEQIYQDRDQFAKLVREVAAPDVGRMGIEILSFTIKDVYDKVDYLSSLGKTQTAVVQRDADIGVAEAERDAGIREAECKKEMLDVKFMADTKIADSKRAFELQKSAFSEEVNIKTAEAQLAYELQGAREQQKIRQEEIEIEVVQRKKQIAVEAQEILRTDKELIATVRRPAEAEAHRIQQIAEGEKVKQVLLAQAEAEKIRKIGEAEAAVIEAMGKAEAERMKLKAEAYQKYGDAAKMALVLEALPQIAAKIAAPLTKVDEIVVLSGDNSKVTSEVNRLLAELPASVHALTGVDLSKIPLIKKATGVQV

SEQ ID NO: 886296 - protein, 258 aa, Homo sapiens
TVDNLLGRSSESWKDMNATEQVHTCTMLLDVLEEGAFLLADNVREPARFLAAKENVVLEVNIKTAEAQLAYELQGAREQQKIRQEEIEIEVVQRKKQIAVEAQEILRTDKELIATVRRPAEAEAHRIQQIAEGEKVKQVLLAQAEAEKIRKIGEAEAAVIEAMGKAEAERMKLKAEAYQKYGDAAKMALVLEALPQIAAKIAAPLTKVDEIVVLSGDNSKVTSEVNRLLAELPASVHALTGVDLSKIPLIKKATGVQV

SEQ ID NO: 886297 - protein, 111 aa, Homo sapiens
GIASSVFAEAAVIEAMGKAEAERMKLKAEAYQKYGDAAKMALVLEALPQIAAKIAAPLTKVDEIVVLSGDNSKVTSEVNRLLAELPASVHALTGVDLSKIPLIKKATGVQV

SEQ ID NO: 886298 - protein, 366 aa, Homo sapiens
MGNCHTVGPNEALVVSGGCCGSDYKQYVFGGWAWAWWCISDTQRISLEIMTLQPRCEDVETAEGVALTVTGVAQVKIMTEKELLAVACEQFLGKNVQDIKNVVLQTLEGHLRSILGTLTVEQIYQDRDQFAKLVREVAAPDVGRMGIEILSFTIKDVYDKVDYLSSLGKTQTAVVQRDADIGVAEAERDAGIREAECKKEMLDVKFMADTKIADSKRAFELQKSAFSEEVNIKTAEAQLAYELQGAREQQKIRQEEIEIEVVQRKKQIAVEAQEILRTDKELIATVRRPAEAEAHRIQQIAEGEKVKQVLLAQAEAEKIRKIGEAEAAVIEAMGKAEAERMKLKAEAYQKYGDAAKMALVLEALPQ

SEQ ID NO: 886299 - protein, 402 aa, Homo sapiens; identical to SEQ ID NO: 886292

SEQ ID NO: 886300 - protein, 164 aa, Homo sapiens
MGNCHTVGPNEALVVSGGCCGSDYKQYVFGGWAWAWWCISDTQRISLEIMTLQPRCEDVETAEGVALTVTGVAQVKIMTEKELLAVACEQFLGKNVQDIKNVVLQTLEGHLRSILGTLTVEQIYQDRDQFAKLVREVAAPDVGRMGIEILSFTIKDPSVLAGVL

SEQ ID NO: 886301 - protein, 39 aa, Homo sapiens
MGKGTIPIPLALVAMGGAEAWEAWSTLCGRGRVQASFNT

SEQ ID NO: 886302 - protein, 428 aa, Homo sapiens; identical to SEQ ID NO: 886291

SEQ ID NO: 886303 - protein, 428 aa, Homo sapiens; identical to SEQ ID NO: 886291

SEQ ID NO: 886304 - protein, 428 aa, Homo sapiens; identical to SEQ ID NO: 886291

SEQ ID NO: 886305 - protein, 328 aa, Homo sapiens
MTEKELLAVACEQFLGTLTVEQIYQDRDQFAKLVREVAAPDVGRMGIEILSFTIKDVYDKVDYLSSLGKTQTAVVQRDADIGVAEAERDAGIREAECKKEMLDVKFMADTKIADSKRAFELQKSAFSEEVNIKTAEAQLAYELQGAREQQKIRQEEIEIEVVQRKKQIAVEAQEILRTDKELIATVRRPAEAEAHRIQQIAEGEKVKQVLLAQAEAEKIRKIGEAEAAVIEAMGKAEAERMKLKAEAYQKYGDAAKMALVLEALPQIAAKIAAPLTKVDEIVVLSGDNSKVTSEVNRLLAELPASVHALTGVDLSKIPLIKKATGVQV

SEQ ID NO: 886306 - protein, 428 aa, Homo sapiens; identical to SEQ ID NO: 886291

SEQ ID NO: 886307 - protein, 428 aa, Homo sapiens; identical to SEQ ID NO: 886291

SEQ ID NO: 886308 - protein, 159 aa, Homo sapiens
GIASSVFAEAAVIEAMGKAEAERMKLKAEAYQKYGDAAKMALVLEALPQIAAKIAAPLTKVDEIVVLSGDNSKVTSEVNRLLAELPASVHALTGVDLSKIPCPFSLTPRAQRQGLLSTAASSVSYCLRRPLLVLREGLFMGMFLLGRCGLVPTLLSFLR

SEQ ID NO: 886309 - protein, 130 aa, Homo sapiens
MGNCHTVGPNEALVVSGGCCGSDYKQYVFGGWAWAWWCISDTQRISLEIMTLQPRCEDVETAEGVALTVTGVAQVKIMTEKELLAVACEQFLGKNVQDIKNVVLQTLEGHLRSILGPIHSHKFSLDIRAA

SEQ ID NO: 886310 - protein, 125 aa, Homo sapiens
MGNCHTVGPNEALVVSGGCCGSDYKQYVFGGWAWAWWCISDTQRLSLEVMTILCRCENIETSEGVPLFVTGVAQNQQRRFKSVKSKKKPWSLRQFVVGGHVIYKKFLLPFTHFCCSISSIPKDPH

SEQ ID NO: 886311 - protein, 435 aa, Homo sapiens
SSYWVNTGGSKMAAVATCGSVAASTGSAVATASKSNVTSFQRRGPRASVTNDSGPRLVSIAGTRPSVRNGQLLVSTGLPALDQLLGGGLAVGTVLLIEEDKYNIYSPLLFKYFLAEGIVNGHTLLVASAKEDPANILQELPAPLLDDKCKKEFDEDVYNHKTPESNIKMKIAWRYQLLPKMEIGPVSSSRFGHYYDASKRMPQELIEASNWHGFFLPEKISSTLKVEPCSLTPGYTKLLQFIQNIIYEEGFDGSNPQKKQRNILRIGIQNLGSPLWGDDICCAENGGNSHSLTKFLYVLRGLLRTSLSACIITMPTHLIQNKAIIARVTTLSDVVVGLESFIGSERETNPLYKDYHGLIHIRQIPRLNNLICDESDVKDLAFKLKRKLFTIERLHLPPDLSDTVSRSSKMDLAESAKRLGPGCGMMAGGKKHLDF

SEQ ID NO: 886312 - protein, 546 aa, Homo sapiens
SSYWVNTGGSKMAAVATCGSVAASTGSAVATASKSNVTSFQRRGPRASVTNDSGPRLVSIAGTRPSVRNGQLLVSTGLPALDQLLGGGLAVGTVLLIEEDKYNIYSPLLFKYFLAEGIVNGHTLLVASAKEDPANILQELPAPLLDDKCKKEFDEDVYNHKTPESNIKMKIAWRYQLLPKMEIGPVSSSRFGHYYDASKRMPQELIEASNWHGFFLPEKISSTLKVEPCSLTPGYTKLLQFIQNIIYEEGFDGSNPQKKQRNILRIGIQNLGSPLWGDDICCAENGGNSHSLTKFLYVLRGLLRTSLSACIITMPTHLIQNKAIIARVTTLSDVVVGLESFIGSERETNPLYKDYHGLIHIRQIPRLNNLICDESDVKDLAFKLKRKLFTIEAGVQWHDLGSRQPRLLGSSNSPASASLVAGITGAHHHTQLIFVFLVEMGFHHVGQAGLELLTSGDSSASASQSAGITGMSYRARPRALYFKENKSKVGARQLLETREEHLSSRLLILTQAERLCMGRRFFTAFHIFNELPCKGDCICLQTCQTQ

SEQ ID NO: 886313 - protein, 369 aa, Homo sapiens
GEKGPPVSWLRVSRFFGARGGGLAVGTVLLIEEDKYNIYSPLLFKYFLAEGIVNGHTLLVASAKEDPANILQELPAPLLDDKCKKEFDEDVYNHKTPESNIKMKIAWRYQLLPKMEIGPVSSSRFGHYYDASKRMPQELIEASNWHGFFLPEKISSTLKVEPCSLTPGYTKLLQFIQNIIYEEGFDGSNPQKKQRNILRIGIQNLGSPLWGDDICCAENGGNSHSLTKFLYVLRGLLRTSLSACIITMPTHLIQNKAIIARVTTLSDVVVGLESFIGSERETNPLYKDYHGLIHIRQIPRLNNLICDESDVKDLAFKLKRKLFTIERLHLPPDLSDTVSRSSKMDLAESAKRLGPGCGMMAGGKKHLDF

SEQ ID NO: 886314 - protein, 546 aa, Homo sapiens; identical to SEQ ID NO: 886312

SEQ ID NO: 886315 - protein, 324 aa, Homo sapiens
SSYWVNTGGSKMAAVATCGSVAASTGSAVATASKSNVTSFQRRGPRASVTNDSGPRLVSIAGTRPSVRNGQLLVSTGLPALDQLLGGGLAVGTVLLIEEDKYNIYSPLLFKYFLAEGIVNGHTLLVASAKEDPANILQELPAPLLDDKCKKEFDEDVYNHKTPESNIKMKIAWRYQLLPKMEIGPVSSSRFGHYYDASKRMPQELIEASNWHGFFLPEKISSTLKVEPCSLTPGYTKLLQFIQNIIYEEGFDGSNPQKKQRNILRIGIQNLGSPLWGDDICCAENGGNSHSLTKFLYVLRGLLRTSLSACIITMPTHLIQNKAN

SEQ ID NO: 886316 - protein, 267 aa, Homo sapiens
MKIAWRYQLLPKMEIGPVSSSRFGHYYDASKRMPQELIEASNWHGFFLPEKISSTLKVEPCSLTPGYTKLLQFIQNIIYEEGFDGSNPQKKQRNILRIGIQNLGSPLWGDDICCAENGGNSHSLTKFLYVLRGLLRTSLSACIITMPTHLIQNKAIIARVTTLSDVVVGLESFIGSERETNPLYKDYHGLIHIRQIPRLNNLICDESDVKDLAFKLKRKLFTIERLHLPPDLSDTVSRSSKMDLAESAKRLGPGCGMMAGGKKHLDF

SEQ ID NO: 886317 - protein, 449 aa, Homo sapiens
SSYWVNTGGSKMAAVATCGSVAASTGSAVATASKSNVTSFQRRGPRASVTNDSGPRLVSIAGTRPSVRNGQLLVSTGLPALDQLLGGGLAVGTVLLIEEDKYNIYSPLLFKYFLAEGIVNGHTLLVASAKEDPANILQELPAPLLDDKCKKEFDEDVYNHKTPESNIKMKIAWRYQLLPKMEIGPVSSSRFGHYYDASKRMPQELIEASNWHGFFLPEKISSTLKVEPCSLTPGYTKLLQFIQNIIYEEGFDGSNPQKKQRNILRIGIQNLGSPLWGDDICCAENGGNSHSLTKFLYVLRGLLRTSLSACIITMPTHLIQNKAIIARVTTLSDVVVGLESFIGSERETNPLYKDYHGLIHIRQIPRLNNLICDESDVKDLAFKLKRKLFTIEILENERKEKERIIERLHLPPDLSDTVSRSSKMDLAESAKRLGPGCGMMAGGKKHLDF

SEQ ID NO: 886318 - protein, 461 aa, Homo sapiens
SSYWVNTGGSKMAAVATCGSVAASTGSAVATASKSNVTSFQRRGPRASVTNDSGPRLVSIAGTRPSVRNGQLLVSTGLPALDQLLGGGLAVGTVLLIEEDKYNIYSPLLFKYFLAEGIVNGHTLLVASAKEDPANILQELPAPLLDDKCKKEFDEDVYNHKTPESNIKMKIAWRYQLLPKMEIGPVSSSRFGHYYDASKRMPQELIEASNWHGFFLPEKISSTLKVEPCSLTPGYTKLLQFIQNIIYEEGFDGSNPQKKQRNILRIGIQNLGSPLWGDDICCAENGGNSHSLTKFLYVLRGLLRTSLSACIITMPTHLIQNKAIIARVTTLSDVVVGLESFIGSERETNPLYKDYHGLIHIRQIPRLNNLICDESDVKDLAFKLKRKLFTIEAEVQKGVSTATFLLDGPRKKLFPCLFQLLEVACIPWLMASSSVFKASNIGFESLCYQLSGFFSASLLHF

SEQ ID NO: 886319 - protein, 262 aa, Homo sapiens
GGNNSSSNQGSLPEKMQPILLLLAFLLLPRADAGEIIGGHEAKPHSRPYMAYLMIWDQKSLKRCGGFLIQDDFVLTAAHCWGSSINVTLGAHNIKEQEPTQQFIPVKRPIPHPAYNPKNFSNDIMLLQLERKAKRTRAVQPLRLPSNKAQVKPGQTCSVAGWGQTAPLGKHSHTLQEVKMTVQEDRKCESDLRHYYDSTIELCVGDPEIKKTSFKGDSGGPLVCNKVAQGIVSYGRNNGMPPRACTKVSSFVHWIKKTMKRY

SEQ ID NO: 886320 - protein, 105 aa, Homo sapiens
GGNNSSSNQGSLPEKMQPILLLLAFLLLPRADAGEIIGGHEAKPHSRPYMAYLMIWDQKSLKRCGGFLIQDDFVLTAAHCWGSWRERPSGPELCSPSGYLATRPR

SEQ ID NO: 886321 - protein, 257 aa, Homo sapiens
SGLFQDGGASVASDRAEGRPAKPSKTAAREKTEGAVAAVGGGPSSFRCCYGCCHEARLGRTSLPRGVIMLTEASLSIWGWGSLGIVLFLITFGPFVIFYLTFYILCFVGGGLVVTLLFGKTNSEKYLEQCEHSFLPPTSPGVPKCLEEMKREARTIKIDRRLTGANIIDEPLQQVIQFSLRDYVQYWYYTLSDDESFLLEIRQTLQNALIQFATRVSPCRPGWSTMAQSRLTATSASWNPVLFNKTLVSLCLLEYVI

SEQ ID NO: 886322 - protein, 203 aa, Homo sapiens
MKREARTIKIDRRLTGANIIDEPLQQVIQFSLRDYVQYWYYTLSDDESFLLEIRQTLQNALIQFATRSKEIDWQPYFTTRIVDDFGTHLRVFRKAQQKITEKDDQVKGTAEDLVDTFFEVEVEMEKEVCRDLVCTSPKDEEGFLRDLCEVLLYLLLPPGDFQNKIMRYFVREILARGILLPLINQLSDPDYINQYVIWMVGAF

SEQ ID NO: 886323 - protein, 877 aa, Homo sapiens
MKREARTIKIDRRLTGANIIDEPLQQVIQFSLRDYVQYWYYTLSDDESFLLEIRQTLQNALIQFATRSKEIDWQPYFTTRIVDDFGTHLRVFRKAQQKITEKDDQVKGTAEDLVDTFFEVEVEMEKEVCRDLVCTSPKDEEGFLRDLCEVLLYLLLPPGDFQNKIMRYFVREILARGILLPLINQLSDPDYINQYVIWMIRDSNCNYEAFMNIIKLSDNIGELEAVRDKAAEELQYLRSLDTAGDDINTIKNQINSLLFVKKVCDSRIQRLQSGKEINTVKLAANFGKLCTVPLDSILVDNVALQFFMDYMQQTGGQAHLFFWMTVEGYRVTAQQQLEVLLSRQRDGKHQTNQTKGLLRAAAVGIYEQYLSEKASPRVTVDDYLVAKLADTLNHEDPTPEIFDDIQRKVYELMLRDERFYPSFRQNALYVRMLAELDMLKDPSFRGSDDGDGESFNGSPTGSINLSLDDLSNVSSDDSVQLHAYISDTGVCNDHGKTYALYAITVHRRNLNSEEMWKTYRRYSDFHDFHMRITEQFESLSSILKLPGKKTFNNMDRDFLEKRKKDLNAYLQLLLAPEMMKASPALAHYVYDFLENKAYSKGKGDFARKMDTFVNPLRNSMRNVSNAVKSLPDSLAEGMTKMSDNMGKMSERLGQDIKQSFFKVPPLIPKTDSDPEHRRVSAQLDDNVDDNIPLRVMLLLMDEVFDLKERNQWLRRNIKNLLQQLIRATYGDTINRKIVDHVDWMTSPEQVADSVKRFRDAFWPNGILAEAVPCRDKSIRMRTRVAGKTKLLAIMPDELKHIIGAETTRKGILRVFEMFQHNQLNRRMVYVFLEGFLETLFPQYKFRELFNKLHSRSKQMQKYKQKLQTTQAPSLQKR

SEQ ID NO: 886324 - protein, 877 aa, Homo sapiens; identical to SEQ ID NO: 886323

SEQ ID NO: 886325 - protein, 1025 aa, Homo sapiens
SGLFQDGGASVASDRAEGRPAKPSKTAAREKTEGAVAAVGGGPSSFRCCYGCCHEARLGRTSLPRGVIMLTEASLSIWGWGSLGIVLFLITFGPFVIFYLTFYILCFVGGGLVVTLLFGKTNSEKYLEQCEHSFLPPTSPGVPKCLEEMKREARTIKIDRRLTGANIIDEPLQQVIQFSLRDYVQYWYYTLSDDESFLLEIRQTLQNALIQFATRSKEIDWQPYFTTRIVDDFGTHLRVFRKAQQKITEKDDQVKGTAEDLVDTFFEVEVEMEKEVCRDLVCTSPKDEEGFLRDLCEVLLYLLLPPGDFQNKIMRYFVREILARGILLPLINQLSDPDYINQYVIWMIRDSNCNYEAFMNIIKLSDNIGELEAVRDKAAEELQYLRSLDTAGDDINTIKNQINSLLFVKKVCDSRIQRLQSGKEINTVKLAANFGKLCTVPLDSILVDNVALQFFMDYMQQTGGQAHLFFWMTVEGYRVTAQQQLEVLLSRQRDGKHQTNQTKGLLRAAAVGIYEQYLSEKASPRVTVDDYLVAKLADTLNHEDPTPEIFDDIQRKVYELMLRDERFYPSFRQNALYVRMLAELDMLKDPSFRGSDDGDGESFNGSPTGSINLSLDDLSNVSSDDSVQLHAYISDTGVCNDHGKTYALYAITVHRRNLNSEEMWKTYRRYSDFHDFHMRITEQFESLSSILKLPGKKTFNNMDRDFLEKRKKDLNAYLQLLLAPEMMKASPALAHYVYDFLENKAYSKGKGDFARKMDTFVNPLRNSMRNVSNAVKSLPDSLAEGMTKMSDNMGKMSERLGQDIKQSFFKVPPLIPKTDSDPEHRRVSAQLDDNVDDNIPLRVMLLLMDEVFDLKERNQWLRRNIKNLLQQLIRATYGDTINRKIVDHVDWMTSPEQVADSVKRFRDAFWPNGILAEAVPCRDKSIRMRTRVAGKTKLLAIMPDELKHIIGAETTRKGILRVFEMFQHNQLNRRMVYVFLEGFLETLFPQYKFRELFNKLHSRSKQMQKYKQKLQTTQAPSLQKR

SEQ ID NO: 886326 - protein, 257 aa, Homo sapiens; identical to SEQ ID NO: 886321

SEQ ID NO: 886327 - protein, 349 aa, Homo sapiens
SGLFQDGGASVASDRAEGRPAKPSKTAAREKTEGAVAAVGGGPSSFRCCYGCCHEARLGRTSLPRGVIMLTEASLSIWGWGSLGIVLFLITFGPFVIFYLTFYILCFVGGGLVVTLLFGKTNSEKYLEQCEHSFLPPTSPGVPKCLEEMKREARTIKIDRRLTGANIIDEPLQQVIQFSLRDYVQYWYYTLSDDESFLLEIRQTLQNALIQFATRSKEIDWQPYFTTRIVDDFGTHLRVFRKAQQKITEKDDQVKGTAEDLVDTFFEVEVEMEKEVCRDLVCTSPKDEEGFLRDLCEVLLYLLLPPGDFQNKIMRYFVRVSLNSYHIIPAKKCRAVVFKIFGLKTLLHS

SEQ ID NO: 886328 - protein, 1025 aa, Homo sapiens; identical to SEQ ID NO: 886325

SEQ ID NO: 886329 - protein, 877 aa, Homo sapiens; identical to SEQ ID NO: 886323

SEQ ID NO: 886330 - protein, 712 aa, Homo sapiens [sequence omitted]

SEQ ID NO: 886331 - protein, 294 aa, Homo sapiens
SGLFQDGGASVASDRAEGRPAKPSKTAAREKTEGAVAAVGGGPSSFRCCYGCCHEARLGRTSLPRGVIMLTEASLSIWGWGSLGIVLFLITFGPFVIFYLTFYILCFVGGGLVVTLLFGKTNSEKYLEQCEHSFLPPTSPGVPKCLEEMKREARTIKIDRRLTGANIIDEPLQQVIQFSLRDYVQYWYYTLSDDESFLLEIRQTLQNALIQFATRSKEIDWQPYFTTRIVDDFGTHLRVFRKAQQKITEKDDQVKGTAEDLVDTFFEVEVEMEKEVCRDLVCTSPKDEEGFLLI

SEQ ID NO: 886332 - protein, 760 aa, Homo sapiens
MLTFLPSPQELFTRSLAESELRSAPYEFPEESPIEQLEERRQRLERQISQDVKLEPDILLRAKQDFLKTDSDSDLQLYKEQGEGQGDRSLRERDVLEREFQRVTISGEEKCGVPFTDLLDAAKSVVRALFIREKYMALSLQSFCPTTRRYLQQLAEKPLETRTYEQGPDTPVSADAPVHPPALEQHPYEHCEPSTMPGDLGLGLRMVRGVVHVYTRREPDEHCSEVELPYPDLQEFVADVNVLMALIINGPIKSFCYRRLQYLSSKFQMHVLLNEMKELAAQKKVPHRDFYNIRKVDTHIHASSCMNQKHLLRFIKRAMKRHLEEIVHVEQGREQTLREVFESMNLTAYDLSVDTLDVHADRNTFHRFDKFNAKYNPIGESVLREIFIKTDNRVSGKYFAHIIKEVMSDLEESKYQNAELRLSIYGRSRDEWDKLARWAVMHRVHSPNVRWLVQVPRLFDVYRTKGQLANFQEMLENIFLPLFEATVHPASHPELHLFLEHVDGFDSVDDESKPENHVFNLESPLPEAWVEEDNPPYAYYLYYTFANMAMLNHLRRQRGFHTFVLRPHCGEAGPIHHLVSAFMLAENISHGLLLRKAPVLQYLYYLAQIGIAMSPLSNNSLFLSYHRNPLPEYLSRGLMVSLSTDDPLQFHFTKEPLMEEYSIATQVWKLSSCDMCELARNSVLMSGFSHKVKSHWLGPNYTKEGPEGNDIRRTNVPDIRVGYRYETLCQELALITQAVQSEMLETIPEEAGITMSPGPQ

SEQ ID NO: 886333 - protein, 760 aa, Homo sapiens; identical to SEQ ID NO: 886332

SEQ ID NO: 886334 - protein, 885 aa, Homo sapiens
MDGKCKEIAEELFTRSLAESELRSAPYEFPEESPIEQLEERRQRLERQISQDVKLEPDILLRAKQDFLKTDSDSDLQLYKEQGEGQGDRSLRERDVLEREFQRVTISGEEKCGVPFTDLLDAAKSVVRALFIREKYMALSLQSFCPTTRRYLQQLAEKPLETRTYEQGPDTPVSAGGTPHLCPMPCALASWLLSLVPGTSALPASPYNPGSFQPLGVQGWRLGRSCLTYWVFNISCPLWGLWVGQWVAWKSPALTLPSSPLQMPRCTPLRWSSTRMSTVSQAPCLGTWAWVCAWCGVWCTSTPAGNPTSSKRGVVHVGGMQRGRLRWLGRGHRARLALLTQAPLHASCSEVELPYPDLQEFVADVNVLMALIINGPIKSFCYRRLQYLSSKFQMHVLLNEMKELAAQKKVPHRDFYNIRKVDTHIHASSCMNQKHLLRFIKRAMKRHLEEIVHVEQGREQTLREVFESMNLTAYDLSVDTLDVHADRNTFHRFDKFNAKYNPIGESVLREIFIKTDNRVSGKYFAHIIKEVMSDLEESKYQNAELRLSIYGRSRDEWDKLARWAVMHRVHSPNVRWLVQVPRLFDVYRTKGQLANFQEMLENIFLPLFEATVHPASHPELHLFLEHVDGFDSVDDESKPENHVFNLESPLPEAWVEEDNPPYAYYLYYTFANMAMLNHLRRQRGFHTFVLRPHCGEAGPIHHLVSAFMLAENISHGLLLRKAPVLQYLYYLAQIGIAMSPLSNNSLFLSYHRNPLPEYLSRGLMVSLSTDDPLQFHFTKEPLMEEYSIATQVWKLSSCDMCELARNSVLMSGFSHKVKSHWLGPNYTKEGPEGNDIRRTNVPDIRVGYRYETLCQELALITQAVQSEMLETIPEEAGITMSPGPQ

SEQ ID NO: 886335 - protein, 616 aa, Homo sapiens
MLTFLPSPQELFTRSLAESELRSAPYEFPEESPIEQLEERRQRLERQISQDVKLEPDILLRAKQDFLKTDSDSDLQLYKEQGEGQGDRSLRERDVLEREFQRVTISGEEKCGVPFTDLLDAAKSVVRALFIREKYMALSLQSFCPTTRRYLQQLAEKPLETRTYEQGPDTPVSADAPVHPPALEQHPYEHCEPSTMPGDLGLGLRMVRGVVHVYTRREPDEHCSEVELPYPDLQEFVADVNVLMALIINGPIKSFCYRRLQYLSSKFQMHVLLNEMKELAAQKKVPHRDFYNIRKVDTHIHASSCMNQKHLLRFIKRAMKRHLEEIVHVEQGREQTLREVFESMNLTAYDLSVDTLDVHADRNTFHRFDKFNAKYNPIGESVLREIFIKTDNRVSGKYFAHIIKEVMSDLEESKYQNAELRLSIYGRSRDEWDKLARWAVMHRVHSPNVRWLVQVPRLFDVYRTKGQLANFQEMLENIFLPLFEATVHPASHPELHLFLEHVDGFDSVDDESKPENHVFNLESPLPEAWVEEDNPPYAYYLYYTFANMAMLNHLRRPPSCSTCTTWPRSASPCLRSATTASSSAITGIRYRSTCPAASWSPCPLMIPCSSTSPRSR

SEQ ID NO: 886336 - protein, 760 aa, Homo sapiens; identical to SEQ ID NO: 886332

SEQ ID NO: 886337 - protein, 754 aa, Homo sapiens
MLTFLPSPQELFTRSLAESELRSAPYEFPEESPIEQLEERRQRLERQISQDVKLEPDILLRAKQDFLKTDSDSDLQLYKEQGEGQGDRSLRERDVLEREFQRVTISGEEKCGVPFTDLLDAAKSVVRALFIREKYMALSLQSFCPTTRRYLQQLAEKPLETRTYEQGPDTPVSADAPVHPPALEQHPYEHCEPSTMPGDLGLGLRMVRGVVHVYTRREPDEHCSEVELPYPDLQEFVADVNVLMALIINGPIKSFCYRRLQYLSSKFQMHVLLNEMKELAAQKKVPHRDFYNIRKVDTHIHASSCMNQKHLLRFIKRAMKRHLEEIVHVEQGREQTLREVFESMNLTAYDLSVDTLDVHADRNTFHRFDKFNAKYNPIGESVLREIFIKTDNRVSGKYFAHIIKVRRQPSLPSLEPEDLGAFEGVRLKEGEADDPLKSSDSAHLMSDSAHLMSEEVMSDLEESKYQNAELRLSIYGRSRDEWDKLARWAVMHRVHSPNVRWLVQVPRLFECPWSGRGTDVYRTKGQLANFQEMLENIFLPLFEATVHPASHPELHLFLEHVSRQRRAGYGEGSRLRIQLQLWFLTPGFCIAPVLQYLYYLAQIGIAMSPLSNNSLFLSYHRNPLPEYLSRGLMVSLSTDDPLQFHFTKEPLMEEYSIATQVWKLSSCDMCELARNSVLMSGFSHKVKSHWLGPNYTKEGPEGNDIRRTNVPDIRVGYRYETLCQELALITQAVQSEMLETIPEEAGITMSPGPQ

SEQ ID NO: 886338 - protein, 175 aa, Homo sapiens
FCAPLCVALPEAPVLQYLYYLAQIGIAMSPLSNNSLFLSYHRNPLPEYLSRGLMVSLSTDDPLQFHFTKEPLMEEYSIATQVWKLSSCDMCELARNSVLMSGFSHKVKSHWLGPNYTKEGPEGNDIRRTNVPDIRVGYRYETLCQELALITQAVQSEMLETIPEEAGITMSPGPQ

SEQ ID NO: 886339 - protein, 760 aa, Homo sapiens; identical to SEQ ID NO: 886332

SEQ ID NO: 886340 - protein, 93 aa, Homo sapiens
ARYEAGSLNGQRHSVVMSGFVATEVKSHWLGPNYTKEGPEGNDIRRTNVPDIRVGYRYETLCQELALITQAVQSEMLETIPEEAGITMSPGPQ

SEQ ID NO: 886341 - protein, 798 aa, Homo sapiens
MASEARGGLGAPPLQSARSLPGPAPCLKHFPLDLRTSMDGKCKEIAEELFTRSLAESELRSAPYEFPEESPIEQLEERRQRLERQISQDVKLEPDILLRAKQDFLKTDSDSDLQLYKEQGEGQGDRSLRERDVLEREFQRVTISGEEKCGVPFTDLLDAAKSVVRALFIREKYMALSLQSFCPTTRRYLQQLAEKPLETRTYEQGPDTPVSADAPVHPPALEQHPYEHCEPSTMPGDLGLGLRMVRGVVHVYTRREPDEHCSEVELPYPDLQEFVADVNVLMALIINGPIKSFCYRRLQYLSSKFQMHVLLNEMKELAAQKKVPHRDFYNIRKVDTHIHASSCMNQKHLLRFIKRAMKRHLEEIVHVEQGREQTLREVFESMNLTAYDLSVDTLDVHADRNTFHRFDKFNAKYNPIGESVLREIFIKTDNRVSGKYFAHIIKEVMSDLEESKYQNAELRLSIYGRSRDEWDKLARWAVMHRVHSPNVRWLVQVPRLFDVYRTKGQLANFQEMLENIFLPLFEATVHPASHPELHLFLEHVDGFDSVDDESKPENHVFNLESPLPEAWVEEDNPPYAYYLYYTFANMAMLNHLRRQRGFHTFVLRPHCGEAGPIHHLVSAFMLAENISHGLLLRKAPVLQYLYYLAQIGIAMSPLSNNSLFLSYHRNPLPEYLSRGLMVSLSTDDPLQFHFTKEPLMEEYSIATQVWKLSSCDMCELARNSVLMSGFSHKVKSHWLGPNYTKEGPEGNDIRRTNVPDIRVGYRYETLCQELALITQAVQSEMLETIPEEAGITMSPGPQ

SEQ ID NO: 886342 - protein, 760 aa, Homo sapiens; identical to SEQ ID NO: 886332

SEQ ID NO: 886343 - protein, 723 aa, Homo sapiens
MLTFLPSPQELFTRSLAESELRSAPYEFPEESPIEQLEERRQRLERQISQDVKLEPDILLRAKQDFLKTDSDSDLQLYKEQGEGQGDRSLRERDVLEREFQRVTISGEEKCGVPFTDLLDAAKSVVRALFIREKYMALSLQSFCPTTRRYLQQLAEKPLETRTYEQGPDTPVSADAPVHPPALEQHPYEHCEPSTMPGDLGLGLRMVRGVVHVYTRREPDEHCSEVELPYPDLQEFVADVNVLMALIINGPIKSFCYRRLQYLSSKFQMHVLLNEMKELAAQKKVPHRDFYNIRKVDTHIHASSCMNQKHLLRFIKRAMKRHLEEIVHVEQGREQTLREVFESMNLTAYDLSVDTLDVHADRNTFHRFDKFNAKYNPIGESVLREIFIKTDNRVSGKYFAHIIKEVMSDLEESKYQNAELRLSIYGRSRDEWDKLARWAVMHRVHSPNVRWLVQVPRLFDVYRTKGQLANFQEMLENIFLPLFEATVHPASHPELHLFLEHVDGFDSVDDESKPENHVFNLESPLPEAWVEEDNPPYAYYLYYTFANMAMLNHLRRQRGFHTFVLRPHCGEAGPIHHLVSAFMLAENISHGLLLRKAPVLQYLYYLAQIGIAMSPLSNNSLFLSYHRNPLPEYLSRGLMVSLSTDDPLQFHFTKVKSHWLGPNYTKEGPEGNDIRRTNVPDIRVGYRYETLCQELALITQAVQSEMLETIPEEAGITMSPGPQ

SEQ ID NO: 886344 - protein, 860 aa, Homo sapiens
MLTFLPSPQELFTRSLAESELRSAPYEFPEESPIEQLEERRQRLERQISQDVKLEPDILLRAKQDFLKTDSDSDLQLYKEQGEGQGDRSLRERDVLEREFQRVTISGEEKCGVPFTDLLDAAKSVVRALFIREKYMALSLQSFCPTTRRYLQQLAEKPLETRTYEQGPDTPVSADAPVHPPALEQHPYEHCEPSTMPGDLGLGLRMVRGVVHVYTRREPDEHCSEVELPYPDLQEFVADVNVLMALIINGPIKSFCYRRLQYLSSKFQMHVLLNEMKELAAQKKVPHRDFYNIRKVDTHIHASSCMNQKHLLRFIKRAMKRHLEEIVHVEQGREQTLREVFESMNLTAYDLSVDTLDVHADRNTFHRFDKFNAKYNPIGESVLREIFIKTDNRVSGKYFAHIIKEVMSDLEESKYQNAELRLSIYGRSRDEWDKLARWAVMHRVHSPNVRWLVQVPRLFECPWSGRGTCGVIFKGSGPASCPPRMAEPPLSLPTPLSARKGFLVPSMVCPAWPTWVSLLSQYGSDAPLRSWAKLLTLAGPLGFLPLALTCTYLHVVYLHDVYRTKGQLANFQEMLENIFLPLFEATVHPASHPELHLFLEHVDGFDSVDDESKPENHVFNLESPLPEAWVEEDNPPYAYYLYYTFANMAMLNHLRRQRGFHTFVLRPHCGEAGPIHHLVSAFMLAENISHGLLLRKAPVLQYLYYLAQIGIAMSPLSNNSLFLSYHRNPLPEYLSRGLMVSLSTDDPLQFHFTKEPLMEEYSIATQVWKLSSCDMCELARNSVLMSGFSHKVKSHWLGPNYTKEGPEGNDIRRTNVPDIRVGYRYETLCQELALITQAVQSEMLETIPEEAGITMSPGPQ

SEQ ID NO: 886345 - protein, 760 aa, Homo sapiens; identical to SEQ ID NO: 886332

SEQ ID NO: 886346 - protein, 194 aa, Homo sapiens
MLTFLPSPQELFTRSLAESELRSAPYEFPEESPIEQLEERRQRLERQISQDVKLEPDILLRAKQDFLKTDSDSDLQSTDDPLQFHFTKEPLMEEYSIATQVWKLSSCDMCELARNSVLMSGFSHKVKSHWLGPNYTKEGPEGNDIRRTNVPDIRVGYRYETLCQELALITQAVQSEMLETIPEEAGITMSPGPQ

SEQ ID NO: 886347 - protein, 291 aa, Homo sapiens
MAEISRIQYEMEYTEGISQRMRVPEKLKVAPPNADLEQGFQEGVPNASVIMQVPERIVVAGNNEDVSFSRPADLDLIQSTPFKPLALKTPPRVLTLSERPLDFLDLERPPTTPQNEEIRAVGRLKRERSMSENAVRQNGQLVRNDSLVTPSPQQARVCPPHMLPEDGANLSSARGILSLIQSSTRRAYQQILDVLDENRRPVLRGGSAAATSNPHHDNVRYGISNIDTTIEGTSDDLTVVDAASLRRQIIKLNRRLQLLEEENKERAKREMVMYSITVAFWLLNSWLWFRR

SEQ ID NO: 886348 - protein, 307 aa, Homo sapiens
MDDFISISLLSLAMLVGCYVAGIIPLAVNFSEERLKLVTVLGAGLLCGTALAVIVPEGVHALYEDILEGKHHQASETHNVIASDKAAEKSVVHEHEHSHDHTQLHAYIGVSLVLGFVFMLLVDQIGNSHVHSTDDPEAARSSNSKITTTLGLVVHAAADGVALGAAASTSQTSVQLIVFVAIMLHKAPAAFGLVSFLMHAGLERNRIRKHLLVFALAAPVMSMVTYLGLSKSSKEALSEVNATGVAMLFSAGTFLYVATVHVLPEVGGIGHSHKPDATGGRGLSRLEVAALVLGCLIPLILSVGHQH

SEQ ID NO: 886349 - protein, 307 aa, Homo sapiens; identical to SEQ ID NO: 886348

SEQ ID NO: 886350 - protein, 307 aa, Homo sapiens; identical to SEQ ID NO: 886348

SEQ ID NO: 886351 - protein, 307 aa, Homo sapiens; identical to SEQ ID NO: 886348

SEQ ID NO: 886352 - protein, 307 aa, Homo sapiens; identical to SEQ ID NO: 886348

SEQ ID NO: 886353 - protein, 307 aa, Homo sapiens; identical to SEQ ID NO: 886348

SEQ ID NO: 886354 - protein, 245 aa, Homo sapiens
MDDFISISLLSLAMLVGCYVAGIIPLAVNFSEERLKLVTVLGAGLLCGTALAVIVPEGVHALYEDILEGKHHQASETHNVIASDKAAEKSVVHEHEHSHDHTQLHAYIGVSLVLGFVFMLLVDQIGNSHVHSTDDPEAARSSNSKITTTLGLVVHAAADGVALGAAASTSQTSVQLIVFVAIMLHKAPAAFGLVSFLMHAGLERNRIRKHLLVFALAAPVMSMVTYLGLSKRTKRTHQHRSVLSP

SEQ ID NO: 886355 - protein, 232 aa, Homo sapiens
MDDFISISLLSLAMLVGCYVAGIIPLAVNFSEERLKLVTVLGAGLLCGTALAVIVPEGVHALYEDILEGKHHQASETHNVIASDKAAEKSVVHEHEHSHDHTQLHAYIGVSLVLGFVFMLLVDQIGNSHVHSTDDPEAARSSNSKITTTLGLVVHAAADGVALGAAASTSQTSVQLIVFVAIMLHKAPAAFGLVSFLMHAGLERNRIRKHLLVFALAAPVMSMVTYLGLSKV

SEQ ID NO: 886356 - protein, 107 aa, Homo sapiens [sequence omitted]

SEQ ID NO: 886357 - protein, 307 aa, Homo sapiens; identical to SEQ ID NO: 886348

SEQ ID NO: 886358 - protein, 307 aa, Homo sapiens; identical to SEQ ID NO: 886348

SEQ ID NO: 886359 - protein, 307 aa, Homo sapiens; identical to SEQ ID NO: 886348

SEQ ID NO: 886360 - protein, 307 aa, Homo sapiens; identical to SEQ ID NO: 886348

SEQ ID NO: 886361 - protein, 327 aa, Homo sapiens
MEFKLEAHRIVSISLGKIYNSRVQRGGIKLHKNLLVSLVLRSARQVYLSDPCPGLYLAGPAGTPAPPPQQQPGEPAAGPPAGWGEPPPPAARASWPETEPQPERSSVSDAPRVGDEVPVATVTGVGDVFQGGEADATEAAWSRVEGPRQAAAREAEGTAGGWGVFPEVSRAARRPCGCPLGGEDPPGTPAATPRAACCCAPRPAEDEPPAPPAVCPRKRCAAGVGGGPAGCPAPGSTPLKKPRRNLEQPPSGGEDDDAEEMETGNVANLISIFGSSFSGLLRKSPGGGREEEEGEESGPEAAEPGQICCDKPVLRDMNPWSTAIVAF

SEQ ID NO: 886362 - protein, 327 aa, Homo sapiens; identical to SEQ ID NO: 886361

SEQ ID NO: 886363 - protein, 105 aa, Homo sapiens
SAGGGARRGAAMAAGGSDPRAGDVEEDASQLIFPKEFETAETLLNSEVHMLLEHRKQQNESAEDEQELSEVFMKTLNYTARFSRFKNRETIASVRRDKVSLCCPG

SEQ ID NO: 886364 - protein, 142 aa, Homo sapiens; identical to SEQ ID NO: 771513

SEQ ID NO: 886365 - protein, 142 aa, Homo sapiens; identical to SEQ ID NO: 771513

SEQ ID NO: 886366 - protein, 142 aa, Homo sapiens; identical to SEQ ID NO: 771513

SEQ ID NO: 886367 - protein, 142 aa, Homo sapiens; identical to SEQ ID NO: 771513

SEQ ID NO: 886368 - protein, 142 aa, Homo sapiens; identical to SEQ ID NO: 771513

SEQ ID NO: 886369 - protein, 142 aa, Homo sapiens; identical to SEQ ID NO: 771513

SEQ ID NO: 886370 - protein, 142 aa, Homo sapiens; identical to SEQ ID NO: 771513

SEQ ID NO: 886371 - protein, 142 aa, Homo sapiens; identical to SEQ ID NO: 771513

SEQ ID NO: 886372 - protein, 142 aa, Homo sapiens; identical to SEQ ID NO: 771513

SEQ ID NO: 886373 - protein, 104 aa, Homo sapiens
MLLEHRKQQNESAEDEQELSEVFMKTLNYTARFSRFKNRETIASVRSLLLQKKLHKFELACLANLCPETAEESKALIPSLEGRFEDEELQQILDDIQTKRSFQY

SEQ ID NO: 886374 - protein, 110 aa, Homo sapiens
MAAGGSDPRAGDVEEDASQLIFPKEFETAETLLNSEVHMLLEHRKQQNESAEDEQELSEVFMKTLNYTARFSRFKNRETIASVRSLEGRFEDEELQQILDDIQTKRSFQY

SEQ ID NO: 886375 - protein, 110 aa, Homo sapiens
MAAGGSDPRAGDVEEDASQLIFPKAWRDGLKMRSCSRFLMISRQSAAFSINLQTSLLLGETTSPGITPPSHCLGLTCTEILLKTVENSFGENSPAWRGVRLLFQITHRPR

SEQ ID NO: 886376 - protein, 508 aa, Homo sapiens
MTQTLKYASRVFHRVRWAPELGASLGYREYHSARRSLADIPGPSTPSFLAELFCKGGLSRLHELQVQGAAHFGPVWLASFGTVRTVYVAAPALVEELLRQEGPRPERCSFSPWTEHRRCRQRACGLLTAEGEEWQRLRSLLAPLLLRPQAAARYAGTLNNVVCDLVRRLRRQRGRGTGPPALVRDVAGEFYKFGLEGIAAVLLGSRLGCLEAQVPPDTETFIRAVGSVFVSTLLTMAMPHWLRHLVPGPWGRLCRDWDQMFAFAQRHVERREAEAAMRNGGQPEKDLESGAHLTHFLFREELPAQSILGNVTELLLAGVDTVSNTLSWALYELSRHPEVQTALHSEITAALSPGSSAYPSATVLSQLPLLKAVVKEVLRLYPVVPGNSRVPDKDIHVGDYIIPKNTLVTLCHYATSRDPAQFPEPNSFRPARWLGEGPTPHPFASLPFGFGKRSCMGRRLAELELQMALAQILTHFEVQPEPGAAPVRPKTRTVLVPERSINLQFLDR

SEQ ID NO: 886377 - protein, 536 aa, Homo sapiens
MTQTLKYASRVFHRVRWAPELGASLGYREYHSARRSLADIPGPSTPSFLAELFCKGGLSRLHELQVQGAAHFGPVWLASFGTVRTVYVAAPALVEELLRQEGPRPERCSFSPWTEHRRCRQRACGLLTAEGEEWQRLRSLLAPLLLRPQAAARYAGTLNNVVCDLVRRLRRQRGRGTGPPALVRDVAGEFYKFGLEGESQDRAGQASGAPYQSLPEPCGAPSRQGIAAVLLGSRLGCLEAQVPPDTETFIRAVGSVFVSTLLTMAMPHWLRHLVPGPWGRLCRDWDQMFAFAQRHVERREAEAAMRNGGQPEKDLESGAHLTHFLFREELPAQSILGNVTELLLAGVDTVSNTLSWALYELSRHPEVQTALHSEITAALSPGSSAYPSATVLSQLPLLKAVVKEVLRLYPVVPGNSRVPDKDIHVGDYIIPKNTLVTLCHYATSRDPAQFPEPNSFRPARWLGEGPTPHPFASLPFGFGKRSCMGRRLAELELQMALAQILTHFEVQPEPGAAPVRPKTRTVLVPERSINLQFLDR

SEQ ID NO: 886378 - protein, 105 aa, Homo sapiens
MTQTLKYASRVFHRVRWAPELGASLGYREYHSARRSLADIPGPSTPSFLAELFCKGGLSRLHELQVGRDAFPETECWGNWFCQRQKGLTSAEQMWDSQRERMPMK

SEQ ID NO: 886379 - protein, 479 aa, Homo sapiens
ATLAGPRLPGTREKSRSPGSSQLRLLELRHSTLLKKVQGAAHFGPVWLASFGTVRTVYVAAPALVEELLRQEGPRPERCSFSPWTEHRRCRQRACGLLTAEGEEWQRLRSLLAPLLLRPQAAARYAGTLNNVVCDLVRRLRRQRGRGTGPPALVRDVAGEFYKFGLEGIAAVLLGSRLGCLEAQVPPDTETFIRAVGSVFVSTLLTMAMPHWLRHLVPGPWGRLCRDWDQMFAFAQRHVERREAEAAMRNGGQPEKDLESGAHLTHFLFREELPAQSILGNVTELLLAGVDTVSNTLSWALYELSRHPEVQTALHSEITAALSPGSSAYPSATVLSQLPLLKAVVKEVLRLYPVVPGNSRVPDKDIHVGDYIIPKNTLVTLCHYATSRDPAQFPEPNSFRPARWLGEGPTPHPFASLPFGFGKRSCMGRRLAELELQMALAQILTHFEVQPEPGAAPVRPKTRTVLVPERSINLQFLDR

SEQ ID NO: 886380 - protein, 499 aa, Homo sapiens
MREEEFAVSKAYTSWAPEKEQKLPIPKPSQQPLAWAQVKLKVPAQVSKCPLCPLPQVQGAAHFGPVWLASFGTVRTVYVAAPALVEELLRQEGPRPERCSFSPWTEHRRCRQRACGLLTAEGEEWQRLRSLLAPLLLRPQAAARYAGTLNNVVCDLVRRLRRQRGRGTGPPALVRDVAGEFYKFGLEGIAAVLLGSRLGCLEAQVPPDTETFIRAVGSVFVSTLLTMAMPHWLRHLVPGPWGRLCRDWDQMFAFAQRHVERREAEAAMRNGGQPEKDLESGAHLTHFLFREELPAQSILGNVTELLLAGVDTVSNTLSWALYELSRHPEVQTALHSEITAALSPGSSAYPSATVLSQLPLLKAVVKEVLRLYPVVPGNSRVPDKDIHVGDYIIPKNTLVTLCHYATSRDPAQFPEPNSFRPARWLGEGPTPHPFASLPFGFGKRSCMGRRLAELELQMALAQILTHFEVQPEPGAAPVRPKTRTVLVPERSINLQFLDR

SEQ ID NO: 886381 - protein, 450 aa, Homo sapiens
STEMIREVQGAAHFGPVWLASFGTVRTVYVAAPALVEELLRQEGPRPERCSFSPWTEHRRCRQRACGLLTAEGEEWQRLRSLLAPLLLRPQAAARYAGTLNNVVCDLVRRLRRQRGRGTGPPALVRDVAGEFYKFGLEGIAAVLLGSRLGCLEAQVPPDTETFIRAVGSVFVSTLLTMAMPHWLRHLVPGPWGRLCRDWDQMFAFAQRHVERREAEAAMRNGGQPEKDLESGAHLTHFLFREELPAQSILGNVTELLLAGVDTVSNTLSWALYELSRHPEVQTALHSEITAALSPGSSAYPSATVLSQLPLLKAVVKEVLRLYPVVPGNSRVPDKDIHVGDYIIPKNTLVTLCHYATSRDPAQFPEPNSFRPARWLGEGPTPHPFASLPFGFGKRSCMGRRLAELELQMALAQILTHFEVQPEPGAAPVRPKTRTVLVPERSINLQFLDR

SEQ ID NO: 886382 - protein, 151 aa, Homo sapiens
AAWGCAAVDCLIDTLRTPNASCMRKGTHLLVPCLEEEELALHRRRLDMSEALPCPGKETPTPGCRLGALYWACVHNDPTQLQAILDGGVSPEEATQVDKQWEGHVPLVSLLLNYYVGLDLERRDQRGLTALMKAAMRNRCECVATLLMAGV

SEQ ID NO: 886383 - protein, 274 aa, Homo sapiens
MPGKLRSDAGLESDTAMKKGETLRKQTEEKEKKEKPKSDKTEEIAEEEETVFPKAKQVKKKAEPSEVDMNSPKSKKAKKKEEPSQNDISPKTKSLRKKKEPIEKKVVSSKTKKVTKNEEPSEEEIDAPKPKKMKKEKEMNGETREKSPKLKNGFPHPEPDCNPSEAASEESNSEIEQEIPVEQKEGAFSNFPISEETIKLLKGRGVTFLFPIQAKTFHHVYSGKDLIAQARTGTGKTFSFAIPLIEKLHGELQDRKRGRAPQVWFCAPKGWGPL

SEQ ID NO: 886384 - protein, 814 aa, Homo sapiens
VTRAGWTQGGELPLPLHAVEKTGRPGQPALKMPGKLRSDAGLESDTAMKKGETLRKQTEEKEKKEKPKSDKTEEIAEEEETVFPKAKQVKKKAEPSEVDMNSPKSKKAKKKEEPSQNDISPKTKSLRKKKEPIEKKVVSSKTKKVTKNEEPSEEEIDAPKPKKMKKEKEMNGETREKSPKLKNGFPHPEPDCNPSEAASEESNSEIEQEIPVEQKEGAFSNFPISEETIKLLKGRGVTFLFPIQAKTFHHVYSGKDLIAQARTGTGKTFSFAIPLIEKLHGELQDRKRGRAPQVLVLAPTRELANQVSKDFSDITKKLSVACFYGGTPYGGQFERMRNGIDILVGTPGRIKDHIQNGKLDLTKLKHVVLDEVDQMLDMGFADQVEEILSVAYKKDSEDNPQTLLFSATCPHWVFNVAKKYMKSTYEQVDLIGKKTQKTAITVEHLAIKCHWTQRAAVIGDVIRVYSGHQGRTIIFCETKKEAQELSQNSAIKQDAQSLHGDIPQKQREITLKGFRNGSFGVLVATNVAARGLDIPEVDLVIQSSPPKDVESYIHRSGRTGRAGRTGVCICFYQHKEEYQLVQVEQKAGIKFKRIGVPSATEIIKASSKDAIRLLDSVPPTAISHFKQSAEKLIEEKGAVEALAAALAHISGATSVDQRSLINSNVGFVTMILQCSIEMPNISYAWKELKEQLGEEIDSKVKGMVFLKGKLGVCFDVPTASVTEIQEKWHDSRRWQLSVATEQPELEGPREGYGGFRGQREGSRGFRGQRDGNRRFRGQREGSRGPRGQRSGGGNKSNRSQNKGQKRSFSKAFGQ

SEQ ID NO: 886385 - protein, 814 aa, Homo sapiens; identical to SEQ ID NO: 886384

SEQ ID NO: 886386 - protein, 814 aa, Homo sapiens; identical to SEQ ID NO: 886384

SEQ ID NO: 886387 - protein, 814 aa, Homo sapiens; identical to SEQ ID NO: 886384

SEQ ID NO: 886388 - protein, 806 aa, Homo sapiens
KSSRGWVKSADEKTGRPGQPALKMPGKLRSDAGLESDTAMKKGETLRKQTEEKEKKEKPKSDKTEEIAEEEETVFPKAKQVKKKAEPSEVDMNSPKSKKAKKKEEPSQNDISPKTKSLRKKKEPIEKKVVSSKTKKVTKNEEPSEEEIDAPKPKKMKKEKEMNGETREKSPKLKNGFPHPEPDCNPSEAASEESNSEIEQEIPVEQKEGAFSNFPISEETIKLLKGRGVTFLFPIQAKTFHHVYSGKDLIAQARTGTGKTFSFAIPLIEKLHGELQDRKRGRAPQVLVLAPTRELANQVSKDFSDITKKLSVACFYGGTPYGGQFERMRNGIDILVGTPGRIKDHIQNGKLDLTKLKHVVLDEVDQMLDMGFADQVEEILSVAYKKDSEDNPQTLLFSATCPHWVFNVAKKYMKSTYEQVDLIGKKTQKTAITVEHLAIKCHWTQRAAVIGDVIRVYSGHQGRTIIFCETKKEAQELSQNSAIKQDAQSLHGDIPQKQREITLKGFRNGSFGVLVATNVAARGLDIPEVDLVIQSSPPKDVESYIHRSGRTGRAGRTGVCICFYQHKEEYQLVQVEQKAGIKFKRIGVPSATEIIKASSKDAIRLLDSVPPTAISHFKQSAEKLIEEKGAVEALAAALAHISGATSVDQRSLINSNVGFVTMILQCSIEMPNISYAWKELKEQLGEEIDSKVKGMVFLKGKLGVCFDVPTASVTEIQEKWHDSRRWQLSVATEQPELEGPREGYGGFRGQREGSRGFRGQRDGNRRFRGQREGSRGPRGQRSGGGNKSNRSQNKGQKRSFSKAFGQ

SEQ ID NO: 886389 - protein, 831 aa, Homo sapiens
AEYVCCPQTKIIGSVSKEEEEEDEEEEDEEQMKRKTMMFIKREFPTEADSGKLRSDAGLESDTAMKKGETLRKQTEEKEKKEKPKSDKTEEIAEEEETVFPKAKQVKKKAEPSEVDMNSPKSKKAKKKEEPSQNDISPKTKSLRKKKEPIEKKVVSSKTKKVTKNEEPSEEEIDAPKPKKMKKEKEMNGETREKSPKLKNGFPHPEPDCNPSEAASEESNSEIEQEIPVEQKEGAFSNFPISEETIKLLKGRGVTFLFPIQAKTFHHVYSGKDLIAQARTGTGKTFSFAIPLIEKLHGELQDRKRGRAPQVLVLAPTRELANQVSKDFSDITKKLSVACFYGGTPYGGQFERMRNGIDILVGTPGRIKDHIQNGKLDLTKLKHVVLDEVDQMLDMGFADQVEEILSVAYKKDSEDNPQTLLFSATCPHWVFNVAKKYMKSTYEQVDLIGKKTQKTAITVEHLAIKCHWTQRAAVIGDVIRVYSGHQGRTIIFCETKKEAQELSQNSAIKQDAQSLHGDIPQKQREITLKGFRNGSFGVLVATNVAARGLDIPEVDLVIQSSPPKDVESYIHRSGRTGRAGRTGVCICFYQHKEEYQLVQVEQKAGIKFKRIGVPSATEIIKASSKDAIRLLDSVPPTAISHFKQSAEKLIEEKGAVEALAAALAHISGATSVDQRSLINSNVGFVTMILQCSIEMPNISYAWKELKEQLGEEIDSKVKGMVFLKGKLGVCFDVPTASVTEIQEKWHDSRRWQLSVATEQPELEGPREGYGGFRGQREGSRGFRGQRDGNRRFRGQREGSRGPRGQRSGGGNKSNRSQNKGQKRSFSKAFGQ

SEQ ID NO: 886390 - protein, 754 aa, Homo sapiens
AAARHGCRRRQNEEIAEEEETVFPKAKQVKKKAEPSEVDMNSPKSKKAKKKEEPSQNDISPKTKSLRKKKEPIEKKVVSSKTKKVTKNEEPSEEEIDAPKPKKMKKEKEMNGETREKSPKLKNGFPHPEPDCNPSEAASEESNSEIEQEIPVEQKEGAFSNFPISEETIKLLKGRGVTFLFPIQAKTFHHVYSGKDLIAQARTGTGKTFSFAIPLIEKLHGELQDRKRGRAPQVLVLAPTRELANQVSKDFSDITKKLSVACFYGGTPYGGQFERMRNGIDILVGTPGRIKDHIQNGKLDLTKLKHVVLDEVDQMLDMGFADQVEEILSVAYKKDSEDNPQTLLFSATCPHWVFNVAKKYMKSTYEQVDLIGKKTQKTAITVEHLAIKCHWTQRAAVIGDVIRVYSGHQGRTIIFCETKKEAQELSQNSAIKQDAQSLHGDIPQKQREITLKGFRNGSFGVLVATNVAARGLDIPEVDLVIQSSPPKDVESYIHRSGRTGRAGRTGVCICFYQHKEEYQLVQVEQKAGIKFKRIGVPSATEIIKASSKDAIRLLDSVPPTAISHFKQSAEKLIEEKGAVEALAAALAHISGATSVDQRSLINSNVGFVTMILQCSIEMPNISYAWKELKEQLGEEIDSKVKGMVFLKGKLGVCFDVPTASVTEIQEKWHDSRRWQLSVATEQPELEGPREGYGGFRGQREGSRGFRGQRDGNRRFRGQREGSRGPRGQRSGGGNKSNRSQNKGQKRSFSKAFGQ

SEQ ID NO: 886391 - protein, 785 aa, Homo sapiens
VTRAGWTQGGELPLPLHAVEKTGRPGQPALKMPGKLRSDAGLESDTAMKKGETLRKQTEEKEKKEKPKSDKTEEIAEEEETVFPKAKQVKKKAEPSEVDMNSPKSKKAKKKEEPSQNDISPKTKSLRKKKEPIEKKVVSSKTKKVTKNEEPSEEEIDAPKPKKMKKEKEMNGETREKSPKLKNGFPHPEPDCNPSEAASEESNSEIEQEIPVEQKEGAFSNFPISEETIKLLKGRGVTFLFPIQAKTFHHVYSGKDLIAQARTGTGKTFSFAIPLIEKLHGELQDRKRGRAPQVLVLAPTRELANQVSKDFSDITKKLSVACFYGGTPYGGQFERMRNGIDILVGTPGRIKDHIQNGKLDLTKLKHVVLDEVDQMLDMGFADQVEEILSVAYKKDSEDNPQTLLFSATCPHWVFNVAKKYMKSTYEQVDLIGKKTQKTAITVEHLAIKCHWTQRAAVIGDVIRVYSGHQGRTIIFCETKKEAQELSQNSAIKQDAQSLHGDIPQKQREITLKGFRNGSFGVLVATNVAARGLDIPEVDLVIQSSPPKDVESYIHRSGRTGRAGRTGVCICFYQHKEEYQLVQVEQKAGIKFKRIGVPSATEIIKASSKDAIRLLDSVPPTAISHFKQSAEKLIEEKGAVEALAAALAHISGATSVDQRSLINSNVGFVTMILQCSIEMPNISYAWKELKEQLGEEIDSKVKGMVFLKGKLGVCFDVPTASVTEIQEKWHDSRRWQLSVATEQPELEGPREGYGGFRGHDQEVATKVTDPKTKARSGVSVKHLVNN

SEQ ID NO: 886392 - protein, 569 aa, Homo sapiens
RYEARGEIGRDLIAQARTGTGKTFSFAIPLIEKLHGELQDRKRGRAPQVLVLAPTRELANQVSKDFSDITKKLSVACFYGGTPYGGQFERMRNGIDILVGTPGRIKDHIQNGKLDLTKLKHVVLDEVDQMLDMGFADQVEEILSVAYKKDSEDNPQTLLFSATCPHWVFNVAKKYMKSTYEQVDLIGKKTQKTAITVEHLAIKCHWTQRAAVIGDVIRVYSGHQGRTIIFCETKKEAQELSQNSAIKQDAQSLHGDIPQKQREITLKGFRNGSFGVLVATNVAARGLDIPEVDLVIQSSPPKDVESYIHRSGRTGRAGRTGVCICFYQHKEEYQLVQVEQKAGIKFKRIGVPSATEIIKASSKDAIRLLDSVPPTAISHFKQSAEKLIEEKGAVEALAAALAHISGATSVDQRSLINSNVGFVTMILQCSIEMPNISYAWKELKEQLGEEIDSKVKGMVFLKGKLGVCFDVPTASVTEIQEKWHDSRRWQLSVATEQPELEGPREGYGGFRGQREGSRGFRGQRDGNRRFRGQREGSRGPRGQRSGGGNKSNRSQNKGQKRSFSKAFGQ

SEQ ID NO: 886393 - protein, 230 aa, Homo sapiens
VTRAGWTQGGELPLPLHAVEKTGRPGQPALKMPGKLRSDAGLESDTAMKKGETLRKQTEEKEKKEKPKSDKTEEIAEEEETVFPKAKQVKKKAEPSEVDMNSPKSKKAKKKEEPSQNDISPKTKSLRKKKEPIEKKVVSSKTKKVTKNEEPSEEEIDAPKPKKMKKEKEMNGETREKSPKLKNGFPHPEPDCNPSEAASEESNSEIEQEIPVEQKEGAFSNFPIFQVPRP

SEQ ID NO: 886394 - protein, 331 aa, Homo sapiens
AAAKQRYQSPPREEEEPEPLPQQPLDPPPFFPISPPGLLVLGGRRREGTLDVPGSDLASEEGAAEPGVLEDTLVPELIMKALDEPPYLTVGTDVSAKYKWSKKLGIKFKRIGVPSATEIIKASSKDAIRLLDSVPPTAISHFKQSAEKLIEEKGAVEALAAALAHISGATSVDQRSLINSNVGFVTMILQCSIEMPNISYAWKELKEQLGEEIDSKVKGMVFLKGKLGVCFDVPTASVTEIQEKWHDSRRWQLSVATEQPELEGPREGYGGFRGQREGSRGFRGQRDGNRRFRGQREGSRGPRGQRSGGGNKSNRSQNKGQKRSFSKAFGQ

SEQ ID NO: 886395 - protein, 746 aa, Homo sapiens
VTRAGWTQGGELPLPLHAVEKTGRPGQPALKMPGKLRSDAGLESDTAMKKGETLRKQTEEKEKKEKPKSDKTEEIAEEEETVFPKAKQVKKKAEPSEVDMNSPKSKKAKKKEEPSQNDISPKTKSLRKKKEPIEKKVVSSKTKKVTKNEEPSEEEIDAPKPKKMKKEKEMNGETREKSPKLKNGFPHPEPDCNPSEAASEESNSEIEQEIPVEQKEGAFSNFPISEETIKLLKGRGVTFLFPIQAKTFHHVYSGKDLIAQARTGTGKTFSFAIPLIEKLHGELQDRKRGRAPQVLVLAPTRELANQVSKDFSDITKKLSVACFYGGTPYGGQFERMRNGIDILVGTPGRIKDHIQNGKLDLTKLKHVVLDEVDQMLDMGFADQVEEILSVAYKKDSEDNPQTLLFSATCPHWVFNVAKKYMKSTYEQVDLIGKKTQKTAITVEHLAIKCHWTQRAAVIGDVIRVYSGHQGRTIIFCETKKEAQELSQNSAIKQDAQSLHGDIPQKQREITLKGFRNGSFGVLVATNVAARGLDIPEVDLVIQSSPPKDVESYIHRSGRTGRAGRTGVCICFYQHKEEYQLVQVEQKAGIKFKRIGVPSATEIIKASSKDAIRLLDSVPPTAISHFKQSAEKLIEEKGAVEALAAALAHISGATSVDQRSLINSNVGFVTMILQCSIEMPNISYAWKELKEQLGEEIDSKVKGMVFLKGKLGVCFDVPTASVTEIQEKWHDSRRCLQHMPVPAHHLV

SEQ ID NO: 886396 - protein, 351 aa, Homo sapiens
VTRAGWTQGGELPLPLHAVEKTGRPGQPALKMPGKLRSDAGLESDTAMKKGETLRKQTEEKEKKEKPKSDKTEEIAEEEETVFPKAKQVKKKAEPSEVDMNSPKSKKAKKKEEPSQNDISPKTKSLRKKKEPIEKKVVSSKTKKVTKNEEPSEEEIDAPKPKKMKKEKEMNGETREKSPKLKNGFPHPEPDCNPSEAASEESNSEIEQEIPVEQKEGAFSNFPISEETIKLLKGRGVTFLFPIQAKTFHHVYSGKDLIAQARTGTGKTFSFAIPLIEKLHGELQDRKRGRAPQVNISNTVLGSFRSAQKRDTAWASLHTLFCLVVFCFLFFFLGLHLQHMAVPRLSELAVS

SEQ ID NO: 886397 - protein, 814 aa, Homo sapiens; identical to SEQ ID NO: 886384

SEQ ID NO: 886398 - protein, 814 aa, Homo sapiens; identical to SEQ ID NO: 886384

SEQ ID NO: 886399 - protein, 783 aa, Homo sapiens
MPGKLRSDAGLESDTAMKKGETLRKQTEEKEKKEKPKSDKTEEIAEEEETVFPKAKQVKKKAEPSEVDMNSPKSKKAKKKEEPSQNDISPKTKSLRKKKEPIEKKVVSSKTKKVTKNEEPSEEEIDAPKPKKMKKEKEMNGETREKSPKLKNGFPHPEPDCNPSEAASEESNSEIEQEIPVEQKEGAFSNFPISEETIKLLKGRGVTFLFPIQAKTFHHVYSGKDLIAQARTGTGKTFSFAIPLIEKLHGELQDRKRGRAPQVLVLAPTRELANQVSKDFSDITKKLSVACFYGGTPYGGQFERMRNGIDILVGTPGRIKDHIQNGKLDLTKLKHVVLDEVDQMLDMGFADQVEEILSVAYKKDSEDNPQTLLFSATCPHWVFNVAKKYMKSTYEQVDLIGKKTQKTAITVEHLAIKCHWTQRAAVIGDVIRVYSGHQGRTIIFCETKKEAQELSQNSAIKQDAQSLHGDIPQKQREITLKGFRNGSFGVLVATNVAARGLDIPEVDLVIQSSPPKDVESYIHRSGRTGRAGRTGVCICFYQHKEEYQLVQVEQKAGIKFKRIGVPSATEIIKASSKDAIRLLDSVPPTAISHFKQSAEKLIEEKGAVEALAAALAHISGATSVDQRSLINSNVGFVTMILQCSIEMPNISYAWKELKEQLGEEIDSKVKGMVFLKGKLGVCFDVPTASVTEIQEKWHDSRRWQLSVATEQPELEGPREGYGGFRGQREGSRGFRGQRDGNRRFRGQREGSRGPRGQRSGGGNKSNRSQNKGQKRSFSKAFGQ

SEQ ID NO: 886400 - protein, 807 aa, Homo sapiens
TYASTSSCYRPSEKTGRPGQPALKMPGKLRSDAGLESDTAMKKGETLRKQTEEKEKKEKPKSDKTEEIAEEEETVFPKAKQVKKKAEPSEVDMNSPKSKKAKKKEEPSQNDISPKTKSLRKKKEPIEKKVVSSKTKKVTKNEEPSEEEIDAPKPKKMKKEKEMNGETREKSPKLKNGFPHPEPDCNPSEAASEESNSEIEQEIPVEQKEGAFSNFPISEETIKLLKGRGVTFLFPIQAKTFHHVYSGKDLIAQARTGTGKTFSFAIPLIEKLHGELQDRKRGRAPQVLVLAPTRELANQVSKDFSDITKKLSVACFYGGTPYGGQFERMRNGIDILVGTPGRIKDHIQNGKLDLTKLKHVVLDEVDQMLDMGFADQVEEILSVAYKKDSEDNPQTLLFSATCPHWVFNVAKKYMKSTYEQVDLIGKKTQKTAITVEHLAIKCHWTQRAAVIGDVIRVYSGHQGRTIIFCETKKEAQELSQNSAIKQDAQSLHGDIPQKQREITLKGFRNGSFGVLVATNVAARGLDIPEVDLVIQSSPPKDVESYIHRSGRTGRAGRTGVCICFYQHKEEYQLVQVEQKAGIKFKRIGVPSATEIIKASSKDAIRLLDSVPPTAISHFKQSAEKLIEEKGAVEALAAALAHISGATSVDQRSLINSNVGFVTMILQCSIEMPNISYAWKELKEQLGEEIDSKVKGMVFLKGKLGVCFDVPTASVTEIQEKWHDSRRWQLSVATEQPELEGPREGYGGFRGQREGSRGFRGQRDGNRRFRGQREGSRGPRGQRSGGGNKSNRSQNKGQKRSFSKAFGQ

SEQ ID NO: 886401 - protein, 650 aa, Homo sapiens
PGVNRPRGETREKSPKLKNGFPHPEPDCNPSEAASEESNSEIEQEIPVEQKEGAFSNFPISEETIKLLKGRGVTFLFPIQAKTFHHVYSGKDLIAQARTGTGKTFSFAIPLIEKLHGELQDRKRGRAPQVLVLAPTRELANQVSKDFSDITKKLSVACFYGGTPYGGQFERMRNGIDILVGTPGRIKDHIQNGKLDLTKLKHVVLDEVDQMLDMGFADQVEEILSVAYKKDSEDNPQTLLFSATCPHWVFNVAKKYMKSTYEQVDLIGKKTQKTAITVEHLAIKCHWTQRAAVIGDVIRVYSGHQGRTIIFCETKKEAQELSQNSAIKQDAQSLHGDIPQKQREITLKGFRNGSFGVLVATNVAARGLDIPEVDLVIQSSPPKDVESYIHRSGRTGRAGRTGVCICFYQHKEEYQLVQVEQKAGIKFKRIGVPSATEIIKASSKDAIRLLDSVPPTAISHFKQSAEKLIEEKGAVEALAAALAHISGATSVDQRSLINSNVGFVTMILQCSIEMPNISYAWKELKEQLGEEIDSKVKGMVFLKGKLGVCFDVPTASVTEIQEKWHDSRRWQLSVATEQPELEGPREGYGGFRGQREGSRGFRGQRDGNRRFRGQREGSRGPRGQRSGGGNKSNRSQNKGQKRSFSKAFGQ

SEQ ID NO: 886402 - protein, 479 aa, Homo sapiens [sequence omitted]

SEQ ID NO: 886403 - protein, 440 aa, Homo sapiens
MLDMGFADQVEEILSVAYKKDSEDNPQTLLFSATCPHWVFNVAKKYMKSTYEQVDLIGKKTQKTAITVEHLAIKCHWTQRAAVIGDVIRVYSGHQGRTIIFCETKKEAQELSQNSAIKQDAQSLHGDIPQKQREITLKGFRNGSFGVLVATNVAARGLDIPEVDLVIQSSPPKDVESYIHRSGRTGRAGRTGVCICFYQHKEEYQLVQVEQKAGIKFKRIGVPSATEIIKASSKDAIRLLDSVPPTAISHFKQSAEKLIEEKGAVEALAAALAHISGATSVDQRSLINSNVGFVTMILQCSIEMPNISYAWKELKEQLGEEIDSKVKGMVFLKGKLGVCFDVPTASVTEIQEKWHDSRRWQLSVATEQPELEGPREGYGGFRGQREGSRGFRGQRDGNRRFRGQREGSRGPRGQRSGGGNKSNRSQNKGQKRSFSKAFGQ

SEQ ID NO: 886404 - protein, 846 aa, Homo sapiens
VTRAGWTQGGELPLPLHAVEKTGRPGQPALKMPGKLRSDAGLESDTAMKKGETLRKQTEEKEKKEKPKSDKTEEIAEEEETVFPKAKQVKKKAEPSEVDMNSPKSKKAKKKEEPSQNDISPKTKSLRKKKEPIEKKVVSSKTKKVTKNEEPSEEEIDAPKPKKMKKEKEMNGETREKSPKLKNGFPHPEPDCNPSEAASEESNSEIEQEIPVEQKEGAFSNFPISEETIKLLKGRGVTFLFPIQAKTFHHVYSGKDLIAQARTGTGKTFSFAIPLIEKLHGELQDRKRGRAPQVLVLAPTRELANQVSKDFSDITKKLSVACFYGGTPYGGQFERMRNGIDILVGTPGRIKDHIQNGKLDLTKLKHVVLDEVDQMLDMGFADQVEEILSVAYKKDSEDNPQTLLFSATCPHWVFNVAKKYMKSTYEQVDLIGKKTQKTAITVEHLAIKCHWTQRAAVIGDVIRVYSGHQGRTIIFCETKKEAQELSQNSAIKQDAQSLHGDIPQKQREITLKGFRNGSFGVLVATNVAARGLDIPEVDLVIQSSPPKDVESYIHRSGRTGRAGRTGVCICFYQHKEEYQLVQVEQKAGIKFKRIGVPSATEIIKASSKDAIRLLDSVPPTAISHFKQSAEKLIEEKGAVEALAAALAHISGATSVDQRSLINSNVGFVTMILQCSIEMPNISYAWKELKEQLGEEIDSKVKGMVFLKGKLGVCFDVPTASVTEIQEKWHDSRRWQLSVATEQPELEGPREGYGGFRGQREGSRGFRGQRDGNRRFRGQREGSRGPRGQRSGGGNKSNRSQNKGHIQIGKLDLTKLKHVVLDEVAQMLDMGFADQVERFHVSHTRTF

SEQ ID NO: 886405 - protein, 433 aa, Homo sapiens
VTRAGWTQGGELPLPLHAVEKTGRPGQPALKMPGKLRSDAGLESDTAMKKGETLRKQTEEKEKKEKPKSDKTEEIAEEEETVFPKAKQVKKKAEPSEVDMNSPKSKKAKKKEEPSQNDISPKTKSLRKKKEPIEKKVVSSKTKKVTKNEEPSEEEIDAPKPKKMKKEKEMNGETREKSPKLKNGFPHPEPDCNPSEAASEESNSEIEQEIPVEQKEGAFSNFPISEETIKLLKGRGVTFLFPIQAKTFHHVYSGKDLIAQARTGTGKTFSFAIPLIEKLHGELQDRKRGRAPQVLVLAPTRELANQVSKDFSDITKKLSVACFYGGTPYGGQFERMRNGIDILVGTPGRIKDHIQNGKLDLTKLKHVVLDEVDQMLDMGFADQVEEILSVAYKKVVFDTTWCSNQDINPIPHAFKLTSIGSSTIKTSHLTAFL

SEQ ID NO: 886406 - protein, 405 aa, Homo sapiens
MVDMMNNRFRKDMMKNASESKLSKDNLKKRLKEEFQHAMGGVPAWAETTKRKTSSDDESEEDEDDLLQRTGNFISTSTSLPRGILKMKNCQHANAERPTVARISSVQFHPGAQIVMVAGLDNAVSLFQVDGKTNPKIQSIYLERFPIFKACFSANGEEVLATSTHSKVLYVYDMLAGKLIPVHQVRGLKEKIVRSFEVSPDGSFLLINGIAGYLHLLAMKTKELIGSMKINGRVAASTFSSDSKKVYASSGDGEVYVWDVNSRKCLNRFVDEGSLYGLSIATSRNGQYVACGSNCGVVNIYNQDSCLQETNPKPIKAIMNLVTGVTSLTFNPTTEILAIASEKMKEAVRLVHLPSCTVFSNFPVIKNKNISHVHTMDFSPRSGYFALGNEKGKALMYRLHHYSDF

SEQ ID NO: 886407 - protein, 184 aa, Homo sapiens
PGRMRSEVPRERLRFSSNLTMPPERRRRMKLDRRTGAKPKRKPGMRPDWKAGAGPGGPPQKPAPSSQRKPPARPSAAAAAIAVAAAEEERRLRQRNRLRLEEDKPAVERCLGGKLGVPSGDGRRNERRKRGCLRAFLSKGPRSGFKGNQMQRKLLGQVGNLSQRKQGFGGKPGKTFWRHRARNM

SEQ ID NO: 886408 - protein, 390 aa, Homo sapiens
VTLQDPGYHIILKKRLKEEFQHAMGGVPAWAETTKRKTSSDDESEEDEDDLLQRTGNFISTSTSLPRGILKMKNCQHANAERPTVARISSVQFHPGAQIVMVAGLDNAVSLFQVDGKTNPKIQSIYLERFPIFKACFSANGEEVLATSTHSKVLYVYDMLAGKLIPVHQVRGLKEKIVRSFEVSPDGSFLLINGIAGYLHLLAMKTKELIGSMKINGRVAASTFSSDSKKVYASSGDGEVYVWDVNSRKCLNRFVDEGSLYGLSIATSRNGQYVACGSNCGVVNIYNQDSCLQETNPKPIKAIMNLVTGVTSLTFNPTTEILAIASEKMKEAVRLVHLPSCTVFSNFPVIKNKNISHVHTMDFSPRSGYFALGNEKGKALMYRLHHYSDF

SEQ ID NO: 886409 - protein, 659 aa, Homo sapiens
  misc_feature (642)..(642): Xaa can be any naturally occurring amino acid
PGRMRSEVPRERLRFSSNLTMPPERRRRMKLDRRTGAKPKRKPGMRPDWKAGAGPGGPPQKPAPSSQRKPPARPSAAAAAIAVAAAEEERRLRQRNRLRLEEDKPAVERCLEELVFGDVENDEDALLRRLRGPRVQEHEDSGDSEVENEAKGNFPPQKKPVWVDEEDEDEEMVDMMNNRFRKDMMKNASESKLSKDNLKKRLKEEFQHAMGGVPAWAETTKRKTSSDDESEEDEDDLLQRTGNFISTSTSLPRGILKMKNCQHANAERPTVARISSVQFHPGAQIVMVAGLDNAVSLFQVDGKTNPKIQSIYLERFPIFKACFSANGEEVLATSTHSKVLYVYDMLAGKLIPVHQVRGLKEKIVRSFEVSPDGSFLLINGIAGYLHLLAMKTKELIGSMKINGRVAASTFSSDSKKVYASSGDGEVYVWDVNSRKCLNRFVDEGSLYGLSIATSRNGQYVACGSNCGVVNIYNQDSCLQETNPKPIKAIMNLVTGVTSLTFNPTTEILAIASEKMKEAVRLVHLPSCTVFSNFPVIKNKNISHVHTMDFSPRSGYFALGNEKGKALMYRCLVAIPDSKSYGVSESRERRESPKLPIGTRQIHRGLNRGTTGVVTKTCNTNSGSTRITARKALPGGEMRHNHXEEDHENGHNSTRTGGAT

SEQ ID NO: 886410 - protein, 172 aa, Homo sapiens
PGRMRSEVPRERLRFSSNLTMPPERRRRMKLDRRTGAKPKRKPGMRPDWKAGAGPGGPPQKPAPSSQRKPPARPSAAAAAIAVAAAEEERRLRQRNRLRLEEDKPAVERCLEELVFGDVENDEDALLRRLRGPRVQEHEDSGDSEVENEAKGNFPPQKKPVWVDEEDEDEEI

SEQ ID NO: 886411 - protein, 534 aa, Homo sapiens
PGRMRSEVPRERLRFSSNLTMPPERRRRMKLDRRTGAKPKRKPGMRPDWKAGAGPGGPPQKPAPSSQRKPPARPSAAAAAIAVAAAEEERRLRQRNRLRLEEDKPAVERCLEELVFGDVENDEDALLRRLRGPRVQEHEDSGDSEVENEAKGNFPPQKKPVWVDEEDEDEEMVDMMNNRFRKDMMKNASESKLSKDNLKKRLKEEFQHAMGGVPAWAETTKRKTSSDDESEEDEDDLLQRTGNFISTSTSLPRGILKMKNCQHANAERPTVARISSVQFHPGAQIVMVAGLDNAVSLFQVDGKTNPKIQSIYLERFPIFKACFSANGEEVLATSTHSKVLYVYDMLAGKLIPVHQVRGLKEKIVRSFEVSPDGSFLLINGIAGYLHLLAMKTKELIGSMKINGRVAASTFSSDSKKVYASSGDGEVYVWDVNSRKCLNRFVDEGSLYGLSIATSRNGQYVACGSNCGVVNIYNQDSCLQETNPKPIKAIMNLVTGVTSLTFNPTTEILAIASEKMKEAVRLACCLNRTEAILGF

SEQ ID NO: 886412 - protein, 264 aa, Homo sapiens
PGRMRSEVPRERLRFSSNLTMPPERRRRMKLDRRTGAKPKRKPGMRPDWKAGAGPGGPPQKPAPSSQRKPPARPSAAAAAIAVAAAEEERRLRQRNRLRLEEDKPAVERCLEELVFGDVENDEDALLRRLRGPRVQEHEDSGDSEVENEAKGNFPPQKKPVWVDEEDEDEEMVDMMNNRFRKDMMKNASESKLSKDNLKKRLKEEFQHAMGGVPAWAETTKRKTSSDDESEEDEDDLLQRTGNFISTSTSLPRGILKRYYVPIA

SEQ ID NO: 886413 - protein, 223 aa, Homo sapiens
PGRMRSEVPRERLRFSSNLTMPPERRRRMKLDRRTGAKPKRKPGMRPDWKAGAGPGGPPQKPAPSSQRKPPARPSAAAAAIAVAAAEEERRLRQRNRLRLEEDKPAVERCLEELVFGDVENDEDALLRRLRGPRVREAAARGLGALGRGARWAVKLRGAEPGRPAAAGSAQVGGSPRTRARRVAAAGPSPPCSRLKVPGGRGPRLSPPLEAPLLGYLLCELWS

SEQ ID NO: 886414 - protein, 576 aa, Homo sapiens
PGRMRSEVPRERLRFSSNLTMPPERRRRMKLDRRTGAKPKRKPGMRPDWKAGAGPGGPPQKPAPSSQRKPPARPSAAAAAIAVAAAEEERRLRQRNRLRLEEDKPAVERCLEELVFGDVENDEDALLRRLRGPRVQEHEDSGDSEVENEAKGNFPPQKKPVWVDEEDEDEEMVDMMNNRFRKDMMKNASESKLSKDNLKKRLKEEFQHAMGGVPAWAETTKRKTSSDDESEEDEDDLLQRTGNFISTSTSLPRGILKMKNCQHANAERPTVARISSVQFHPGAQIVMVAGLDNAVSLFQVDGKTNPKIQSIYLERFPIFKACFSANGEEVLATSTHSKVLYVYDMLAGKLIPVHQVRGLKEKIVRSFEVSPDGSFLLINGIAGYLHLLAMKTKELIGSMKINGRVAASTFSSDSKKVYASSGDGEVYVWDVNSRKCLNRFVDEGSLYGLSIATSRNGQYVACGSNCGVVNIYNQDSCLQETNPKPIKAIMNLVTGVTSLTFNPTTEILAIASEKMKEAVRLVHLPSCTVFSNFPVIKNKNISHVHTMDFSPRSGYFALGNEKGKALMYRLHHYSDF

SEQ ID NO: 886415 - protein, 73 aa, Homo sapiens
  misc_feature (17)..(17): Xaa can be any naturally occurring amino acid
PAPPHKSRTRPKREGRXGVHLPSCTVFSNFPVIKNKNISHVHTMDFSPRSGYFALGNEKGKALMYRLHHYSDF

SEQ ID NO: 886416 - protein, 530 aa, Homo sapiens
PSGEAVSKTCKNEENIYEEMCAVCLMQDFKKKNNCYATVNLLCILCATGMKGDIAKYSSSSRSVEGVTPGVGGVPAWAETTKRKTSSDVQEHEDSGDSEVENEAKGNFPPQKKPVWVDEEDEDEEMVDMMNNRFRKDMMKNASESKLSKDNLKKRLKEEFQHAMGGVPAWAETTKRKTSSDDESEEDEDDLLQRTGNFISTSTSLPRGILKMKNCQHANAERPTVARISSVQFHPGAQIVMVAGLDNAVSLFQVDGKTNPKIQSIYLERFPIFKACFSANGEEVLATSTHSKVLYVYDMLAGKLIPVHQVRGLKEKIVRSFEVSPDGSFLLINGIAGYLHLLAMKTKELIGSMKINGRVAASTFSSDSKKVYASSGDGEVYVWDVNSRKCLNRFVDEGSLYGLSIATSRNGQYVACGSNCGVVNIYNQDSCLQETNPKPIKAIMNLVTGVTSLTFNPTTEILAIASEKMKEAVRLVHLPSCTVFSNFPVIKNKNISHVHTMDFSPRSGYFALGNEKGKALMYRLHHYSDF

SEQ ID NO: 886417 - protein, 576 aa, Homo sapiens; identical to SEQ ID NO: 886414

SEQ ID NO: 886418 - protein, 544 aa, Homo sapiens
PGRMRSEVPRERLRFSSNLTMPPERRRRMKLDRRTGAKPKRKPGMRPDWKAGAGPGGPPQKPAPSSQRKPPARPSAAAAAIAVAAAEEERRLRQRNRLRLEEDKPAVERCLEELVFGDVENDEDALLRRLRGPRVQEHEDSGDSEVENEAKGNFPPQKKPVWVDEEDEDEEMVDMMNNRFRKDMMKNASESKLSKDNLKKRLKEEFQHAMGGVPAWAETTKRKTSSDDESEEDEDDLLQRTGNFISTSTSLPRGILKMKNCQHANAERPTVARISSVQFHPGAQIVMVAGLDNAVSLFQVDGKTNPKIQSIYLERFPIFKACFSANGEEVLATSTHSKVLYVYDMLAGKLIPVHQVRGLKEKIVRSFEVSPDGSFLLINGIAGYLHLLAMKTKELIGSMKINGRVAASTFSSDSKKVYASSGDGEVYVWDVNSRKCLNRFVDEGSLYGLSIATSRNGQYVACGSNCGVVNIYNQDSCLQETNPKPIKAIMNLVTGVTSLTFNPTTEILAIASEKMKEAVRLVAPLLRLLKRLFEVQLSHKRSLS

SEQ ID NO: 886419 - protein, 495 aa, Homo sapiens
PGRMRSEVPRERLRFSSNLTMPPERRRRMKLDRRTGAKPKRKPGMRPDWKAGAGPGGPPQKPAPSSQRKPPARPSAAAAAIAVAAAEEERRLRQRNRLRLEEDKPAVERCLEELVFGDVENDEDALLRRLRGPRVQEHEDSGDSEVENEAKGNFPPQKKPVWVDEEDEDEEMVDMMNNRFRKDMMKNASESKLSKDNLKKRLKEEFQHAMGGVPAWAETTKRKTSSDDESEEDEDDLLQRTGNFISTSTSLPRGILKMKNCQHANAERPTVARISSVQFHPGAQIVMVAGLDNAVSLFQVDGKTNPKIQSIYLERFPIFKACFSANGEEVLATSTHSKVLYVYDMLAGKLIPVHQVRGLKGEDSEGGLEVSQKWVLHGPIKRKMAGTVAHQYGKHDVKDTKKHGIGNADTIRARGVRHTQCLYAKCSKRIYAIRGKTKEHDREEYTRRRAHTFVKRENRERVAIEEQQGGRQGGQTQATCAHSRDKSKREKSQTT

SEQ ID NO: 886420 - protein, 207 aa, Homo sapiens
PGRMRSEVPRERLRFSSNLTMPPERRRRMKLDRRTGAKPKRKPGMRPDWKAGAGPGGPPQKPAPSSQRKPPARPSAAAAAIAVAAAEEERRLRQRNRLRLEEDKPAVERCLEELVFGDVENDEDALLRRLRGPRVQEHEDSGDSEVENEAKGNFPPQKKPVWVDEEDEDEEMVDMMNNRFRKDMMKKKKKKKKKKKNQKNLFFDCRF

SEQ ID NO: 886421 - protein, 354 aa, Homo sapiens
DGGAHARAPSCAQPPTRPQSEVRGPGARRGWPPRPLGLRGEGASAPVVIAPAAFSLGLRDTAPRPGARCVPGRVLGTVPRVPYKDCQAIMKVLLLKDAKEDDCGQDPYIRELGLYGLEATLIPVLSFEFLSLPSFSEKLSHPEDYGGLIFTSPRAVEAAELCLEQNNKTEVWERSLKEKWNAKSVYVVGNATASLVSKIGLDTEGETCGNAEKLAEYICSRESSALPLLFPCGNLKREILPKALKDKGIAMESITVYQTVAHPGIQGNLNSYYSQQGVPASITFFSPSGLTYSLKHIQELSGDNIDQIKFAAIGPTTARALAAQGLPVSCTAESPTPQALATGIRKALQPHGCC

SEQ ID NO: 886422 - protein, 265 aa, Homo sapiens
MKVLLLKDAKEDDCGQDPYIRELGLYGLEATLIPVLSFEFLSLPSFSEKLSHPEDYGGLIFTSPRAVEAAELCLEQNNKTEVWERSLKEKWNAKSVYVVGNATASLVSKIGLDTEGETCGNAEKLAEYICSRESSALPLLFPCGNLKREILPKALKDKGIAMESITVYQTVAHPGIQGNLNSYYSQQGVPASITFFSPSGLTYSLKHIQELSGDNIDQIKFAAIGPTTARALAAQGLPVSCTAESPTPQALATGIRKALQPHGCC

SEQ ID NO: 886423 - protein, 81 aa, Homo sapiens
SSAQRLNPSPVRASCKLHCREPHATSPGHWHQEGSPAPWLLLSQPPSAGPMQPPWAGLALDGARHRQGLSGAAAVRLLPQA

SEQ ID NO: 886424 - protein, 354 aa, Homo sapiens; identical to SEQ ID NO: 886421

SEQ ID NO: 886425 - protein, 331 aa, Homo sapiens
DGGAHARAPSCAQPPTRPQSEVRGPGARRGWPPRPLGLRGEGASAPVVIAPAAFSLGLRDTAPRPGARCVPGRVLGTVPRVPYKDCQAIMKVLLLKDAKEDDCGQDPYIRELGLYGLEATLIPVLSFEFLSLPSFSEKLSHPEDYGGLIFTSPRAVEAAELCLEQNNKTEVWERSLKEKWNAKSVYVVGNATASLVSKIGLDTEGETCGNAEKLAEYICSRESSALPLLFPCGNLKREILPKALKDKGIAMESITVYQTVAHPGIQGNLNSYYSQQGVPASITFFSPSGLTYSLKHIQELSGDNIDQIKMRRWRPERMGHGPRSLSCGAGI

SEQ ID NO: 886426 - protein, 354 aa, Homo sapiens; identical to SEQ ID NO: 886421

SEQ ID NO: 886427 - protein, 354 aa, Homo sapiens; identical to SEQ ID NO: 886421

SEQ ID NO: 886428 - protein, 381 aa, Homo sapiens
DGGAHARAPSCAQPPTRPQSEVRGPGARRGWPPRPLGLRGEGASAPVVIAPAAFSLGLRDTAPRPGARCVPGRVLGTVPRVPYKDCQAIMKVLLLKDAKEDDCGQDPYIRELGLYGLEATLIPVLSFEFLSLPSFSEKLSHPEDYGGLIFTSPRAVEAAELCLEQNNKTEVWERSLKEKWNAKSVYVVGNATASLVSKIGLDTEGETCGNAEKLAEYICSRESSALPLLFPCGNLKREILPKALKDKGIAMESITVYQTVAHPGIQGNLNSYYSQQGVPASITFFSPSGLTYSLKHIQELSGDNIDQIKTQGPQHPKKNCLQLEPLRKDCTDTAVMFAAIGPTTARALAAQGLPVSCTAESPTPQALATGIRKALQPHGCC

SEQ ID NO: 886429 - protein, 312 aa, Homo sapiens
DGGAHARAPSCAQPPTRPQSEVRGPGARRGWPPRPLGLRGEGASAPVVIAPAAFSLGLRDTAPRPGARCVPGRVLGTVPRVPYKDCQAIMKVLLLKDAKEDDCGQDPYIRELGLYGLEATLIPVLSFEFLSLPSFSEKLSHPEDYGGLIFTSPRAVEAAELCLEQNNKTEVWERSLKEKWNAKSVYVVGNATASLVSKIGLDTEGETCGNAEKLAEYICSRESSALPLLFPCGNLKREILPKALKDKGIAMESITVYQTVAHPGIQGNLNSYYSQQGVPASITFFSPSGLTYSLKHIQELSGDNIDQIKKHL

SEQ ID NO: 886430 - protein, 249 aa, Homo sapiens
DGGAHARAPSCAQPPTRPQSEVRGPGARRGWPPRPLGLRGEGASAPVVIAPAAFSLGLRDTAPRPGARCVPGRVLGTVPRVPYKDCQAIMKVLLLKDAKEDDCGQDPYIRELGLYGLEATLIPVLSFEFLSLPSFSEKLSHPEDYGGLIFTSPRAVEAAELCLEQNNKTEVWERSLKEKWNAKSVYVVGNATASLVSKIGLDTEGETCGNAEKLAEYICSRESSALPLLFPCGNLKREILPKALKDKEA

SEQ ID NO: 886431 - protein, 351 aa, Homo sapiens
DGGAHARAPSCAQPPTRPQSEVRGPGARRGWPPRPLGLRGEGASAPVVIAPAAFSLGLRDTAPRPGARCVPGRVLGTVPRVPYKDCQAIMKVLLLKDAKEDDCGQDPYIRELGLYGLEATLIPVLSFEFLSLPSFSEKLSHPEDYGGLIFTSPRAVEAAELCLEQNNKTEVWERSLKEKWNAKSVYVVGNATASLVSKIGLDTEGETCGNAEKLAEYICSRESSALPLLFPCGNLKREILPKALKDKGIAMESITVYQTVAHPGIQGNLNSYYSQQGVPASITFFSPSGLTYSLKHIQELSGDNIDQIKLLDGGELLKKFMQGRNKGSHRNLRAKVKCNWPPRPRGASSEN

SEQ ID NO: 886432 - protein, 323 aa, Homo sapiens
DGGAHARAPSCAQPPTRPQSEVRGPGARRGWPPRPLGLRGEGASAPVVIAPAAFSLGLRDTAPRPGARCVPGRVLGTVPRVPYKDCQAIMKVLLLKDAKEDDCGQDPYIRELGLYGLEATLIPVLSFEFLSLPSFSEKLSHPEDYGGLIFTSPRAVEAAELCLEQNNKTEVWERSLKEKWNAKSVYVVGNATASLVSKIGLDTEGETCGNAEKLAEYICSRESSALPLLFPCGNLKREILPKALKDKGIAMESITVYQTVAHPGIQGNLNSYYSQQGVPASITFFSPSGLTYSLKHIQELSGDNIDQIKIEELELQWASWALR

SEQ ID NO: 886433 - protein, 326 aa, Homo sapiens
DGGAHARAPSCAQPPTRPQSEVRGPGARRGWPPRPLGLRGEGASAPVVIAPAAFSLGLRDTAPRPGARCVPGRVLGTVPRVPYKDCQAIMKVLLLKDAKEDDCGQDPYIRLSHPEDYGGLIFTSPRAVEAAELCLEQNNKTEVWERSLKEKWNAKSVYVVGNATASLVSKIGLDTEGETCGNAEKLAEYICSRESSALPLLFPCGNLKREILPKALKDKGIAMESITVYQTVAHPGIQGNLNSYYSQQGVPASITFFSPSGLTYSLKHIQELSGDNIDQIKFAAIGPTTARALAAQGLPVSCTAESPTPQALATGIRKALQPHGCC

SEQ ID NO: 886434 - protein, 327 aa, Homo sapiens
DGGAHARAPSCAQPPTRPQSEVRGPGARRGWPPRPLGLRGEGASAPVVIAPAAFSLGLRDTAPRPGARCVPGRVLGTVPRVPYKDCQAIMKVLLLKDAKEDDCGQDPYIRELGLYGLEATLIPVLSFEFLSLPSFSEKLSHPEDYGGLIFTSPRAVEAAELCLEQNNKTEVWERSLKEKWNAKSVYVVGNATASLVSKIGLDTEGETCGNAEKLAEYICSRIAMESITVYQTVAHPGIQGNLNSYYSQQGVPASITFFSPSGLTYSLKHIQELSGDNIDQIKFAAIGPTTARALAAQGLPVSCTAESPTPQALATGIRKALQPHGCC

SEQ ID NO: 886435 - protein, 264 aa, Homo sapiens
DGGAHARAPSCAQPPTRPQSEVRGPGARRGWPPRPLGLRGEGASAPVVIAPAAFSLGLRDTAPRPGARCVPGRVLGTVPRVWERSLKEKWNAKSVYVVGNATASLVSKIGLDTEGETCGNAEKLAEYICSRESSALPLLFPCGNLKREILPKALKDKGIAMESITVYQTVAHPGIQGNLNSYYSQQGVPASITFFSPSGLTYSLKHIQELSGDNIDQIKFAAIGPTTARALAAQGLPVSCTAESPTPQALATGIRKALQPHGCC

SEQ ID NO: 886436 - protein, 228 aa, Homo sapiens
DGGAHARAPSCAQPPTRPQSEVRGPGARRGWPPRPLGLRGEGASAPVVIAPAAFSLGLRDTAPRPGARCVPGRVLGTVPRVPYKDCQAIMKVLLLKDAKEDDCGQDPYIRELGLYGLEATLIPVLSFEFLSLPSFSEKLSHPEDYGGLIFTSPRAVEAAELCLEQNNKTEVWERSLKEKWNAKSVYVVGNATASLVSKIGLDTEGETCGNAEKLAEYICSSEEVKGIF

SEQ ID NO: 886437 - protein, 222 aa, Homo sapiens
DGGAHARAPSCAQPPTRPQSEVRGPGARRGWPPRPLGLRGEGASAPVVIAPAAFSLGLRDTAPRPGARCVPGRVLGTVPRVPYKDCQAIMKVLLLKDAKEDDCGQDPYIRELGLYGLEATLIPVLSFEFLSLPSFSEKLSHPEDYGGLIFTSPRAVEAAELCLEQNNKTEVWERSLKEKWNAKSVYVVGNATASLVSKIGLDTEGETCGNAEKLAEYICSSK

SEQ ID NO: 886438 - protein, 88 aa, Homo sapiens
MAVRMRERLAARSHPRDPSLRCGVLGPGAGGRRGPSGCVGRGLPPLLSLLLQPFRWDCATPPPDRVPAVCQAGCWARSRECPIRTARQ

SEQ ID NO: 886439 - protein, 492 aa, Homo sapiens
MDLLKAITSPLAAGSKPSKKTGEKSSGSSSHSESKKEHHRKKVSGSSGELPLEDGVSHKSKKMKPLYVNTETLTLREPDGLKMKLILSPKEKGSSSVDEESFQYPSQQATVKKSSKKSARDEQGALLLGHELQSFLKTARKKHKSSSDAHSSPGPEGCGSDASQFAESHSANLDLSGLEPILVESDSSSGGELEAGELVIDDSYREIKKKKKSKKSKKKKDKEKHKEKRHSKSKRSLGLSAVPVGEVTVTSGPPPSIPYAGAAAPPLPLPGLHTDGHSEKKKKKEEKDKERERGEKPKKKNMSAYQVFCKEYRVTIVADHPGIDFGELSKKLAEVWKQLPEKDKLIWKQKAQYLQHKQNKAEATTVKRKASSSEGSMKVKASSVGVLSPQKKSPPTTMLLPASPAKAPETEPIDVAAHLQLLGESLSLIGHRLQETEGMVAVSGSLSVLLDSIICALGPLACLTTQLPELNGCPKQVLSNTLDNIAYIMPGL

SEQ ID NO: 886440 - protein, 492 aa, Homo sapiens; identical to SEQ ID NO: 886439

SEQ ID NO: 886441 - protein, 492 aa, Homo sapiens; identical to SEQ ID NO: 886439

SEQ ID NO: 886442 - protein, 492 aa, Homo sapiens; identical to SEQ ID NO: 886439

SEQ ID NO: 886443 - protein, 617 aa, Homo sapiens
PLALFSPSPRWRRSAALRRDPGEPSEDCFDGDHTFEDIGLAAGRSQREKKRSYKDFLREEEEIAAQVRNSSKKKLKDSELYFLGTDTHKKKRKHSSDDYYYGDISSLESSQKKKKKSSPQSTDTAMDLLKAITSPLAAGSKPSKKTGEKSSGSSSHSESKKEHHRKKVSGSSGELPLEDGVSHKSKKMKPLYVNTETLTLREPDGLKMKLILSPKEKGSSSVDEESFQYPSQQATVKKSSKKSARDEQGALLLGHELQSFLKTARKKHKSSSDAHSSPGPEGCGSDASQFAESHSANLDLSGLEPILVESDSSSGGELEAGELVIDDSYREIKKKKKSKKSKKKKDKEKHKEKRHSKSKRSLGLSAVPVGEVTVTSGPPPSIPYAGAAAPPLPLPGLHTDGHSEKKKKKEEKDKERERGEKPKKKNMSAYQVFCKEYRVTIVADHPGIDFGELSKKLAEVWKQLPEKDKLIWKQKAQYLQHKQNKAEATTVKRKASSSEGSMKVKASSVGVLSPQKKSPPTTMLLPASPAKAPETEPIDVAAHLQLLGESLSLIGHRLQETEGMVAVSGSLSVLLDSIICALGPLACLTTQLPELNGCPKQVLSNTLDNIAYIMPGL

SEQ ID NO: 886444 - protein, 601 aa, Homo sapiens
MAYDDSVKKEDCFDGDHTFEDIGLAAGRSQREKKRSYKDFLREEEEIAAQVRNSSKKKLKDSELYFLGTDTHKKKRKHSSDDYYYGDISSLESSQKKKKKSSPQSTDTAMDLLKAITSPLAAGSKPSKKTGEKSSGSSSHSESKKEHHRKKVSGSSGELPLEDGVSHKSKKMKPLYVNTETLTLREPDGLKMKLILSPKEKGSSSVDEESFQYPSQQATVKKSSKKSARDEQGALLLGHELQSFLKTARKKHKSSSDAHSSPGPEGCGSDASQFAESHSANLDLSGLEPILVESDSSSGGELEAGELVIDDSYREIKKKKKSKKSKKKKDKEKHKEKRHSKSKRSLGLSAVPVGEVTVTSGPPPSIPYAGAAAPPLPLPGLHTDGHSEKKKKKEEKDKERERGEKPKKKNMSAYQVFCKEYRVTIVADHPGIDFGELSKKLAEVWKQLPEKDKLIWKQKAQYLQHKQNKAEATTVKRKASSSEGSMKVKASSVGVLSPQKKSPPTTMLLPASPAKAPETEPIDVAAHLQLLGESLSLIGHRLQETEGMVAVSGSLSVLLDSIICALGPLACLTTQLPELNGCPKQVLSNTLDNIAYIMPGL

SEQ ID NO: 886445 - protein, 492 aa, Homo sapiens; identical to SEQ ID NO: 886439

SEQ ID NO: 886446 - protein, 226 aa, Homo sapiens
LSSLPVTCSIVTTQEQEDKDHAVERASEKKPKKKNMSAYQVFCKEYRVTIVADHPGIDFGELSKKLAEVWKQLPEKDKLIWKQKAQYLQHKQNKAEATTVKRKASSSEGSMKVKASSVGVLSPQKKSPPTTMLLPASPAKAPETEPIDVAAHLQLLGESLSLIGHRLQETEGMVAVSGSLSVLLDSIICALGPLACLTTQLPELNGCPKQVLSNTLDNIAYIMPGL

SEQ ID NO: 886447 - protein, 82 aa, Homo sapiens
  misc_feature (1)..(1): Xaa can be any naturally occurring amino acid
  misc_feature (12)..(13): Xaa can be any naturally occurring amino acid
  misc_feature (16)..(16): Xaa can be any naturally occurring amino acid
  misc_feature (18)..(18): Xaa can be any naturally occurring amino acid
  misc_feature (34)..(34): Xaa can be any naturally occurring amino acid
  misc_feature (38)..(39): Xaa can be any naturally occurring amino acid
  misc_feature (77)..(79): Xaa can be any naturally occurring amino acid
XLVRPSYSGARXXEDXFXPAQGALSPQWAMIGNXGLGXXSMSTHLRLLVMFIMSAGTAIASYFIPSTVGVVLFMTGXXXILS

SEQ ID NO: 886448 - protein, 938 aa, Homo sapiens
MPALEHMNQILHILFVFLPFLWALGTLPPPDALLLWAMEQVLEFGLGGSSMSTHLRLLVMFIMSAGTAIASYFIPSTVGVVLFMTGFGFLLSLNLSDMGHKIGTKSKDLPSGPEKHFSWKECLFYIIILVLALLETSLLHHFAGFSQISKSNSQAIVGYGLMILLIILWILREIQSVYIIGIFRNPFYPKDVQTVTVFFEKQTRLMKIGIVRRILLTLVSPFAMIAFLSLDSSLQGLHSVSVCIGFTRAFRMVWQNTENALLETVIVSTVHLISSTDIWWNRSLDTGLRLLLVGIIRDRLIQFISKLQFAVTVLLTSWTEKKQRRKTTATLCILNIVFSPFVLVIIVFSTLLSSPLLPLFTLPVFLVGFPRPIQSWPGAAGTTACVCADTVYYYQMVPRLTAVLQTAMAAGSLGLLLPGSHYLGRFQDRLMWIMILECGYTYCSINIKGLELQETSCHTAEARRVDEVFEDAFEQEYTRVCSLNEHFGNVLTPCTVLPVKLYSDARNVLSGIIDSHENLKEFKGDLIKVLVWILVQYCSKRPGMKENVHNTENKGKAPLMLPALNTLPPPKSPEDIDSLNSETFNDWSDDNIFDDEPTIKKVIEEKHQLKDLPGTNLFIPGSVESQRVGDHSTGTVPENDLYKAVLLGYPAVDKGKQEDMPYIPLMEFSCSHSHLVCLPAEWRTSCMPSSKMKEMSSLFPEDWYQFVLRQLECYHSEEKASNVLEEIAKDKVLKDFYVHTVMTCYFSLFGIDNMAPSPGHILRVYGGVLPWSVALDWLTEKPELFQLALKAFRYTLKLMIDKASLGPIEDFRELIKYLEEYERDWYIGLVSDEKWKEAILQEKPYLFSLGYDSNMGIYTGRVLSLQELLIQVGKLNPEAVRGQWANLSWELLYATNDDEERYSIQAHPLLLRNLTVQAAEPPLGYPIYSSKPLHIHLY

SEQ ID NO: 886449 - protein, 531 aa, Homo sapiens
QDRHSGKQISANKIAAEAISDRLMWIMILECGYTYCSINIKGLELQETSCHTAEARRVDEVFEDAFEQEYTRVCSLNEHFGNVLTPCTVLPVKLYSDARNVLSGIIDSHENLKEFKGDLIKVLVWILVQYCSKRPGMKENVHNTENKGKAPLMLPALNTLPPPKSPEDIDSLNSETFNDWSDDNIFDDEPTIKKVIEEKHQLKDLPGTNLFIPGSVESQRVGDHSTGTVPENDLYKAVLLGYPAVDKGKQEDMPYIPLMEFSCSHSHLVCLPAEWRTSCMPSSKMKEMSSLFPEDWYQFVLRQLECYHSEEKASNVLEEIAKDKVLKDFYVHTVMTCYFSLFGIDNMAPSPGHILRVYGGVLPWSVALDWLTEKPELFQLALKAFRYTLKLMIDKASLGPIEDFRELIKYLEEYERDWYIGLVSDEKWKEAILQEKPYLFSLGYDSNMGIYTGRVLSLQELLIQVGKLNPEAVRGQWANLSWELLYATNDDEERYSIQAHPLLLRNLTVQAAEPPLGYPIYSSKPLHIHLY

SEQ ID NO: 886450 - protein, 857 aa, Homo sapiens
MPALEHMNQILHILFVFLPFLWALGTLPPPDALLLWAMEQVLEFGLGGSSMSTHLRLLVMFIMSAGTAIASYFIPSTVGVVLFMTGFGFLLSLNLSDMGHKIGTKSKDLPSGPEKHFSWKECLFYIIILVLALLETSLLHHFAGFSQISKSNSQAIVGYGLMILLIILWILREIQSVYIIGIFRNPFYPKDVQTVTVFFEKQTRLMKIGIVRRILLTLVSPFAMIAFLSLDSSLQGLHSVSVCIGFTRAFRMVWQNTENALLETVIVSTVHLISSTDIWWNRSLDTGLRLLLVGIIRDRLIQFISKLQFAVTVLLTSWTEKKQRRKTTATLCILNIVFSPFVLVIIVFSTLLSSPLLPLFTLPVFLVGFPRPIQSWPGAAGTTACVCADTVYYYQMVPRLTAVLQTAMAAGSLGLLLPGSHYLGRFQDRLMWIMILECGYTYCSINIKGLELQETSCHTAEARRVDEVFEDAFEQEYTRVCSLNEHFGNVLTPCTVLPVKLYSDARNVLSGIIDSHENLKEFKGDLIKVLVWILVQYCSKRPGMKENVHNTENKGKAPLMLPALNTLPPPKSPEDIDSLNSETFNDWSDDNIFDDEPTIKKVIEEKHQLKDLPGTNLFIPGSVESQRVGDHSTGTVPENDLYKAVLLGYPAVDKGKQEDMPYIPLMEFSCSHSHLVCLPAEWRTSCMPSSKMKEMSSLFPEDWYQFVLRQLECYHSEEKASNVLEEIAKDKVLKDFYVHTVMTCYFSLFGIDNMAPSPGHILRVYGGVLPWSVALDWLTEKPELFQLALKAFRYTLKLMIDKASLGPIEDFRELIKYLEEYERDWYIGLVSDEKWKEAILQEKPYLFSLGYDSNMYL

SEQ ID NO: 886451 - protein, 486 aa, Homo sapiens
MPALEHMNQILHILFVFLPFLWALGTLPPPDALLLWAMEQVLEFGLGGSSMSTHLRLLVMFIMSAGTAIASYFIPSTVGVVLFMTGFGFLLSLNLSDMGHKIGTKSKDLPSGPEKHFSWKECLFYIIILVLALLETSLLHHFAGFSQISKSNSQAIVGYGLMILLIILWILREIQSVYIIGIFRNPFYPKDVQTVTVFFEKQTRLMKIGIVRRILLTLVSPFAMIAFLSLDSSLQGLHSVSVCIGFTRAFRMVWQNTENALLETVIVSTVHLISSTDIWWNRSLDTGLRLLLVGIIRDRLIQFISKLQFAVTVLLTSWTEKKQRRKTTATLCILNIVFSPFVLVIIVFSTLLSSPLLPLFTLPVFLVGFPRPIQSWPGAAGTTACVCADTVYYYQMVPRLTAVLQTAMAAGSLGLLLPGSHYLGRFQDRLMWIMILECGYTYCSINIKGLELQETSCHTAEARRVDEVFEDAFEQEYTRVYSETND

SEQ ID NO: 886452 - protein, 92 aa, Homo sapiens
FRASRLSPLLLLLGPVRDQSTSDSRRPRPGRCWPSPGANEARYFPASSRPSLLYGRARLGSEHRPGQRGQPGADEVPERARAPFSSGWRPPE

SEQ ID NO: 886453 - protein, 230 aa, Homo sapiens
MSPDVPLLNDYKQDFFLKRFPQTVLGGPRFKLGYCAPPYIYVNQIILFLMPWVWGGVGTLLYQLGILKDYYTAALSGGLMLFTAFVIQFTSLYAKNKSTTVERILTTDILAEEDEHEFTSCTGAETVKFLIPGKKYVANTVFHSILAGLACGLGTWYLLPNRITLLYGSTGGTALLFFFGWMTLCIAEYSLIVNTATETATFQTQDTYEIIPLMRPLYIFFFVSVDLAHR

SEQ ID NO: 886454 - protein, 92 aa, Homo sapiens; identical to SEQ ID NO: 886452

SEQ ID NO: 886455 - protein, 856 aa, Homo sapiens
MPALEHMNQILHILFVFLPFLWALGTLPPPDALLLWAMEQVLEFGLGGSSMSTHLRLLVMFIMSAGTAIASYFIPSTVGVVLFMTGFGFLLSLNLSDMGHKIGTKSKDLPSGPEKHFSWKECLFYIIILVLALLETSLLHHFAGFSQISKSNSQAIVGYGLMILLIILWILREIQSVYIIGIFRNPFYPKDVQTVTVFFEKQTRLMKIGIVRRILLTLVSPFAMIAFLSLDSSLQGLHSVSVCIGFTRAFRMVWQNTENALLETVIVSTVHLISSTDIWWNRSLDTGLRLLLSWPGAAGTTACVCADTVYYYQMVPRLTAVLQTAMAAGSLGLLLPGSHYLGRFQDRLMWIMILECGYTYCSINIKGLELQETSCHTAEARRVDEVFEDAFEQEYTRVCSLNEHFGNVLTPCTVLPVKLYSDARNVLSGIIDSHENLKEFKGDLIKVLVWILVQYCSKRPGMKENVHNTENKGKAPLMLPALNTLPPPKSPEDIDSLNSETFNDWSDDNIFDDEPTIKKVIEEKHQLKDLPGTNLFIPGSVESQRVGDHSTGTVPENDLYKAVLLGYPAVDKGKQEDMPYIPLMEFSCSHSHLVCLPAEWRTSCMPSSKMKEMSSLFPEDWYQFVLRQLECYHSEEKASNVLEEIAKDKVLKDFYVHTVMTCYFSLFGIDNMAPSPGHILRVYGGVLPWSVALDWLTEKPELFQLALKAFRYTLKLMIDKASLGPIEDFRELIKYLEEYERDWYIGLVSDEKWKEAILQEKPYLFSLGYDSNMGIYTGRVLSLQELLIQVGKLNPEAVRGQWANLSWELLYATNDDEERYSIQAHPLLLRNLTVQAAEPPLGYPIYSSKPLHIHLY

SEQ ID NO: 886456 - protein, 857 aa, Homo sapiens; identical to SEQ ID NO: 886450

SEQ ID NO: 886457 - protein, 616 aa, Homo sapiens
MPALEHMNQILHILFVFLPFLWALGTLPPPDALLLWAMEQVLEFGLGGSSMSTHLRLLVMFIMSAGTAIASYFIPSTVGVVLFMTGFGFLLSLNLSDMGHKIGTKSKDLPSGPEKHFSWKECLFYIIILVLALLETSLLHHFAGFSQISKSNSQAIVGYGLMILLIILWILREIQSVYIIGIFRNPFYPKDVQTVTVFFEKQTRLMKIGIVRRILLTLVSPFAMIAFLSLDSSLQGLHSVSVCIGFTRAFRMVWQNTENALLETVIVSTVHLISSTDIWWNRSLDTGLRLLLVGIIRDRLIQFISKLQFAVTVLLTSWTEKKQRRKTTATLCILNIVFSPFVLVIIVFSTLLSSPLLPLFTLPVFLVGFPRPIQSWPGAAGTTACVCADTVYYYQMVPRLTAVLQTAMAAGSLGLLLPGSHYLGRFQDRLMWIMILECGYTYCSINIKGLELQETSCHTAEARRVDEVFEDAFEQEYTRVCSLNEHFGNVLTPCTVLPVKLYSDARNVLSGIIDSHENLKEFKGDLIKVLVWILVQYCSKRPGMKENVHNTENKGKAPLMLPALNTLPPPKSPEDIDSLNSETFNDWSDDNIFDDEPTIKKVIEEKHQLKDLPGIL

SEQ ID NO: 886458 - protein, 230 aa, Homo sapiens; identical to SEQ ID NO: 886453

SEQ ID NO: 886459 - protein, 129 aa, Homo sapiens
AIVGYGLMILLIILWILREIQSVYIIGIFRNPFYPKDVQTVTVFFEKQTRLMKIGIVRRILLTLGRKIKSINLVLQIISWKYSKILLNSHICVVLYHIQVFVLLCYGFLFIGFLVHRLNVLIKNVYLPE

SEQ ID NO: 886460 - protein, 130 aa, Homo sapiens
MGGNGSTCKPDTERQGTLSTAAPTTSPAPCLSNHHNKKHLILAFCAGVLLTLLLIAFIFLIIKSYRKYHSKPQAPDPHSDPPAKLSSIPGESLTYASTTFKLSEEKSNHLAENHSADFDPIVYAQIKVTN

SEQ ID NO: 886461 - protein, 112 aa, Homo sapiens
MGGNGSTCKPDTERQGTLSTAAPTTSPAPCLSNHHNKKHLILAFCAGVLLTLLLIAFIFLIIKSYRKYHSKPQAPDPHSDPPAKLSSIPGESLTYASTTFKLSEDAQIKVTN

SEQ ID NO: 886462 - protein, 155 aa, Homo sapiens
MGGNGSTCKPDTERQGTLSTAAPTTSPAPCLSNHHNKKHLILAFCAGVLLTLLLIAFIFLIIKSYRKYRRERLPISPGPLLRWVPLLSGTMADHSKPQAPDPHSDPPAKLSSIPGESLTYASTTFKLSEEKSNHLAENHSADFDPIVYAQIKVTN

SEQ ID NO: 886463 - protein, 289 aa, Homo sapiens
ASFVFGSGINPERDPEISNGFRLISVNNFCVCDLANDNNIENASLSGSNFGIVDSLSELEALMERMKRLQEEREDEEASQEEMSTRFEKEKKESLFVVSGDTFHSFPHSDFEDDMIITSDVSRYIEDPGFGYEDFARRGEEHLPTFRAQDYTWENHGFSLVNRLYSDIGHLLDEKFRMVYNLTYNTMATHEDVDTTMLRRALFNYVHCMFGIRYDDYDYGEVNQLLERSLKVYIKTVTCYPERTTKRMYDSYWRQFKHSEKVHVNLLLMEARMQAELLYALRAITRHLT

SEQ ID NO: 886464 - protein, 289 aa, Homo sapiens; identical to SEQ ID NO: 886463

SEQ ID NO: 886465 - protein, 980 aa, Homo sapiens
MGRRKGRSALSRSSLERVNQGEVKVIGRGAREGGGGQAWGTGGGGRDLSCGIPRSASPLAPLAAPAITQAPEALSRTRASTARFVCRASGEPRPALRWLHNGAPLRPNGRVKVQGGGGSLVITQIGLQDAGYYQCVAENSAGMACAAASLAVVVREGLPSAPTRVTATPLSSSAVLVAWERPEMHSEQIIGFSLHYQKARGMDNVEYQFAVNNDTTELQVRDLEPNTDYEFYVVAYSQLGASRTSTPALVHTLDDVPSAAPQLSLSSPNPSDIRVAWLPLPPSLSNGQVVKYKIEYGLGKEDQIFSTEVRGNETQLMLNSLQPNKVYRVRISAGTAAGFGAPSQWMHHRTPSMHNQSHVPFAPAELKVQAKMESLVVSWQPPPHPTQISGYKLYWREVGAEEEANGDRLPGGRGDQAWDVGPVRLKKKVKQYELTQLVPGRLYEVKLVAFNKHEDGYAAVWKGKTEKAPAPDMPIQRGPPLPPAHVHAESNSSTSIWLRWKKPDFTTVKIVNYTVRFSPWGLRNASLVTYYTSSGEDILIGGLKPFTKYEFAVQSHGVDMDGPFGSVVERSTLPDRPSTPPSDLRLSPLTPSTVRLHWCPPTEPNGEIVEYLILYSSNHTQPEHQWTLLTTQGNIFSAEVHGLESDTRYFFKMGARTEVGPGPFSRLQDVITLQEKLSDSLDMHSVTGIIVGVCLGLLCLLACMCAGLRRSPHRESLPGLSSTATPGNPALYSRARLGPPSPPAAHELESLVHPHPQDWSPPPSDVEDRAEVHSLMGGGVSEGRSHSKRKISWAQPSGLSWAGSWAGCELPQAGPRPALTRALLPPAGTGQTLLLQALVYDAIKGNGRKKSPPACRNQVEAEVIVHSDFSASNGNPDLHLQDLEPEDPLPPEAPDLISGVGDPGQGAAWLDRELGGCELAAPGPDRLTCLPEAASASCSYPDLQPGEVLEETPGDSCQLKSPCPLGASPGLPRSPVSSSA

SEQ ID NO: 886466 - protein, 980 aa, Homo sapiens; identical to SEQ ID NO: 886465

SEQ ID NO: 886467 - protein, 980 aa, Homo sapiens; identical to SEQ ID NO: 886465

SEQ ID NO: 886468 - protein, 548 aa, Homo sapiens
PRFLREDQLGAQLPAATSNSGPLTMHSLDEPLDLKLSITKLRAAREKRERTLGVVRPRALHRELGLVDDSPTPGSPGSPPSGFLLNSKFPEKVEGRFSAAPLVDLSLSPPSGLDSPNGSSSLSPERQGNGDLPPVPSASDFQPLRYLDGVPSSFQFFLPLGSGGALHLPASSFLTPPKDKCLSPDLPLPKQLVCRWAKCNQLFELLQDLVDHVNDYHVKPEKDAGYCCHWEGCARHGRGFNARYKMLIHIRTHTNEKPHRCPTCSKSFSRLENLKIHNRSHTGEKPYVCPYEGCNKRYSNSSDRFKHTRTHYVDKPYYCKMPGCHKRYTDPSSLRKHIKAHGHFVSHEQQELLQLRPPPKPPLPAPDGGPYVSGAQIIIPNPAALFGGPGLPGLPLPLAPGPLDLSALACGNGGGSGGGGGMGPGLPGPVLPLNLAKNPLLPSPFGAGGLGLPVVSLLAGAAGGKAEGEKGRGSVPTRALGMEGHKTPLERTESSCSRPSPDGLPLLPGTVLDLSTGVNSAASSPEALAPGWVVIPPGSVLLKPAVVN

SEQ ID NO: 886469 - protein, 548 aa, Homo sapiens; identical to SEQ ID NO: 886468

SEQ ID NO: 886470 - protein, 115 aa, Homo sapiens
KLWRLVKLRGGGWCHTPVSSTGCSSHSCGLGAWLVSAPKVTVGVRRQEYLAHWDSTLQHTLNCASPSGFLLNSKFPEKVEGRFSAAPLVDLSLSPPSGLDSPNGSSSLSPERQGN

SEQ ID NO: 886471 - protein, 496 aa, Homo sapiens
MDDVPAPTPAPAPPAAAAPRVPFHCSECGKSFRYRSDLRRHFARHTALKPHACPRCGKGFKHSFNLANHLRSHTGERPYRCSACPKGFRDSTGLLHHQVVHTGEKPYCCLVCELRFSSRSSLGRHLKRQHRGVLPSPLQPGPGLPALSAPCSVCCNVGPCSVCGGSGAGGGEGPEGAGAGLGSWGLAEAAAAAAASLPPFACGACARRFDHGRELAAHWAAHTDVKPFKCPRCERDFNAPALLERHKLTHDLQGPGAPPAQAWAAGPGAGPETAGEGTAAEAGDAPLASDRRLLLGPAGGGVPKLGGLLPEGGGEAPAPAAAAEPSEDTLYQCDCGTFFASAAALASHLEAHSGPATYGCGHCGALYAALAALEEHRRVSHGEGGGEEAAAAAREREPASGEPPSGSGRGKKIFGCSECEKLFRSPRDLERHVLVHTGEKPFPCLECGKFFRHECYLKRHRLLHGTERPFPCHICGKGFITLSNLSRHLKLHRGMD

SEQ ID NO: 886472 - protein, 496 aa, Homo sapiens; identical to SEQ ID NO: 886471

SEQ ID NO: 886473 - protein, 496 aa, Homo sapiens; identical to SEQ ID NO: 886471

SEQ ID NO: 886474 - protein, 476 aa, Homo sapiens
MDDVPAPTPAPAPPAAAAPRVPFHCSECGKSFRYRSDLRRHFARHTALKPHACPRCGKGFKHSFNLANHLRSHTGERPYRCSACPKGFRDSTGLLHHQVVHTGEKPYCCLVCELRFSSRSSLGRHLKRQHRGVLPSPLQPGPGLPALSAPCSVCCNVGPCSVCGGSGAGGGEGPEGAGAGLGSWGLAEAAAAAAASLPPFACGACARRFDHGRELAAHWAAHTDVKPFKCPRCERDFNAPALLERHKLTHDLQGPGAPPAQAWAAGPGAGPETAGEGTAAEAGDAPLASDRRLLLGPAGGGVPKLGGLLPEGGGEAPAPAAAAEPSEDTLYQCDCGTFFASAAALASHLEAHSGPATYGCGHCGALYAALAAAREREPASGEPPSGSGRGKKIFGCSECEKLFRSPRDLERHVLVHTGEKPFPCLECGKFFRHECYLKRHRLLHGTERPFPCHICGKGFITLSNLSRHLKLHRGMD

SEQ ID NO: 886475 - protein, 534 aa, Homo sapiens
MDDVPAPTPAPAPPAAAAPRVPFHCSECGKSFRYRSDLRRHFARHTALKPHACPRCGKGFKHSFNLANHLRSHTGERPYRCSACPKGFRDSTGLLHHQEAKQALEELEEGQCDWSMEKQKVWLRRSLESAGPWKYSVVHTGEKPYCCLVCELRFSSRSSLGRHLKRQHRGVLPSPLQPGPGLPALSAPCSVCCNVGPCSVCGGSGAGGGEGPEGAGAGLGSWGLAEAAAAAAASLPPFACGACARRFDHGRELAAHWAAHTDVKPFKCPRCERDFNAPALLERHKLTHDLQGPGAPPAQAWAAGPGAGPETAGEGTAAEAGDAPLASDRRLLLGPAGGGVPKLGGLLPEGGGEAPAPAAAAEPSEDTLYQCDCGTFFASAAALASHLEAHSGPATYGCGHCGALYAALAALEEHRRVSHGEGGGEEAAAAAREREPASGEPPSGSGRGKKIFGCSECEKLFRSPRDLERHVLVHTGEKPFPCLECGKFFRHECYLKRHRLLHGTERPFPCHICGKGFITLSNLSRHLKLHRGMD

SEQ ID NO: 886476 - protein, 1031 aa, Homo sapiens
MGGDHPEDEEDFYEEEMDYGESEEPMGDDDYDEYSKELNQYRRSKDSRGRGLSRGRGRGSRGRGKGMGRGRGRGGSRGGMNKGGMNDDEDFYDEDMGDGGGGSYRSRDHDKPHQQSDKKGKVICKYFVEGRCTWGDHCNFSHDIELPKKRELCKFYITGFCARAENCPYMHGDFPCKLYHTTGNCINGDDCMFSHDPLTEETRELLDKMLADDAEAGAEDEKEVEELKKQGINPLPKPPPGVGLLPTPPRPPGPQAPTSPNGRPMQGGPPPPPPPPPPPPGPPQMPMPVHEPLSPQQLQQQDMYNKKIPSLFEIVVRPTGQLAEKLGVRFPGPGGPPGPMGPGPNMGPPGPMGGPMHPDMHPDMHPDMHPDMHADMHADMPMGPGMNPGPPMGPGGPPMMPYGPGDSPHSGMMPPIPPAQNFYENFYQQQEGMEMEPGLLGDAEDYGHYEELPGEPGEHLFPEHPLEPDSFSEGGPPGRPKPGAGVPDFLPSAQRALYLRIQQKQQEEEERARRLAESSKQDRENEEGDTGNWYSSDEDEGGSSVTSILKTLRQQTSSRPPASVGELSSSGLGDPRLQKGHPTGSRLADPRLSRDPRLTRHVEASGGSGPGDSGPSDPRLARALPTSKPEGSLHSSPVGPSSSKGSGPPPTEEEEGERALREKAVNIPLDPLPGHPLRDPRSQLQQFSHIKKDVTLSKPSFARTVLWNPEDLIPLPIPKQDAVPPVPAALQSMPTLDPRLHRAATAGPPNARQRPGASTDSSTQGANLPDFELLSRILKTVNATGSSAAPGSSDKPSDPRVRKAPTDPRLQKPTDSTASSRAAKPGPAEAPSPTASPSGDASPPATAPYDPRVLAAGGLGQGGGGGQSSVLSGISLYDPRTPNAGGKATEPAADTGAQPKGAEGNGKSSASKAKEPPFVRKSALEQPETGKAGADGGTPTDRYNSYNRPRPKAAAAPAATTATPPPEGAPPQPGVHNLPVPTLFGTVKQTPKTGSGSPFAGNSPAREGEQDAASLKDVFKGFDPTASPFCQ

SEQ ID NO: 886477 - protein, 85 aa, Homo sapiens
RSHLYPSLSFPFTSTPCPLQDGGGGSYRSRDHDKPHQQSDKKGKVICKYFVEGRCTWVRSAESWAPLGGHSPQRTHGFQKVLEPW

SEQ ID NO: 886478 - protein, 632 aa, Homo sapiens
MGGDHPEDEEDFYEEEMDYGESEEPMGDDDYDEYSKELNQYRRSKDSRGRGLSRGRGRGSRGRGKGMGRGRGRGGSRGGMNKGGMNDDEDFYDEDMGDGGGGSYRSRDHDKPHQQSDKKGKVICKYFVEGRCTWGDHCNFSHDIELPKKRELCKFYITGFCARAENCPYMHGDFPCKLYHTTGNCINGDDCMFSHDPLTEETRELLDKMLADDAEAGAEDEKEVEELKKQGINPLPKPPPGVGLLPTPPRPPGPQAPTSPNGRPMQGGPPPPPPPPPPPPGPPQMPMPVHEPLSPQQLQQQDMYNKKIPSLFEIVVRPTGQLAEKLGVRFPGPGGPPGPMGPGPNMGPPGPMGGPMHPDMHPDMHPDMHPDMHADMHADMPMGPGMNPGPPMGPGGPPMMPYGPGDSPHSGMMPPIPPAQNFYENFYQQQEGMEMEPGLLGDAEDYGHYEELPGEPGEHLFPEHPLEPDSFSEGGPPGRPKPGAGVPDFLPSAQRALYLRIQQKQQEEEERARRLAESSKQDRENEEGDTGNWYSSDEDEGGSSVTSILKTLRQQTSSRPPASVGELSSSGLGDPRLQKGHPTGSRLADPRLSRDPRLTRHVEASGGSGPGDSGPSDPRLSLERRYWFSSLD

SEQ ID NO: 886479 - protein, 439 aa, Homo sapiens
MSVPSALMKQPPIQSTAGAVPVRNEKGEISMEKVKVKRYVSGKRPDYAPMESSDEEDEEFQFIKKAKEQEAEPEEQEEDSSSDPRLRRLQNRISEDVEERLARHRKIVEPEVVGESDSEVEGDAWRMEREDSSEEEEEEIDDEEIERRRGMMRQRAQERKNEEMEVMEVEDEGRSGEESESESEYEEYTDSEDEMEPRLKPVFIRKKDRVTVQEREAEALKQKELEQEAKRMAEERRKYTLKIVEEETKKELEENKRSLAALDALNTDDENDEEEYEAWKVRELKRIKRDREDREALEKEKAEIERMRNLTEEERRAELRANGKVITNKAVKGKYKFLQKYYHRGAFFMDEDEEVYKRDFSAPTLEDHFNKTILPKVMQVKNFGRSGRTKYTHLVDQDTTSFDSAWGQESAQNTKFFKQKAAGVRDVFERPSAKKRKTT

SEQ ID NO: 886480 - protein, 439 aa, Homo sapiens; identical to SEQ ID NO: 886479

SEQ ID NO: 886481 - protein, 439 aa, Homo sapiens; identical to SEQ ID NO: 886479

SEQ ID NO: 886482 - protein, 296 aa, Homo sapiens
MSVPSALMKQPPIQSTAGAVPVRNEKGEISMEKVKVKRYVSGKRPDYAPMESSDEEDEEFQFIKKAKEQEAEPEEQEEDSSSDPRLRRLQNRISEDVEERLARHRKIVEPEVVGESDSEVEGDAWRMEREDSSEEEEEEIDDEEIERRRGMMRQRAQERKNEEMEVMEVEDEGRSGEESESESEYEEYTDSEDEMEPRLKPVFIRKKDRVTVQEREAEALKQKELEQEAKRMAEERRKYTLKIVEEETKKELEENKRSLAALDALNTDDENDEEEYEAWKVRELKRIKRDREDREA

SEQ ID NO: 886483 - protein, 309 aa, Homo sapiens
MSVPSALMKQPPIQSTAGAVPVRNEKGEISMEKVKVKRYVSGKRPDYAPMESSDEEDEEFQFIKKAKEQEAEPEEQEEDSSSDPRLRRLQNRISEDVEERLARHRKIVEPEVVGESDSEVEGDAWRMEREDSSEEEEEEIDDEEIERRRGMMRQRAQERKNEEMEVMEVEDEGRFWQQAAQHITQSAANGSSYNRAAASMHDGRPSPFKGQGLPCPGTLKTQGKPPAKPLEPKGSPPTGGKPAWRTKGPPGQQGPATFSRHKTPQVTRRETSTLAAKAHKRGRNNGPQPTSYRSPTWGPRWTTWRNHKG

SEQ ID NO: 886484 - protein, 142 aa, Homo sapiens
MSVPSALMKQPPIQSTAGAVPVRNEKGEISMEKVKVKRYVSGKRPDYAPMESSDEEDEEFQFIKKAKEQEAEPEEQEEDSSSDPRLRRLQNRISEDVEERLARHRKIVEPEVVGESDSEVEGDAWRMEREDSSEERDIMCPA

SEQ ID NO: 886485 - protein, 102 aa, Homo sapiens
MSVPSALMKQPPIQSTAGAVPVRNEKGTVLTPSSQSNFNPFRPQQPPDLSRTDHSNPASFEIWLPDSSIFPPPPTCIRSCSCGLLSYSASTSLLLASTNSLD

SEQ ID NO: 886486 - protein, 439 aa, Homo sapiens; identical to SEQ ID NO: 886479

SEQ ID NO: 886487 - protein, 133 aa, Homo sapiens
MRNLTEEERRAELRANGKVITNKAVKGKYKFLQKYYHRGAFFMDEDEEVYKRDFSAPTLEDHFNKTILPKVMQVKNFGRSGRTKYTHLVDQDTTSFDSAWGQESAQNTKFFKQKAAGVRDVFERPSAKKRKTT

SEQ ID NO: 886488 - protein, 379 aa, Homo sapiens
MSVPSALMKQPPIQSTAGAVPVRNEKGEISMEKVKVKRYVSGKRPDYAPMESSDEEDEEFQFIKKAKEQEAEPEEQEEDSSSDPRLRRLQNRISEDVEERLARHRKIVEPEVVGESDSEVEGDAWRMEREDSSEEEEEEIDDEEIERRRGMMRQRAQERKNEEMEVMEVEDEGRSGEESESESEYEEYTDSEDEMEPRLKPVFIRKKDRVTVQEREAEALKQKELEQEAKRMAEERRKYTLKIVEEETKKELEENKRSLAALDALNTDDENDEEEYEAWKVRELKRIKRDREDREALEKEKAEIERMRNLTEEERRAELRANGKVITNKAVKGKYKFLQKYYHRGAFFMVRSEKRVRKLGSRNNSETLNYFSLQEYSGM

SEQ ID NO: 886489 - protein, 150 aa, Homo sapiens
MSVPSALMKQPPIQSTAGAVPVRNEKGEISMEKVKVKRYVSGKRPDYAPMESSDEEDEEFQFIKKAKEQEAEPEEQEEDSSSDPRLRRLQNRISEDVEERLARHRKIVEPEVVGESDSEVEGDAWRMEREDSSEEEEEEIDDESRWTARS

SEQ ID NO: 886490 - protein, 114 aa, Homo sapiens
LNYGRVDFFLRWSLALLPRLEGSGAISAHCNLCLPGSSSSASASQVAVTKGARRHAQLIFCILVETGFHRVAQAALRTPELRQSTASAYRSARITDVSHRAWSSLHFFSISFIS

SEQ ID NO: 886491 - protein, 176 aa, Homo sapiens
PFPGVHLVAGKATFSERVCLLSGSLSPQPAMEEQPQMQDADEPADSGGEGRAGGPPQVAGAQAACSEDRMTLLLRLRAQTKQQLLEYKSMVDASEEKTPEQIMQEKQIEAKIEDLENEIEEVKVAFEIKKLALDRMRLSTALKKNLEKISRQSSVLMDNMKHLLELNKLIMKSQQN

SEQ ID NO: 886492 - protein, 277 aa, Homo sapiens
PFPGVHLVAGKATFSERVCLLSGSLSPQPAMEEQPQMQDADEPADSGGEGRAGGPPQVAGAQAACSEDRMTLLLRLRAQTKQQLLEYKSMVDASEEKTPEQIMQEKQIEAKIEDLENEIEEVKVAFEIKKLALDRMRLSTALKKNLEKISRQSSVLMDNMKHLLELNKLIMKSQQESWDLEEKLLDIRKKRLQLKQASESKLLEIQTEKNKQKIDLDSMENSERIKIIRQNLQMEIKITTVIQHVFQNLILGSKVNWAEDPALKEIVLQLEKNVDMM

SEQ ID NO: 886493 - protein, 194 aa, Homo sapiens
PFPGVHLVAGKATFSERVCLLSGSLSPQPAMEEQPQMQDADEPADSGGEGRAGGPPQVAGAQAACSEDRMTLLLRLRAQTKQQLLEYKSMVDASEEKTPEQIMQEKQIEAKIEDLENEIEEVKVAFEIKKLALDRMRLSTALKKNLEKISRQSSVLMDNMKHLLELNKLIMKSQQESWDLEEKLLDIRKKRLRM

SEQ ID NO: 886494 - protein, 157 aa, Homo sapiens
SCQAALQLGVGVGRVISPDSLKLLSLHSPRRCPGLADDSPSAYGAGAKLLWVDCTGPHARHQPHLLDPLYTGPGSFLVSPAQRFQGEDQATAHCPASGRKEEEPLCAHISGRPGQLGSVSQPQPTGSGDLKGSTASAPSAHCVRPTPALAVIDRERP

SEQ ID NO: 886495 - protein, 414 aa, Homo sapiens
QEETVPAGGRSCRSGGLLGAGLGGDRWRGGAWGSEGWALEIRGSTLLRCLDSGFRPGASRGLVGSWAAMESTLGAGIVIAEALQNQLAWLENVWLWITFLGDPKILFLFYFPAAYYASRRVGIAVLWISLITEWLNLIFKWFLFGDRPFWWVHESGYYSQAPAQVHQFPSSCETGPGSPSGHCMITGAALWPIMTALSSQVATRARSRWVRVMPSLAYCTFLLAVGLSRIFILAHFPHQVLAGLITGAVLGWLMTPRVPMERELSFYGLTALALMLGTSLIYWTLFTLGLDLSWSISLAFKWCERPEWIHVDSRPFASLSRDSGAALGLGIALHSPCYAQVRRAQLGNGQKIACLVLAMGLLGPLDWLGHPPQISLFYIFNFLKYTLWPCLVLALVPWAVHMFSAQEAPPIHSS

SEQ ID NO: 886496 - protein, 221 aa, Homo sapiens
MTALSSQVATRARSRWVRVMPSLAYCTFLLAVGLSRIFILAHFPHQVLAGLITGAVLGWLMTPRVPMERELSFYGLTALALMLGTSLIYWTLFTLGLDLSWSISLAFKWCERPEWIHVDSRPFASLSRDSGAALGLGIALHSPCYAQVRRAQLGNGQKIACLVLAMGLLGPLDWLGHPPQISLFYIFNFLKYTLWPCLVLALVPWAVHMFSAQEAPPIHSS

SEQ ID NO: 886497 - protein, 257 aa, Homo sapiens
TLLDFKPYYEATVTNNNMVLVQKQAHRTMEQSRQPIMTALSSQVATRARSRWVRVMPSLAYCTFLLAVGLSRIFILAHFPHQVLAGLITGAVLGWLMTPRVPMERELSFYGLTALALMLGTSLIYWTLFTLGLDLSWSISLAFKWCERPEWIHVDSRPFASLSRDSGAALGLGIALHSPCYAQVRRAQLGNGQKIACLVLAMGLLGPLDWLGHPPQISLFYIFNFLKYTLWPCLVLALVPWAVHMFSAQEAPPIHSS

SEQ ID NO: 886498 - protein, 263 aa, Homo sapiens
QEETVPAGGRSCRSGGLLGAGLGGDRWRGGAWGSEGWALEIRGSTLLRCLDSGFRPGASRGLVGSWAAMESTLGAGIVIAEALQNQLAWLENVWLWITFLGDPKILFLFYFPAAYYASRRVGIAVLWISLITEWLNLIFKWFLFGDRPFWWVHESGYYSQAPAQVHQFPSSCETGPGSPSGHCMITGAALWPIMTALSSQVATRARRRCPGLADDSPSAYGAGAKLLWVDCTGPHARHQPHLLDPLYTGPGSFLVHQPSLQVV

SEQ ID NO: 886499 - protein, 264 aa, Homo sapiens
QEETVPAGGRSCRSGGLLGAGLGGDRWRGGAWGSEGWALEIRGSTLLRCLDSGFRPGASRGLVGSWAAMESTLGAGIVIAEALQNQLAWLENVWLWITFLGDPKILFLFYFPAAYYASRRVGIAVLWISLIYWTLFTLGLDLSWSISLAFKWCERPEWIHVDSRPFASLSRDSGAALGLGIALHSPCYAQVRRAQLGNGQKIACLVLAMGLLGPLDWLGHPPQISLFYIFNFLKYTLWPCLVLALVPWAVHMFSAQEAPPIHSS

SEQ ID NO: 886500 - protein, 414 aa, Homo sapiens; identical to SEQ ID NO: 886495

SEQ ID NO: 886501 - protein, 434 aa, Homo sapiens
QEETVPAGGRSCRSGGLLGAGLGGDRWRGGAWGSEGWALEIRGSTLLRCLDSGFRPGASRGLVGSWAAMESTLGAGIVIAEALQNQLAWLENVWLWITFLGDPKILFLFYFPAAYYASRRVGIAVLWISLITEWLNLIFKWLRQRSPPASWSPPPRALSHVFLFGDRPFWWVHESGYYSQAPAQVHQFPSSCETGPGSPSGHCMITGAALWPIMTALSSQVATRARSRWVRVMPSLAYCTFLLAVGLSRIFILAHFPHQVLAGLITGAVLGWLMTPRVPMERELSFYGLTALALMLGTSLIYWTLFTLGLDLSWSISLAFKWCERPEWIHVDSRPFASLSRDSGAALGLGIALHSPCYAQVRRAQLGNGQKIACLVLAMGLLGPLDWLGHPPQISLFYIFNFLKYTLWPCLVLALVPWAVHMFSAQEAPPIHSS

SEQ ID NO: 886502 - protein, 221 aa, Homo sapiens; identical to SEQ ID NO: 886496

SEQ ID NO: 886503 - protein, 425 aa, Homo sapiens
QEETVPAGGRSCRSGGLLGAGLGGDRWRGGAWGSEGWALEIRGSTLLRCLDSGFRPGASRGLVGSWAAMESTLGAGIVIAEALQNQLAWLENVWLWITFLGDPKILFLFYFPAAYYASRRVGIAVLWISLITEWLNLIFKWFLFGDRPFWWVHESGYYSQAPAQVHQFPSSCETGPGSPSGHCMITGAALWPIMTALSSQVATRARSRWVRVMPSLAYCTFLLAVGLSRIFILAHFPHQVLAGLITDSLKLLSLHSPGAVLGWLMTPRVPMERELSFYGLTALALMLGTSLIYWTLFTLGLDLSWSISLAFKWCERPEWIHVDSRPFASLSRDSGAALGLGIALHSPCYAQVRRAQLGNGQKIACLVLAMGLLGPLDWLGHPPQISLFYIFNFLKYTLWPCLVLALVPWAVHMFSAQEAPPIHSS

SEQ ID NO: 886504 - protein, 73 aa, Homo sapiens
IIIGDISTSTECTPVPLPDAKQRLFPRGHPPQISLFYIFNFLKYTLWPCLVLALVPWAVHMFSAQEAPPIHSS

SEQ ID NO: 886505 - protein, 524 aa, Homo sapiens
MKVLGRSFFWVLFPVLPWAVQAVEHEEVAQRVIKLHRGRGVAAMQSRQWVRDSCRKLSGLLRQKNAVLNKLKTAIGAVEKDVGLSDEEKLFQVHTFEIFQKELNESENSVFQAVYGLQRALQGDYKDVVNMKESSRQRLEALREAAIKEETEYMELLAAEKHQVEALKNMQHQNQSLSMLDEILEDVRKAADRLEEEIEEHAFDDNKSVKGVNFEAVLRVEEEEANSKQNITKREVEDDLGLSMLIDSQNNQYILTKPRDSTIPRADHHFIKDIVTIGMLSLPCGWLCTAIGLPTMFGYIICGVLLGPSGLNSIKSIVQVETLGEFGVFFTLFLVGLEFSPEKLRKVWKISLQGPCYMTLLMIAFGLLWGHLLRIKPTQSVFISTCLSLSSTPLVSRFLMGSARGDKEGDIDYSTVLLGMLVTQDVQLGLFMAVMPTLIQAGASASSSIVVEVLRILVLIGQILFSLAAVFLLCLVIKKYLIGPYYRKLHMESKGNKEILILGISAFIFLMLTVILKLCVIYVI

SEQ ID NO: 886506 - protein, 414 aa, Homo sapiens
MKVLGRSFFWVLFPVLPWAVQAVEHEEVAQRVIKLHRGRGVAAMQSRQWVRDSCRKLSGLLRQKNAVLNKLKTAIGAVEKDVGLSDEEKLFQVHTFEIFQKELNESENSVFQAVYGLQRALQGDYKDVVNMKESSRQRLEALREAAIKEETEYMELLAAEKHQVEALKNMQHQNQSLSMLDEILEDVRKAADRLEEEIEEHAFDDNKSVKGVNFEAVLRVEEEEANSKQNITKREVEDDLGLSMLIDSQNNQYILTKPRDSTIPRADHHFIKDIVTIGMLSLPCGWLCTAIGLPTMFGYIICGVLLGPSGLNSIKSIVQVETLGEFGVFFTLFLVGLEFSPEKLRKVWKISLQGPCYMTLLMIAFGLLWGHLLRIKPTQSVFISTCLSLSSTPLVSRFLMGSARGDKEGNRTAL

SEQ ID NO: 886507 - protein, 677 aa, Homo sapiens
MKVLGRSFFWVLFPVLPWAVQAVEHEEVAQRVIKLHRGRGVAAMQSRQWVRDSCRKLSGLLRQKNAVLNKLKTAIGAVEKDVGLSDEEKLFQVHTFEIFQKELNESENSVFQAVYGLQRALQGDYKDVVNMKESSRQRLEALREAAIKEETEYMELLAAEKHQVEALKNMQHQNQSLSMLDEILEDVRKAADRLEEEIEEHAFDDNKSVKGVNFEAVLRVEEEEANSKQNITKREVEDDLGLSMLIDSQNNQYILTKPRDSTIPRADHHFIKDIVTIGMLSLPCGWLCTAIGLPTMFGYIICGVLLGPSGLNSIKSIVQVETLGEFGVFFTLFLVGLEFSPEKLRKVWKISLQGPCYMTLLMIAFGLLWGHLLRIKPTQSVFISTCLSLSSTPLVSRFLMGSARGDKEGDIDYSTVLLGMLVTQDVQLGLFMAVMPTLIQAGASASSSIVVEVLRILVLIGQILFSLAAVFLLCLVIKKYLIGPYYRKLHMESKGNKEILILGISAFIFLMLTVTELLDVSMELGCFLAGALVSSQGPVVTEEIATSIEPIRDFLAIVFFASIGLHVFPTFVAYELTVLVFLTLSVVVMKFLLAALVLSLILPRSSQYIKWIVSAGLAQVSEFSFVLGSRARRAGVISREVYLLILSVTTLSLLLAPVLWRAAITRCVPRPERRSSL

SEQ ID NO: 886508 - protein, 646 aa, Homo sapiens
MKVLGRSFFWVLFPVLPWAVQAVEHEEVAQRVIKLHRGRGVAAMQSRQWVRDSCRKLSGLLRQKNAVLNKLKTAIGAVEKDVGLSDEEKLFQVHTFEIFQKELNESENSVFQAVYGLQRALQGDYKDVVNMKESSRQRLEALREAAIKEETEYMELLAAEKHQVEALKNMQHQNQSLSMLDEILEDVRKAADRLEEEIEEHAFDDNKSVKGVNFEAVLRVEEEEANSKQNITKREVEDDLGLSMLIDSQNNQYILTKPRDSTIPRADHHFIKDIVTIGMLSLPCGWLCTAIGLPTMFGYIICGVLLGPSGLNSIKVWKISLQGPCYMTLLMIAFGLLWGHLLRIKPTQSVFISTCLSLSSTPLVSRFLMGSARGDKEGDIDYSTVLLGMLVTQDVQLGLFMAVMPTLIQAGASASSSIVVEVLRILVLIGQILFSLAAVFLLCLVIKKYLIGPYYRKLHMESKGNKEILILGISAFIFLMLTVTELLDVSMELGCFLAGALVSSQGPVVTEEIATSIEPIRDFLAIVFFASIGLHVFPTFVAYELTVLVFLTLSVVVMKFLLAALVLSLILPRSSQYIKWIVSAGLAQVSEFSFVLGSRARRAGVISREVYLLILSVTTLSLLLAPVLWRAAITRCVPRPERRSSL

SEQ ID NO: 886509 - protein, 677 aa, Homo sapiens; identical to SEQ ID NO: 886507

SEQ ID NO: 886510 - protein, 704 aa, Homo sapiens
MKVLGRSFFWVLFPVLPWAVQAVEHEEVAQRVIKLHRGRGVAAMQSRQWVRDSCRKLSGLLRQKNAVLNKLKTAIGAVEKDVGLSDEEKLFQVHTFEIFQKELNESENSVFQAVYGLQRALQGDYKDVVNMKESSRQRLEALREAAIKEETEYMELLAAEKHQVEALKNMQHQNQSLSMLDEILEDVRKAADRLEEEIEEHAFDDNKSVSVPEQLLLHLLSHSLIRRHVVEIVHSVKGVNFEAVLRVEEEEANSKQNITKREVEDDLGLSMLIDSQNNQYILTKPRDSTIPRADHHFIKDIVTIGMLSLPCGWLCTAIGLPTMFGYIICGVLLGPSGLNSIKSIVQVETLGEFGVFFTLFLVGLEFSPEKLRKVWKISLQGPCYMTLLMIAFGLLWGHLLRIKPTQSVFISTCLSLSSTPLVSRFLMGSARGDKEGDIDYSTVLLGMLVTQDVQLGLFMAVMPTLIQAGASASSSIVVEVLRILVLIGQILFSLAAVFLLCLVIKKYLIGPYYRKLHMESKGNKEILILGISAFIFLMLTVTELLDVSMELGCFLAGALVSSQGPVVTEEIATSIEPIRDFLAIVFFASIGLHVFPTFVAYELTVLVFLTLSVVVMKFLLAALVLSLILPRSSQYIKWIVSAGLAQVSEFSFVLGSRARRAGVISREVYLLILSVTTLSLLLAPVLWRAAITRCVPRPERRSSL

SEQ ID NO: 886511 - protein, 580 aa, Homo sapiens
MKVLGRSFFWVLFPVLPWAVQAVEHEEVAQRVIKLHRGRGVAAMQSRQWVRDSCRKLSGLLRQKNAVLNKLKTAIGAVEKDVGLSDEEKLFQVHTFEIFQKELNESENSVFQAVYGLQRALQGDYKDVVNMKESSRQRLEALREAAIKEETEYMELLAAEKHQVEALKNMQHQNQSLSMLDEILEDVRKAADRLEEEIEEHAFDDNKSVKGVNFEAVLRVEEEEANSKQNITKREVEDDLGLSMLIDSQNNQYILTKPRDSTIPRADHHFIKDIVTIGMLSLPCGWLCTAIGLPTMFGYIICGVLLGPSGLNSIKSIVQVETLGEFGVFFTLFLVGLEFSPEKLRKHCRGSSPNPGFDWSDSFFTSGGFSFMSCYKEVSHWTLLSEAAHGKQGEQRNPDLGNICLYLLNVNGHGAAGRLHGAGLFPGWSARLLSGPRGHRGDRHLHRTHPRLPGHRFLRLHRAPRVPHVCGVRAHGAGVPHLVSGGDEVSPGGAGPVSHSAEEQPVHQVDRLCGACPGQRVFLCPGEPGAKSGRHLSGGVPPYTECDHAQPLARPGAVESCNHEVCAQTGETVQPLMARR

SEQ ID NO: 886512 - protein, 497 aa, Homo sapiens
MKVLGRSFFWVLFPVLPWAVQAVEHEEVAQRVIKLHRGRGVAAMQSRQWVRDSCRKLSGLLRQKNAVLNKLKTAIGAVEKDVGLSDEEKLFQVHTFEIFQKELNESENSVFQAVYGLQRALQGDYKDVVNMKESSRQRLEALREAAIKEETEYMELLAAEKHQVEALKNMQHQNQSLSMLDEILEDVRKAADRLEEEIEEHAFDDNKSVKGVNFEAVLRVEEEEANSKQNITKREVEDDLGLSMLIDSQNNQYILTKPRDSTIPRADHHFIKDIVTIGMLSLPCGWLCTAIGLPTMFGYIICGVLLGPSGLNSIKSIVQVETLGEFGVFFTLFLVGLEFSPEKLRKVWKISLQGPCYMTLLMIAFGLLWGHLLRIKPTQSVFISTCLSLSSTPLVSRFLMGSARGDKEGDIDYSTVLLGMLVTQDVQLGLFMAVMPTLIQAGASASSRSRSCWTSPWSWAVSWLERSSPLRAPWSPRRSPPPSNPSATSWPSFSSPP

SEQ ID NO: 886513 - protein, 677 aa, Homo sapiens; identical to SEQ ID NO: 886507

SEQ ID NO: 886514 - protein, 594 aa, Homo sapiens
ELGTPSFIIPTQGDYKDVVNMKESSRQRLEALREAAIKEETEYMELLAAEKHQVEALKNMQHQNQSLSMLDEILEDVRKAADRLEEEIEEHAFDDNKSVSVPEQLLLHLLSHSLIRRHVVEIVHSVKGVNFEAVLRVEEEEANSKQNITKREVEDDLGLSMLIDSQNNQYILTKPRDSTIPRADHHFIKDIVTIGMLSLPCGWLCTAIGLPTMFGYIICGVLLGPSGLNSIKSIVQVETLGEFGVFFTLFLVGLEFSPEKLRKVWKISLQGPCYMTLLMIAFGLLWGHLLRIKPTQSVFISTCLSLSSTPLVSRFLMGSARGDKEGDIDYSTVLLGMLVTQDVQLGLFMAVMPTLIQAGASASSSIVVEVLRILVLIGQILFSLAAVFLLCLVIKKYLIGPYYRKLHMESKGNKEILILGISAFIFLMLTVTELLDVSMELGCFLAGALVSSQGPVVTEEIATSIEPIRDFLAIVFFASIGLHVFPTFVAYELTVLVFLTLSVVVMKFLLAALVLSLILPRSSQYIKWIVSAGLAQVSEFSFVLGSRARRAGVISREVYLLILSVTTLSLLLAPVLWRAAITRCVPRPERRSSL

SEQ ID NO: 886515 - protein, 161 aa, Homo sapiens
GHSCPAQLRAQEPPGHQRLAGVRDATRCRGGGSGRAGEEERLVEKSRGLHVFPTFVAYELTVLVFLTLSVVVMKFLLAALVLSLILPRSSQYIKWIVSAGLAQVSEFSFVLGSRARRAGVISREVYLLILSVTTLSLLLAPVLWRAAITRCVPRPERRSSL

SEQ ID NO: 886516 - protein, 156 aa, Homo sapiens [sequence omitted]

SEQ ID NO: 886517 - protein, 136 aa, Homo sapiens
MGRKPGISGTGHSQAGRKPVGLEMKGRLSTGQQRGENAARNAQGLHVFPTFVAYELTVLVFLTLSVVVMKFLLAALVLSLILPRSSQYIKWIVSAGLAQVYLLILSVTTLSLLLAPVLWRAAITRCVPRPERRSSL

SEQ ID NO: 886518 - protein, 241 aa, Homo sapiens [sequence omitted]

SEQ ID NO: 886519 - protein, 124 aa, Homo sapiens
MNHCLTMCDNNSFSAENVCLTCKLSGAETRGLLCPALRTWIMKVLGRSFFWVLFPVLPWAVQAVEHEEVAQRVIKLHRGRGVAAMQSRQWVRDSCRKLSGLLRQKNAVLNKLKTAIGAVEKDVG

SEQ ID NO: 886520 - protein, 907 aa, Homo sapiens
MPTAAAPIISSVQKLVLYETRARYFLVGSNNAETKYRVLKIDRTEPKDLVIIDDRHVYTQQEVRELLGRLDLGNRTKMGQKGSSGLFRAVSAFGVVGFVRFLEGYYIVLITKRRKMADIGGHAIYKVEDTNMIYIPNDSVRVTHPDEARYLRIFQNVDLSSNFYFSYSYDLSHSLQYNLTVLRMPLEMLKSEMTQNRQESFDIFEDEGLITQGGSGVFGICSEPYMKYVWNGELLDIIKSTVHRDWLLYIIHGFCGQSKLLIYGRPVYVTLIARRSSKFAGTRFLKRGANCEGDVANEVETEQILCDASVMSFTAGSYSSYVQVRGSVPLYWSQDISTMMPKPPITLDQADPFAHVAALHFDQMFQRFGSPIIILNLVKEREKRKHERILSEELVAAVTYLNQFLPPEHTIVYIPWDMAKYTKSKLCNVLDRLNVIAESVVKKTGFFVNRPDSYCSILRPDEKWNELGGCVIPTGRLQTGILRTNCVDCLDRTNTAQFMVGKCALAYQLYSLGLIDKPNLQFDTDAVRLFEELYEDHGDTLSLQYGGSQLVHRVKTYRKIAPWTQHSKDIMQTLSRYYSNAFSDADRQDSINLFLGVFHPTEGKPHLWELPTDFYLHHKNTMRLLPTRRSYTYWWTPEVIKHLPLPYDEVICAVNLKKLIVKKFHKYEEEIDIHNEFFRPYELSSFDDTFCLAMTSSARDFMPKTVGIDPSPFTVRKPDETGKSVLGNKSNREEAVLQRKTAASAPPPPSEEAVSSSSEDDSGTDREEEGSVSQRSTPVKMTDAGDSAKVTENVVQPMKELYGINLSDGLSEEDFSIYSRFVQLGQSQHKQDKNSQQPCSRCSDGVIKLTPISAFSQDNIYEVQPPRVDRKSTEIFQAHIQASQGIMQPLGKEDSSMYREYIRNRYL

SEQ ID NO: 886521 - protein, 95 aa, Homo sapiens
SACLFNASDSQVLLRLLPVVLPYIFFNAALSLFIFYRTPISAFSQDNIYEVQPPRVDRKSTEIFQAHIQASQGIMQPLGKEDSSMYREYIRNRYL

SEQ ID NO: 886522 - protein, 245 aa, Homo sapiens
MRYFLVGSNNAETKYRVLKIDRTEPKDLVIIDDRHVYTQQEVRELLGRLDLGNRTKMGQKGSSGLFRAVSAFGVVGFVRFLEGYYIVLITKRRKMADIGGHAIYKVEDTNMIYIPNDSVRVTHPDEARYLRIFQNVDLSSNFYFSYSYDLSHSLQYNLTVLRMPLEMLKSEMTQNRQESFDIFEDEGLITQGGSGVFGICSEPYMKYVWNGELLDIIKSTVHRDWLLYIIHGFCGQSSILSEEKV

SEQ ID NO: 886523 - protein, 157 aa, Homo sapiens
TSGYQRITGTMNYHSLIQNAVRLFEELYEDHGDTLSLQYGGSQLVHRVKTYRKIAPWTQHSKDIMQTLSRYYSNAFSDADRQDSINLFLGVFHPTEGKPHLWELPTDFYLHHKNTMRLLPTRRSYTYWWTPEVIKHLPLPYDEGFLARSPANLECSN

SEQ ID NO: 886524 - protein, 725 aa, Homo sapiens [sequence omitted]

SEQ ID NO: 886525 - protein, 264 aa, Homo sapiens
MQYLFLVICAVNLKKLIVKKFHKYEEEIDIHNEFFRPYELSSFDDTFCLAMTSSARDFMPKTVGIDPSPFTVRKPDETGKSVLGNKSNREEAVLQRKTAASAPPPPSEEAVSSSSEDDSGTDREEEGSVSQRSTPVKMTDAGDSAKVTENVVQPMKELYGINLSDGLSEEDFSIYSRFVQLGQSQHKQDKNSQQPCSRCSDGVIKLTPISAFSQDNIYEVQPPRVDRKSTEIFQAHIQASQGIMQPLGKEDSSMYREYIRNRYL

SEQ ID NO: 886526 - protein, 127 aa, Homo sapiens
MTDAGDSAKVTENVVQPMKELYGINLSDGLSEEDFSIYSRFVQLGQSQHKQDKNSQQPCSRCSDGVIKLTPISAFSQDNIYEVQPPRVDRKSTEIFQAHIQASQGIMQPLGKEDSSMYREYIRNRYL

SEQ ID NO: 886527 - protein, 361 aa, Homo sapiens
MPTAAAPIISSVQKLVLYETRARYFLVGSNNAETKYRVLKIDRTEPKDLVIIDDRHVYTQQEVRELLGRLDLGNRTKMGQKGSSGLFRAVSAFGVVGFVRFLEGYYIVLITKRRKMADIGGHAIYKVEDTNMIYIPNDSVRVTHPDEARYLRIFQNVDLSSNFYFSYSYDLSHSLQYNLTVLRMPLEMLKSEMTQNRQESFDIFEDEGLITQGGSGVFGICSEPYMKYVWNGELLDIIKSTVHRDWLLYIIHGFCGQSKLLIYGRPVYVTLIARRSSKFAGTRFLKRGANCEGDVANEVETEQILCDASVMSFTAGSYSSYVQVRGSVPLYWSQDISTMMPKPPITCVWSHVFNNNSCPHI

SEQ ID NO: 886528 - protein, 216 aa, Homo sapiens
MPTAAAPIISSVQKLVLYETRARYFLVGSNNAETKYRVLKIDRTEPKDLVIIDDRHVYTQQEVRELLGRLDLGNRTKMGQKGSSGLFRAVSAFGVVGFVRFLEGYYIVLITKRRKMADIGGHAIYKVEDTNMIYIPNDSVRVTHPDEARYLRIFQNVDLSSNFYFSYSYDLSHSLQYNLTVLRMPLEMLKSEMTQNRQESFDIFEDEGLITQGGSG

SEQ ID NO: 886529 - protein, 157 aa, Homo sapiens
MASMGTLAFDEYGRPFLIIKDQDRKSRLMGLEALKSHIMAAKAVANTMRTSLGPNGLDKMMVDKDGDVTVTNDGATILSMMDVDHQIAKLMVELSKSQDDEIGDGTTGVVVLAGALLEEAEQLLDRGIHPIRIADGYEQAARVAIEHLDKISDSVPC

SEQ ID NO: 886530 - protein, 157 aa, Homo sapiens; identical to SEQ ID NO: 886529

SEQ ID NO: 886531 - protein, 157 aa, Homo sapiens; identical to SEQ ID NO: 886529

SEQ ID NO: 886532 - protein, 157 aa, Homo sapiens
KARYEAGWRAKYGRPFLIIKDQDRKSRLMGLEALKSHIMAAKAVANTMRTSLGPNGLDKMMVDKDGDVTVTNDGATILSMMDVDHQIAKLMVELSKSQDDEIGDGTTGVVVLAGALLEEAEQLLDRGIHPIRIADGYEQAARVAIEHLDKISDSVPC

SEQ ID NO: 886533 - protein, 162 aa, Homo sapiens
QNKNQKQQEEEITMIIEEAKRSLHDALCVIRNLIRDNRVVYGGGAAEISCALAVSQEADKCPTLEQYAMRAFADALEVIPMALSENSGMNPIQTMTEVRARQVKEMNPALGIDCLHKGTNDMKQQHVIETLIGKKQQISLATQMVRMILKIDDIRKPGESEE

SEQ ID NO: 886534 - protein, 303 aa, Homo sapiens [sequence omitted]

SEQ ID NO: 886535 - protein, 303 aa, Homo sapiens [sequence omitted]

SEQ ID NO: 886536 - protein, 303 aa, Homo sapiens [sequence omitted]

SEQ ID NO: 886537 - protein, 303 aa, Homo sapiens [sequence omitted]

SEQ ID NO: 886538 - protein, 303 aa, Homo sapiens [sequence omitted]

SEQ ID NO: 886539 - protein, 303 aa, Homo sapiens [sequence omitted]

SEQ ID NO: 886540 - protein, 303 aa, Homo sapiens [sequence omitted]

SEQ ID NO: 886541 - protein, 303 aa, Homo sapiens [sequence omitted]

SEQ ID NO: 886542 - protein, 303 aa, Homo sapiens [sequence omitted]

SEQ ID NO: 886543 - protein, 303 aa, Homo sapiens [sequence omitted]

SEQ ID NO: 886544 - protein, 303 aa, Homo sapiens [sequence omitted]

SEQ ID NO: 886545 - protein, 303 aa, Homo sapiens [sequence omitted]

SEQ ID NO: 886546 - protein, 157 aa, Homo sapiens; identical to SEQ ID NO: 886529

SEQ ID NO: 886547 - protein, 244 aa, Homo sapiens
MPKKVEDAKIAILTCPFEPPKPKTKHKLDVTSVEDYKALQKYEKEKFEEMIQQIKETGANLAICQWGFDDEANHLLLQNNLPAVRWVGGPEIELIAIATGGRIVPRFSELTAEKLGFAGLVQEISFGTTKDKMLVIEQCKNSRAVTIFIRGGNKMIIEEAKRSLHDALCVIRNLIRDNRVVYGGGAAEISCALAVSQEADKCPTLEQYAMRAFADALEVIPMALSENSGMNPIQTMTEVRARQI

SEQ ID NO: 886548 - protein, 303 aa, Homo sapiens [sequence omitted]

SEQ ID NO: 886549 - protein, 290 aa, Homo sapiens
MPKKVEDAKIAILTCPFEPPKPKTKHKLDVTSVEDYKALQKYEKEKFEEMIQQIKETGANLAICQWGFDDEANHLLLQNNLPAVRWVGGPEIELIAIATGGRIVPRFSELTAEKLGFAGLVQEISFGTTKDKMLVIEQCKNSRAVTIFIRGGNKMIIEEAKRSLHDALCVIRNLIRDNRVVYGGGAAEISCALAVSQEADKCPTLEQYAMRAFADALEVIPMALSENSGMNPIQTMTEVRARQVKEMNPALGIDCCQGALLSTLSRNLLERPFSCPLVDGFGCGSVPDLM

SEQ ID NO: 886550 - protein, 157 aa, Homo sapiens; identical to SEQ ID NO: 886529

SEQ ID NO: 886551 - protein, 303 aa, Homo sapiens [sequence omitted]

SEQ ID NO: 886552 - protein, 303 aa, Homo sapiens [sequence omitted]

SEQ ID NO: 886553 - protein, 303 aa, Homo sapiens [sequence omitted]

SEQ ID NO: 886554 - protein, 303 aa, Homo sapiens [sequence omitted]

SEQ ID NO: 886555 - protein, 303 aa, Homo sapiens [sequence omitted]

SEQ ID NO: 886556 - protein, 303 aa, Homo sapiens [sequence omitted]

SEQ ID NO: 886557 - protein, 157 aa, Homo sapiens; identical to SEQ ID NO: 886529

SEQ ID NO: 886558 - protein, 303 aa, Homo sapiens [sequence omitted]

SEQ ID NO: 886559 - protein, 157 aa, Homo sapiens; identical to SEQ ID NO: 886529

SEQ ID NO: 886560 - protein, 157 aa, Homo sapiens; identical to SEQ ID NO: 886529

SEQ ID NO: 886561 - protein, 108 aa, Homo sapiens
MASMGTLAFDEYGRPFLIIKDQDRKSRLMGLEALKSHIMAAKAVANTMRTSLGPNGLDKMMVDKDGDVTVTNDGATILSMMDVDHREFVFSPPPPPGGGPGAGAGVRR

SEQ ID NO: 886562 - protein, 285 aa, Homo sapiens
MPKKVEDAKIAILTCPFEPPKPKTKHKLDVTSVEDYKALQKYEKEKFEEMIQQIKETGANLAICQWGFDDEANHLLLQNNLPAVRWVGGPEIELIAIATGGRIVPRFSELTAEKLGFAGLVQEISFGTTKDKMLVIEQCKNSRAVTIFIRGGNKMIIEEAKRSLHDALCVIRNLIRDNRVVYGGGAAEISCALAVSQEADKCPTLEQYAMRAFADALEVIPMALSENSGMNPIQTMTEVRARQVKEMNPALGIDCLHKGTNDMKQQHVIETLIGNDIRKPGESEE

SEQ ID NO: 886563 - protein, 303 aa, Homo sapiens [sequence omitted]

SEQ ID NO: 886564 - protein, 157 aa, Homo sapiens; identical to SEQ ID NO: 886529

SEQ ID NO: 886565 - protein, 303 aa, Homo sapiens [sequence omitted]

SEQ ID NO: 886566 - protein, 303 aa, Homo sapiens [sequence omitted]

SEQ ID NO: 886567 - protein, 303 aa, Homo sapiens [sequence omitted]

SEQ ID NO: 886568 - protein, 303 aa, Homo sapiens [sequence omitted]

SEQ ID NO: 886569 - protein, 154 aa, Homo sapiens
RGGNKMIIEEAKRSLHDALCVIRNLIRDNRVVYGGGAAEISCALAVSQEADKCPTLEQYAMRAFADALEVIPMALSENSGMNPIQTMTEVRARQVKEMNPALGIDCLHKGTNDMKQQHVIETLIGKKQQISLATQMVRMILKIDDIRKPGESEE

SEQ ID NO: 886570 - protein, 157 aa, Homo sapiens; identical to SEQ ID NO: 886529

SEQ ID NO: 886571 - protein, 189 aa, Homo sapiens
MALVRGGWLWRQSSILRRWKRNWFALWLDGTLGYYHDETAQDEEDRVLIHFNVRDIKIGPECHDVQPPEGRSRDGLLTVNLREGGRLHLCAETKDDALAWKTALLEANSTPVRVYSPYQDYYEVVPPNAHEATYVRSYYGPPYAGPGVTHVIVREDPCYSAGAPLAMGMLAGAATGAALGSLMWSPCWF

SEQ ID NO: 886572 - protein, 208 aa, Homo sapiens
MSPAAPVPPDSALESPFEEMALVRGGWLWRQSSILRRWKRNWFALWLDGTLGYYHDETAQDEEDRVLIHFNVRDIKIGPECHDVQPPEGRSRDGLLTVNLREGGRLHLCAETKDDALAWKTALLEANSTPVRVYSPYQDYYEVVPPNAHEATYVRSYYGPPYAGPGVTHVIVREDPCYSAGAPLAMGMLAGAATGAALGSLMWSPCWF

SEQ ID NO: 886573 - protein, 224 aa, Homo sapiens
MALVRGGWLWRQSSILRRWKRNWFALWLDGTLGYYHDETAQDEEDRVLIHFNVRDIKIGPECHDVQPPEGRSRDGLLTVNLREGGRLHLCAETKDDALAWKTALLEANSTPAPAGATVPPRSRRVCSKVRCVTRSWSPCKVERRIWVRVYSPYQDYYEVVPPNAHEATYVRSYYGPPYAGPGVTHVIVREDPCYSAGAPLAMGMLAGAATGAALGSLMWSPCWF

SEQ ID NO: 886574 - protein, 189 aa, Homo sapiens; identical to SEQ ID NO: 886571

SEQ ID NO: 886575 - protein, 189 aa, Homo sapiens; identical to SEQ ID NO: 886571

SEQ ID NO: 886576 - protein, 189 aa, Homo sapiens; identical to SEQ ID NO: 886571

SEQ ID NO: 886577 - protein, 209 aa, Homo sapiens
LKPGLLGVPPDSALESPFEEMALVRGGWLWRQSSILRRWKRNWFALWLDGTLGYYHDETAQDEEDRVLIHFNVRDIKIGPECHDVQPPEGRSRDGLLTVNLREGGRLHLCAETKDDALAWKTALLEANSTPVRVYSPYQDYYEVVPPNAHEATYVRSYYGPPYAGPGVTHVIVREDPCYSAGAPLAMGMLAGAATGAALGSLMWSPCWF

SEQ ID NO: 886578 - protein, 189 aa, Homo sapiens; identical to SEQ ID NO: 886571

SEQ ID NO: 886579 - protein, 189 aa, Homo sapiens; identical to SEQ ID NO: 886571

SEQ ID NO: 886580 - protein, 152 aa, Homo sapiens
MWGPNSPTPKLPPHGLVGFALQSMEDSTAGGKLHPGARLQPVPRLLRGGAPQCTRGHVCPQLLRTALRRPWRDARDSAGGSLLQRRRPSGHGHACGSRHWGGAGLAHVVALLVLSPGTRSTDPCAWIARLLFLLDPILYHPSPVPLWPYPLH

SEQ ID NO: 886581 - protein, 148 aa, Homo sapiens
MDPREACARRGGRGPNPGQGVPGHLTWLDSPGARLQPVPRLLRGGAPQCTRGHVCPQLLRTALRRPWRDARDSAGGSLLQRRRPSGHGHACGSRHWGGAGLAHVVALLVLSPGTRSTDPCAWIARLLFLLDPILYHPSPVPLWPYPLH

SEQ ID NO: 886582 - protein, 147 aa, Homo sapiens
MALVRGGWLWRQSSILRRWKRNWFALWLDGTLGYYHDETAQDEEDRVLIHFNVRDIKIGPECHDVQPPEGRSRDGLLTVNLREGGRLHLCAETKDDALAWKTALLEANSTPVSLPFSPPFPTTSMCHGIMSDSDSVSTCQKFSVLCG

SEQ ID NO: 886583 - protein, 243 aa, Homo sapiens
MSPAAPVPPDSALESPFEEMALVRGGWLWRQSSILRRWKRNWFALWLDGTLGYYHDETAQDEEDRVLIHFNVRDIKIGPECHDVQPPEGRSRDGLLTVNLREGGRLHLCAETKDDALAWKTALLEANSTPAPAGATVPPRSRRVCSKVRCVTRSWSPCKVERRIWVRVYSPYQDYYEVVPPNAHEATYVRSYYGPPYAGPGVTHVIVREDPCYSAGAPLAMGMLAGAATGAALGSLMWSPCWF

SEQ ID NO: 886584 - protein, 189 aa, Homo sapiens; identical to SEQ ID NO: 886571

SEQ ID NO: 886585 - protein, 189 aa, Homo sapiens; identical to SEQ ID NO: 886571

SEQ ID NO: 886586 - protein, 261 aa, Homo sapiens
TRSWSEEDWKLQLEAENYEGHTPLHVAVIHKDVEMAGCSEMLELTLTNRSPRAGPCTRTVPPDSALESPFEEMALVRGGWLWRQSSILRRWKRNWFALWLDGTLGYYHDETAQDEEDRVLIHFNVRDIKIGPECHDVQPPEGRSRDGLLTVNLREGGRLHLCAETKDDALAWKTALLEANSTPVRVYSPYQDYYEVVPPNAHEATYVRSYYGPPYAGPGVTHVIVREDPCYSAGAPLAMGMLAGAATGAALGSLMWSPCWF

SEQ ID NO: 886587 - protein, 225 aa, Homo sapiens
RQGWGLLSRELLLRPVSPVAPLTVPPDSALESPFEEMALVRGGWLWRQSSILRRWKRNWFALWLDGTLGYYHDETAQDEEDRVLIHFNVRDIKIGPECHDVQPPEGRSRDGLLTVNLREGGRLHLCAETKDDALAWKTALLEANSTPVRVYSPYQDYYEVVPPNAHEATYVRSYYGPPYAGPGVTHVIVREDPCYSAGAPLAMGMLAGAATGAALGSLMWSPCWF

SEQ ID NO: 886588 - protein, 260 aa, Homo sapiens
DYYEVVPPNAHEATYVRSYYGPPYAGPGVTHVIVREDPCYSAGAPLAIGSNIRNKCETVPPDSALESPFEEMALVRGGWLWRQSSILRRWKRNWFALWLDGTLGYYHDETAQDEEDRVLIHFNVRDIKIGPECHDVQPPEGRSRDGLLTVNLREGGRLHLCAETKDDALAWKTALLEANSTPVRVYSPYQDYYEVVPPNAHEATYVRSYYGPPYAGPGVTHVIVREDPCYSAGAPLAMGMLAGAATGAALGSLMWSPCWF

SEQ ID NO: 886589 - protein, 196 aa, Homo sapiens
MALVRGGWLWRQMHLEYRTGSILRRWKRNWFALWLDGTLGYYHDETAQDEEDRVLIHFNVRDIKIGPECHDVQPPEGRSRDGLLTVNLREGGRLHLCAETKDDALAWKTALLEANSTPVRVYSPYQDYYEVVPPNAHEATYVRSYYGPPYAGPGVTHVIVREDPCYSAGAPLAMGMLAGAATGAALGSLMWSPCWF

SEQ ID NO: 886590 - protein, 129 aa, Homo sapiens
MEDSTAGGKLHPGARLQPVPRLLRGGAPQCTRGHVCPQLLRTALRRPWRDARDSAGGSLLQRRRPSGHGHACGSRHWGGAGLAHVVALLVLSPGTRSTDPCAWIARLLFLLDPILYHPSPVPLWPYPLH

SEQ ID NO: 886591 - protein, 189 aa, Homo sapiens; identical to SEQ ID NO: 886571

SEQ ID NO: 886592 - protein, 142 aa, Homo sapiens
MALVRGGWLWRQSSILRRWKRNWFALWLDGTLGYYHDETAQDEEDRVLIHFNVRDIKIGPECHDVQPPEGRSRDGLLTVNLREGGRLHLCAETKDDALAWKTALLEANSTPMIRLKLIHPHNKYLLSCYYGPGGVPSARDQR

SEQ ID NO: 886593 - protein, 61 aa, Homo sapiens
MALVRGGWLWRQSSILRRWKRNWFALWLDGTLGYYHDETAAPHQGHFFKRTFQSGVRVPSS

SEQ ID NO: 886594 - protein, 197 aa, Homo sapiens
KKKKKKKIPVYWEGYVRFLNTPSDKSEDGRLIYTGNMARAVFGVKCFSYSTSLIGLTFLPYIFTQNNAISESVPLPIQIIFYGIMGSFTVITPVLLHFITKGYVIRLYHEATTDTYKAITYNAMLAETSTVFHQNDVKIPDAKHVFTTFYAKTKSLLVNPVLFPNREDYIHLMGYDKEEFILYMEETSEEKRHKDDK

SEQ ID NO: 886595 - protein, 161 aa, Homo sapiens
MARAVFGVKCFSYSTSLIGLTFLPYIFTQNNAISESVPLPIQIIFYGIMGSFTVITPVLLHFITKGYVIRLYHEATTDTYKAITYNAMLAETSTVFHQNDVKIPDAKHVFTTFYAKTKSLLVNPVLFPNREDYIHLMGYDKEEFILYMEETSEEKRHKDDK

SEQ ID NO: 886596 - protein, 301 aa, Homo sapiens
SCQSGVPGWACATCAAVGWEAVSRSRGLVQLGRPQPLVTRVMLFLALGSPWAVELPLCGRRTALCAAAALRGPRASVSRASSSSGPSGPVAGWSTGPSGAARLLRRPGRAQIPVYWEGYVRFLNTPSDKSEDGRLIYTGNMARAVFGVKCFSYSTSLIGLTFLPYIFTQNNAISESVPLPIQIIFYGIMGSFTVITPVLLHFITKGYVIRLYHEATTDTYKAITYNAMLAETSTVFHQNDVKIPDAKHVFTTFYAKTKSLLVNPVLFPNREDYIHLMGYDKEEFILYMEETSEEKRHKDDK

SEQ ID NO: 886597 - protein, 126 aa, Homo sapiens
LPVRRPGLGMRHLCGSRVGSRVSQSWTRAAGASAAARHPRDAVSGVGQPVGGRTASLRKEDCIVCGRRAPRSPGLCLPGVLQQRAFGAGSRLEYGAFGSRAPSPASGSSADPCLLGRICSILKYAI

SEQ ID NO: 886598 - protein, 301 aa, Homo sapiens; identical to SEQ ID NO: 886596

SEQ ID NO: 886599 - protein, 301 aa, Homo sapiens; identical to SEQ ID NO: 886596

SEQ ID NO: 886600 - protein, 126 aa, Homo sapiens; identical to SEQ ID NO: 886597

SEQ ID NO: 886601 - protein, 543 aa, Homo sapiens [sequence omitted]

SEQ ID NO: 886602 - protein, 497 aa, Homo sapiens
MAQVFVDGVFQRRGAPPLQLPRVCTFRFPSTNIKITFTALSSEKREKQEASESPVKAVQPHISPLTINIPDTMAHLISPLPSPTGTISAANSCPSSPRGAGSSGYKVGRVMPSDLNLMADNSQPENEKEASGGDSPKDDSKPPYSYAQLIVQAITMAPDKQLTLNGIYTHITKNYPYYRTADKGWQNSIRHNLSLNRYFIKVPRSQEEPGKGSFWRIDPASESKLIEQAFRKRRPRGVPCFRTPLGPLSSRSAPASPNHAGVLSAHSSGAQTPESLSREGSPAPLEPEPGAAQPKLAVIQEARFAQSAPGSPLSSQPVLITVQRQLPQAIKPVTYTVATPVTTSTSQPPVVQTVHVVHQIPAVSVTSVAGLAPANTYTVSGQAVVTPAAVLAPPKAEAQENGDHREVKVKVEPIPAIGHATLGTASRIIQTAQTTPVQTVTIVQQAPLGQHQLPIKTVTQNGTHVASVPTAVHGQVNNGPLGLRRPPCASSDWSCLS

SEQ ID NO: 886603 - protein, 398 aa, Homo sapiens
APPPRLLPSSRPRVLPPLAAARSLAGRPPLGPLPQLRCAAADDPRPGPRRATGARAERPGGPHAGPWRRRGALSGRAPRGRGAGGAGPGAGPRRAAGPWRRLEGREFEYLMKKRSVTIGRNSSQGSVDVSMGHSSFISRRHLEIFTPPGGGGHGGAAPELPPAQPRPDAGGDFYLRCLGKNGVFVDGVFQRRGAPPLQLPRVCTFRFPSTNIKITFTALSSEKREKQEASESPVKAVQPHISPLTINIPDTMAHLISPLPSPTGTISAANSCPSSPRGAGSSGYKVGRVMPSDLNLMADNSQPENEKEASGGDSPKDDSKPPYSYAQLIVQAITMAPDKQLTLNGIYTHITKNYPYYRTADKGWQPRRVLCTCWQHTHPHRPPCPQSATTVTSRSSRS

SEQ ID NO: 886604 - protein, 722 aa, Homo sapiens
APPPRLLPSSRPRVLPPLAAARSLAGRPPLGPLPQLRCAAADDPRPGPRRATGARAERPGGPHAGPWRRRGALSGRAPRGRGAGGAGPGAGPRRAAGPWRRLEGREFEYLMKKRSVTIGRNSSQGSVDVSMGHSSFISRRHLEIFTPPGGGGHGGAAPELPPAQPRPDAGGDFYLRCLGKNGVFVDGVFQRRGAPPLQLPRVCTFRFPSTNIKITFTALSSEKREKQEASESPVKAVQPHISPLTINIPDTMAHLISPLPSPTGTISAANSCPSSPRGAGSSGYKVGRVMPSDLNLMADNSQPENEKEASGGDSPKDDSKPPYSYAQLIVQAITMAPDKQLTLNGIYTHITKNYPYYRTADKGWQNSIRHNLSLNRYFIKVPRSQEEPGKGSFWRIDPASESKLIEQAFRKRRPRGVPCFRTPLGPLSSRSAPASPNHAGVLSAHSSGAQTPESLSREGSPAPLEPEPGAAQPKLAVIQEARFAQSAPGSPLSSQPVLITVQRQLPQAIKPVTYTVATPVTTSTSQPPVVQTVHVVHQIPAVSVTSVAGLAPANTYTVSGQAVVTPAAVLAPPKAEAQENGDHREVKVKVEPIPAIGHATLGTASRIIQTAQTTPVQTVTIVQQAPLGQHQLPIKTVTQNGTHVASVPTAVHGQVNNAAASPLHMLATHASASASLPTKRHNGDQPEQPELKRIKTEDGEGIVIALSVDTPPAAVREKGVQN

SEQ ID NO: 886605 - protein, 569 aa, Homo sapiens
LHSCAQLRASFVCRAQQRWRSHLASKHLALFVSTWFCRENPWVLEPLGWCTFRFPSTNIKITFTALSSEKREKQEASESPVKAVQPHISPLTINIPDTMAHLISPLPSPTGTISAANSCPSSPRGAGSSGYKVGRVMPSDLNLMADNSQPENEKEASGGDSPKDDSKPPYSYAQLIVQAITMAPDKQLTLNGIYTHITKNYPYYRTADKGWQNSIRHNLSLNRYFIKVPRSQEEPGKGSFWRIDPASESKLIEQAFRKRRPRGVPCFRTPLGPLSSRSAPASPNHAGVLSAHSSGAQTPESLSREGSPAPLEPEPGAAQPKLAVIQEARFAQSAPGSPLSSQPVLITVQRQLPQAIKPVTYTVATPVTTSTSQPPVVQTVHVVHQIPAVSVTSVAGLAPANTYTVSGQAVVTPAAVLAPPKAEAQENGDHREVKVKVEPIPAIGHATLGTASRIIQTAQTTPVQTVTIVQQAPLGQHQLPIKTVTQNGTHVASVPTAVHGQVNNAAASPLHMLATHASASASLPTKRHNGDQPEQPELKRIKTEDGEGIVIALSVDTPPAAVREKGVQN

SEQ ID NO: 886606 - protein, 189 aa, Homo sapiens
NTRHNDNKLSNYDSVRLAGCTVGLRLGQAVVTPAAVLAPPKAEAQENGDHREVKVKVEPIPAIGHATLGTASRIIQTAQTTPVQTVTIVQQAPLGQHQLPIKTVTQNGTHVASVPTAVHGQVNNAAASPLHMLATHASASASLPTKRHNGDQPEQPELKRIKTEDGEGIVIALSVDTPPAAVREKGVQN

SEQ ID NO: 886607 - protein, 142 aa, Homo sapiens
MGSWAFHITPFLLRLSESHRPFPWISFGAKKQRSFVFVFSLWNDFLLSVLFKFRRSYSGICTFPCYSSCLMNFIHLHFSMWLAWTGGRTLWPHGTLRTQGRASAGKELPGLTELHLTVLFLAIFCCLFLCVDFVPGKIFHSE

SEQ ID NO: 886608 - protein, 722 aa, Homo sapiens; identical to SEQ ID NO: 886604

SEQ ID NO: 886609 - protein, 692 aa, Homo sapiens
APPPRLLPSSRPRVLPPLAAARSLAGRPPLGPLPQLRCAAADDPRPGPRRATGARAERPGGPHAGPWRRRGALSGRAPRGRGAGGAGPGAGPRRAAGPWRRLEGREFEYLMKKRSVTIGRNSSQGSVDVSMGHSSFISRRHLEIFTPPGGGGHGGAAPELPPAQPRPDAGGDFYLRCLGKNGVFVDGVFQRRGAPPLQLPRVCTFRFPSTNIKITFTALSSEKREKQEASESPVKAVQPHISPLTINIPDTMAHLISPLPSPTGTISAANSCPSSPRGAGSSGYKVGRVMPSDLNLMADNSQPENEKEASGGDSPKDDSKPPYSYAQLIVQAITMAPDKQLTLNGIYTHITKNYPYYRTADKGWQNSIRHNLSLNRYFIKVPRSQEEPGKGSFWRIDPASESKLIEQAFRKRRPRGVPCFRTPLGPLSSRSAPASPNHAGVLSAHSSGAQTPESLSREGSPAPLEPEPGAAQPKLAVIQEARFAQSAPGSPLSSQPVLITVQRQLPQAIKPVTYTVATPVTTSTSQPPVVQTVHVVHQIPAVSVTSVAGLAPANTYTVSGQAVVTPAAVLAPPKAEAQENGDHREVKVKVEPIPAIGHATLGTASRIIQTAQTTPVQTVTIVQQAPLGQHQLPIKTVTQNGTHVASVPTAVHGQVNNGKTCWSVAPRGCGYWEQSPFSLVVSVLTVTILAFV

SEQ ID NO: 886610 - protein, 692 aa, Homo sapiens; identical to SEQ ID NO: 886609

SEQ ID NO: 886611 - protein, 676 aa, Homo sapiens
APPPRLLPSSRPRVLPPLAAARSLAGRPPLGPLPQLRCAAADDPRPGPRRATGARAERPGGPHAGPWRRRGALSGRAPRGRGAGGAGPGAGPRRAAGPWRRLEGREFEYLMKKRSVTIGRNSSQGSVDVSMGHSSFISRRHLEIFTPPGGGGHGGAAPELPPAQPRPDAGGDFYLRCLGKNGVFVDGVFQRRGAPPLQLPRVCTFRFPSTNIKITFTALSSEKREKQEASESPVKAVQPHISPLTINIPDTMAHLISPLPSPTGTISAANSCPSSPRGAGSSGYKVGRVMPSDLNLMADNSQPENEKEASGGDSPKDDSKPPYSYAQLIVQAITMAPDKQLTLNGIYTHITKNYPYYRTADKGWQNSIRHNLSLNRYFIKVPRSQEEPGKGSFWRIDPASESKLIEQAFRKRRPRGVPCFRTPLGPLSSRSAPASPNHAGVLSAHSSGAQTPESLSREGSPAPLEPEPGAAQPKLAVIQEARFAQSAPGSPLSSQPVLITVQRQLPQAIKPVTYTVATPVTTSTSQPPVVQTVHVVHQIPAVSVTSVAGLAPANTYTVSGQAVVTPAAVLAPPKAEAQENGDHREVKVKVEPIPAIGHATLGTASRIIQTAQTTPVQTVTIVQQAPLGQHQLPIKTVTQNGTHVASVPTAVHGQVNNGPLGLRRPPCASSDWSCLS

SEQ ID NO: 886612 - protein, 722 aa, Homo sapiens; identical to SEQ ID NO: 886604

SEQ ID NO: 886613 - protein, 676 aa, Homo sapiens; identical to SEQ ID NO: 886611

SEQ ID NO: 886614 - protein, 278 aa, Homo sapiens
APPPRLLPSSRPRVLPPLAAARSLAGRPPLGPLPQLRCAAADDPRPGPRRATGARAERPGGPHAGPWRRRGALSGRAPRGRGAGGAGPGAGPRRAAGPWRRLEGREFEYLMKKRSVTIGRNSSQGSVDVSMGHSSFISRRHLEIFTPPGGGGHGGAAPELPPAQPRPDAGGDFYLRCLGKNGVFVDGVFQRRGAPPLQLPRVCTFRFPSTNIKITFTALSSEKREKQEASESPVKAVQPHISPLTINIPDTMAHLISPLPSPTGTIRMIQSRLTPTRS

SEQ ID NO: 886615 - protein, 388 aa, Homo sapiens
MAPDKQLTLNGIYTHITKNYPYYRTADKGWQNSIRHNLSLNRYFIKVPRSQEEPGKGSFWRIDPASESKLIEQAFRKRRPRGVPCFRTPLGPLSSRSAPASPNHAGVLSAHSSGAQTPESLSREGSPAPLEPEPGAAQPKLAVIQEARFAQSAPGSPLSSQPVLITVQRQLPQAIKPVTYTVATPVTTSTSQPPVVQTVHVVHQIPAVSVTSVAGLAPANTYTVSGQAVVTPAAVLAPPKAEAQENGDHREVKVKVEPIPAIGHATLGTASRIIQTAQTTPVQTVTIVQQAPLGQHQLPIKTVTQNGTHVASVPTAVHGQVNNAAASPLHMLATHASASASLPTKRHNGDQPEQPELKRIKTEDGEGIVIALSVDTPPAAVREKGVQN

SEQ ID NO: 886616 - protein, 558 aa, Homo sapiens
TPQLRSAQSQLRVQSPAEMAEPLGIQAPCPVCVHLVLPCTFRFPSTNIKITFTALSSEKREKQEASESPVKAVQPHISPLTINIPDTMAHLISPLPSPTGTISAANSCPSSPRGAGSSGYKVGRVMPSDLNLMADNSQPENEKEASGGDSPKDDSKPPYSYAQLIVQAITMAPDKQLTLNGIYTHITKNYPYYRTADKGWQNSIRHNLSLNRYFIKVPRSQEEPGKGSFWRIDPASESKLIEQAFRKRRPRGVPCFRTPLGPLSSRSAPASPNHAGVLSAHSSGAQTPESLSREGSPAPLEPEPGAAQPKLAVIQEARFAQSAPGSPLSSQPVLITVQRQLPQAIKPVTYTVATPVTTSTSQPPVVQTVHVVHQIPAVSVTSVAGLAPANTYTVSGQAVVTPAAVLAPPKAEAQENGDHREVKVKVEPIPAIGHATLGTASRIIQTAQTTPVQTVTIVQQAPLGQHQLPIKTVTQNGTHVASVPTAVHGQVNNAAASPLHMLATHASASASLPTKRHNGDQPEQPELKRIKTEDGEGIVIALSVDTPPAAVREKGVQN

SEQ ID NO: 886617 - protein, 722 aa, Homo sapiens; identical to SEQ ID NO: 886604

SEQ ID NO: 886618 - protein, 727 aa, Homo sapiens
APPPRLLPSSRPRVLPPLAAARSLAGRPPLGPLPQLRCAAADDPRPGPRRATGARAERPGGPHAGPWRRRGALSGRAPRGRGAGGAGPGAGPRRAAGPWRRLEGREFEYLMKKRSVTIGRNSSQGSVDVSMGHSSFISRRHLEIFTPPGGGGHGGAAPELPPAQPRPDAGGDFYLRCLGKNGVFVDGVFQRRGAPPLQLPRVCTFRFPSTNIKITFTALSSEKREKQEASESPVKAVQPHISPLTINIPDTMAHLISPLPSPTGTISAANSCPSSPRGAGSSGYKVGRVMPSDLNLMADNSQPENEKEASGGDSPKDDSKPPYSYAQLIVQAITMAPDKQLTLNGIYTHITKNYPYYRTADKGWQNSIRHNLSLNRYFIKVPRSQEEPGKGSFWRIDPASESKLIEQAFRKRRPRGVPCFRTPLGPLSSRSAPASPNHAGVLSAHSSGAQTPESLSREGSPAPLEPEPGAAQPKLAVIQEARFAQSAPGSPLSSQPVLITVQRQLPQAIKPVTYTVATPVTTSTSQPPVVQTVHVVHQIPAVSVTSVAGLAPANTYTVSGQAVVTPAAVLAPPKAEAQENGDHREVKVKVEPIPAIGHATLGTASRIIQTAQTTPVQTVTIVQQAPLGQHQLPIKTVTQNGTHVASVPTAVHGQVNNAAASPLHMLATHASASASLPTKRHNGDQPEQPELKRIKTEDGEGIVIALSVDTPPAAVRGPLSEGILRGQ

SEQ ID NO: 886619 - protein, 692 aa, Homo sapiens; identical to SEQ ID NO: 886609

SEQ ID NO: 886620 - protein, 586 aa, Homo sapiens
PPPHASSPPPARACSRPSPPLARSPAGLRSAPSLSSGARRPTTRGLGLGAPPAPARSGPGALTQAHGGGAARSRAGHHAGAGPGARGRGRVPPGAGPWRRLEGREFEYLMKKRSVTIGRNSSQGSVDVSMGHSSFISRRHLEIFTPPGGGGHGGAAPELPPAQPRPDAGGDFYLRCLGKNGVFVDGVFQRRGAPPLQLPRVCTFRFPSTNIKITFTALSSEKREKQEASESPVKAVQPHISPLTINIPDTMAHLISPLPSPTGTISAANSCPSSPRGAGSSGYKVGRVMPSDLNLMADNSQPENEKEASGGDSPKDDSKPPYSYAQLIVQAITMAPDKQLTLNGIYTHITKNYPYYRTADKGWQNSIRHNLSLNRYFIKVPRSQEEPGKGSFWRIDPASESKLIEQAFRKRRPRGVPCFRTPLGPLSSRSAPASPNHAGVLSAHSSGAQTPESLSREGSPAPLEPEPGAAQPKLAVIQEARFAQSAPGSPLSSQPVLITVQRQLPQAIKPVTYTVATPVTTSTSQPPVVQTVHVVHQIPAVSVTSVAGLAQRTRTLSLDKLWSPRQPCWPLLRQRPRRMETTGKSK

SEQ ID NO: 886621 - protein, 371 aa, Homo sapiens
MSCVLGGVIPLGLLFLVCGSQGYLLPNVTLLEELLSKYQHNESHSRVRRAIPREDKEEILMLHNKLRGQVQPQASNMEYMTWDDELEKSAAAWASQCIWEHGPTSLLVSIGQNLGAHWGRYRSPGFHVQSWYDEVKDYTYPYPSECNPWCPERCSGPMCTHYTQIVWATTNKIGCAVNTCRKMTVWGEVWENAVYFVCNYSPKGNWIGEAPYKNGRPCSECPPSYGGSCRNNLCYREETYTPKPETDEMNEVETAPIPEENHVWLQPRVMRPTKPKKTSAVNYMTQVVRCDTKMKDRCKGSTCNRYQCPAGCLNHKAKIFGTLFYESSSSICRAAIHYGILDDKGGLVDITRNGKVPFFVKSERHGVQSLR

SEQ ID NO: 886622 - protein, 120 aa, Homo sapiens
MSCVLGGVIPLGLLFLVCGSQGYLLPNVTLLEELLSKYQHNESHSRVRRAIPREDKEEILMLHNKLRGQVQPQASNMEYMTWDDELEKSAAAWASQCIWEHGPTSLLVSIGQNLGAHWGR

SEQ ID NO: 886623 - protein, 310 aa, Homo sapiens
MTELVADLLSCNYSPKGNWIGEAPYKNGRPCSECPPSYGGSCRNNLCYREETYTPKPETDEMNEVETAPIPEENHVWLQPRVMRPTKPKKTSAVNYMTQVVRCDTKMKDRCKGSTCNRYQCPAGCLNHKAKIFGTLFYESSSSICRAAIHYGILDDKGGLVDITRNGKVPFFVKSERHGVQSLSKYKPSSSFMVSKVKVQDLDCYTTVAQLCPFEKPATHCPRIHCPAHCKDEPSYWAPVFGTNIYADTSSICKTAVHAGVISNESGGDVDVMPVDKKKTYVGSLRNGVQSESLGTPRDGKAFRIFAVRQ

SEQ ID NO: 886624 - protein, 80 aa, Homo sapiens
IVQKITFRAMITLSAEDHLIVQNITSSCKKIISNESGGDVDVMPVDKKKTYVGSLRNGVQSESLGTPRDGKAFRIFAVRQ

SEQ ID NO: 886625 - protein, 49 aa, Homo sapiens
TAPIPEENHVWLQPRVMRPTKPKKTSAVNYMSESRPSSAPPALPATSKG

SEQ ID NO: 886626 - protein, 497 aa, Homo sapiens
MSCVLGGVIPLGLLFLVCGSQGYLLPNVTLLEELLSKYQHNESHSRVRRAIPREDKEEILMLHNKLRGQVQPQASNMEYMTWDDELEKSAAAWASQCIWEHGPTSLLVSIGQNLGAHWGRYRSPGFHVQSWYDEVKDYTYPYPSECNPWCPERCSGPMCTHYTQIVWATTNKIGCAVNTCRKMTVWGEVWENAVYFVCNYSPKGNWIGEAPYKNGRPCSECPPSYGGSCRNNLCYREETYTPKPETDEMNEVETAPIPEENHVWLQPRVMRPTKPKKTSAVNYMTQVVRCDTKMKDRCKGSTCNRYQCPAGCLNHKAKIFGTLFYESSSSICRAAIHYGILDDKGGLVDITRNGKVPFFVKSERHGVQSLSKYKPSSSFMVSKVKVQDLDCYTTVAQLCPFEKPATHCPRIHCPAHCKDEPSYWAPVFGTNIYADTSSICKTAVHAGVISNESGGDVDVMPVDKKKTYVGSLRNGVQSESLGTPRDGKAFRIFAVRQ

SEQ ID NO: 886627 - protein, 338 aa, Homo sapiens
MSSFQIVWATTNKIGCAVNTCRKMTVWGEVWENAVYFVCNYSPKGNWIGEAPYKNGRPCSECPPSYGGSCRNNLCYREETYTPKPETDEMNEVETAPIPEENHVWLQPRVMRPTKPKKTSAVNYMTQVVRCDTKMKDRCKGSTCNRYQCPAGCLNHKAKIFGTLFYESSSSICRAAIHYGILDDKGGLVDITRNGKVPFFVKSERHGVQSLSKYKPSSSFMVSKVKVQDLDCYTTVAQLCPFEKPATHCPRIHCPAHCKDEPSYWAPVFGTNIYADTSSICKTAVHAGVISNESGGDVDVMPVDKKKTYVGSLRNGVQSESLGTPRDGKAFRIFAVRQ

SEQ ID NO: 886628 - protein, 131 aa, Homo sapiens
MPEAQACWDLTLSPLLLFTVQDLDCYTTVAQLCPFEKPATHCPRIHCPAHCKDEPSYWAPVFGTNIYADTSSICKTAVHAGVISNESGGDVDVMPVDKKKTYVGSLRNGVQSESLGTPRDGKAFRIFAVRQ

SEQ ID NO: 886629 - protein, 337 aa, Homo sapiens
MSCVLGGVIPLGLLFLVCGSQGYLLPNVTLLEELLSKYQHNESHSRVRRAIPREDKEEILMLHNKLRGQVQPQASNMEYMTWDDELEKSAAAWASQCIWEHGPTSLLVSIGQNLGAHWGRYRSPGFHVQSWYDEVKDYTYPYPSECNPWCPERCSGPMCTHYTQIVWATTNKIGCAVNTCRKMTVWGEVWENAVYFVCNYSPKGNWIGEAPYKNGRPCSECPPSYGGSCRNNLCYREETYTPKPETDEMNEVETAPIPEENHVWLQPRVMRPTKPKKTSAVNYMTQVVRCDTKMKDRCKGSTCNRYQCPAGCLNHKAKIFGTLFYESVRLASPALNG

SEQ ID NO: 886630 - protein, 971 aa, Homo sapiens
MATVRASLRGALLLLLAVAGVAEVAGGLAPGSAGALCCNHSKDNQMCRDVCEQIFSSKSESRLKHLLQRAPDYCPETMVEIWNCMNSSLPGVFKKSDGWVGLGCCELAIALECRQACKQASSKNDISKVCRKEYENALFSCISRNEMGSVCCSYAGHHTNCREYCQAIFRTDSSPGPSQIKAVENYCASISPQLIHCVNNYTQSYPMRNPTDSLYCCDRAEDHACQNACKRILMSKKTEMEIVDGLIEGCKTQPLPQDPLWQCFLESSQSVHPGVTVHPPPSTGLDGAKLHCCSKANTSTCRELCTKLYSMSWGNTQSWQEFDRFCEYNPVEVSMLTCLADVREPCQLGCRNLTYCTNFNNRPTELFRSCNAQSDQGAMNDMKLWEKGSIKMPFINIPVLDIKKCQPEMWKAIACSLQIKPCHSKSRGSIICKSDCVEILKKCGDQNKFPEDHTAESICELLSPTDDLKNCIPLDTYLRPSTLGNIVEEVTHPCNPNPCPANELCEVNRKGCPSGDPCLPYFCVQGCKLGEASDFIVRQGTLIQVPSSAGEVGCYKICSCGQSGLLENCMEMHCIDLQKSCIVGGKRKSHGTSFSIDCNVCSCFAGNLVCSTRLCLSEHSSEDDRRTFTGLPCNCADQFVPVCGQNGRTYPSACIARCVGLQDHQFEFGSCMSKDPCNPNPCQKNQRCIPKPQVCLTTFDKFGCSQYECVPRQLACDQVQDPVCDTDHMEHNNLCTLYQRGKSLSYKGPCQPFCRATEPVCGHNGETYSSVCAAYSDRVAVDYYGDCQAVGVLSEHSSVAECASVKCPSLLAAGCKPIIPPGACCPLCAGMLRVLFDKEKLDTIAKVTNKKPITVLEILQKIRMHVSVPQCDVFGYFSIESEIVILIIPVDHYPKALQIEACNKEAEKIESLINSDSPTLASHVPLSALIISQVQVSSSVPSAGVRARPSCHSLLLPLSLGLALHLLWTYN

SEQ ID NO: 886631 - protein, 225 aa, Homo sapiens
MATVRASLRGALLLLLAVAGVAEVAGGLAPGSAGALCCNHSKDNQMCRDVCEQIFSSKSESRLKHLLQRAPDYCPETMVEIWNCMNSSLPGVFKKSDGWVGLGCCELAIALECRQACKQASSKNDISKVCRKEYENALFSCISRNEMGSVCCSYAGHHTNCREYCQAIFRTDSSPGPSQIKAVENYCASISPQLIHCVNNYTQSYPMRNPTDMFEFFANEQLLLL

SEQ ID NO: 886632 - protein, 968 aa, Homo sapiens
MYVNSIHGFYRLSYLQIFSSKSESRLKHLLQRAPDYCPETMVEIWNCMNSSLPGVFKKSDGWVGLGCCELAIALECRQACKQASSKNDISKVCRKEYEPVLRYFSVLPSLVWISALPKEVCQYVLMKDKTGKNALFSCISRNEMGSVCCSYAGHHTNCREYCQAIFRTDSSPGPSQIKAVENYCASISPQLIHCVNNYTQSYPMRNPTDSLYCCDRAEDHACQNACKRILMSKKTEMEIVDGLIEGCKTQPLPQDPLWQCFLESSQSVHPGVTVHPPPSTGLDGAKLHCCSKANTSTCRELCTKLYSMSWGNTQSWQEFDRFCEYNPVEVSMLTCLADVREPCQLGCRNLTYCTNFNNRPTELFRSCNAQSDQGAMNDMKLWEKGSIKMPFINIPVLDIKKCQPEMWKAIACSLQIKPCHSKSRGSIICKSDCVEILKKCGDQNKFPEDHTAESICELLSPTDDLKNCIPLDTYLRPSTLGNIVEEVTHPCNPNPCPANELCEVNRKGCPSGDPCLPYFCVQGCKLGEASDFIVRQGTLIQVPSSAGEVGCYKICSCGQSGLLENCMEMHCIDLQKSCIVGGKRKSHGTSFSIDCNVCSCFAGNLVCSTRLCLSEHSSEDDRRTFTGLPCNCADQFVPVCGQNGRTYPSACIARCVGLQDHQFEFGSCMSKDPCNPNPCQKNQRCIPKPQVCLTTFDKFGCSQYECVPRQLACDQVQDPVCDTDHMEHNNLCTLYQRGKSLSYKGPCQPFCRATEPVCGHNGETYSSVCAAYSDRVAVDYYGDCQAVGVLSEHSSVAECASVKCPSLLAAGCKPIIPPGACCPLCAGMLRVLFDKEKLDTIAKVTNKKPITVLEILQKIRMHVSVPQCDVFGYFSIESEIVILIIPVDHYPKALQIEACNKEAEKIESLINSDSPTLASHVPLSALIISQVQVSSSVPSAGVRARPSCHSLLLPLSLGLALHLLWTYN

SEQ ID NO: 886633 - protein, 359 aa, Homo sapiens
MYVNSIHGFYRLSYLQIFSSKSESRLKHLLQRAPDYCPETMVEIWNCMNSSLPGVFKKSDGWVGLGCCELAIALECRQACKQASSKNDISKVCRKEYEPVLRYFSVLPSLVWISALPKEVCQYVLMKDKTGKNALFSCISRNEMGSVCCSYAGHHTNCREYCQAIFRTDSSPGPSQIKAVENYCASISPQLIHCVNNYTQSYPMRNPTDSLYCCDRAEDHACQNACKRILMSKKTEMEIVDGLIEGCKTQPLPQDPLWQCFLESSQSVHPGVTVHPPPSTGLDGAKLHCCSKANTSTCRELCTKLYSMSWGNTQSWQEFDRFCEYNPVEVSMLTCLADVREPCQLGCRNLTYCTNFNNR

SEQ ID NO: 886634 - protein, 968 aa, Homo sapiens; identical to SEQ ID NO: 886632

SEQ ID NO: 886635 - protein, 220 aa, Homo sapiens
MATVRASLRGALLLLLAVAGVAEVAGGLAPGSAGALCCNHSKDNQMCRDVCEQIFSSKSESRLKHLLQRAPDYCPETMVEIWNCMNSSLPGVFKKSDGWVGLGCCELAIALECRQACKQASSKNDISKVCRKEYENALFSCISRNEMGSVCCSYAGHHTNCREYCQAIFRTDSSPGPSQIKAVENYCASISPQLIHCVNNYTQSYPMRNPTDSRSVLSDI

SEQ ID NO: 886636 - protein, 104 aa, Homo sapiens
PSRGRAAVLASVCCGRNMADRLTQLQDAVNSVRNFIRLASVFLFLEVKQGRKGAQEAKLESGERTERQGFGIKRSLGRRHRELGGLRPAAGRCLKVREGADSFA

SEQ ID NO: 886637 - protein, 144 aa, Homo sapiens
MADRLTQLQDAVNSLADQFCNAIGVLQQCGPPASFNNIQTAINKDQPANPTEEYAQLFAALIARTAKDIDVLIDSLPSEESTAALQAASLYKLEEENHEAATCLEDVVYRGDMLLEKIQSALADIAQSQLKTRSGTHSQSLPDS

SEQ ID NO: 886638 - protein, 144 aa, Homo sapiens; identical to SEQ ID NO: 886637

SEQ ID NO: 886639 - protein, 144 aa, Homo sapiens; identical to SEQ ID NO: 886637

SEQ ID NO: 886640 - protein, 144 aa, Homo sapiens; identical to SEQ ID NO: 886637

SEQ ID NO: 886641 - protein, 118 aa, Homo sapiens
PSRGRAAVLASVCCGRNMADRLTQLQDAVNSLADQFCNAIGVLQQCGPPASFNNIQTAINKDQPANPTEEYAQLFAALIARTAKDIDVLIDSLPSEESTAALQVSLYSFENFTSNREF

SEQ ID NO: 886642 - protein, 306 aa, Homo sapiens
VDPRVRPRVCMAAGGPGAGSAAPVSSTSSLPLAALNMRVRRRLSLFLNVRTQVAADWTALAEEMDFEYLEIRQLETQADPTGRLLDAWQGRPGASVGRLLELLTKLGRDDVLLELGPSIEEDCQKYILKQQQEEAEKPLQVAAVDSSVPRTAELAGITTLDDPLGHMPERFDAFICYCPSDIQFVQEMIRQLEQTNYRLKLCVSDRDVLPGTCVWSIASELIEKRCRRMVVVVSDDYLQSKECDFQTKFALSLSPGAHQKRLIPIKYKAMKKEFPSILRFITVCDYTNPCTKSWFWTRLAKALSLP

SEQ ID NO: 886643 - protein, 440 aa, Homo sapiens
LVPSSPSSRAGPYEPLRFLRGRTVAPPDPKKQGPFPTTPEGGSSSLRRQPTSTITRPSRAVPWTSPDLKRQIPTSYAPHITRLETSRVEVGTPASALLLGAPDCRAGRRFSESESGGAGRVPRRKRKRWQTMRPDRAEAPGPPAMAAGGPGAGSAAPVSSTSSLPLAALNMRVRRRLSLFLNVRTQVAADWTALAEEMDFEYLEIRQLETQADPTGRLLDAWQGRPGASVGRLLELLTKLGRDDVLLELGPSIEEDCQKYILKQQQEEAEKPLQVAAVDSSVPRTAELAGITTLDDPLGHMPERFDAFICYCPSDIQFVQEMIRQLEQTNYRLKLCVSDRDVLPGTCVWSIASELIEKRCRRMVVVVSDDYLQSKECDFQTKFALSLSPGAHQKRLIPIKYKAMKKEFPSILRFITVCDYTNPCTKSWFWTRLAKALSLP

SEQ ID NO: 886644 - protein, 389 aa, Homo sapiens
LVPSSPSSRAGPYEPLRFLRGRTVAPPDPKKQGPFPTTPEGGSSSLRRQPTSTITRPSRAVPWTSPDLKRQIPTSYAPHITRLETSRVEVGTPASALLLGAPDCRAGRRFSESESRRGGAGARRKRKRWQTMRPDRAEAPGPPAMAAGGPGAGSAAPVSSTSSLPLAALNMRVRRRLSLFLNVRTQVAADWTALAEEMDFEYLEIRQLETQADPTGRLLDAWQGRPGASVGRLLELLTKLGRDDVLLELGPSIEEDCQKYILKQQQEEAEKPLQVAAVDSSVPRTAELAGITTLDDPLGHMPERFDAFICYCPSDIQFVQEMIRQLEQTNYRLKLCVSDRDVLPGTCVWSIASAAGWWWLSLMITCRARNVTSRPNLHSASLQVPIRSD

SEQ ID NO: 886645 - protein, 198 aa, Homo sapiens
MGRKQLRQRLSEEDCQKYILKQQQEEAEKPLQVAAVDSSVPRTAELAGITTLDDPLGHMPERFDAFICYCPSDIQFVQEMIRQLEQTNYRLKLCVSDRDVLPGTCVWSIASELIEKRCRRMVVVVSDDYLQSKECDFQTKFALSLSPGAHQKRLIPIKYKAMKKEFPSILRFITVCDYTNPCTKSWFWTRLAKALSLP

SEQ ID NO: 886646 - protein, 144 aa, Homo sapiens
VTVTHPQNSYLIEYAMMARISFIMPGGAESMTTGILTGGNEKQPKLLRRVSWGLVSAEGGAKAGSLPPWATCRELSHQLCTLIALQSYLFTNSDHIKASCPKACGHMGTYRLTYRHTHICTDMYSHTHRHQHTHVFLGTAPRNS

SEQ ID NO: 886647 - protein, 440 aa, Homo sapiens; identical to SEQ ID NO: 886643

SEQ ID NO: 886648 - protein, 440 aa, Homo sapiens; identical to SEQ ID NO: 886643

SEQ ID NO: 886649 - protein, 483 aa, Homo sapiens
LVPSSPSSRAGPYEPLRFLRGRTVAPPDPKKQGPFPTTPEGGSSSLRRQPTSTITRPSRAVPWTSPDLKRQIPTSYAPHITRLETSRVEVGTPASALLLGAPDCRAGRRFSESESGGAGRVPRRKRKRWQTMRPDRAEAPGPPAMAAGGPGAGSAAPVSSTSSLPLAALNMRVRRRLSLFLNVRTQVAADWTALAEEMDFEYLEIRQLETQADPTGRLLDAWQGRPGASVGRLLELLTKLGRDDVLLELGPSIEEDCQKYILKQQQEEAEKPLQVAAVDSSVPRTAELAGITTLDDPLGHMPERFDAFICYCPSDIQFVQEMIRQLEQTNYRLKLCVSDRDVLPGTCVWSIASELIEKRCRRMVVVVSDDYLQSKECDFQTKFALSLSPGAHQKRLIPIRRVSPGQEVTPASTPPSCRYRRLTGDSGIELCPCPASGEGEPVKEVRVSATLTDLEDYSPCALPPESVPQIFPMGLSSSEGDIP

SEQ ID NO: 886650 - protein, 168 aa, Homo sapiens
EAPGPPAMAAGGPGAGSAAPVSSTSSLPLAALNMRVRRRLSLFLNVRTQVAADWTALAEEMDFEYLEIRQLETQADPTGRLLDAWQGRPGASVGRLLELLTKLGRDDVLLELGPSIGEDVPFLASYLGGEEADFPRPQHPVSHGETPFPASGARRSLQRENHAGPVPS

SEQ ID NO: 886651 - protein, 440 aa, Homo sapiens; identical to SEQ ID NO: 886643

SEQ ID NO: 886652 - protein, 440 aa, Homo sapiens; identical to SEQ ID NO: 886643

SEQ ID NO: 886653 - protein, 448 aa, Homo sapiens
LVPSSPSSRAGPYEPLRFLRGRTVAPPDPKKQGPFPTTPEGGSSSLRRQPTSTITRPSRAVPWTSPDLKRQIPTSYAPHITRLETSRVEVGTPASALLLGAPDCRAGRRFSESESGGAGRVPRRKRKRWQTMRPDRAEAPGPPAMAAGGPGAGSAAPVSSTSSLPLAALNMRVRRRLSLFLNVRTQVAADWTALAEEMDFEYLEIRQLETQADPTGRLLDAWQGRPGASVGRLLELLTKLGRDDVLLELGPSIEEDCQKYILKQQQEEAEKPLQVAAVDSSVPRTAELAGITTLDDPLGHMPERFDAFICYCPSDIQFVQEMIRQLEQTNYRLKLCVSDRDVLPGTCVWSIASELIEKRLARRPRGGCRRMVVVVSDDYLQSKECDFQTKFALSLSPGAHQKRLIPIKYKAMKKEFPSILRFITVCDYTNPCTKSWFWTRLAKALSLP

SEQ ID NO: 886654 - protein, 440 aa, Homo sapiens; identical to SEQ ID NO: 886643

SEQ ID NO: 886655 - protein, 440 aa, Homo sapiens; identical to SEQ ID NO: 886643

SEQ ID NO: 886656 - protein, 316 aa, Homo sapiens
LVPSSPSSRAGPYEPLRFLRGRTVAPPDPKKQGPFPTTPEGGSSSLRRQPTSTITRPSRAVPWTSPDLKRQIPTSYAPHITRLETSRVEVGTPASALLLGAPDCRAGRRFSESESRRGGAGARRKRKRWQTMRPDRAEAPGPPAMAAGGPGAGSAAPVSSTSSLPLAALNMRVRRRLSLFLNVRTQVAADWTALAEEMDFEYLEIRQLETQADPTGRLLDAWQGRPGASVGRLLELLTKLGRDDVLLELGPSIEEDCQKYILKQQQEEAEKPLQVAAVDSSVPRTAELAGITTLDDPLGKGPILFPWDRWNRTLWC

SEQ ID NO: 886657 - protein, 476 aa, Homo sapiens
MFRLNSLSALAELAVGSRWYHGGSQPIQIRRRLMMVAFLGASAVTASTGLLWKRAHAESPPCVDNLKSDIGDKGKNKDEGDVCNHEKKTADLAPHPEEKKKKRSGFRDRKVMEYENRIRAYSTPDKIFRYFATLKVISEPGEAEVFMTPEDFVRSITPNEKQPEHLGLDQYIIKRFDGKKISQEREKFADEGSIFYTLGECGLISFSDYIFLTTVLSTPQRNFEIAFKMFDLNGDGEVDMEEFEQVQSIIRSQTSMGMRHRDRPTTGNTLKSGLCSALTTYFFGADLKGKLTIKNFLEFQRKLQHDVLKLEFERHDPVDGRITERQFGGMLLAYSGVQSKKLTAMQRQLKKHFKEGKGLTFQEVENFFTFLKNINDVDTALSFYHMAGASLDKVTMQQVARTVAKVELSDHVCDVVFALFDCDGNGELSNKEFVSIMKQRLMRGLEKPKDMGFTRLMQAMWKCAQETAWDFALPKQ

SEQ ID NO: 886658 - protein, 212 aa, Homo sapiens
MFRLNSLSALAELAVGSRWYHGGSQPIQIRRRLMMVAFLGASAVTASTGLLWKRAHAESPPCVDNLKSDIGDKGKNKDEGDVCNHEKKTADLAPHPEEKKKKRSGFRDRKVMEYENRIRAYSTPDKIFRYFATLKVISEPGEAEVFMTPEDFVRSITPNEKQPEHLGLDQYIIKRFDGKARFSKKKILHRVRKKSKGSILQRRKKALQKEER

SEQ ID NO: 886659 - protein, 476 aa, Homo sapiens; identical to SEQ ID NO: 886657

SEQ ID NO: 886660 - protein, 430 aa, Homo sapiens
MFRLNSLSALAELAVGSRWYHGGSQPIQIRRRLMMVAFLGASAVTASTGLLWKRAHAESPPCVDNLKSDIGDKGKNKDEGDVCNHEKKTADLAPHPEEKKKKRSGFRDRKVMEYENRIRAYSTPDKIFRYFATLKVISEPGEAEVFMTPEDFVRSITPNEKQPEHLGLDQYIIKRFDGKKISQEREKFADEGSIFYTLGECGLISFSDYIFLTTVLSTPQRNFEIAFKMFDLNGDGEVDMEEFEQVQSIIRSQTSMGMRHRDRPTTGNTLKSGLCSALTTYFFGADLKGKLTIKNFLEFQRKLQHDVLKLEGLTFQEVENFFTFLKNINDVDTALSFYHMAGASLDKVTMQQVARTVAKVELSDHVCDVVFALFDCDGNGELSNKEFVSIMKQRLMRGLEKPKDMGFTRLMQAMWKCAQETAWDFALPKQ

SEQ ID NO: 886661 - protein, 443 aa, Homo sapiens
MMVAFLGASAVTASTGLLWKRAHAESPPCVDNLKSDIGDKGKNKDEGDVCNHEKKTADLAPHPEEKKKKRSGFRDRKVMEYENRIRAYSTPDKIFRYFATLKVISEPGEAEVFMTPEDFVRSITPNEKQPEHLGLDQYIIKRFDGKKISQEREKFADEGSIFYTLGECGLISFSDYIFLTTVLSTPQRNFEIAFKMFDLNGDGEVDMEEFEQVQSIIRSQTSMGMRHRDRPTTGNTLKSGLCSALTTYFFGADLKGKLTIKNFLEFQRKLQHDVLKLEFERHDPVDGRITERQFGGMLLAYSGVQSKKLTAMQRQLKKHFKEGKGLTFQEVENFFTFLKNINDVDTALSFYHMAGASLDKVTMQQVARTVAKVELSDHVCDVVFALFDCDGNGELSNKEFVSIMKQRLMRGLEKPKDMGFTRLMQAMWKCAQETAWDFALPKQ

SEQ ID NO: 886662 - protein, 388 aa, Homo sapiens
MFRLNSLSALAELAVGSRWYHGGSQPIQIRRRLMMVAFLGASAVTASTGLLWKRAHAESPPCVDNLKSDIGDKGKNKDEGDVCNHEKKTADLAPHPEEKKKKRSGFRDRKVMEYENRIRAYSTPDKIFRYFATLKVISEPGEAEVFMTPEDFVRSITPNEKQPEHLGLDQYIIKRFDGKKISQEREKFADEGSIFYTLGECGLISFSDYIFLTTVLSTPQRNFEIAFKMFDLNGDGEVDMEEFEQVQSIIRSQTSMGMRHRDRPTTGNTLKSGLCSALTTYFFGADLKGKLTIKNFLEFQRKLQHDVLKLEFERHDPVDGRITERQFGGMLLAYSGVQSKKLTAMQRQLKKHFKEGKPTLQEGTPPPPVPWTPSAESRQSPLCCCFWK

SEQ ID NO: 886663 - protein, 248 aa, Homo sapiens
MFDLNGDGEVDMEEFEQVQSIIRSQTSMGMRHRDRPTTGNTLKSGLCSALTTYFFGADLKGKLTIKNFLEFQRKLQHDVLKLEFERHDPVDGRITERQFGGMLLAYSGVQSKKLTAMQRQLKKHFKEGKGLTFQEVENFFTFLKNINDVDTALSFYHMAGASLDKVTMQQVARTVAKVELSDHVCDVVFALFDCDGNGELSNKEFVSIMKQRLMRGLEKPKDMGFTRLMQAMWKCAQETAWDFALPKQ

SEQ ID NO: 886664 - protein, 206 aa, Homo sapiens
IVDFLEVSPYTGFEADLKGKLTIKNFLEFQRKLQHDVLKLEFERHDPVDGRITERQFGGMLLAYSGVQSKKLTAMQRQLKKHFKEGKGLTFQEVENFFTFLKNINDVDTALSFYHMAGASLDKVTMQQVARTVAKVELSDHVCDVVFALFDCDGNGELSNKEFVSIMKQRLMRGLEKPKDMGFTRLMQAMWKCAQETAWDFALPKQ

SEQ ID NO: 886665 - protein, 476 aa, Homo sapiens; identical to SEQ ID NO: 886657

SEQ ID NO: 886666 - protein, 476 aa, Homo sapiens; identical to SEQ ID NO: 886657

SEQ ID NO: 886667 - protein, 427 aa, Homo sapiens
MFRLNSLSALAELAVGSRWYHGGSQPIQIRRRLMMVAFLGASAVTASTGLLWKRAHAESPPCVDNLKSDIGDKGKNKDEGDVCNHEKKTADLAPHPEEKKKKRSGFRDRKVMEYENRIRAYSTPDKIFRYFATLKVISEPGEAEVFMTPEDFVRSITPNEKQPEHLGLDQYIIKRFDGKKISQEREKFADEGSIFYTLGECGLISFSDYIFLTTVLSTPQRNFEIAFKMFDLNGDGEVDMEEFEQVQSIIRSQTSMGMRHRDRPTTGNTLKSGLCSALTTYFFGADLKGKLTIKNFLEFQRKLQHDVLKLEFERHDPVDGRITERQFGGMLLAYSGVQSKKLTAMQRQLKKHFKEGKGLTFQEVENFFTFLKNINDVDTALSFYHMAGASLDKVTMQQVARTVAKVELSDHVCDVVFALFDCDAMAN

SEQ ID NO: 886668 - protein, 199 aa, Homo sapiens
MFDLNGDGEVDMEEFEQVQSIIRSQTSMGMRHRDRPTTGNTLKSGLCSALTTYFFGADLKGKLTIKNFLEFQRKLQHDVLKLEFERHDPVDGRITERQFGGMLLAYSGVQSKKLTAMQRQLKKHFKEGKGLTFQEVENFFTFLKNINDVDTALSFYHMAGASLDKVTMQQVARTVAKVELSDHVCDVVFALFDCDAMAN

SEQ ID NO: 886669 - protein, 403 aa, Homo sapiens
MFRLNSLSALAELAVGSRWYHGGSQPIQIRRRLMMVAFLGASAVTASTGLLWKRAHAESPPCVDNLKSDIGDKGKNKDEGDVCNHEKKTADLAPHPEEKKKKRSGFRDRKVMEYENRIRAYSTPDKIFRYFATLKVISEPGEAEVFMTPEDFVRSITPNEKQPEHLGLDQYIIKRFDGKKISQEREKFADEGSIFYTLGECGLISFSDYIFLTTVLSTPQRNFEIAFKMFDLNGDGEVDMEEFEQVQSIIRSQTSMGMRHRDRPTTGNTLKSGLCSALTTYFFGADLKGKLTIKNFLEFQRKLQHDVLKLEFERHDPVDGRITERQFGGMLLAYSGVQSKKLTAMQRQLKKHFKEGKGLTFQEVENFFTFLKNINDVDTALSFYHMAGASLDKGKGTIFMGRR

SEQ ID NO: 886670 - protein, 476 aa, Homo sapiens; identical to SEQ ID NO: 886657

SEQ ID NO: 886671 - protein, 356 aa, Homo sapiens
MIDYSVNKLRYLHLKVISEPGEAEVFMTPEDFVRSITPNEKQPEHLGLDQYIIKRFDGKKISQEREKFADEGSIFYTLGECGLISFSDYIFLTTVLSTPQRNFEIAFKMFDLNGDGEVDMEEFEQVQSIIRSQTSMGMRHRDRPTTGNTLKSGLCSALTTYFFGADLKGKLTIKNFLEFQRKLQHDVLKLEFERHDPVDGRITERQFGGMLLAYSGVQSKKLTAMQRQLKKHFKEGKGLTFQEVENFFTFLKNINDVDTALSFYHMAGASLDKVTMQQVARTVAKVELSDHVCDVVFALFDCDGNGELSNKEFVSIMKQRLMRGLEKPKDMGFTRLMQAMWKCAQETAWDFALPKQ

SEQ ID NO: 886672 - protein, 249 aa, Homo sapiens
MVPWRITAHPDPAKTNDGGFPGSICSNSMGMRHRDRPTTGNTLKSGLCSALTTYFFGADLKGKLTIKNFLEFQRKLQHDVLKLEFERHDPVDGRITERQFGGMLLAYSGVQSKKLTAMQRQLKKHFKEGKGLTFQEVENFFTFLKNINDVDTALSFYHMAGASLDKVTMQQVARTVAKVELSDHVCDVVFALFDCDGNGELSNKEFVSIMKQRLMRGLEKPKDMGFTRLMQAMWKCAQETAWDFALPKQ

SEQ ID NO: 886673 - protein, 175 aa, Homo sapiens
MLDNTFLALEFERHDPVDGRITERQFGGMLLAYSGVQSKKLTAMQRQLKKHFKEGKGLTFQEVENFFTFLKNINDVDTALSFYHMAGASLDKVTMQQVARTVAKVELSDHVCDVVFALFDCDGNGELSNKEFVSIMKQRLMRGLEKPKDMGFTRLMQAMWKCAQETAWDFALPKQ

SEQ ID NO: 886674 - protein, 434 aa, Homo sapiens
MFRLNSLSALAELAVGSRWYHGGSQPIQIRRRLMMVAFLGASAVTASTGLLWKRAHAESPPCVDNLKSDIGDKGKNKDEGDVCNHEKKTADLAPHPEEKKKKRSGFRDRKVMEYENRIRAYSTPDKIFRYFATLKVISEPGEAEVFMTPEDFVRSITPNEKQPEHLGLDQYIIKRFDGKKISQEREKFADEGSIFYTLGECGLISFSDYIFLTTVLSTPQRNFEIAFKMFDLNGDGEVDMEEFEQVQSIIRSQTSMGMRHRDRPTTGNTLKSGLCSALTTYFFGADLKGKLTIKNFLEFQRKLQHDVLKLEFERHDPVDGRITERQFGGMLLAYSGVQSKKLTAMQRQLKKHFKEGKGLTFQEVENFFTFLKNINDVDTALSFYHMAGASLDKVTMQQVARTVAKVELSDHVCDVVFALFDCDVCTPFSSSQPP

SEQ ID NO: 886675 - protein, 307 aa, Homo sapiens
MEPSSLELPADTVQRIAAELKCHPTDERVALHLDEEDKLRHFRECFYIPKIQDLPPVDLSLVNKDENAIYFLGNSLGLQPKMVKTYLEEELDKWAKIAAYGHEVGKRPWITGDESIVGLMKDIVGANEKEIALMNALTVNLHLLMLSFFKPTPKRYKILLEAKAFPSDHYAIESQLQLHGLNIEESMRMIKPREGEETLRIEDILEVIEKEGDSIAVILFSGVHFYTGQHFNIPAITKAGQAKGCYVGFDLAHAVGNVELYLHDWGVDFACWCSYKYLNAGAGGIAGAFIHEKHAHTIKPARSEFFN

SEQ ID NO: 886676 - protein, 479 aa, Homo sapiens
MLNTSSLSFREQLVMEPSSLELPADTVQRIAAELKCHPTDERVALHLDEEDKLRHFRECFYIPKIQDLPPVDLSLVNKDENAIYFLGNSLGLQPKMVKTYLEEELDKWAKIAAYGHEVGKRPWITGDESIVGLMKDIVGANEKEIALMNALTVNLHLLMLSFFKPTPKRYKILLEAKAFPSDHYAIESQLQLHGLNIEESMRMIKPREGEETLRIEDILEVIEKEGDSIAVILFSGVHFYTGQHFNIPAITKAGQAKGCYVGFDLAHAVGNVELYLHDWGVDFACWCSYKYLNAGAGGIAGAFIHEKHAHTIKPALVGWFGHELSTRFKMDNKLQLIPGVCGFRISNPPILLVCSLHASLEIFKQATMKALRKKSVLLTGYLEYLIKHNYGKDKAATKKPVVNIITPSHVEERGCQLTITFSVPNKDVFQELEKRGVVCDKRNPNGIRVAPVPLYNSFHDVYKFTNLLTSILDSAETKN

SEQ ID NO: 886677 - protein, 480 aa, Homo sapiens
MIAILTDMSFREQLVMEPSSLELPADTVQRIAAELKCHPTDERVALHLDEEDKLRHFRECFYIPKIQDLPPVDLSLVNKDENAIYFLGNSLGLQPKMVKTYLEEELDKWAKIAAYGHEVGKRPWITGDESIVGLMKDIVGANEKEIALMNALTVNLHLLMLSFFKPTPKRYKILLEAKAFPSDHYAIESQLQLHGLNIEESMRMIKPREGEETLRIEDILEVIEKEGDSIAVILFSGVHFYTGQHFNIPAITKAGQAKGCYVGFDLAHAVGNVELYLHDWGVDFACWCSYKYLNAGAGGIAGAFIHEKHAHTIKPALVGWFGHELSTRFKMDNKLQLIPGVCGFRISNPPILLVCSLHASLEIFKQATMKALRKKSVLLTGYLEYLIKHNYGKDKAATKKPVVNIITPSHVEERGCQLTITFSVPNKDVFQELEKRGVVCDKRNPNGIRVAPVPLYNSFHDVYKFTNLLTSILDSAETKN

SEQ ID NO: 886678 - protein, 492 aa, Homo sapiens
MEPSSLELPADTVQRIAAELKCHPTDERVALHLDEEDKLRHFRECFYIPKIQDLPPVDLSLVNKDENAIYFLGNSLGLQPKMVKTYLEEELDKWAKIAAYGHEVGKRPWITGDESIVGLMKDIVGANEKEIALMNALTVNLHLLMLSFFKPTPKRYKILLEAKAFPSDHYAIESQLQLHGLNIEESMRMIKPREGEETLRIEDILEVIEKEGDSIAVILFSGVHFYTGQHFNIPAITKAGQAKGCYVGFDLAHAVGNVELYLHDWGVDFACWCSYKYLNAGAGGIAGAFIHEKHAHTIKPALVGWFGHELSTRFKMDNKLQLIPGVCGFRISNPPILLVCSLHASLENETFTLCEMNLKVPQNAVALIVVVMEKIFKQATMKALRKKSVLLTGYLEYLIKHNYGKDKAATKKPVVNIITPSHVEERGCQLTITFSVPNKDVFQELEKRGVVCDKRNPNGIRVAPVPLYNSFHDVYKFTNLLTSILDSAETKN

SEQ ID NO: 886679 - protein, 332 aa, Homo sapiens
MNALTVNLHLLMLSFFKPTPKRYKILLEAKAFPSDHYAIESQLQLHGLNIEESMRMIKPREGEETLRIEDILEVIEKEGDSIAVILFSGVHFYTGQHFNIPAITKAGQAKGCYVGFDLAHAVGNVELYLHDWGVDFACWCSYKYLNAGAGGIAGAFIHEKHAHTIKPALVGWFGHELSTRFKMDNKLQLIPGVCGFRISNPPILLVCSLHASLEIFKQATMKALRKKSVLLTGYLEYLIKHNYGKDKAATKKPVVNIITPSHVEERGCQLTITFSVPNKDVFQELEKRGVVCDKRNPNGIRVAPVPLYNSFHDVYKFTNLLTSILDSAETKN

SEQ ID NO: 886680 - protein, 447 aa, Homo sapiens
MEPSSLELPADTVQRIAAELKCHPTDERVALHLDEEDKLRHFRECFYIPKIQDLPPVDLSLVNKDENAIYFLGNSLGLQPKMVKTYLEEELDKWAKIIVGLMKDIVGANEKEIALMNALTVNLHLLMLSFFKPTPKRYKILLEAKAFPSDHYAIESQLQLHGLNIEESMRMIKPREGEETLRIEDILEVIEKEGDSIAVILFSGVHFYTGQHFNIPAITKAGQAKGCYVGFDLAHAVGNVELYLHDWGVDFACWCSYKYLNAGAGGIAGAFIHEKHAHTIKPALVGWFGHELSTRFKMDNKLQLIPGVCGFRISNPPILLVCSLHASLEIFKQATMKALRKKSVLLTGYLEYLIKHNYGKDKAATKKPVVNIITPSHVEERGCQLTITFSVPNKDVFQELEKRGVVCDKRNPNGIRVAPVPLYNSFHDVYKFTNLLTSILDSAETKN

SEQ ID NO: 886681 - protein, 301 aa, Homo sapiens
MEPSSLELPADTVQRIAAELKCHPTDERVALHLDEEDKLRHFRECFYIPKIQDLPPVDLSLVNKDENAIYFLGNSLGLQPKMVKTYLEEELDKWAKIAAYGHEVGKRPWITGDESIVGLMKDIVGANEKEIALMNALTVNLHLLMLSFFKPTPKRYKILLEAKAFPSDHYAIESQLQLHGLNIEESMRMIKPREGEETLRIEDILEVIEKEGDSIAVILFSGVHFYTGQHFNIPAITKAGQAKGCYVGFDLAHAVGNVELYLHDWGVDFACWCSYKYLNAGAGGIAGAFIHEKHAHTIKPA

SEQ ID NO: 886682 - protein, 416 aa, Homo sapiens
MEPSSLELPADTVQRIAAELKCHPTDERVALHLDEEDKLRHFRECFYIPKIQDLPPVDLSLVNKDENAIYFLGNSLGLQPKMVKTYLEEELDKWAKIAAYGHEVGKRPWITGDESIVGLMKDIVGANEKEIALMNALTVNLHLLMLSFFKPTPKRYKILLEAKAFPSDHYAIESQLQLHGLNIEESMRMIKPREGCYVGFDLAHAVGNVELYLHDWGVDFACWCSYKYLNAGAGGIAGAFIHEKHAHTIKPALVGWFGHELSTRFKMDNKLQLIPGVCGFRISNPPILLVCSLHASLEIFKQATMKALRKKSVLLTGYLEYLIKHNYGKDKAATKKPVVNIITPSHVEERGCQLTITFSVPNKDVFQELEKRGVVCDKRNPNGIRVAPVPLYNSFHDVYKFTNLLTSILDSAETKN

SEQ ID NO: 886683 - protein, 465 aa, Homo sapiens
MEPSSLELPADTVQRIAAELKCHPTDERVALHLDEEDKLRHFRECFYIPKIQDLPPVDLSLVNKDENAIYFLGNSLGLQPKMVKTYLEEELDKWAKIAAYGHEVGKRPWITGDESIVGLMKDIVGANEKEIALMNALTVNLHLLMLSFFKPTPKRYKILLEAKAFPSDHYAIESQLQLHGLNIEESMRMIKPREGEETLRIEDILEVIEKEGDSIAVILFSGVHFYTGQHFNIPAITKAGQAKGCYVGFDLAHAVGNVELYLHDWGVDFACWCSYKYLNAGAGGIAGAFIHEKHAHTIKPALVGWFGHELSTRFKMDNKLQLIPGVCGFRISNPPILLVCSLHASLEIFKQATMKALRKKSVLLTGYLEYLIKHNYGKDKAATKKPVVNIITPSHVEERGCQLTITFSVPNKDVFQELEKRGVVCDKRNPNGIRVAPVPLYNSFHDVYKFTNLLTSILDSAETKN

SEQ ID NO: 886684 - protein, 266 aa, Homo sapiens
MEPSSLELPADTVQRIAAELKCHPTDERVALHLDEEDKLRHFRECFYIPKIQDLPPVDLSLVNKDENAIYFLGNSLGLQPKMVKTYLEEELDKWAKIAAYGHEVGKRPWITGDESIVGLMKDIVGANEKEIALMNALTVNLHLLMLSFFKPTPKRYKILLEAKAFPSDHYAIESQLQLHGLNIEESMRMIKPREGEETLRIEDILEVIEKEGDSIAVILFSGVHFYTGQHFNIPAITKAGQAKVCTPFTSSHLTPNITLLKSVLIA

SEQ ID NO: 886685 - protein, 465 aa, Homo sapiens; identical to SEQ ID NO: 886683

SEQ ID NO: 886686 - protein, 465 aa, Homo sapiens; identical to SEQ ID NO: 886683

SEQ ID NO: 886687 - protein, 307 aa, Homo sapiens; identical to SEQ ID NO: 886675

SEQ ID NO: 886688 - protein, 370 aa, Homo sapiens
VFLQVFKLQEQEELLVPSFMKSMPIRLNLRANEKEIALMNALTVNLHLLMLSFFKPTPKRYKILLEAKAFPSDHYAIESQLQLHGLNIEESMRMIKPREGEETLRIEDILEVIEKEGDSIAVILFSGVHFYTGQHFNIPAITKAGQAKGCYVGFDLAHAVGNVELYLHDWGVDFACWCSYKYLNAGAGGIAGAFIHEKHAHTIKPALVGWFGHELSTRFKMDNKLQLIPGVCGFRISNPPILLVCSLHASLEIFKQATMKALRKKSVLLTGYLEYLIKHNYGKDKAATKKPVVNIITPSHVEERGCQLTITFSVPNKDVFQELEKRGVVCDKRNPNGIRVAPVPLYNSFHDVYKFTNLLTSILDSAETKN

SEQ ID NO: 886689 - protein, 159 aa, Homo sapiens
MEPSSLELPADTVQRIAAELKCHPTDERVALHLDEEDKLRHFRECFYIPKIQDLPPVDLSLVNKDENAIYFLGNSLGLQPKMVKTYLEEELDKWAKIAAYGHEVGKRPWITGDESIVGLMKDIVGANEKEIALMNALTVNLHLLMLSFFKPTPKRYICY

SEQ ID NO: 886690 - protein, 417 aa, Homo sapiens
GHLFRRLNCGRMRGSVECTWGWGHCAPSPLLLWTLLLFAAPFGLLGEKTRQVSLEVIPNWLGPLQNLLHIRAVGTNSTLHYVWSSLGPLAVVMVATNTPHSTLSVNWSLLLSPEPDGGLMVLPKDSIQFSSALVFTRLLEFDSTNVSDTAAKPLGRPYPPYSLADFSWNNITDSLDPATLSATFQGHPMNDPTRTFANGSLAFRVQAFSRSSRPAQPPRLLHTADTCQLEVALIGASPRGNRSLFGLEVATLGQGPDCPSMQEQHSIDDEYAPAVFQLDQLLWGSLPSGFAQWRPVAYSQKPGGRESALPCQASPLHPALAYSLPQSPIVRAFFGSQNNFCAFNLTFGASTGPGYWDQHYLSWSMLLGVGFPPVDGLSPLVLGIMAVALGAPGLMLLGGGLVLLLHHKKYSEYQSIN

SEQ ID NO: 886691 - protein, 417 aa, Homo sapiens; identical to SEQ ID NO: 886690

SEQ ID NO: 886692 - protein, 417 aa, Homo sapiens; identical to SEQ ID NO: 886690

SEQ ID NO: 886693 - protein, 417 aa, Homo sapiens; identical to SEQ ID NO: 886690

SEQ ID NO: 886694 - protein, 417 aa, Homo sapiens; identical to SEQ ID NO: 886690

SEQ ID NO: 886695 - protein, 331 aa, Homo sapiens
GHLFRRLNCGRMRGSVECTWGWGHCAPSPLLLWTLLLFAAPFGLLGEKTRQLLEFDSTNVSDTAAKPLGRPYPPYSLADFSWNNITDSLDPATLSATFQGHPMNDPTRTFANGSLAFRVQAFSRSSRPAQPPRLLHTADTCQLEVALIGASPRGNRSLFGLEVATLGQGPDCPSMQEQHSIDDEYAPAVFQLDQLLWGSLPSGFAQWRPVAYSQKPGGRESALPCQASPLHPALAYSLPQSPIVRAFFGSQNNFCAFNLTFGASTGPGYWDQHYLSWSMLLGVGFPPVDGLSPLVLGIMAVALGAPGLMLLGGGLVLLLHHKKYSEYQSIN

SEQ ID NO: 886696 - protein, 229 aa, Homo sapiens
MNDPTRTFANGSLAFRVQAFSRSSRPAQPPRLLHTADTCQLEVALIGASPRGNRSLFGLEVATLGQGPDCPSMQEQHSIDDEYAPAVFQLDQLLWGSLPSGFAQWRPVAYSQKPGGRESALPCQASPLHPALAYSLPQSPIVRAFFGSQNNFCAFNLTFGASTGPGYWDQHYLSWSMLLGVGFPPVDGLSPLVLGIMAVALGAPGLMLLGGGLVLLLHHKKYSEYQSIN

SEQ ID NO: 886697 - protein, 194 aa, Homo sapiens
GHLFRRLNCGRMRGSVECTWGWGHCAPSPLLLWTLLLFAAPFGLLGEKTRQLLEFDSTNVSDTAAKPLGRPYPPYSLADFSWNNITDSLDPATLSATFQGHPMNDPTRTFANGSLAFRVQAFSRSSRPAQPPRLLHTADTCQLEVALIGASPRGNRSLFGLEVATLGQGPDCPSMQEQHSIDDEYAPAVFQRRD

SEQ ID NO: 886698 - protein, 211 aa, Homo sapiens
GHLFRRLNCGRMRGSVECTWGWGHCAPSPLLLWTLLLFAAPFGLLGEKTRQLLEFDSTNVSDTAAKPLGRPYPPYSLADFSWNNITDSLDPATLSATFQGHPMNDPTRTFANGSLAFRVQAFSRSSRPAQPPRLLHTADTCQLEVALIGASPRGNRSLFGLEVATLGQGPDCPSMQEQHSIDDEYAPAVFQVRLPGERQMGEECRWDTIGT

SEQ ID NO: 886699 - protein, 417 aa, Homo sapiens; identical to SEQ ID NO: 886690

SEQ ID NO: 886700 - protein, 417 aa, Homo sapiens; identical to SEQ ID NO: 886690

SEQ ID NO: 886701 - protein, 368 aa, Homo sapiens
GHLFRRLNCGRMRGSVECTWGWGHCAPSPLLLWTLLLFAAPFGLLGEKTRQVSLEVIPNWLGPLQNLLHIRAVGTNSTLHYVWSSLGPLAVVMVATNTPHSTLSVNWSLLLSPEPDGGLMVLPKDSIQFSSALVFTRLLEFDSTNVSDTAAKPLGRPYPPYSLADFSWNNITDSLDPATLSATFQGHPMNDPTRTFANGSLAFRVQAFSRSSRPAQPPRLLHTADTCQLEVALIGASPRGNRSLFGLEVATLGQGPDCPSMQEQHSIDDEYAPAVFQSPIVRAFFGSQNNFCAFNLTFGASTGPGYWDQHYLSWSMLLGVGFPPVDGLSPLVLGIMAVALGAPGLMLLGGGLVLLLHHKKYSEYQSIN

SEQ ID NO: 886702 - protein, 397 aa, Homo sapiens
MPSVSDWVGMCPALLLDLSVHAIWLLGRRPQVSLEVIPNWLGPLQNLLHIRAVGTNSTLHYVWSSLGPLAVVMVATNTPHSTLSVNWSLLLSPEPDGGLMVLPKDSIQFSSALVFTRLLEFDSTNVSDTAAKPLGRPYPPYSLADFSWNNITDSLDPATLSATFQGHPMNDPTRTFANGSLAFRVQAFSRSSRPAQPPRLLHTADTCQLEVALIGASPRGNRSLFGLEVATLGQGPDCPSMQEQHSIDDEYAPAVFQLDQLLWGSLPSGFAQWRPVAYSQKPGGRESALPCQASPLHPALAYSLPQSPIVRAFFGSQNNFCAFNLTFGASTGPGYWDQHYLSWSMLLGVGFPPVDGLSPLVLGIMAVALGAPGLMLLGGGLVLLLHHKKYSEYQSIN

SEQ ID NO: 886703 - protein, 342 aa, Homo sapiens
GHLFRRLNCGRMRGSVECTWGWGHCAPSPLLLWTLLLFAAPFGLLGEKTRQVSLEVIPNWLGPLQNLLHIRAVGTNSTLHYVWSSLGPLAVVMVATNTPHSTLSVNWSLLLSPEPDGGLMVLPKDSIQFSSALVFTRLLEFDSTNVSDTAAKPLGRPYPPYSLADFSWNNITDSLDPATLSATFQGHPMNDPTRTFANGSLAFRVQAFSRSSRPAQPPRLLHTADTCQLEVALIGASPRGNRSLFGLEVATLGQGPDCPSMQEQHSIDDEYAPAVFQVDAPGCGLPSSGRLVPTSPGHHGSGPGCPRAHAARGRLGSAAAPQEVLRVPVHKLRPALWREGHY

SEQ ID NO: 886704 - protein, 300 aa, Homo sapiens
MEGVLYKWTNYLTGWQPRWFVLDNGILSYYDSQDDVCKGSKGSIKMAVCEIKVHSADNTRMELIIPGEQHFYMKAVNAAERQRWLVALGSSKACLTDTRTKKEKEISETSESLKTKMSELRLYCDLLMQQVHTIQEFVHHDENHSSPSAENMNEASSLLSATCNTFITTLEECVKIANAKFKPEMFQLHHPDPLVSPVSPSPVQMMKRSVSHPGSCSSERSSHSIKEPVSTLHRLSQRRRRTYSDTDSCSDIPLEDPDRPVHCSKNTLNGDLASATIPEESRLMAKKQSESEDTLPSFSS

SEQ ID NO: 886705 - protein, 240 aa, Homo sapiens
MELIIPGEQHFYMKAVNAAERQRWLVALGSSKACLTDTRTKKEKEISETSESLKTKMSELRLYCDLLMQQVHTIQEFVHHDENHSSPSAENMNEASSLLSATCNTFITTLEECVKIANAKFKPEMFQLHHPDPLVSPVSPSPVQMMKRSVSHPGSCSSERSSHSIKEPVSTLHRLSQRRRRTYSDTDSCSDIPLEDPDRPVHCSKNTLNGDLASATIPEESRLMAKKQSESEDTLPSFSS

SEQ ID NO: 886706 - protein, 300 aa, Homo sapiens; identical to SEQ ID NO: 886704

SEQ ID NO: 886707 - protein, 300 aa, Homo sapiens; identical to SEQ ID NO: 886704

SEQ ID NO: 886708 - protein, 305 aa, Homo sapiens
MEGVLYKWTNYLTGWQPRWFVLDNGILSYYDSQDDVCKGSKGSIKMAVCEIKVHSADNTRMELIIPGEQHFYMKAVNAAERQRWLVALGSSKACLTDTRTKKEKEISETSESLKTKMSELRLYCDLLMQQVHTIQEFVHHDENHSSPSAENMNEASSLLSATCNTFITTLEECVKIANAKFKPEMFQLHHPDPLVSPVSPSPVQMMKRSVSHPGSCSSERSSHSIKEPVSTLHRLSQRRRRTYSDTDSCSDIPLEDPDNVGGEMKERNREGEGRKKLSWANQARPGREEEERRRVKEVEYVKKVI

SEQ ID NO: 886709 - protein, 300 aa, Homo sapiens; identical to SEQ ID NO: 886704

SEQ ID NO: 886710 - protein, 300 aa, Homo sapiens; identical to SEQ ID NO: 886704

SEQ ID NO: 886711 - protein, 486 aa, Homo sapiens
MKGRRRRRREYCKFALLLVLYTLVLLLVPSVLDGGRDGDKGAEHCPGLQRSLGVWSLEAAAAGEREQGAEARAAEEGGANQSPRFPSNLSGAVGEAVSREKQHIYVHATWRTGSSFLGELFNQHPDVFYLYEPMWHLWQALYPGDAESLQGALRDMLRSLFRCDFSVLRLYAPPGDPAARAPDTANLTTAALFRWRTNKVICSPPLCPGAPRARAEVGLVEDTACERSCPPVAIRALEAECRKYPVVVIKDVRLLDLGVLVPLLRDPGLNLKVVQLFRDPRAVHNSRLKSRQGLLRESIQVLRTRQRGDRFHRVLLAHGVGARPGGQSRALPAAPRADFFLTGALEVICEAWLRDLLFARGAPAWLRRRYLRLRYEDLVRQPRAQLRRLLRFSGLRALAALDAFALNMTRGAAYGADRPFHLSARDAREAVHAWRERLSREQVRQVEAACAPAMRLLAYPRSGEEGDAEQPREGETPLEMDADGAT

SEQ ID NO: 886712 - protein, 121 aa, Homo sapiens
SKQCARAVALKAGQQSLWPMWRSSARASVVMTVFALRGEGMCDHFQRDRVSPCCPDWSQTPGFKQSTRLGLPKCWDYRSVTTNRGTRHAAPALEKQRCGGNLSHSQSLGLDLLPTTAVQFC

SEQ ID NO: 886713 - protein, 460 aa, Homo sapiens
MKGRRRRRREYCKFALLLVLYTLVLLLVPSVLDGGRDGDKGAEHCPGLQRSLGVWSLEAAAAGEREQGAEARAAEEGGANQSPRFPSNLSGAVGEAVSREKQHIYVHATWRTGSSFLGELFNQHPDVFYLYEPMWHLWQALYPGDAESLQGALRDMLRSLFRCDFSVLRLYAPPGDPAARAPDTANLTTAALFRWRTNKVICSPPLCPGAPRARAEVGLVEDTACERSCPPVAIRALEAECRKYPVVVIKDVRLLDLGVLVPLLRDPGLNLKVVQLFRDPRAVHNSRLKSRQGLLRESIQVLRTRQRGDRFHRVLLAHGVGARPGGQSRALPAAPRADFFLTGALEVICEAWLRDLLFARGAPAWLRRRYLRLRYEDLVRQPRAQLRRLLRFSGLRALAALDAFALNMTRGAAYGADRPFHAACAPAMRLLAYPRSGEEGDAEQPREGETPLEMDADGAT

SEQ ID NO: 886714 - protein, 1794 aa, Homo sapiens
GAQAAAPLPATGGAALRRWLVVAVGGGGGERRPRVVRREALRADRALGGGGGGRRRAGARVRPAPAMADAAASPVGKRLLLLFADTAASASASAPAAAAASGDPGPALRTRAWRAGTVRAMSGAVPQDLAIFVEFDGCNWKQHSWVKVHAEEVIVLLLEGSLVWAPREDPVLLQGIRVSIAQWPALTFTPLVDKLGLGSVVPVEYLLDRELRFLSDANGLHLFQMGTDSQNQILLEHAALRETVNALISDQKLQEIFSRGPYSVQGHRVKIYQPEGEEGWLYGVVSHQDSITRLMEVSVTESGEIKSVDPRLIHVMLMDNSTPQSEGGTLKAVKSSKGKKKRESIEGKDGRRRKSASDSGCDPASKKLKGDRGEVDSNGSDGDKPQHSLATYTKENGRTLVVQDEPVGGDTPASFTPYSTATGQTPLAPEVGGAENKEAGKTLEQVGQGIVASAAVVTTASSTPNTVRISDTGLAAGTVPEKQKGSRSQASGENSRNSILASSGFGAPLPSSSQPLTFGSGRSQSNGVLATENKPLGFSFGCSSAQEAQKDTDLSKNLFFQCMSQTLPTSNYFTTVSESLADDSSSRDSFKQSLESLSSGLCKGRSVLGTDTKPGSKAGSSVDRKVPAESMPTLTPAFPRSLLNARTPENHENLFLQPPKLSREEPSNPFLAFVEKVEHSPFSSFASQASGSSSSATTVTSKVAPSWPESHSSADSASLAKKKPLFITTDSSKLVSGVLGSALTSGGPSLSAMGNGRSSSPTSSLTQPIEMPTLSSSPTEERPTVGPGQQDNPLLKTFSNVFGRHSGGFLSSPADFSQENKAPFEAVKRFSLDERSLACRQDSDSSTNSDLSDLSDSEEQLQAKTGLKGIPEHLMGKLGPNGERSAELLLGKSKGKQAPKGRPRTAPLKVGQSVLKDVSKVKKLKQSGEPFLQDGSCINVAPHLHKCRECRLERYRKFKEQEQDDSTVACRFFHFRRLIFTRKGVLRVEGFLSPQQSDPDAMNLWIPSSSLAEGIDLETSKYILANVGDQFCQLVMSEKEAMMMVEPHQKVAWKRAVRGVREMCDVCETTLFNIHWVCRKCGFGVCLDCYRLRKSRPRSETEEMGDEEVFSWLKCAKGQSHEPENLMPTQIIPGTALYNIGDMVHAARGKWGIKANCPCISRQNKSVLRPAVTNGMSQLPSINPSASSGNETTFSGGGGPAPVTTPEPDHVPKADSTDIRSEEPLKTDSSASNSNSELKAIRPPCPDTAPPSSALHWLADLATQKAKEETKEAGSLRSVLNKESHSPFGLDSFNSTAKVSPLTPKLFNSLLLGPTASNNKTEGSSLRDLLHSGPGKLPQTPLDTGIPFPPVFSTSSAGVKSKASLPNFLDHIIASVVENKKTSDASKRACNLTDTQKEVKEMVMGLNVLDPHTSHSWLCDGRLLCLHDPSNKNNWKIFRECWKQGQPVLVSGVHKKLKSELWKPEAFSQEFGDQDVDLVNCRNCAIISDVKVRDFWDGFEIICKRLRSEDGQPMVLKLKDWPPGEDFRDMMPTRFEDLMENLPLPEYTKRDGRLNLASRLPSYFVRPDLGPKMYNAYGLITAEDRRVGTTNLHLDVSDAVNVMVYVGIPIGEGAHDEEVLKTIDEGDADEVTKQRIHDGKEKPGALWHIYAAKDAEKIRELLRKVGEEQGQENPPDHDPIHDQSWYLDQTLRKRLYEEYGVQGWAIVQFLGDAVFIPAGAPHQVHNLYSCIKVAEDFVSPEHVKHCFRLTQEFRHLSNTHTNHEDKLQVKNIIYHAVKDAVGTLKAHESKLARS

SEQ ID NO: 886715 - protein, 1723 aa, Homo sapiens
PPGFNAILLPRPPVVSSDCRRCHHAHIFVEFDGCNWKQHSWVKVHAEEVIVLLLEGSLVWAPREDPVLLQGIRVSIAQWPALTFTPLVDKLGLGSVVPVEYLLDRELRFLSDANGLHLFQMGTDSQNQILLEHAALRETVNALISDQKLQEIFSRGPYSVQGHRVKIYQPEGEEGWLYGVVSHQDSITRLMEVSVTESGEIKSVDPRLIHVMLMDNSTPQSEGGTLKAVKSSKGKKKRESIEGKDGRRRKSASDSGCDPASKKLKGDRGEVDSNGSDGGEASRGPWKGGNASGEPGLDQRAKQPPSTFVPQINRNIRFATYTKENGRTLVVQDEPVGGDTPASFTPYSTATGQTPLAPEVGGAENKEAGKTLEQVGQGIVASAAVVTTASSTPNTVRISDTGLAAGTVPEKQKGSRSQASGENSRNSILASSGFGAPLPSSSQPLTFGSGRSQSNGVLATENKPLGFSFGCSSAQEAQKDTDLSKNLFFQCMSQTLPTSNYFTTVSESLADDSSSRDSFKQSLESLSSGLCKGRSVLGTDTKPGSKAGSSVDRKVPAESMPTLTPAFPRSLLNARTPENHENLFLQPPKLSREEPSNPFLAFVEKVEHSPFSSFASQASGSSSSATTVTSKVAPSWPESHSSADSASLAKKKPLFITTDSSKLVSGVLGSALTSGGPSLSAMGNGRSSSPTSSLTQPIEMPTLSSSPTEERPTVGPGQQDNPLLKTFSNVFGRHSGGFLSSPADFSQENKAPFEAVKRFSLDERSLACRQDSDSSTNSDLSDLSDSEEQLQAKTGLKGIPEHLMGKLGPNGERSAELLLGKSKGKQAPKGRPRTAPLKVGQSVLKDVSKVKKLKQSGEPFLQDGSCINVAPHLHKCRECRLERYRKFKEQEQDDSTVACRFFHFRRLIFTRKGVLRVEGFLSPQQSDPDAMNLWIPSSSLAEGIDLETSKYILANVGDQFCQLVMSEKEAMMMVEPHQKVAWKRAVRGVREMCDVCETTLFNIHWVCRKCGFGVCLDCYRLRKSRPRSETEEMGDEEVFSWLKCAKGQSHEPENLMPTQIIPGTALYNIGDMVHAARGKWGIKANCPCISRQNKSVLRPAVTNGMSQLPSINPSASSGNETTFSGGGGPAPVTTPEPDHVPKADSTDIRSEEPLKTDSSASNSNSELKAIRPPCPDTAPPSSALHWLADLATQKAKEETKEAGSLRSVLNKESHSPFGLDSFNSTAKVSPLTPKLFNSLLLGPTASNNKTEGSSLRDLLHSGPGKLPQTPLDTGIPFPPVFSTSSAGVKSKASLPNFLDHIIASVVENKKTSDASKRACNLTDTQKEVKEMVMGLNVLDPHTSHSWLCDGRLLCLHDPSNKNNWKIFRECWKQGQPVLVSGVHKKLKSELWKPEAFSQEFGDQDVDLVNCRNCAIISDVKVRDFWDGFEIICKRLRSEDGQPMVLKLKDWPPGEDFRDMMPTRFEDLMENLPLPEYTKRDGRLNLASRLPSYFVRPDLGPKMYNAYGLITAEDRRVGTTNLHLDVSDAVNVMVYVGIPIGEGAHDEEVLKTIDEGDADEVTKQRIHDGKEKPGALWHIYAAKDAEKIRELLRKVGEEQGQENPPDHDPIHDQSWYLDQTLRKRLYEEYGVQGWAIVQFLGDAVFIPAGAPHQVHNLYSCIKVAEDFVSPEHVKHCFRLTQEFRHLSNTHTNHEDKLQVKNIIYHAVKDAVGTLKAHESKLARS

SEQ ID NO: 886716 - protein, 1849 aa, Homo sapiens
GAQAAAPLPATGGAALRRWLVVAVGGGGGERRPRVVRREALRADRALGGGGGGRRRAGARVRPAPAMADAAASPVGKRLLLLFADTAASASASAPAAAAASGDPGPALRTRAWRAGTVRAMSGAVPQDLAIFVEFDGCNWKQHSWVKVHAEEVIVLLLEGSLVWAPREDPVLLQGIRVSIAQWPALTFTPLVDKLGLGSVVPVEYLLDRELRFLSDANGLHLFQMGTDSQNQILLEHAALRETVNALISDQKLQEIFSRGPYSVQGHRVKIYQPEGEEGWLYGVVSHQDSITRLMEVSVTESGEIKSVDPRLIHVMLMDNSTPQSEGGTLKAVKSSKGKKKRESIEGKDGRRRKSASDSGCDPASKKLKGDRGEVDSNGSDGGEASRGPWKGGNASGEPGLELRSRRKAEAQTRVRKPHYMDPPSQRQIKNPGKTNYPDIFRHQPFKTKENGRTLVVQDEPVGGDTPASFTPYSTATGQTPLAPEVGGAENKEAGKTLEQVGQGIVASAAVVTTASSTPNTVRISDTGLAAGTVPEKQKGSRSQASGENSRNSILASSGFGAPLPSSSQPLTFGSGRSQSNGVLATENKPLGFSFGCSSAQEAQKDTDLSKNLFFQCMSQTLPTSNYFTTVSESLADDSSSRDSFKQSLESLSSGLCKGRSVLGTDTKPGSKAGSSVDRKVPAESMPTLTPAFPRSLLNARTPENHENLFLQPPKLSREEPSNPFLAFVEKVEHSPFSSFASQASGSSSSATTVTSKVAPSWPESHSSADSASLAKKKPLFITTDSSKLVSGVLGSALTSGGPSLSAMGNGRSSSPTSSLTQPIEMPTLSSSPTEERPTVGPGQQDNPLLKTFSNVFGRHSGGFLSSPADFSQENKAPFEAVKRFSLDERSLACRQDSDSSTNSDLSDLSDSEEQLQAKTGLKGIPEHLMGKLGPNGERSAELLLGKSKGKQAPKGRPRTAPLKVGQSVLKDVSKVKKLKQSGEPFLQDGSCINVAPHLHKCRECRLERYRKFKEQEQDDSTVACRFFHFRRLIFTRKGVLRVEGFLSPQQSDPDAMNLWIPSSSLAEGIDLETSKYILANVGDQFCQLVMSEKEAMMMVEPHQKVAWKRAVRGVREMCDVCETTLFNIHWVCRKCGFGVCLDCYRLRKSRPRSETEEMGDEEVFSWLKCAKGQSHEPENLMPTQIIPGTALYNIGDMVHAARGKWGIKANCPCISRQNKSVLRPAVTNGMSQLPSINPSASSGNETTFSGGGGPAPVTTPEPDHVPKADSTDIRSEEPLKTDSSASNSNSELKAIRPPCPDTAPPSSALHWLADLATQKAKEETKEAGSLRSVLNKESHSPFGLDSFNSTAKVSPLTPKLFNSLLLGPTASNNKTEGSSLRDLLHSGPGKLPQTPLDTGIPFPPVFSTSSAGVKSKASLPNFLDHIIASVVENKKTSDASKRACNLTDTQKEVKEMVMGLNVLDPHTSHSWLCDGRLLCLHDPSNKNNWKIFRECWKQGQPVLVSGVHKKLKSELWKPEAFSQEFGDQDVDLVNCRNCAIISDVKVRDFWDGFEIICKRLRSEDGQPMVLKLKDWPPGEDFRDMMPTRFEDLMENLPLPEYTKRDGRLNLASRLPSYFVRPDLGPKMYNAYGLITAEDRRVGTTNLHLDVSDAVNVMVYVGIPIGEGAHDEEVLKTIDEGDADEVTKQRIHDGKEKPGALWHIYAAKDAEKIRELLRKVGEEQGQENPPDHDPIHDQSWYLDQTLRKRLYEEYGVQGWAIVQFLGDAVFIPAGAPHQVHNLYSCIKVAEDFVSPEHVKHCFRLTQEFRHLSNTHTNHEDKLQVKNIIYHAVKDAVGTLKAHESKLARS

SEQ ID NO: 886717 - protein, 759 aa, Homo sapiens
MSEKEAMMMVEPHQKVAWKRAVRGVREMCDVCETTLFNIHWVCRKCGFGVCLDCYRLRKSRPRSETEEMGDEEVFSWLKCAKGQSHEPENLMPTQIIPGTALYNIGDMVHAARGKWGIKANCPCISRQNKSVLRPAVTNGMSQLPSINPSASSGNETTFSGGGGPAPVTTPEPDHVPKADSTDIRSEEPLKTDSSASNSNSELKAIRPPCPDTAPPSSALHWLADLATQKAKEETKEAGSLRSVLNKESHSPFGLDSFNSTAKVSPLTPKLFNSLLLGPTASNNKTEGSSLRDLLHSGPGKLPQTPLDTGIPFPPVFSTSSAGVKSKASLPNFLDHIIASVVENKKTSDASKRACNLTDTQKEVKEMVMGLNVLDPHTSHSWLCDGRLLCLHDPSNKNNWKIFRECWKQGQPVLVSGVHKKLKSELWKPEAFSQEFGDQDVDLVNCRNCAIISDVKVRDFWDGFEIICKRLRSEDGQPMVLKLKDWPPGEDFRDMMPTRFEDLMENLPLPEYTKRDGRLNLASRLPSYFVRPDLGPKMYNAYGLITAEDRRVGTTNLHLDVSDAVNVMVYVGIPIGEGAHDEEVLKTIDEGDADEVTKQRIHDGKEKPGALWHIYAAKDAEKIRELLRKVGEEQGQENPPDHDPIHDQSWYLDQTLRKRLYEEYGVQGWAIVQFLGDAVFIPAGAPHQVHNLYSCIKVAEDFVSPEHVKHCFRLTQEFRHLSNTHTNHEDKLQVKNIIYHAVKDAVGTLKAHESKLARS

SEQ ID NO: 886718 - protein, 1518 aa, Homo sapiens
GAQAAAPLPATGGAALRRWLVVAVGGGGGERRPRVVRREALRADRALGGGGGGRRRAGARVRPAPAMADAAASPVGKRLLLLFADTAASASASAPAAAAASGDPGPALRTRAWRAGTVRAMSGAVPQDLAIFVEFDGCNWKQHSWVKVHAEEVIVLLLEGSLVWAPREDPVLLQGIRVSIAQWPALTFTPLVDKLGLGSVVPVEYLLDRELRFLSDANGLHLFQMGTDSQNQILLEHAALRETVNALISDQKLQEIFSRGPYSVQGHRVKIYQPEGEEGWLYGVVSHQDSITRLMEVSVTESGEIKSVDPRLIHVMLMDNSTPQSEGGTLKAVKSSKGKKKRESIEGKDGRRRKSASDSGCDPASKKLKGDRGEVDSNGSDGGEASRGPWKGGNASGEPGLDQRAKQPPSTFVPQINRNIRFATYTKENGRTLVVQDEPVGGDTPASFTPYSTATGQTPLAPEVGGAENKEAGKTLEQVGQGIVASAAVVTTASSTPNTVRISDTGLAAGTVPEKQKGSRSQASGENSRNSILASSGFGAPLPSSSQPLTFGSGRSQSNGVLATENKPLGFSFGCSSAQEAQKDTDLSKNLFFQCMSQTLPTSNYFTTVSESLADDSSSRDSFKQSLESLSSGLCKGRSVLGTDTKPGSKAGSSVDRKVPAESMPTLTPAFPRSLLNARTPENHENLFLQPPKLSREEPSNPFLAFVEKVEHSPFSSFASQASGSSSSATTVTSKVAPSWPESHSSADSASLAKKKPLFITTDSSKLVSGVLGSALTSGGPSLSAMGNGRSSSPTSSLTQPIEMPTLSSSPTEERPTVGPGQQDNPLLKTFSNVFGRHSGGFLSSPADFSQENKAPFEAVKRFSLDERSLACRQDSDSSTNSDLSDLSDSEEQLQAKTGLKGIPEHLMGKLGPNGERSAELLLGKSKGKQAPKGRPRTAPLKVGQSVLKDVSKVKKLKQSGEPFLQDGSCINVAPHLHKCRECRLERYRKFKEQEQDDSTVACRFFHFRRLIFTRKGVLRVEGFLSPQQSDPDAMNLWIPSSSLAEGIDLETSKYILANVGDQFCQLVMSEKEAMMMVEPHQKVAWKRAVRGVREMCDVCETTLFNIHWVCRKCGFGVCLDCYRLRKSRPRSETEEMGDEEVFSWLKCAKGQSHEPENLMPTQIIPGTALYNIGDMVHAARGKWGIKANCPCISRQNKSVLRPAVTNGMSQLPSINPSASSGNETTFSGGGGPAPVTTPEPDHVPKADSTDIRSEEPLKTDSSASNSNSELKAIRPPCPDTAPPSSALHWLADLATQKAKEETKEAGSLRSVLNKESHSPFGLDSFNSTAKVSPLTPKLFNSLLLGPTASNNKTEGSSLRDLLHSGPGKLPQTPLDTGIPFPPVFSTSSAGVKSKASLPNFLDHIIASVVENKKTSDASKRACNLTDTQKEVKEMVMGLNVLDPHTSHSWLCDGRLLCLHDPSNKNNWKIFRECWKQGQPVLVSGVHKKLKSELWKPEAFSQEFGDQGWRRTRPREPP

SEQ ID NO: 886719 - protein, 178 aa, Homo sapiens
GRSYAYEVTGDADEVTKQRIHDGKEKPGALWHIYAAKDAEKIRELLRKVGEEQGQENPPDHDPIHDQSWYLDQTLRKRLYEEYGVQGWAIVQFLGDAVFIPAGAPHQVHNLYSCIKVAEDFVSPEHVKHCFRLTQEFRHLSNTHTNHEDKLQVKNIIYHAVKDAVGTLKAHESKLARS

SEQ ID NO: 886720 - protein, 1677 aa, Homo sapiens
GAQAAAPLPATGGAALRRWLVVAVGGGGGERRPRVVRREALRADRALGGGGGGRRRAGARVRPAPAMADAAASPVGKRLLLLFADTAASASASAPAAAAASGDPGPALRTRAWRAGTVRAMSGAVPQDLAIFVEFDGCNWKQHSWVKVHAEEVIVLLLEGSLVWAPREDPVLLQGIRVSIAQWPALTFTPLVDKLGLGSVVPVEYLLDRELRFLSDANGLHLFQMGTDSQNQILLEHAALRETVNALISDQKLQEIFSRGPYSVQGHRVKIYQPEGEEGWLYGVVSHQDSITRLMEVSVTESGEIKSVDPRLIHVMLMDNSTPQSEGGTLKAVKSSKGKKKRESIEGKDGRRRKSASDSGCDPASKKLKGDRGEVDSNGSDGGEASRGPWKGGNASGEPGLDQRAKQPPSTFVPQINRNIRFATYTKENGRTLVVQDEPVGGDTPASFTPYSTATGQTPLAPEVGGAENKEAGKTLEQVGQGIVASAAVVTTASSTPNTVRISDTGLAAGTVPEKQKGSRSQASGENSRNSILASSGFGAPLPSSSQPLTFGSGRSQSNGVLATENKPLGFSFGCSSAQEAQKDTDLSKNLFFQCMSQTLPTSNYFTTVSESLADDSSSRDSFKQSLESLSSGLCKGRSVLGTDTKPGSKAGSSVDRKVPAESMPTLTPAFPRSLLNARTPENHENLFLQPPKLSREEPSNPFLAFVEKVEHSPFSSFASQASGSSSSATTVTSKVAPSWPESHSSADSASLAKKKPLFITTDSSKLVSGVLGSALTSGGPSLSAMGNGRSSSPTSSLTQPIEMPTLSSSPTEERPTVGPGQQDNPLLKTFSNVFGRHSGGFLSSPADFSQENKAPFEAVKRFSLDERSLACRQDSDSSTNSDLSDLSDSEEQLQAKTGLKGIPEHLMGKLGPNGERSAELLLGKSKGKQAPKGRPRTAPLKVGQSVLKDVSKVKKLKQSGEPFLQDGSCINVAPHLHKCRECRLERYRKFKEQEQDDSTVACRFFHFRRLIFTRKGVLRVEGFLSPQQSDPDAMNLWIPSSSLAEGIDLETSKYILANVGDQFCQLVMSEKEAMMMVEPHQKVAWKRAVRGVREMCDVCETTLFNIHWVCRKCGFGVCLDCYRLRKSRPRSETEEMGDEEVFSWLKCAKGQSHEPENLMPTQIIPGTALYNIGDMVHAARGKWGIKANCPCISRQNKSVLRPAVTNGMSQLPSINPSASSGNETTFSGGGGPAPVTTPEPDHVPKADSTDIRSEEPLKTDSSASNSNSELKAIRPPCPDTAPPSSALHWLADLATQKAKEETKEAGSLRSVLNKESHSPFGLDSFNSTAKVSPLTPKLFNSLLLGPTASNNKTEGSSLRDLLHSGPGKLPQTPLDTGIPFPPVFSTSSAGVKSKASLPNFLDHIIASVVENKKTSDASKRACNLTDTQKEVKEMVMGLNVLDPHTSHSWLCDGRLLCLHDPSNKNNWKIFRECWKQGQPVLVSGVHKKLKSELWKPEAFSQEFGDQDVDLVNCRNCAIISDVKVRDFWDGFEIICKRLRSEDGQPMVLKLKDWPPGEDFRDMMPTRFEDLMENLPLPEYTKRDGRLNLASRLPSYFVRPDLGPKMYNAYGLITAEDRRVGTTNLHLDVSDAVNVMVYVGIPIGEGAHDEEVLKTIDEGDADEVTKQRIHESKLARS

SEQ ID NO: 886721 - protein, 1827 aa, Homo sapiens
GAQAAAPLPATGGAALRRWLVVAVGGGGGERRPRVVRREALRADRALGGGGGGRRRAGARVRPAPAMADAAASPVGKRLLLLFADTAASASASAPAAAAASGDPGPALRTRAWRAGTVRAMSGAVPQDLAIFVEFDGCNWKQHSWVKVHAEEVIVLLLEGSLVWAPREDPVLLQGIRVSIAQWPALTFTPLVDKLGLGSVVPVEYLLDRELRFLSDANGLHLFQMGTDSQNQILLEHAALRETVNALISDQKLQEIFSRGPYSVQGHRVKIYQPEGEEGWLYGVVSHQDSITRLMEVSVTESGEIKSVDPRLIHVMLMDNSTPQSEGGTLKAVKSSKGKKKRESIEGKDGRRRKSASDSGCDPASKKLKGDRGEVDSNGSDGGEASRGPWKGGNASGEPGLDQRAKQPPSTFVPQINRNIRFATYTKENGRTLVVQDEPVGGDTPASFTPYSTATGQTPLAPEVGGAENKEAGKTLEQVGQGIVASAAVVTTASSTPNTVRISDTGLAAGTVPEKQKGSRSQASGENSRNSILASSGFGAPLPSSSQPLTFGSGRSQSNGVLATENKPLGFSFGCSSAQEAQKDTDLSKNLFFQCMSQTLPTSNYFTTVSESLADDSSSRDSFKQSLESLSSGLCKGRSVLGTDTKPGSKAGSSVDRKVPAESMPTLTPAFPRSLLNARTPENHENLFLQPPKLSREEPSNPFLAFVEKVEHSPFSSFASQASGSSSSATTVTSKVAPSWPESHSSADSASLAKKKPLFITTDSSKLVSGVLGSALTSGGPSLSAMGNGRSSSPTSSLTQPIEMPTLSSSPTEERPTVGPGQQDNPLLKTFSNVFGRHSGGFLSSPADFSQENKAPFEAVKRFSLDERSLACRQDSDSSTNSDLSDLSDSEEQLQAKTGLKGIPEHLMGKLGPNGERSAELLLGKSKGKQAPKGRPRTAPLKVGQSVLKDVSKVKKLKQSGEPFLQDGSCINVAPHLHKCRECRLERYRKFKEQEQDDSTVACRFFHFRRLIFTRKGVLRVEGFLSPQQSDPDAMNLWIPSSSLAEGIDLETSKYILANVGDQFCQLVMSEKEAMMMVEPHQKVAWKRAVRGVREMCDVCETTLFNIHWVCRKCGFGVCLDCYRLRKSRPRSETEEMGDEEVFSWLKCAKGQSHEPENLMPTQIIPGTALYNIGDMVHAARGKWGIKANCPCISRQNKSVLRPAVTNGMSQLPSINPSASSGNETTFSGGGGPAPVTTPEPDHVPKADSTDIRSEEPLKTDSSASNSNSELKAIRPPCPDTAPPSSALHWLADLATQKAKEETKEAGSLRSVLNKESHSPFGLDSFNSTAKVSPLTPKLFNSLLLGPTASNNKTEGSSLRDLLHSGPGKLPQTPLDTGIPFPPVFSTSSAGVKSKASLPNFLDHIIASVVENKKTSDASKRACNLTDTQKEVKEMVMGLNVLDPHTSHSWLCDGRLLCLHDPSNKNNWKIFRECWKQGQPVLVSGVHKKLKSELWKPEAFSQEFGDQDVDLVNCRNCAIISDVKVRDFWDGFEIICKRLRSEDGQPMVLKLKDWPPGEDFRDMMPTRFEDLMENLPLPEYTKRDGRLNLASRLPSYFVRPDLGPKMYNAYGLITAEDRRVGTTNLHLDVSDAVNVMVYVGIPIGEGAHDEEVLKTIDEGDADEVTKQRIHDGKEKPGALWHIYAAKDAEKIRELLRKVGEEQGQENPPDHDPIHDQSWYLDQTLRKRLYEEYGVQGWAIVQFLGDAVFIPAGAPHQVHNLYSCIKVAEDFVSPEHVKHCFRLTQEFRHLSNTHTNHEDKLQVKNIIYHAVKDAVGTLKAHESKLARS

SEQ ID NO: 886722 - protein, 1538 aa, Homo sapiens
GAQAAAPLPATGGAALRRWLVVAVGGGGGERRPRVVRREALRADRALGGGGGGRRRAGARVRPAPAMADAAASPVGKRLLLLFADTAASASASAPAAAAASGDPGPALRTRAWRAGTVRAMSGAVPQDLAIFVEFDGCNWKQHSWVKVHAEEVIVLLLEGSLVWAPREDPVLLQGIRVSIAQWPALTFTPLVDKLGLGSVVPVEYLLDRELRFLSDANGLHLFQMGTDSQNQILLEHAALRETVNALISDQKLQEIFSRGPYSVQGHRVKIYQPEGEEGWLYGVVSHQDSITRLMEVSVTESGEIKSVDPRLIHVMLMDNSTPQSEGGTLKAVKSSKGKKKRESIEGKDGRRRKSASDSGCDPASKKLKGDRGEVDSNGSDGGEASRGPWKGGNASGEPGLDQRAKQPPSTFVPQINRNIRFATYTKENGRTLVVQDEPVGGDTPASFTPYSTATGQTPLAPEVGGAENKEAGKTLEQVGQGIVASAAVVTTASSTPNTVRISDTGLAAGTVPEKQKGSRSQASGENSRNSILASSGFGAPLPSSSQPLTFGSGRSQSNGVLATENKPLGFSFGCSSAQEAQKDTDLSKNLFFQCMSQTLPTSNYFTTVSESLADDSSSRDSFKQSLESLSSGLCKGRSVLGTDTKPGSKAGSSVDRKVPAESMPTLTPAFPRSLLNARTPENHENLFLQPPKLSREEPSNPFLAFVEKVEHSPFSSFASQASGSSSSATTVTSKVAPSWPESHSSADSASLAKKKPLFITTDSSKLVSGVLGSALTSGGPSLSAMGNGRSSSPTSSLTQPIEMPTLSSSPTEERPTVGPGQQDNPLLKTFSNVFGRHSGGFLSSPADFSQENKAPFEAVKRFSLDERSLACRQDSDSSTNSDLSDLSDSEEQLQAKTGLKGIPEHLMGKLGPNGERSAELLLGKSKGKQAPKGRPRTAPLKVGQSVLKDVSKVKKLKQSGEPFLQDGSCINVAPHLHKCRECRLERYRKFKEQEQDDSTVACRFFHFRRLIFTRKGVLRVEGFLSPQQSDPDAMNLWIPSSSLAEGIDLETSKYILANVGDQFCQLVMSEKEAMMMVEPHQKVAWKRAVRGVREMCDVCETTLFNIHWVCRKCGFGVCLDCYRLRKSRPRSETEEMGDEEVFSWLKCAKGQSHEPENLMPTQIIPGTALYNIGDMVHAARGKWGIKANCPCISRQNKSVLRPAVTNGMSQLPSINPSASSGNETTFSGGGGPAPVTTPEPDHVPKADSTDIRSEEPLKTDSSASNSNSELKAIRPPCPDTAPPSSALHWLADLATQKAKEETKEAGSLRSVLNKESHSPFGLDSFNSTAKVSPLTPKLFNSLLLGPTASNNKTEGSSLRDLLHSGPGKLPQTPLDTGIPFPPVFSTSSAGVKSKASLPNFLDHIIASVVENKKTSDASKRACNLTDTQKEVKEMVMGLNVLDPHTSHSWLCDGRLLCLHDPSNKNNWKIFRECWKQGQPVLVSGVHKKLKSELWKPEAFSQEFGDQDVDLVNCRNCAIISDVKVRDFWDGFEIICSK

SEQ ID NO: 886723 - protein, 1140 aa, Homo sapiens
GAQAAAPLPATGGAALRRWLVVAVGGGGGERRPRVVRREALRADRALGGGGGGRRRAGARVRPAPAMADAAASPVGKRLLLLFADTAASASASAPAAAAASGDPGPALRTRAWRAGTVRAMSGAVPQDLAIFVEFDGCNWKQHSWVKVHAEEVIVLLLEGSLVWAPREDPVLLQGIRVSIAQWPALTFTPLVDKLGLGSVVPVEYLLDRELRFLSDANGLHLFQMGTDSQNQILLEHAALRETVNALISDQKLQEIFSRGPYSVQGHRVKIYQPEGEEGWLYGVVSHQDSITRLMEVSVTESGEIKSVDPRLIHVMLMDNSTPQSEGGTLKAVKSSKGKKKRESIEGKDGRRRKSASDSGCDPASKKLKGDRGEVDSNGSDGGEASRGPWKGGNASGEPGLDQRAKQPPSTFVPQINRNIRFATYTKENGRTLVVQDEPVGGDTPASFTPYSTATGQTPLAPEVGGAENKEAGKTLEQVGQGIVASAAVVTTASSTPNTVRISDTGLAAGTVPEKQKGSRSQASGENSRNSILASSGFGAPLPSSSQPLTFGSGRSQSNGVLATENKPLGFSFGCSSAQEAQKDTDLSKNLFFQCMSQTLPTSNYFTTVSESLADDSSSRDSFKQSLESLSSGLCKGRSVLGTDTKPGSKAGSSVDRKVPAESMPTLTPAFPRSLLNARTPENHENLFLQPPKLSREEPSNPFLAFVEKVEHSPFSSFASQASGSSSSATTVTSKVAPSWPESHSSADSASLAKKKPLFITTDSSKLVSGVLGSALTSGGPSLSAMGNGRSSSPTSSLTQPIEMPTLSSSPTEERPTVGPGQQDNPLLKTFSNVFGRHSGGFLSSPADFSQENKAPFEAVKRFSLDERSLACRQDSDSSTNSDLSDLSDSEEQLQAKTGLKGIPEHLMGKLGPNGERSAELLLGKSKGKQAPKGRPRTAPLKVGQSVLKDVSKVKKLKQSGEPFLQDGSCINVAPHLHKCRECRLERYRKFKEQEQDDSTVACRFFHFRRLIFTRKGVLRVEGFLSPQQSDPDAMNLWIPSSSLAEGIDLETSKYILANVGDQFCQLVMSEKEAMMMVEPHQKVAWKRAVRGVREMCDVCETTLFNIHWVCRKCGFGVCLDCYRLRKSRPRSETEEIGDV

SEQ ID NO: 886724 - protein, 730 aa, Homo sapiens
GAQAAAPLPATGGAALRRWLVVAVGGGGGERRPRVVRREALRADRALGGGGGGRRRAGARVRPAPAMADAAASPVGKRLLLLFADTAASASASAPAAAAASGDPGPALRTRAWRAGTVRAMSGAVPQDLAIFVEFDGCNWKQHSWVKVHAEEVIVLLLEGSLVWAPREDPVLLQGIRVSIAQWPALTFTPLVDKLGLGSVVPVEYLLDRELRFLSDANGLHLFQMGTDSQNQILLEHAALRETVNALISDQKLQEIFSRGPYSVQGHRVKIYQPEGEEGWLYGVVSHQDSITRLMEVSVTESGEIKSVDPRLIHVMLMDNSTPQSEGGTLKAVKSSKGKKKRESIEGKDGRRRKSASDSGCDPASKKLKGDRGEVDSNGSDGGEASRGPWKGGNASGEPGLDQRAKQPPSTFVPQINRNIRFATYTKENGRTLVVQDEPVGGDTPASFTPYSTATGQTPLAPEVGGAENKEAGKTLEQVGQGIVASAAVVTTASSTPNTVRISDTGLAAGTVPEKQKGSRSQASGENSRNSILASSGFGAPLPSSSQPLTFGSGRSQSNGVLATENKPLGFSFGCSSAQEAQKDTDLSKNLFFQCMSQTLPTSNYFTTVSESLADDSSSRDSFKQSLESLSSGLCKGRSVLGTDTKPGSKAGSSVDRKVPAESMPTCTPAWATERDSISKKKKKKKISLLGWAQCLTPVIPATQGESLEPGRPRSCHCTAARVTEQDSVS

SEQ ID NO: 886725 - protein, 328 aa, Homo sapiens
GAQAAAPLPATGGAALRRWLVVAVGGGGGERRPRVVRREALRADRALGGGGGGRRRAGARVRPAPAMADAAASPVGKRLLLLFADTAASASASAPAAAAASGDPGPALRTRAWRAGTVRAMSGAVPQDLAIFVEFDGCNWKQHSWVKVHAEEVIVLLLEGSLVWAPREDPVLLQGIRVSIAQWPALTFTPLVDKLGLGSVVPVEYLLDRELRFLSDANGLHLFQMGTDSQNQILLEHAALRETVNALISDQKLQEIFSRGPYSVQGHRVKIYQPEGEEGWLYGVVSHQDSITRLMEVSVTESGEIKSVDPRLIHVMLMDNSTPQSEVQ

SEQ ID NO: 886726 - protein, 103 aa, Homo sapiens
AIGSCLHLMTNFSSLPLATVGQSVLKDVSKVKKLKQSGEPFLQDGSCINVAPHLHKCRECRLERYRKFKEQEQDDSTVACRFFHFRRYPNSCFPPLLVFISDT

SEQ ID NO: 886727 - protein, 142 aa, Homo sapiens
EPSNPFLAFVEKVEHSPFSSFASQASGSSSSATTVTSKVAPSWPESHSSADSASLAKKKPLFITTDSSKLVSGVLGSALTSGGPSLSAMGNGRSSSPTSSLTQPIEMPTLSSSPTEERPTVGPGQQDNPLLKTFSNVFGRHS

SEQ ID NO: 886728 - protein, 1827 aa, Homo sapiens; identical to SEQ ID NO: 886721

SEQ ID NO: 886729 - protein, 759 aa, Homo sapiens; identical to SEQ ID NO: 886717

SEQ ID NO: 886730 - protein, 1827 aa, Homo sapiens; identical to SEQ ID NO: 886721

SEQ ID NO: 886731 - protein, 116 aa, Homo sapiens
MRLAPSRLMNPNWQGPRHGETPSSSVKQVFHSQHLTGNGRALCWSRGPSPRASVVSIPNSPATLFYAASTLKVDTGKSYCSHTQFETPSQECHIPILWPFGNPNCLNMAGLSCTFS

SEQ ID NO: 886732 - protein, 1827 aa, Homo sapiens; identical to SEQ ID NO: 886721

SEQ ID NO: 886733 - protein, 1272 aa, Homo sapiens
GAQAAAPLPATGGAALRRWLVVAVGGGGGERRPRVVRREALRADRALGGGGGGRRRAGARVRPAPAMADAAASPVGKRLLLLFADTAASASASAPAAAAASGDPGPALRTRAWRAGTVRAMSGAVPQDLAIFVEFDGCNWKQHSWVKVHAEEVIVLLLEGSLVWAPREDPVLLQGIRVSIAQWPALTFTPLVDKLGLGSVVPVEYLLDRELRFLSDANGLHLFQMGTDSQNQILLEHAALRETVNALISDQKLQEIFSRGPYSVQGHRVKIYQPEGEEGWLYGVVSHQDSITRLMEVSVTESGEIKSVDPRLIHVMLMDNSTPQSEGGTLKAVKSSKGKKKRESIEGKDGRRRKSASDSGCDPASKKLKGDRGEVDSNGSDGGEASRGPWKGGNASGEPGLDQRAKQPPSTFVPQINRNIRFATYTKENGRTLVVQDEPVGGDTPASFTPYSTATGQTPLAPEVGGAENKEAGKTLEQVGQGIVASAAVVTTASSTPNTVRISDTGLAAGTVPEKQKGSRSQASGENSRNSILASSGFGAPLPSSSQPLTFGSGRSQSNGVLATENKPLGFSFGCSSAQEAQKDTDLSKNLFFQCMSQTLPTSNYFTTVSESLADDSSSRDSFKQSLESLSSGLCKGRSVLGTDTKPGSKAGSSVDRKVPAESMPTLTPAFPRSLLNARTPENHENLFLQPPKLSREEPSNPFLAFVEKVEHSPFSSFASQASGSSSSATTVTSKVAPSWPESHSSADSASLAKKKPLFITTDSSKLVSGVLGSALTSGGPSLSAMGNGRSSSPTSSLTQPIEMPTLSSSPTEERPTVGPGQQDNPLLKTFSNVFGRHSGGFLSSPADFSQENKAPFEAVKRFSLDERSLACRQDSDSSTNSDLSDLSDSEEQLQAKTGLKGIPEHLMGKLGPNGERSAELLLGKSKGKQAPKGRPRTAPLKVGQSVLKDVSKVKKLKQSGEPFLQDGSCINVAPHLHKCRECRLERYRKFKEQEQDDSTVACRFFHFRRLIFTRKGVLRVEGFLSPQQSDPDAMNLWIPSSSLAEGIDLETSKYILANVGDQFCQLVMSEKEAMMMVEPHQKVAWKRAVRGVREMCDVCETTLFNIHWVCRKCGFGVCLDCYRLRKSRPRSETEEMGDEEVFSWLKCAKGQSHEPENLMPTQIIPGTALYNIGDMVHAARGKWGIKANCPCISRQNKSVLRPAVTNGMSQLPSINPSASSGNETTFSGGGGPAPVTTPEPDHVPKADSTDIRSEEPLKTDSSASNSNMLGL

SEQ ID NO: 886734 - protein, 222 aa, Homo sapiens
MAQSRDGGNPFAEPSELDNPFQDPAVIQHRPSRQYATLDVYNPFETREPPPAYEPPAPAPLPPPSAPSLQPSRKLSPTEPKNYGSYSTQASAAAATAELLKKQEELNRKAEELDRRERELQHAALGGTATRQNNWPPLPSFCPVQPCFFQDISMEIPQEFQKTVSTMYYLWMCSTLALLLNFLACLASFCVETNNGAGFGAFYPLGPPFHSLLLCLLVPPHV

SEQ ID NO: 886735 - protein, 153 aa, Homo sapiens
MAQALGLSILWVLLFTPCSFVCWYRPMYKAFRSDSSFNFFVFFFIFFVQDVLFVLQAIGIPGWGFSGWISALVVPKGNTAVSVLMLLVALLFTGIAVLGIVMLKRIHSLYRRTGASFQKAQQEFAAGVFSNPAVRTAAANAAAGAAENAFRAP

SEQ ID NO: 886736 - protein, 222 aa, Homo sapiens; identical to SEQ ID NO: 886734

SEQ ID NO: 886737 - protein, 222 aa, Homo sapiens; identical to SEQ ID NO: 886734

SEQ ID NO: 886738 - protein, 222 aa, Homo sapiens; identical to SEQ ID NO: 886734

SEQ ID NO: 886739 - protein, 153 aa, Homo sapiens; identical to SEQ ID NO: 886735

SEQ ID NO: 886740 - protein, 196 aa, Homo sapiens
MAQSRDGGNPFAEPSELDNPFQPPPAYEPPAPAPLPPPSAPSLQPSRKLSPTEPKNYGSYSTQASAAAATAELLKKQEELNRKAEELDRRERELQHAALGGTATRQNNWPPLPSFCPVQPCFFQDISMEIPQEFQKTVSTMYYLWMCSTLALLLNFLACLASFCVETNNGAGFGAFYPLGPPFHSLLLCLLVPPHV

SEQ ID NO: 886741 - protein, 153 aa, Homo sapiens; identical to SEQ ID NO: 886735

SEQ ID NO: 886742 - protein, 208 aa, Homo sapiens
MAQSRDGGNPFAEPSELDNPFQDPAVIQHRPSRQYATLDVYNPFETREPPPAYEPPAPAPLPPPSAPSLQPSRKLSPTEPKNYGSYSTQASAAAATAELLKKQEELNRKAEELDRRERELQHAALGGTAIQPCFFQDISMEIPQEFQKTVSTMYYLWMCSTLALLLNFLACLASFCVETNNGAGFGAFYPLGPPFHSLLLCLLVPPHV

SEQ ID NO: 886743 - protein, 153 aa, Homo sapiens; identical to SEQ ID NO: 886735

SEQ ID NO: 886744 - protein, 153 aa, Homo sapiens; identical to SEQ ID NO: 886735

SEQ ID NO: 886745 - protein, 153 aa, Homo sapiens; identical to SEQ ID NO: 886735

SEQ ID NO: 886746 - protein, 204 aa, Homo sapiens
MAQSRDGGNPFAEPSELDNPFQDPAVIQHRPSRQYATLDVYNPFETREPPPAYEPPAPAPLPPPSAPSLQPSRKLSPTEPKNYGSYSTQASAAAATAELLKKQEELNRKAEELDRRERELQHAALGGTATRQNNWPPLPSFCPVQPCFFQDISMEIPQEFQKTVSTMYYLWMLAGSLLWWCRRATQQYPCSCCWSPCSSLALLC

SEQ ID NO: 886747 - protein, 99 aa, Homo sapiens
SRGGTFVLAFGQDAGATHGCCGDPCGPSGRWNQSVHREAGRTEASEVDSEGYRYRHCCGRGVEGRGPRRPQLQTWLRAETAETRSPSPASLTTPFRTQL

SEQ ID NO: 886748 - protein, 251 aa, Homo sapiens
HCVFAAGVFSNPAVRTAAANAAAEAAVANMAQSRDGGNPFAEPSELDNPFQDPAVIQHRPSRQYATLDVYNPFETREPPPAYEPPAPAPLPPPSAPSLQPSRKLSPTEPKNYGSYSTQASAAAATAELLKKQEELNRKAEELDRRERELQHAALGGTATRQNNWPPLPSFCPVQPCFFQDISMEIPQEFQKTVSTMYYLWMCSTLALLLNFLACLASFCVETNNGAGFGAFYPLGPPFHSLLLCLLVPPHV

SEQ ID NO: 886749 - protein, 222 aa, Homo sapiens; identical to SEQ ID NO: 886734

SEQ ID NO: 886750 - protein, 153 aa, Homo sapiens; identical to SEQ ID NO: 886735

SEQ ID NO: 886751 - protein, 153 aa, Homo sapiens; identical to SEQ ID NO: 886735

SEQ ID NO: 886752 - protein, 222 aa, Homo sapiens; identical to SEQ ID NO: 886734

SEQ ID NO: 886753 - protein, 99 aa, Homo sapiens; identical to SEQ ID NO: 886747

SEQ ID NO: 886754 - protein, 96 aa, Homo sapiens
SRGGTFVLAFGQDAGATHGCCGDPCGPSGRWNQSVHREAGRTEASEVDSEGYRYRHCCGRGVEGRGPRRPQLQTWLRAETAETRSPSPASLTTPFR

SEQ ID NO: 886755 - protein, 339 aa, Homo sapiens
QRTSPWWCTPGLGAQRSGGRPLRSLRAQRPARGSEFDHTQRPASCPQRPLPPRFPCPSLSPARSARRLPLPRSLGSRDGGAVRQAQPPAPMAARRSQRRRGRRGEPGTALLVPLALGLGLALACLGLLLAVVSLGSRASLSAQEPAQEELVAEEDQDPSELNPQTEESQDPAPFLNRLVRPRRSAPKGRKTRARRAIAAHYEVHPRPGQDGAQAGVDGTVSGWEEARINSSSPLRYNRQIGEFIVTRAGLYYLYCQVHFDEGKAVYLKLDLLVDGVLALRCLEEFSATAASSLGPQLRLCQVSGLLALRPGSSLRIRTLPWAHLKAAPFLTYFGLFQVH

SEQ ID NO: 886756 - protein, 224 aa, Homo sapiens
QRTSPWWCTPGLGAQRSGGRPLRSLRAQRPARGSEFDHTQRPASCPQRPLPPRFPCPSLSPARSARRLPLPRSLGSRDGGAVRQAQPPAPMAARRSQRRRGRRGEPGTALLVPLALGLGLALACLGLLLAVVSLGSRASLSAQEPAQEELVAEEDQDPSELNPQTEESQDPAPFLNRLVRPRRSAPKGRKTRARRAIAAHYEVHPRPGQDGAQADGGYTTCLRP

SEQ ID NO: 886757 - protein, 192 aa, Homo sapiens
ARGQAEEDQDPSELNPQTEESQDPAPFLNRLVRPRRSAPKGRKTRARRAIAAHYEVHPRPGQDGAQAGVDGTVSGWEEARINSSSPLRYNRQIGEFIVTRAGLYYLYCQVHFDEGKAVYLKLDLLVDGVLALRCLEEFSATAASSLGPQLRLCQVSGLLALRPGSSLRIRTLPWAHLKAAPFLTYFGLFQVH

SEQ ID NO: 886758 - protein, 339 aa, Homo sapiens; identical to SEQ ID NO: 886755

SEQ ID NO: 886759 - protein, 194 aa, Homo sapiens
MCESAWKRGAVVYRELNPQTEESQDPAPFLNRLVRPRRSAPKGRKTRARRAIAAHYEVHPRPGQDGAQAGVDGTVSGWEEARINSSSPLRYNRQIGEFIVTRAGLYYLYCQVHFDEGKAVYLKLDLLVDGVLALRCLEEFSATAASSLGPQLRLCQVSGLLALRPGSSLRIRTLPWAHLKAAPFLTYFGLFQVH

SEQ ID NO: 886760 - protein, 339 aa, Homo sapiens; identical to SEQ ID NO: 886755

SEQ ID NO: 886761 - protein, 337 aa, Homo sapiens [sequence omitted]

SEQ ID NO: 886762 - protein, 156 aa, Homo sapiens
MGAAGSSALARFVLLAQSRPGWLGVAALGLTAVALGAVAWRRAWPTRRRRLLQQVGTVAQLWIYPVKSCKGVPVSEAECTAMGLRSGNLRDRYGQAPARGSADPARGKGVKTQYPLFLFLIMYKFFSSEIKKLGIFRAHFILLKGAPSIGIYWYAL

SEQ ID NO: 886763 - protein, 259 aa, Homo sapiens
MPGPVLPPAFEVFMFWLVINQEGNMVTARQEPRLVLISLTCDGDTLTLSAAYTKDLLLPIKTPTTNAVHKCRVHGLEIEGRDCGEAAAQWITSFLKSQPYRLVHFEPHMRPRRPHQIADLFRPKDQIAYSDTSPFLILSEASLADLNSRLEKKVKATNFRPNIVISGCDVYAEDSWDELLIGDVELKRVMACSRCILTTVDPDTGVMSRKEPLETLKSYRQCDPSERKLYGKSPLFGQYFVLENPGTIKVGDPVYLLGQ

SEQ ID NO: 886764 - protein, 306 aa, Homo sapiens
MGAAGSSALARFVLLAQSRPGWLGVAALGLTAVALGAVAWRRAWPTRRRRLLQQVGTVAQLWIYPVKSCKGVPVSEAECTAMGLRSGNLRDRFWLVINQEGNMVTARQEPRLVLISLTCDGDTLTLSAAYTKDLLLPIKTPTTNAVHKCRVHGLEIEGRDCGEAAAQWITSFLKSQPYRLVHFEPHMRPRRPHQIADLFRPKDQIAYSDTSPFLILSEASLADLNSRLEKKVKATNFRPNIVISGCDVYAEDSWDELLIGDVELKRVMACSRCILTTVDPDTGVMSRKEPLETLKRESDVHTDPHG

SEQ ID NO: 886765 - protein, 285 aa, Homo sapiens
MGAAGSSALARFVLLAQSRPGWLGVAALGLTAVALGAVAWRRAWPTRRRRLLQQVGTVAQLWIYPVKSCKGVPVSEAECTAMGLRSGNLRDRFWLVINQEGNMVTARQEPRLVLISLTCDGDTLTLSAAYTKDLLLPIKTPTTNAVHKCRVHGLEIEGRDCGEAAAQWITSFLKSQPYRLVHFEPHMRPRRPHQIADLFRPKDQIAYSDTSPFLILSEASLADLNSRLEKKVKATNFRPNIVISGCDVYAEVTLCPFGSFLGFDFFFKIYSALNKCRLLCGGYKC

SEQ ID NO: 886766 - protein, 183 aa, Homo sapiens
MASRAGPRAAGTDGSDFQHRERVAMHYQMSVTLKYEIKKLIYVHLVIWLLLVAKMSVGHLRLLSHDQVAMPYQWEYPYLLSILPSLLGLLSFPRNNISYLVLSMISMGLFSIAPLIYGSMEMFPAAQQLYRHGKAYRFLFGFSAVSIMYLVLVLAVQVHAWQLYYSKKLLDSWFTSTQEKKHK

SEQ ID NO: 886767 - protein, 183 aa, Homo sapiens; identical to SEQ ID NO: 886766

SEQ ID NO: 886768 - protein, 183 aa, Homo sapiens; identical to SEQ ID NO: 886766

SEQ ID NO: 886769 - protein, 129 aa, Homo sapiens
MSVGHLRLLSHDQVAMPYQWEYPYLLSILPSLLGLLSFPRNNISYLVLSMISMGLFSIAPLIYGSMEMFPAAQQLYRHGKAYRFLFGFSAVSIMYLVLVLAVQVHAWQLYYSKKLLDSWFTSTQEKKHK

SEQ ID NO: 886770 - protein, 226 aa, Homo sapiens
MCGSSWMRGCKSSRAVRELVHHVRCLETIAPADSDSLAHGGADVFQDQVERGSDDDDYSSMRCDTIKFVIIEDVTLKYEIKKLIYVHLVIWLLLVAKMSVGHLRLLSHDQVAMPYQWEYPYLLSILPSLLGLLSFPRNNISYLVLSMISMGLFSIAPLIYGSMEMFPAAQQLYRHGKAYRFLFGFSAVSIMYLVLVLAVQVHAWQLYYSKKLLDSWFTSTQEKKHK

SEQ ID NO: 886771 - protein, 172 aa, Homo sapiens
VWTSVMVFSYMVFSYMVFSVTLKYEIKKLIYVHLVIWLLLVAKMSVGHLRLLSHDQVAMPYQWEYPYLLSILPSLLGLLSFPRNNISYLVLSMISMGLFSIAPLIYGSMEMFPAAQQLYRHGKAYRFLFGFSAVSIMYLVLVLAVQVHAWQLYYSKKLLDSWFTSTQEKKHK

SEQ ID NO: 886772 - protein, 129 aa, Homo sapiens; identical to SEQ ID NO: 886769

SEQ ID NO: 886773 - protein, 129 aa, Homo sapiens; identical to SEQ ID NO: 886769

SEQ ID NO: 886774 - protein, 357 aa, Homo sapiens
GAAGLRAGAAGTSSTSSSSSCAAGRVRPGPRRGQSAAASGGGASRARAGRASAACSMHPEPAPPPSRSSPELPPSGGSTTSGSRRSRRRSGDGEPPGAPPPPPSAVTYPDWIGQSYSEVMSLNEHSMQALSWRKLYLSRAKLKASSRTSALLSGFAMVAMVEVQLDADHDYPPGLLIAFSACTTVLVAVHLFALMISTCILPNIEAVSNVHNLNSVKESPHERMHRHIELAWAFSTVIGTLLFLAEVVLLCWVKFLPLKKQPGQPRPTSKPPASGAAANVSTSGITPGQAAAIASTTIMVPFGLIFIVFAVHFYRSLVSHKTDRQFQELNELAEFARLQDQLDHRGDHPLTPGSHYA

SEQ ID NO: 886775 - protein, 342 aa, Homo sapiens
MHPEPAPPPSRSSPELPPSGGSTTSGSRRSRRRSGDGEPPGAPPPPPSAVTYPDWIGQSYSEVMSLNEHSMQALSWRKLYLSRAKLKASSRTSALLSGFAMVSSGRPALPPLLSRLLPPAAPTGLSGRAGRARVREELGETVVAMVEVQLDADHDYPPGLLIAFSACTTVLVAVHLFALMISTCILPNIEAVSNVHNLNSVKESPHERMHRHIELAWAFSTVIGTLLFLAEVVLLCWVKFLPLKKQPGQPRPTSKPPASGAAANVSTSGITPGQAAAIASTTIMVPFGLIFIVFAVHFYRSLVSHKTDRQFQELNELAEFARLQDQLDHRGDHPLTPGSHYA

SEQ ID NO: 886776 - protein, 357 aa, Homo sapiens; identical to SEQ ID NO: 886774

SEQ ID NO: 886777 - protein, 357 aa, Homo sapiens; identical to SEQ ID NO: 886774

SEQ ID NO: 886778 - protein, 245 aa, Homo sapiens
MNGRADFREPNAEVPRPIPHIGPDYIPTEEERRVFAECNDESFWFRSVPLAATSMLITQGLISKGILSSHPKYGSIPKLILACIMGYFAGKLSYVKTCQEKFKKLENSPLGEALRSGQARRSSPPGHYYQKSKYDSSVSGQSSFVTSPAADNIEMLPHYEPIPFSSSMNESAPTGITDHIVQGPDPNLEESPKRKNITYEELRNKNRESYEVSLTQKTDPSVRPMHERVPKKEVKVNKYGDTWDE

SEQ ID NO: 886779 - protein, 245 aa, Homo sapiens; identical to SEQ ID NO: 886778

SEQ ID NO: 886780 - protein, 244 aa, Homo sapiens
  misc_feature (17)..(17): Xaa can be any naturally occurring amino acid
FLRSQFDGDSPFFQDQXPHIGPDYIPTEEERRVFAECNDESFWFRSVPLAATSMLITQGLISKGILSSHPKYGSIPKLILACIMGYFAGKLSYVKTCQEKFKKLENSPLGEALRSGQARRSSPPGHYYQKSKYDSSVSGQSSFVTSPAADNIEMLPHYEPIPFSSSMNESAPTGITDHIVQGPDPNLEESPKRKNITYEELRNKNRESYEVSLTQKTDPSVRPMHERVPKKEVKVNKYGDTWDE

SEQ ID NO: 886781 - protein, 191 aa, Homo sapiens [sequence omitted]

SEQ ID NO: 886782 - protein, 234 aa, Homo sapiens
LALRPAVRSDVISCRKMNGRADFREPNAEVPRPIPPVPLAATSMLITQGLISKGILSSHPKYGSIPKLILACIMGYFAGKLSYVKTCQEKFKKLENSPLGEALRSGQARRSSPPGHYYQKSKYDSSVSGQSSFVTSPAADNIEMLPHYEPIPFSSSMNESAPTGITDHIVQGPDPNLEESPKRKNITYEELRNKNRESYEVSLTQKTDPSVRPMHERVPKKEVKVNKYGDTWDE

SEQ ID NO: 886783 - protein, 245 aa, Homo sapiens; identical to SEQ ID NO: 886778

SEQ ID NO: 886784 - protein, 245 aa, Homo sapiens; identical to SEQ ID NO: 886778

SEQ ID NO: 886785 - protein, 245 aa, Homo sapiens; identical to SEQ ID NO: 886778

SEQ ID NO: 886786 - protein, 245 aa, Homo sapiens; identical to SEQ ID NO: 886778

SEQ ID NO: 886787 - protein, 194 aa, Homo sapiens
MNGRADFREPNAEVPRPIPHIGPDYIPTEEERRVFAECNDESFWFRSVPLAATSMLITQGLISKGILSSHPKYGSIPKLILACIMGYFAGKLSYVKTCQEKFKKLENSPLGEALRSGQARRSSPPGHYYQKSKYDSSVSGQSSFVTSPAADNIEMLPHYEPIPFSSSMNESAPTGITDHIVQVKVNKYGDTWDE

SEQ ID NO: 886788 - protein, 237 aa, Homo sapiens [sequence omitted]

SEQ ID NO: 886789 - protein, 194 aa, Homo sapiens; identical to SEQ ID NO: 886787

SEQ ID NO: 886790 - protein, 187 aa, Homo sapiens
MNGRADFREPNAEVPRPIPHIGPDYIPTEEERRVFAECNDESFWFRSVPLAATSMLITQGLISKGILSSHPKYGSIPKLILACIMGYFAGKLSYVKTCQEKFKKLENSPLGEALRSGQARRSSPPGHYYQKSKYDSSVSGQSSFVTSPAADNIEMLPHYEPIPFSSSMNESAPTGITDHIVQGRNFS

SEQ ID NO: 886791 - protein, 245 aa, Homo sapiens; identical to SEQ ID NO: 886778

SEQ ID NO: 886792 - protein, 245 aa, Homo sapiens; identical to SEQ ID NO: 886778

SEQ ID NO: 886793 - protein, 245 aa, Homo sapiens; identical to SEQ ID NO: 886778

SEQ ID NO: 886794 - protein, 245 aa, Homo sapiens; identical to SEQ ID NO: 886778

SEQ ID NO: 886795 - protein, 245 aa, Homo sapiens; identical to SEQ ID NO: 886778

SEQ ID NO: 886796 - protein, 245 aa, Homo sapiens; identical to SEQ ID NO: 886778

SEQ ID NO: 886797 - protein, 187 aa, Homo sapiens; identical to SEQ ID NO: 886790

SEQ ID NO: 886798 - protein, 196 aa, Homo sapiens
MNGRADFREPNAEVPRPIPHIGPDYIPTEEERRVFAECNDESFWFRSVPLAATSMLITQGLISKGILSSHPKYGSIPKLILACIMGYFAGKLSYVKTCQEKFKKLENSPLGEALRSGQARRSSPPGHYYQKSKYDSSVSGQSSFVTSPAADNIEMLPHYEPIPFSSSMNESAPTGITDHIVQVKVNKYGDTWDEWS

SEQ ID NO: 886799 - protein, 264 aa, Homo sapiens
MNGRADFREPNAEVPRPIPHIGPDYIPTEEERRVFAECNDESFWFRSVPLAATSMLITQGLISKGILSSHPKYGSIPKLILACIMGYFAGKLSYVKTCQEKFKKLENSPLGEALRSGQARRSSPPGHYYQKSKYDSSVSGQSSFVTSPAADNIEMLPHYEPIPFSSSMNESAPTGITDHIVQGPDPNLEESPKRKNITYEELRNKNRESYEVSLTQKTDPSASQVEREPKKQATWGNGGRKHTGERVNDARGEKKSTTPYRVGD

SEQ ID NO: 886800 - protein, 187 aa, Homo sapiens; identical to SEQ ID NO: 886790

SEQ ID NO: 886801 - protein, 250 aa, Homo sapiens
GRGRRGARRPRRGARRPGGASGGEWRTRRRAAVPACRCSAAVAAPVYPALGTAPSGETVPAMSAAMRERFDRFLHEKNCMTDLLAKLEAKTGVNRSFIALGVIGLVALYLVFGYGASLLCNLIGFGYPAYISIKAIESPNKEDDTQWLTYWVVYGVFSIAEFFSDIFLSWFPFYYMLKCGFLLWCMAPSPSNGAELLYKRIIRPFFLKHESQMDSVVKDLKDKAKETADAITKEAKKATVNLLGEEKKST

SEQ ID NO: 886802 - protein, 250 aa, Homo sapiens; identical to SEQ ID NO: 886801

SEQ ID NO: 886803 - protein, 210 aa, Homo sapiens
GTHVDTSGALGTAPSGETVPAMSAAMRERFDRFLHEKNCMTDLLAKLEAKTGVNRSFIALGVIGLVALYLVFGYGASLLCNLIGFGYPAYISIKAIESPNKEDDTQWLTYWVVYGVFSIAEFFSDIFLSWFPFYYMLKCGFLLWCMAPSPSNGAELLYKRIIRPFFLKHESQMDSVVKDLKDKAKETADAITKEAKKATVNLLGEEKKST

SEQ ID NO: 886804 - protein, 250 aa, Homo sapiens; identical to SEQ ID NO: 886801

SEQ ID NO: 886805 - protein, 69 aa, Homo sapiens
GTHVDTSGALGTAPSGETVPAMSAAMRERFDRFLHEKNCMTDLLAKLEVSSDWWPCTWCSVMEPLSSAT

SEQ ID NO: 886806 - protein, 242 aa, Homo sapiens
GRGLGKGGVGDRRDKQHIQGSGWPPGKRGHRRTPRGLPRLRVAGLEGSCGAGRWQLEGPALTYVCPAAGALFLLSCAVGADGGAPAGGRVDGGVIGLVALYLVFGYGASLLCNLIGFGYPAYISIKAIESPNKEDDTQWLTYWVVYGVFSIAEFFSDIFLSWFPFYYMLKCGFLLWCMAPSPSNGAELLYKRIIRPFFLKHESQMDSVVKDLKDKAKETADAITKEAKKATVNLLGEEKKST

SEQ ID NO: 886807 - protein, 167 aa, Homo sapiens
VFNLLITTIFRSSANLFGVIGLVALYLVFGYGASLLCNLIGFGYPAYISIKAIESPNKEDDTQWLTYWVVYGVFSIAEFFSDIFLSWFPFYYMLKCGFLLWCMAPSPSNGAELLYKRIIRPFFLKHESQMDSVVKDLKDKAKETADAITKEAKKATVNLLGEEKKST

SEQ ID NO: 886808 - protein, 250 aa, Homo sapiens; identical to SEQ ID NO: 886801

SEQ ID NO: 886809 - protein, 250 aa, Homo sapiens; identical to SEQ ID NO: 886801

SEQ ID NO: 886810 - protein, 250 aa, Homo sapiens; identical to SEQ ID NO: 886801

SEQ ID NO: 886811 - protein, 250 aa, Homo sapiens; identical to SEQ ID NO: 886801

SEQ ID NO: 886812 - protein, 250 aa, Homo sapiens; identical to SEQ ID NO: 886801

SEQ ID NO: 886813 - protein, 199 aa, Homo sapiens
GRGRRGARRPRRGARRPGGASGGEWRTRRRAAVPACRCSAAVAAPVYPALGTAPSGETVPAMSAAMRERFDRFLHEKNCMTDLLAKLEAKTGVNRSFIALGVIGLVALYLVFGYGASLLCNLIGFGYPAYISIKAIESPNKEDDTQWLTYWVVYGVFSIAEFFSDIFLSWFPFYYMLKQIYLEPPCARFCSTSGRYFGE

SEQ ID NO: 886814 - protein, 192 aa, Homo sapiens
GRGRRGARRPRRGARRPGGASGGEWRTRRRAAVPACRCSAAVAAPVYPALGTAPSGETVPAMSAAMRERFDRFLHEKNCMTDLLAKLEAKTGVNRSFIALGVIGLVALYLVFGYGASLLCNLIGFGYPAYISIKAIESPNKEDDTQWLTYWVVYGVFSIAEFFSDIFLSWFPFYYMLKVWSGLGFLLPRCLL

SEQ ID NO: 886815 - protein, 593 aa, Homo sapiens
MWCLLRGLGRPGALARGALGQQQSLGARALASAGSESRDEYSYVVVGAGSAGCVLAGRLTEDPAERVLLLEAGPKDVRAGSKRLSWKIHMPAALVANLCDDRYNWCYHTEVQRGLDGRVLYWPRGRVWGGSSSLNAMVYVRGHAEDYERWQRQGARGWDYAHCLPYFRKAQGHELGASRYRGADGPLRVSRGKTNHPLHCAFLEATQQAGYPLTEDMNGFQQEGFGWMDMTIHEGKRWSAACAYLHPALSRTNLKAEAETLVSRVLFEGTRAVGVEYVKNGQSHRAYASKEVILSGGAINSPQLLMLSGIGNADDLKKLGIPVVCHLPGVGQNLQDHLEIYIQQACTRPITLHSAQKPLRKVCIGLEWLWKFTGEGATAHLETGGFIRSQPGVPHPDIQFHFLPSQVIDHGRVPTQQEAYQVHVGPMRGTSVGWLKLRSANPQDHPVIQPYLSTETDIEDFRLCVKLTREIFAQEALAPFRGKELQPGSHIQSDKEIDAFVRAKADSAYHPSCTCKMGQPSDPTAVVDPQTRVLGVENLRVVDASIMPSMVSGNLNAPTIMIAEKAADIIKGQPALWDKDVPVYKPRTLATQR

SEQ ID NO: 886816 - protein, 593 aa, Homo sapiens; identical to SEQ ID NO: 886815

SEQ ID NO: 886817 - protein, 593 aa, Homo sapiens; identical to SEQ ID NO: 886815

SEQ ID NO: 886818 - protein, 593 aa, Homo sapiens; identical to SEQ ID NO: 886815

SEQ ID NO: 886819 - protein, 593 aa, Homo sapiens
MWCLLRGLGRPGALARGALGQQQSLGARALASAGSESRDEYSYVVVGAGSAGCVLAGRLTEDPAERVLLLEAGPKDVRAGSKRLSWKIHMPAALVANLCDDRYNWCYHTEVQRGLDGRVLYWPRGRVWGGSSSLNAMVYVRGHAEDYERWQRQGARGWDYAHCLPYFRKAQGHELGASRYRGADGPLRVSRGKTNHPLHCAFLEATQQAGYPLTEDMNGFQQEGFGWMDMTIHEGKRWSAACAYLHPALSRTNLKAEAETLVSRVLFEGTRAVGVEYVKNGQSHRAYASKEVILSGGAINSPQLLMLSGIGNADDLKKLGIPVVCHLPGVGQNLQDHLEIYIQQACTRPITLHSAQKPLRKVCIGLEWLWKFTGEGATAHLETGGFIRSQPGVPHPDIQFHFLPSQVIDHGRVPTQQEAYQVHVGPMRGTSVGWLKLRSANPQDHPVISPYLSTETDIEDFRLCVKLTREIFAQEALAPFRGKELQPGSHIQSDKEIDAFVRAKADSAYHPSCTCKMGQPSDPTAVVDPQTRVLGVENLRVVDASIMPSMVSGNLNAPTIMIAEKAADIIKGQPALWDKDVPVYKPRTLATQR

SEQ ID NO: 886820 - protein, 593 aa, Homo sapiens; identical to SEQ ID NO: 886815

SEQ ID NO: 886821 - protein, 575 aa, Homo sapiens
MWCLLRGLGRPGALARGALGQQQSLGARALASAGSESRDEYSYVVVGAGSAGCVLAGRLTEDPAERVLLLEAGPKDVRAGSKRLSWKIHMPAALVANLCDDRYNWCYHTEVQRGLDGRVLYWPRGRVWGGSSSLNAMVYVRGHAEDYERWQRQGARGWDYAHCLPYFRKAQGHELGASRYRGADGPLRVSRGKTNHPLHCAFLEATQQAGYPLTEDMNGFQQEGFGWMDMTIHEGKRWSAACAYLHPALSRTNLKAEAETLVSRVLFEGTRAVGVEYVKNGQSHRLLMLSGIGNADDLKKLGIPVVCHLPGVGQNLQDHLEIYIQQACTRPITLHSAQKPLRKVCIGLEWLWKFTGEGATAHLETGGFIRSQPGVPHPDIQFHFLPSQVIDHGRVPTQQEAYQVHVGPMRGTSVGWLKLRSANPQDHPVIQPYLSTETDIEDFRLCVKLTREIFAQEALAPFRGKELQPGSHIQSDKEIDAFVRAKADSAYHPSCTCKMGQPSDPTAVVDPQTRVLGVENLRVVDASIMPSMVSGNLNAPTIMIAEKAADIIKGQPALWDKDVPVYKPRTLATQR

SEQ ID NO: 886822 - protein, 2347 aa, Homo sapiens
MKNIYCLIPKLVNFATLGCLWISVVQCTVLNSCLKSCVTNLGQQLDLGTPHNLSEPCIQGCHFWNSVDQKNCALKCRESCEVGCSSAEGAYEEEVLENADLPTAPFASSIGSHNMTLRWKSANFSGVKYIIQWKYAQLLGSWTYTKTVSRPSYVVKPLHPFTEYIFRVVWIFTAQLQLYSPPSPSYRTHPHGVPETAPLIRNIESSSPDTVEVSWDPPQFPGGPILGYNLRLISKNQKLDAGTQRTSFQFYSTLPNTIYRFSIAAVNEVGEGPEAESSITTSSSAVQQEEQWLFLSRKTSLRKRSLKHLVDEAHCLRLDAIYHNITGISVDVHQQIVYFSEGTLIWAKKAANMSDVSDLRIFYRGSGLISSISIDWLYQRMYFIMDELVCVCDLENCSNIEEITPPSISAPQKIVADSYNGYVFYLLRDGIYRADLPVPSGRCAEAVRIVESCTLKDFAIKPQAKRIIYFNDTAQVFMSTFLDGSASHLILPRIPFADVKSFACENNDFLVTDGKVIFQQDALSFNEFIVGCDLSHIEEFGFGNLVIFGSSSQLHPLPGRPQELSVLFGSHQALVQWKPPALAIGANVILISDIIELFELGPSAWQNWTYEVKVSTQDPPEVTHIFLNISGTMLNVPELQSAMKYKVSVRASSPKRPGPWSEPSVGTTLVPASEPPFIMAVKEDGLWSKPLNSFGPGEFLSSDIGNVSDMDWYNNSLYYSDTKGDVFVWLLNGTDISENYHLPSIAGAGALAFEWLGHFLYWAGKTYVIQRQSVLTGHTDIVTHVKLLVNDMVVDSVGGYLYWTTLYSVESTRLNGESSLVLQTQPWFSGKKVIALTLDLSDGLLYWLVQDSQCIHLYTAVLRGQSTGDTTITEFAAWSTSEISQNALMYYSGRLFWINGFRIITTQEIGQKTSVSVLEPARFNQFTIIQTSLKPLPGNFSFTPKVIPDSVQESSFRIEGNASSFQILWNGPPAVDWGVVFYSVEFSAHSKFLASEQHSLPVFTVEGLEPYALFNLSVTPYTYWGKGPKTSLSLRAPETVPSAPENPRIFILPSGKCCNKNEVVVEFRWNKPKHENGVLTKFEIFYNISNQSITNKTCEDWIAVNVTPSVMSFQLEGMSPRCFIAFQVRAFTSKGPGPYADVVKSTTSEINPFPHLITLLGNKIVFLDMDQNQVVWTFSAERVISAVCYTADNEMGYYAEGDSLFLLHLHNRSSSELFQDSLVFDITVITIDWISRHLYFALKESQNGMQVFDVDLEHKVKYPREVKIHNRNSTIISFSVYPLLSRLYWTEVSNFGYQMFYYSIISHTLHRILQPTATNQQNKRNQCSCNVTEFELSGAMAIDTSNLEKPLIYFAKAQEIWAMDLEGCQCWRVITVPAMLAGKTLVSLTVDGDLIYWIITAKDSTQIYQAKKGNGAIVSQVKALRSRHILAYSSVMQPFPDKAFLSLASDTVEPTILNATNTSLTIRLPLAKTNLTWYGITSPTPTYLVYYAEVNDRKNSSDLKYRILEFQDSIALIEDLQPFSTYMIQIAVKNYYSDPLEHLPPGKEIWGKTKNGVPEAVQLINTTVRSDTSLIISWRESHKPNGPKESVRYQLAISHLALIPETPLRQSEFPNGRLTLLVTRLSGGNIYVLKVLACHSEEMWCTESHPVTVEMFNTPEKPYSLVPENTSLQFNWKAPLNVNLIRFWVELQKWKYNEFYHVKTSCSQGPAYVCNITNLQPYTSYNVRVVVVYKTGENSTSLPESFKTKAGVPNKPGIPKLLEGSKNSIQWEKAEDNGCRITYYILEIRKSTSNNLQNQNLRWKMTFNGSCSSVCTWKSKNLKGIFQFRVVAANNLGFGEYSGISENIILVGDDFWIPETSFILTIIVGIFLVVTIPLTFVWHRRLKNQKSAKEGVTVLINEDKELAELRGLAAGVGLANACYAIHTLPTQEEIENLPAFPREKLTLRLLLGSGAFGEVYEGTAVDILGVGSGEIKVAVKTLKKGSTDQEKIEFLKEAHLMSKFNHPNILKQLGVCLLNEPQYIILELMEGGDLLTYLRKARMATFYGPLLTLVDLVDLCVDISKGCVYLERMHFIHRDLAARNCLVSVKDYTSPRIVKIGDFGLARDIYKNDYYRKRGEGLLPVRWMAPESLMDGIFTTQSDVWSFGILIWEILTLGHQPYPAHSNLDVLNYVQTGGRLEPPRNCPDDLWNLMTQCWAQEPDQRPTFHRIQDQLQLFRNFFLNSIYKSRDEANNSGVINESFEGEDGDVICLNSDDIMPVALMETKNREGLNYMVLATECGQGEEKSEGPLGSQESESCGLRKEEKEPHADKDFCQEKQVAYCPSGKPEGLNYACLTHSGYGDGSD

SEQ ID NO: 886823 - protein, 187 aa, Homo sapiens
EFYVLILLLLVLLEKTFVYTTQQCIENLPAFPREKLTLRLLLGSGAFGEVYEGTAVDILGVGSGEIKVAVKTLKKGSTDQEKIEFLKEAHLMSKFNHPNILKQLGVCLLNEPQYIILELMEGGDLLTYLRKARMATFYGPLLTLVDLVDLCVDISKGCVYLERMHFIHRDLAVCNRLFSAKFFPIPV

SEQ ID NO: 886824 - protein, 1790 aa, Homo sapiens
MKNIYCLIPKLVNFATLGCLWISVVQCTVLNSCLKSCVTNLGQQLDLGTPHNLSEPCIQGCHFWNSVDQKNCALKCRESCEVGCSSAEGAYEEEVLENADLPTAPFASSIGSHNMTLRWKSANFSGVKYIIQWKYAQLLGSWTYTKTVSRPSYVVKPLHPFTEYIFRVVWIFTAQLQLYSPPSPSYRTHPHGVPETAPLIRNIESSSPDTVEVSWDPPQFPGGPILGYNLRLISKNQKLDAGTQRTSFQFYSTLPNTIYRFSIAAVNEVGEGPEAESSITTSSSAVQQEEQWLFLSRKTSLRKRSLKHLVDEAHCLRLDAIYHNITGISVDVHQQIVYFSEGTLIWAKKAANMSDVSDLRIFYRGSGLISSISIDWLYQRMYFIMDELVCVCDLENCSNIEEITPPSISAPQKIVADSYNGYVFYLLRDGIYRADLPVPSGRCAEAVRIVESCTLKDFAIKPQAKRIIYFNDTAQVFMSTFLDGSASHLILPRIPFADVKSFACENNDFLVTDGKVIFQQDALSFNEFIVGCDLSHIEEFGFGNLVIFGSSSQLHPLPGRPQELSVLFGSHQALVQWKPPALAIGANVILISDIIELFELGPSAWQNWTYEVKVSTQDPPEVTHIFLNISGTMLNVPELQSAMKYKVSVRASSPKRPGPWSEPSVGTTLVPASEPPFIMAVKEDGLWSKPLNSFGPGEFLSSDIGNVSDMDWYNNSLYYSDTKGDVFVWLLNGTDISENYHLPSIAGAGALAFEWLGHFLYWAGKTYVIQRQSVLTGHTDIVTHVKLLVNDMVVDSVGGYLYWTTLYSVESTRLNGESSLVLQTQPWFSGKKVIALTLDLSDGLLYWLVQDSQCIHLYTAVLRGQSTGDTTITEFAAWSTSEISQNALMYYSGRLFWINGFRIITTQEIGQKTSVSVLEPARFNQFTIIQTSLKPLPGNFSFTPKVIPDSVQESSFRIEGNASSFQILWNGPPAVDWGVVFYSVEFSAHSKFLASEQHSLPVFTVEGLEPYALFNLSVTPYTYWGKGPKTSLSLRAPETVPSAPENPRIFILPSGKCCNKNEVVVEFRWNKPKHENGVLTKFEIFYNISNQSITNKTCEDWIAVNVTPSVMSFQLEGMSPRCFIAFQVRAFTSKGPGPYADVVKSTTSEINPFPHLITLLGNKIVFLDMDQNQVVWTFSAERVISAVCYTADNEMGYYAEGDSLFLLHLHNRSSSELFQDSLVFDITVITIDWISRHLYFALKESQNGMQVFDVDLEHKVKYPREVKIHNRNSTIISFSVYPLLSRLYWTEVSNFGYQMFYYSIISHTLHRILQPTATNQQNKRNQCSCNVTEFELSGAMAIDTSNLEKPLIYFAKAQEIWAMDLEGCQCWRVITVPAMLAGKTLVSLTVDGDLIYWIITAKDSTQIYQAKKGNGAIVSQVKALRSRHILAYSSVMQPFPDKAFLSLASDTVEPTILNATNTSLTIRLPLAKTNLTWYGITSPTPTYLVYYAEVNDRKNSSDLKYRILEFQDSIALIEDLQPFSTYMIQIAVKNYYSDPLEHLPPGKEIWGKTKNGVPEAVQLINTTVRSDTSLIISWRESHKPNGPKESVRYQLAISHLALIPETPLRQSEFPNGRLTLLVTRLSGGNIYVLKVLACHSEEMWCTESHPVTVEMFNTPEKPYSLVPENTSLQFNWKAPLNVNLIRFWVELQKWKYNEFYHVKTSCSQGPAYVCNITNLQPYTSYNVRVVVVYKTGENSTSLPESFKTKAGVPNKPGIPKLLEGSKNSIQWEKAEDNGCRITYYILEIRD

SEQ ID NO: 886825 - protein, 213 aa, Homo sapiens
MAITQFRLFKFCTCLATVFSFLKRLICRSGRGRKLSGDQITLPTTVDYSSVPKQTDVEEWTSWDEDAPTSVKIEGGNGNVATQQNSLEQLEPDYFKDMTPTIRKTQKIVIKKREPLNFGIPDGSTGFSSRLAATQDLPFIHQSSELGDLDTWQENTNAWEEEEDAAWQAEEVLRQQKLADREKRAAEQQRKKMEKEAQRLMKKEQNKIGVKLS

SEQ ID NO: 886826 - protein, 213 aa, Homo sapiens; identical to SEQ ID NO: 886825

SEQ ID NO: 886827 - protein, 153 aa, Homo sapiens
MAITQFRLFKFCTCLATVFSFLKRLICRSGRGRKLSGDQITLPTTVDYSSVPKQTDVEEWTSWDEDAPTSVKIEGGNGNVATQQNSLEQLEPDYFKDMTPTIRKTQKIVIKKREPLNFGIPDGSTGFSSRLAATQDLPFIHQSTSHWVGATII

SEQ ID NO: 886828 - protein, 213 aa, Homo sapiens; identical to SEQ ID NO: 886825

SEQ ID NO: 886829 - protein, 213 aa, Homo sapiens; identical to SEQ ID NO: 886825

SEQ ID NO: 886830 - protein, 119 aa, Homo sapiens
MVKMTRSKTFQAYLPSCHRTYSCIHCRAHLANHDELISKSFQGSQGRAYLFNSVVNVGCGPAEERVLLTGLHAVADIYCENCKTTLGWKYEHAFESSQKYKEGKYIIELAHMIKDNGWD

SEQ ID NO: 886831 - protein, 111 aa, Homo sapiens
GRGGGGDCGFKSVPGARAPAGPRFAAAHPSGAKPHAGRTGPPVAGLLRTSPRPLREGSSAEDITSVWSLPHPPAAKPRPLPVSSGVSRATHPVGVPRGLPQSSPHTQQHQW

SEQ ID NO: 886832 - protein, 119 aa, Homo sapiens; identical to SEQ ID NO: 886830

SEQ ID NO: 886833 - protein, 126 aa, Homo sapiens
DVTGCALQYRGRKMASATRLIQRLRNWASGHDLQGKLQLRYQEISKRTQPPPKLPVGPSHKLSNNYYCTRDGRRESVPPSIIMSSQKALVSGKPAESSAVAATEKKAVTPAPPIKRWELSSDQPYL

SEQ ID NO: 886834 - protein, 126 aa, Homo sapiens; identical to SEQ ID NO: 886833

SEQ ID NO: 886835 - protein, 126 aa, Homo sapiens
INAEWPLWGGGRKMASATRLIQRLRNWASGHDLQGKLQLRYQEISKRTQPPPKLPVGPSHKLSNNYYCTRDGRRESVPPSIIMSSQKALVSGKPAESSAVAATEKKAVTPAPPIKRWELSSDQPYL

SEQ ID NO: 886836 - protein, 119 aa, Homo sapiens
RRLGSERVGVARLIQRLRNWASGHDLQGKLQLRYQEISKRTQPPPKLPVGPSHKLSNNYYCTRDGRRESVPPSIIMSSQKALVSGKPAESSAVAATEKKAVTPAPPIKRWELSSDQPYL

SEQ ID NO: 886837 - protein, 132 aa, Homo sapiens
  misc_feature (7)..(7): Xaa can be any naturally occurring amino acid
MAWAVEXVREGMAEGYGWRSPRVLIRTVCEVTGRPCHDLQGKLQLRYQEISKRTQPPPKLPVGPSHKLSNNYYCTRDGRRESVPPSIIMSSQKALVSGKPAESSAVAATEKKAVTPAPPIKRWELSSDQPYL

SEQ ID NO: 886838 - protein, 110 aa, Homo sapiens
ARSRPASSNLARSVHDLQGKLQLRYQEISKRTQPPPKLPVGPSHKLSNNYYCTRDGRRESVPPSIIMSSQKALVSGKPAESSAVAATEKKAVTPAPPIKRWELSSDQPYL

SEQ ID NO: 886839 - protein, 98 aa, Homo sapiens
  misc_feature (12)..(12): Xaa can be any naturally occurring amino acid
YYYEIRGRVDYXYQEISKRTQPPPKLPVGPSHKLSNNYYCTRDGRRESVPPSIIMSSQKALVSGKPAESSAVAATEKKAVTPAPPIKRWELSSDQPYL

SEQ ID NO: 886840 - protein, 157 aa, Homo sapiens
MHIRTHSPQMSYTYPCTLHTHHATHIYRHYTIHTYKAHTYTYHNTDTAHIIRPGMHTWAYGHDLQGKLQLRYQEISKRTQPPPKLPVGPSHKLSNNYYCTRDGRRESVPPSIIMSSQKALVSGKPAESSAVAATEKKAVTPAPPIKRWELSSDQPYL

SEQ ID NO: 886841 - protein, 126 aa, Homo sapiens; identical to SEQ ID NO: 886833

SEQ ID NO: 886842 - protein, 126 aa, Homo sapiens; identical to SEQ ID NO: 886833

SEQ ID NO: 886843 - protein, 126 aa, Homo sapiens; identical to SEQ ID NO: 886833

SEQ ID NO: 886844 - protein, 89 aa, Homo sapiens
INAEWPLWGGGRKMASATRLIQRLRNWASGHDLQGKLQLRYQEISKRRNGVSPCWPVWSRTPDLIIRLPRPPKVLGLQNSASSQAPCGS

SEQ ID NO: 886845 - protein, 111 aa, Homo sapiens
MSVGPRSHPGRLHNLALRVKTLRAESYQEISVTQPPPKLPVGPSHKLSNNYYCTRDGRRESVPPSIIMSSQKALVSGKPAESSAVAATEKKAVTPAPPIKRWELSSDQPYL

SEQ ID NO: 886846 - protein, 188 aa, Homo sapiens
MTAPSCAFPVQFRQPSVSGLSQITKSLYISNGVAANNKLMLSSNQITMVINVSVEVVNTLYEDIQYMQVPVADSPNSRLCDFFDPIADHIHSVEMKQGRTLLHCAAGVSRSAALCLAYLMKYHAMSLLDAHTWTKSCRPIIRPNSGFWEQLIHYEFQLFGKNTVHMVSSPVGMIPDIYEKEVRLMIPL

SEQ ID NO: 886847 - protein, 121 aa, Homo sapiens [sequence omitted]

SEQ ID NO: 886848 - protein, 188 aa, Homo sapiens; identical to SEQ ID NO: 886846

SEQ ID NO: 886849 - protein, 188 aa, Homo sapiens; identical to SEQ ID NO: 886846

SEQ ID NO: 886850 - protein, 188 aa, Homo sapiens; identical to SEQ ID NO: 886846

SEQ ID NO: 886851 - protein, 136 aa, Homo sapiens
  misc_feature (3)..(3): Xaa can be any naturally occurring amino acid
  misc_feature (5)..(5): Xaa can be any naturally occurring amino acid
  misc_feature (7)..(7): Xaa can be any naturally occurring amino acid
VEXRXKXQGGWSFLEPEGEGSDAEEGDSESEIEDETFNPSEDDYEEEEEDSDEDYSSEAEESDYSKESLGSEEESGKDWDELEEEARKADRESRYEEEEEQSRSMSRKRKASVHSSGRGSNRGSRHSSAPPKKKRK

SEQ ID NO: 886852 - protein, 1047 aa, Homo sapiens
MAVTLDKDAYYRRVKRLYSNWRKGEDEYANVDAIVVSVGVDEEIVYAKSTALQTWLFGYELTDTIMVFCDDKIIFMASKKKVEFLKQIANTKGNENANGAPAITLLIREKNESNKSSFDKMIEAIKESKNGKKIGVFSKDKFPGEFMKSWNDCLNKEGFDKIDISAVVAYTIAVKEDGELNLMKKAASITSEVFNKFFKERVMEIVDADEKVRHSKLAESVEKAIEEKKYLAGADPSTVEMCYPPIIQSGGNYNLKFSVVSDKNHMHFGAITCAMGIRFKSYCSNLVRTLMVDPSQEVQENYNFLLQLQEELLKELRHGVKICDVYNAVMDVVKKQKPELLNKITKNLGFGMGIEFREGSLVINSKNQYKLKKGMVFSINLGFSDLTNKEGKKPEEKTYALFIGDTVLVDEDGPATVLTSVKKKVKNVGIFLKNEDEEEEEEEKDEAEDLLGRGSRAALLTERTRNEMTAEEKRRAHQKELAAQLNEEAKRRLTEQKGEQQIQKARKSNVSYKNPSLMPKEPHIREMKIYIDKKYETVIMPVFGIATPFHIATIKNISMSVEGDYTYLRINFYCPGSALGRNEGNIFPNPEATFVKEITYRASNIKAPGEQTVPALNLQNAFRIIKEVQKRYKTREAEEKEKEGIVKQDSLVINLNRSNPKLKDLYIRPNIAQKRMQGSLEAHVNGFRFTSVRGDKVDILYNNIKHALFQPCDGEMIIVLHFHLKNAIMFGKKRHTDVQFYTEVGEITTDLGKHQHMHDRDDLYAEQMEREMRHKLKTAFKNFIEKVEALTKEELEFEVPFRDLGFNGAPYRSTCLLQPTSSALVNATEWPPFVVTLDEVELIHFERVQFHLKNFDMVIVYKDYSKKVTMINAIPVASLDPIKEWLNSCDLKYTEGVQSLNWTKIMKTIVDDPEGFFEQGGWSFLEPEGEGSDAEEGDSESEIEDETFNPSEDDYEEEEEDSDEDYSSEAEESDYSKESLGSEEESGKDWDELEEEARKADRESRYEEEEEQSRSMSRKRKASVHSSGRGSNRGSRHSSAPPKKKRK

SEQ ID NO: 886853 - protein, 1047 aa, Homo sapiens; identical to SEQ ID NO: 886852

SEQ ID NO: 886854 - protein, 1047 aa, Homo sapiens; identical to SEQ ID NO: 886852

SEQ ID NO: 886855 - protein, 1024 aa, Homo sapiens
GVQRIPLFSFFMSYQGCDEEDVYAKSTALQTWLFGYELTDTIMVFCDDKIIFMASKKKVEFLKQIANTKGNENANGAPAITLLIREKNESNKSSFDKMIEAIKESKNGKKIGVFSKDKFPGEFMKSWNDCLNKEGFDKIDISAVVAYTIAVKEDGELNLMKKAASITSEVFNKFFKERVMEIVDADEKVRHSKLAESVEKAIEEKKYLAGADPSTVEMCYPPIIQSGGNYNLKFSVVSDKNHMHFGAITCAMGIRFKSYCSNLVRTLMVDPSQEVQENYNFLLQLQEELLKELRHGVKICDVYNAVMDVVKKQKPELLNKITKNLGFGMGIEFREGSLVINSKNQYKLKKGMVFSINLGFSDLTNKEGKKPEEKTYALFIGDTVLVDEDGPATVLTSVKKKVKNVGIFLKNEDEEEEEEEKDEAEDLLGRGSRAALLTERTRNEMTAEEKRRAHQKELAAQLNEEAKRRLTEQKGEQQIQKARKSNVSYKNPSLMPKEPHIREMKIYIDKKYETVIMPVFGIATPFHIATIKNISMSVEGDYTYLRINFYCPGSALGRNEGNIFPNPEATFVKEITYRASNIKAPGEQTVPALNLQNAFRIIKEVQKRYKTREAEEKEKEGIVKQDSLVINLNRSNPKLKDLYIRPNIAQKRMQGSLEAHVNGFRFTSVRGDKVDILYNNIKHALFQPCDGEMIIVLHFHLKNAIMFGKKRHTDVQFYTEVGEITTDLGKHQHMHDRDDLYAEQMEREMRHKLKTAFKNFIEKVEALTKEELEFEVPFRDLGFNGAPYRSTCLLQPTSSALVNATEWPPFVVTLDEVELIHFERVQFHLKNFDMVIVYKDYSKKVTMINAIPVASLDPIKEWLNSCDLKYTEGVQSLNWTKIMKTIVDDPEGFFEQGGWSFLEPEGEGSDAEEGDSESEIEDETFNPSEDDYEEEEEDSDEDYSSEAEESDYSKESLGSEEESGKDWDELEEEARKADRESRYEEEEEQSRSMSRKRKASVHSSGRGSNRGSRHSSAPPKKKRK

SEQ ID NO: 886856 - protein, 173 aa, Homo sapiens
SEARGEKLARYEASCDLKYTEGVQSLNWTKIMKTIVDDPEGFFEQGGWSFLEPEGEGSDAEEGDSESEIEDETFNPSEDDYEEEEEDSDEDYSSEAEESDYSKESLGSEEESGKDWDELEEEARKADRESRYEEEEEQSRSMSRKRKASVHSSGRGSNRGSRHSSAPPKKKRK

SEQ ID NO: 886857 - protein, 1019 aa, Homo sapiens
MAVTLDKDAYYRRVKRLYSNWRKGEDEYANVDAIVVSVGVDEEIVYAKSTALQTWLFGYELTDTIMVFCDDKIIFMASKKKVEFLKQIANTKGNENANGAPAITLLIREKNESNKSSFDKMIEAIKESKNGKKIGVFSKDKFPGEFMKSWNDCLNKEGFDKIDISAVVAYTIAVKEDGELNLMKKAASITSEVFNKFFKERVMEIVDADEKVRHSKLAESVEKAIEEKKYLAGADPSTVEMCYPPIIQSGGNYNLKFSVVSDKNHMHFGAITCAMGIRFKSYCSNLVRTLMVDPSQEVQENYNFLLQLQEELLKELRHGVKICDVYNAVMDVVKKQKPELLNKITKNLGFGMGIEFREGSLVINSKNQYKLKKGMVFSINLGFSDLTNKEGKKPEEKTYALFIGDTVLVDEDGPATVLTSVKKKVKNVGIFLKNEDEEEEEEEKDEAEDLLGRGSRAALLTERTRNEMTAEEKRRAHQKELAAQLNEEAKRRLTEQKGEQQIQKARKSNVSYKNPSLMPKEPHIREMKIYIDKKYETVIMPVFGIATPFHIATIKNISMSVEGDYTYLRINFYCPGSALGRNEGNIFPNPEATFVKEITYRASNIKAPGEQTVPALNLQNAFRIIKEVQKRYKTREAEEKEKEGIVKQDSLVINLNRSNPKLKDLYIRPNIAQKRMQGSLEAHVNGFRFTSVRGDKVDILYNNIKHALFQPCDGEMIIVLHFHLKNAIMFGKKRHTDVQFYTEVGEITTDLGKHQHMHDRDDLYAEQMEREMRHKLKTAFKNFIEKVEALTKEELEFEVPFRDLGFNGAPYRSTCLLQPTSSALVNATEWPPFVVTLDEVELIHFERVQFHLKNFDMVIVYKDYSKKVTMINAIPVASLDPIKEWLNSCDLKYTEGVQSLNWTKIMKTIVDDPEGFFEQGGWSFLEPEGEGSDAEEGDSESEIEDETFNPSEDDYEEEEEDSDEDYSSEAEESDYSKESLGSEEESGKDWDELEEEARKADRESRYEEDAGTGFKKQEL

SEQ ID NO: 886858 - protein, 766 aa, Homo sapiens
MAVTLDKDAYYRRVKRLYSNWRKGEDEYANVDAIVVSVGVDEEIVYAKSTALQTWLFGYELTDTIMVFCDDKIIFMASKKKVEFLKQIANTKGNENANGAPAITLLIREKNESNKSSFDKMIEAIKESKNGKKIGVFSKDKFPGEFMKSWNDCLNKEGFDKIDISAVVAYTIAVKEDGELNLMKKAASITSEVFNKFFKERVMEIVDADEKVRHSKLAESVEKAIEEKKYLAGADPSTVEMCYPPIIQSGGNYNLKFSVVSDKNHMHFGAITCAMGIRFKSYCSNLVRTLMVDPSQEVQENYNFLLQLQEELLKELRHGVKICDVYNAVMDVVKKQKPELLNKITKNLGFGMGIEFREGSLVINSKNQYKLKKGMVFSINLGFSDLTNKEGKKPEEKTYALFIGDTVLVDEDGPATVLTSVKKKVKNVGIFLKNEDEEEEEEEKDEAEDLLGRGSRAALLTERTRNEMTAEEKRRAHQKELAAQLNEEAKRRLTEQKGEQQIQKARKSNVSYKNPSLMPKEPHIREMKIYIDKKYETVIMPVFGIATPFHIATIKNISMSVEGDYTYLRINFYCPGSALGRNEGNIFPNPEATFVKEITYRASNIKAPGEQTVPALNLQNAFRIIKEVQKRYKTREAEEKEKEGIVKQDSLVINLNRSNPKLKDLYIRPNIAQKRMQGSLEAHVNGFRFTSVRGDKVDILYNNIKHALFQPCDGEMIIVLHFHLKKLPPYLSTSFSSLSLRAHSTMFQKPHLHRFSATQNALLLFL

SEQ ID NO: 886859 - protein, 1047 aa, Homo sapiens; identical to SEQ ID NO: 886852

SEQ ID NO: 886860 - protein, 1047 aa, Homo sapiens; identical to SEQ ID NO: 886852

SEQ ID NO: 886861 - protein, 990 aa, Homo sapiens
MAVTLDKDAYYRRVKRLYSNWRKGEDEYANVDAIVVSVGVDEEIVYAKSTALQNESNKSSFDKMIEAIKESKNGKKIGVFSKDKFPGEFMKSWNDCLNKEGFDKIDISAVVAYTIAVKEDGELNLMKKAASITSEVFNKFFKERVMEIVDADEKVRHSKLAESVEKAIEEKKYLAGADPSTVEMCYPPIIQSGGNYNLKFSVVSDKNHMHFGAITCAMGIRFKSYCSNLVRTLMVDPSQEVQENYNFLLQLQEELLKELRHGVKICDVYNAVMDVVKKQKPELLNKITKNLGFGMGIEFREGSLVINSKNQYKLKKGMVFSINLGFSDLTNKEGKKPEEKTYALFIGDTVLVDEDGPATVLTSVKKKVKNVGIFLKNEDEEEEEEEKDEAEDLLGRGSRAALLTERTRNEMTAEEKRRAHQKELAAQLNEEAKRRLTEQKGEQQIQKARKSNVSYKNPSLMPKEPHIREMKIYIDKKYETVIMPVFGIATPFHIATIKNISMSVEGDYTYLRINFYCPGSALGRNEGNIFPNPEATFVKEITYRASNIKAPGEQTVPALNLQNAFRIIKEVQKRYKTREAEEKEKEGIVKQDSLVINLNRSNPKLKDLYIRPNIAQKRMQGSLEAHVNGFRFTSVRGDKVDILYNNIKHALFQPCDGEMIIVLHFHLKNAIMFGKKRHTDVQFYTEVGEITTDLGKHQHMHDRDDLYAEQMEREMRHKLKTAFKNFIEKVEALTKEELEFEVPFRDLGFNGAPYRSTCLLQPTSSALVNATEWPPFVVTLDEVELIHFERVQFHLKNFDMVIVYKDYSKKVTMINAIPVASLDPIKEWLNSCDLKYTEGVQSLNWTKIMKTIVDDPEGFFEQGGWSFLEPEGEGSDAEEGDSESEIEDETFNPSEDDYEEEEEDSDEDYSSEAEESDYSKESLGSEEESGKDWDELEEEARKADRESRYEEEEEQSRSMSRKRKASVHSSGRGSNRGSRHSSAPPKKKRK

SEQ ID NO: 886862 - protein, 633 aa, Homo sapiens
RNEGNIFPNPEDGYGIFLKNEDEEEEEEEKDEAEDLLGRGSRAALLTERTRNEMTAEEKRRAHQKELAAQLNEEAKRRLTEQKGEQQIQKARKSNVSYKNPSLMPKEPHIREMKIYIDKKYETVIMPVFGIATPFHIATIKNISMSVEGDYTYLRINFYCPGSALGRNEGNIFPNPEATFVKEITYRASNIKAPGEQTVPALNLQNAFRIIKEVQKRYKTREAEEKEKEGIVKQDSLVINLNRSNPKLKDLYIRPNIAQKRMQGSLEAHVNGFRFTSVRGDKVDILYNNIKHALFQPCDGEMIIVLHFHLKNAIMFGKKRHTDVQFYTEVGEITTDLGKHQHMHDRDDLYAEQMEREMRHKLKTAFKNFIEKVEALTKEELEFEVPFRDLGFNGAPYRSTCLLQPTSSALVNATEWPPFVVTLDEVELIHFERVQFHLKNFDMVIVYKDYSKKVTMINAIPVASLDPIKEWLNSCDLKYTEGVQSLNWTKIMKTIVDDPEGFFEQGGWSFLEPEGEGSDAEEGDSESEIEDETFNPSEDDYEEEEEDSDEDYSSEAEESDYSKESLGSEEESGKDWDELEEEARKADRESRYEEEEEQSRSMSRKRKASVHSSGRGSNRGSRHSSAPPKKKRK

SEQ ID NO: 886863 - protein, 191 aa, Homo sapiens
MVIVYKDYSKKVTMINAIPVASLDPIKEWLNSCDLKYTEGVQSLNWTKIMKTIVDDPEGFFEQGGWSFLEPEGEGSDAEEGDSESEIEDETFNPSEDDYEEEEEDSDEDYSSEAEESDYSKESLGSEEESGKDWDELEEEARKADRESRYEEEEEQSRSMSRKRKASVHSSGRGSNRGSRHSSAPPKKKRK

SEQ ID NO: 886864 - protein, 408 aa, Homo sapiens
MAVTLDKDAYYRRVKRLYSNWRKGEDEYANVDAIVVSVGVDEEIVYAKSTALQTWLFGYELTDTIMVFCDDKIIFMASKKKVEFLKQIANTKGNENANGAPAITLLIREKNESNKSSFDKMIEAIKESKNGKKIGVFSKDKFPGEFMKSWNDCLNKEGFDKIDISAVVAYTIAVKEDGELNLMKKAASITSEVFNKFFKERVMEIVDADEKVRHSKLAESVEKAIEEKKYLAGADPSTVEMCYPPIIQSGGNYNLKFSVVSDKNHMHFGAITCAMGIRFKSYCSNLVRTLMVDPSQEVQENYNFLLQLQEELLKELRHGVKICDVYNAVMDVVKKQKPELLNKITKNLGFGMGIEFREGSLVINSKNQYKLKKDGSASLRISRLITEGTGEENYAVHWHIVVMPLVSL

SEQ ID NO: 886865 - protein, 4302 aa, Homo sapiens
MPPAAPARLALALGLGLWLGALAGGPGRGCGPCEPPCLCGPAPGAACRVNCSGRGLRTLGPALRIPADATALDVSHNLLRALDVGLLANLSALAELDISNNKISTLEEGIFANLFNLSEINLSGNPFECDCGLAWLPRWAEEQQVRVVQPEAATCAGPGSLAGQPLLGIPLLDSGCGEEYVACLPDNSSGTVAAVSFSAAHEGLLQPEACSAFCFSTGQGLAALSEQGWCLCGAAQPSSASFACLSLCSGPPPPPAPTCRGPTLLQHVFPASPGATLVGPHGPLASGQLAAFHIAAPLPVTATRWDFGDGSAEVDAAGPAASHRYVLPGRYHVTAVLALGAGSALLGTDVQVEAAPAALELVCPSSVQSDESLDLSIQNRGGSGLEAAYSIVALGEEPARAVHPLCPSDTEIFPGNGHCYRLVVEKAAWLQAQEQCQAWAGAALAMVDSPAVQRFLVSRVTRSLDVWIGFSTVQGVEVGPAPQGEAFSLESCQNWLPGEPHPATAEHCVRLGPTGWCNTDLCSAPHSYVCELQPGGPVQDAENLLVGAPSGDLQGPLTPLAQQDGLSAPHEPVEVMVFPGLRLSREAFLTTAEFGTQELRRPAQLRLQVYRLLSTAGTPENGSEPESRSPDNRTQLAPACMPGGRWCPGANICLPLDASCHPQACANGCTSGPGLPGAPYALWREFLFSVPAGPPAQYSVTLHGQDVLMLPGDLVGLQHDAGPGALLHCSPAPGHPGPRAPYLSANASSWLPHLPAQLEGTWACPACALRLLAATEQLTVLLGLRPNPGLRLPGRYEVRAEVGNGVSRHNLSCSFDVVSPVAGLRVIYPAPRDGRLYVPTNGSALVLQVDSGANATATARWPGGSVSARFENVCPALVATFVPGCPWETNDTLFSVVALPWLSEGEHVVDVVVENSASRANLSLRVTAEEPICGLRATPSPEARVLQGVLVRYSPVVEAGSDMVFRWTINDKQSLTFQNVVFNVIYQSAAVFKLSLTASNHVSNVTVNYNVTVERMNRMQGLQVSTVPAVLSPNATLALTAGVLVDSAVEVAFLWTFGDGEQALHQFQPPYNESFPVPDPSVAQVLVEHNVMHTYAAPGEYLLTVLASNAFENLTQQVPVSVRASLPSVAVGVSDGVLVAGRPVTFYPHPLPSPGGVLYTWDFGDGSPVLTQSQPAANHTYASRGTYHVRLEVNNTVSGAAAQADVRVFEELRGLSVDMSLAVEQGAPVVVSAAVQTGDNITWTFDMGDGTVLSGPEATVEHVYLRAQNCTVTVGAASPAGHLARSLHVLVFVLEVLRVEPAACIPTQPDARLTAYVTGNPAHYLFDWTFGDGSSNTTVRGCPTVTHNFTRSGTFPLALVLSSRVNRAHYFTSICVEPEVGNVTLQPERQFVQLGDEAWLVACAWPPFPYRYTWDFGTEEAAPTRARGPEVTFIYRDPGSYLVTVTASNNISAANDSALVEVQEPVLVTSIKVNGSLGLELQQPYLFSAVGRGRPASYLWDLGDGGWLEGPEVTHAYNSTGDFTVRVAGWNEVSRSEAWLNVTVKRRVRGLVVNASRTVVPLNGSVSFSTSLEAGSDVRYSWVLCDRCTPIPGGPTISYTFRSVGTFNIIVTAENEVGSAQDSIFVYVLQLIEGLQVVGGGRYFPTNHTVQLQAVVRDGTNVSYSWTAWRDRGPALAGSGKGFSLTVLEAGTYHVQLRATNMLGSAWADCTMDFVEPVGWLMVAASPNPAAVNTSVTLSAELAGGSGVVYTWSLEEGLSWETSEPFTTHSFPTPGLHLVTMTAGNPLGSANATVEVDVQVPVSGLSIRASEPGGSFVAAGSSVPFWGQLATGTNVSWCWAVPGGSSKRGPHVTMVFPDAGTFSIRLNASNAVSWVSATYNLTAEEPIVGLVLWASSKVVAPGQLVHFQILLAAGSAVTFRLQVGGANPEVLPGPRFSHSFPRVGDHVVSVRGKNHVSWAQAQVRIVVLEAVSGLQVPNCCEPGIATGTERNFTARVQRGSRVAYAWYFSLQKVQGDSLVILSGRDVTYTPVAAGLLEIQVRAFNALGSENRTLVLEVQDAVQYVALQSGPCFTNRSAQFEAATSPSPRRVAYHWDFGDGSPGQDTDEPRAEHSYLRPGDYRVQVNASNLVSFFVAQATVTVQVLACREPEVDVVLPLQVLMRRSQRNYLEAHVDLRDCVTYQTEYRWEVYRTASCQRPGRPARVALPGVDVSRPRLVLPRLALPVGHYCFVFVVSFGDTPLTQSIQANVTVAPERLVPIIEGGSYRVWSDTRDLVLDGSESYDPNLEDGDQTPLSFHWACVASTQREAGGCALNFGPRGSSTVTIPRERLAAGVEYTFSLTVWKAGRKEEATNQTVLIRSGRVPIVSLECVSCKAQAVYEVSRSSYVYLEGRCLNCSSGSKRGRWAARTFSNKTLVLDETTTSTGSAGMRLVLRRGVLRDGEGYTFTLTVLGRSGEEEGCASIRLSPNRPPLGGSCRLFPLGAVHALTTKVHFECTGWHDAEDAGAPLVYALLLRRCRQGHCEEFCVYKGSLSSYGAVLPPGFRPHFEVGLAVVVQDQLGAAVVALNRSLAITLPEPNGSATGLTVWLHGLTASVLPGLLRQADPQHVIEYSLALVTVLNEYERALDVAAEPKHERQHRAQIRKNITETLVSLRVHTVDDIQQIAAALAQCMGPSRELVCRSCLKQTLHKLEAMMLILQAETTAGTVTPTAIGDSILNITGDLIHLASSDVRAPQPSELGAESPSRMVASQAYNLTSALMRILMRSRVLNEEPLTLAGEEIVAQGKRSDPRSLLCYGGAPGPGCHFSIPEAFSGALANLSDVVQLIFLVDSNPFPFGYISNYTVSTKVASMAFQTQAGAQIPIERLASERAITVKVPNNSDWAARGHRSSANSANSVVVQPQASVGAVVTLDSSNPAAGLHLQLNYTLLDGHYLSEEPEPYLAVYLHSEPRPNEHNCSASRRIRPESLQGADHRPYTFFISPGSRDPAGSYHLNLSSHFRWSALQVSVGLYTSLCQYFSEEDMVWRTEGLLPLEETSPRQAVCLTRHLTAFGASLFVPPSHVRFVFPEPTADVNYIVMLTCAVCLVTYMVMAAILHKLDQLDASRGRAIPFCGQRGRFKYEILVKTGWGRGSGTTAHVGIMLYGVDSRSGHRHLDGDRAFHRNSLDIFRIATPHSLGSVWKIRVWHDNKGLSPAWFLQHVIVRDLQTARSAFFLVNDWLSVETEANGGLVEKEVLAASDAALLRFRRLLVAELQRGFFDKHIWLSIWDRPPRSRFTRIQRATCCVLLICLFLGANAVWYGAVGDSAYSTGHVSRLSPLSVDTVAVGLVSSVVVYPVYLAILFLFRMSRSKVAGSPSPTPAGQQVLDIDSCLDSSVLDSSFLTFSGLHAEAFVGQMKSDLFLDDSKSLVCWPSGEGTLSWPDLLSDPSIVGSNLRQLARGQAGHGLGPEEDGFSLASPYSPAKSFSASDEDLIQQVLAEGVSSPAPTQDTHMETDLLSSLSSTPGEKTETLALQRLGELGPPSPGLNWEQPQAARLSRTGLVEGLRKRLLPAWCASLAHGLSLLLVAVAVAVSGWVGASFPPGVSVAWLLSSSASFLASFLGWEPLKVLLEALYFSLVAKRLHPDEDDTLVESPAVTPVSARVPRVRPPHGFALFLAKEEARKVKRLHGMLRSLLVYMLFLLVTLLASYGDASCHGHAYRLQSAIKQELHSRAFLAITRSEELWPWMAHVLLPYVHGNQSSPELGPPRLRQVRLQEALYPDPPGPRVHTCSAAGGFSTSDYDVGWESPHNGSGTWAYSAPDLLGAWSWGSCAVYDSGGYVQELGLSLEESRDRLRFLQLHNWLDNRSRAVFLELTRYSPAVGLHAAVTLRLEFPAAGRALAALSVRPFALRRLSAGLSLPLLTSVCLLLFAVHFAVAEARTWHREGRWRVLRLGAWARWLLVALTAATALVRLAQLGAADRQWTRFVRGRPRRFTSFDQVAQLSSAARGLAASLLFLLLVKAAQQLRFVRQWSVFGKTLCRALPELLGVTLGLVVLGVAYAQLAILLVSSCVDSLWSVAQALLVLCPGTGLSTLCPAESWHLSPLLCVGLWALRLWGALRLGAVILRWRYHALRGELYRPAWEPQDYEMVELFLRRLRLWMGLSKVKEFRHKVRFEGMEPLPSRSSRGSKVSPDVPPPSAGSDASHPSTSSSQLDGLSVSLGRLGTRCEPEPSRLQAVFEALLTQFDRLNQATEDVYQLEQQLHSLQGRRSSRAPAGSSRGPSPGLRPALPSRLARASRGVDLATGPSRTPLRAKNKVHPSST

SEQ ID NO: 886866 - protein, 4302 aa, Homo sapiens; identical to SEQ ID NO: 886865

SEQ ID NO: 886867 - protein, 4351 aa, Homo sapiens
MPPAAPARLALALGLGLWLGALAGGPGRGCGPCEPPCLCGPAPGAACRVNCSGRGLRTLGPALRIPADATALDVSHNLLRALDVGLLANLSALAELDISNNKISTLEEGIFANLFNLSEINLSGNPFECDCGLAWLPRWAEEQQVRVVQPEAATCAGPGSLAGQPLLGIPLLDSGCGEEYVACLPDNSSGTVAAVSFSAAHEGLLQPEACSAFCFSTGQGLAALSEQGWCLCGAAQPSSASFACLSLCSGPPPPPAPTCRGPTLLQHVFPASPGATLVGPHGPLASGQLAAFHIAAPLPVTATRWDFGDGSAEVDAAGPAASHRYVLPGRYHVTAVLALGAGSALLGTDVQVEAAPAALELVCPSSVQSDESLDLSIQNRGGSGLEAAYSIVALGEEPARAVHPLCPSDTEIFPGNGHCYRLVVEKAAWLQAQEQCQAWAGAALAMVDSPAVQRFLVSRVTRSLDVWIGFSTVQGVEVGPAPQGEAFSLESCQNWLPGEPHPATAEHCVRLGPTGWCNTDLCSAPHSYVCELQPGGPVQDAENLLVGAPSGDLQGPLTPLAQQDGLSAPHEPVEVMVFPGLRLSREAFLTTAEFGTQELRRPAQLRLQVYRLLSTAGTPENGSEPESRSPDNRTQLAPACMPGGRWCPGANICLPLDASCHPQACANGCTSGPGLPGAPYALWREFLFSVPAGPPAQYSVTLHGQDVLMLPGDLVGLQHDAGPGALLHCSPAPGHPGPRAPYLSANASSWLPHLPAQLEGTWACPACALRLLAATEQLTVLLGLRPNPGLRLPGRYEVRAEVGNGVSRHNLSCSFDVVSPVAGLRVIYPAPRDGRLYVPTNGSALVLQVDSGANATATARWPGGSVSARFENVCPALVATFVPGCPWETNDTLFSVVALPWLSEGEHVVDVVVENSASRANLSLRVTAEEPICGLRATPSPEARVLQGVLVRYSPVVEAGSDMVFRWTINDKQSLTFQNVVFNVIYQSAAVFKLSLTASNHVSNVTVNYNVTVERMNRMQGLQVSTVPAVLSPNATLALTAGVLVDSAVEVAFLWTFGDGEQALHQFQPPYNESFPVPDPSVAQVLVEHNVMHTYAAPGEYLLTVLASNAFENLTQQVPVSVRASLPSVAVGVSDGVLVAGRPVTFYPHPLPSPGGVLYTWDFGDGSPVLTQSQPAANHTYASRGTYHVRLEVNNTVSGAAAQADVRVFEELRGLSVDMSLAVEQGAPVVVSAAVQTGDNITWTFDMGDGTVLSGPEATVEHVYLRAQNCTVTVGAASPAGHLARSLHVLVFVLEVLRVEPAACIPTQPDARLTAYVTGNPAHYLFDWTFGDGSSNTTVRGCPTVTHNFTRSGTFPLALVLSSRVNRAHYFTSICVEPEVGNVTLQPERQFVQLGDEAWLVACAWPPFPYRYTWDFGTEEAAPTRARGPEVTFIYRDPGSYLVTVTASNNISAANDSALVEVQEPVLVTSIKVNGSLGLELQQPYLFSAVGRGRPASYLWDLGDGGWLEGPEVTHAYNSTGDFTVRVAGWNEVSRSEAWLNVTVKRRVRGLVVNASRTVVPLNGSVSFSTSLEAGSDVRYSWVLCDRCTPIPGGPTISYTFRSVGTFNIIVTAENEVGSAQDSIFVYVLQLIEGLQVVGGGRYFPTNHTVQLQAVVRDGTNVSYSWTAWRDRGPALAGSGKGFSLTVLEAGTYHVQLRATNMLGSAWADCTMDFVEPVGWLMVAASPNPAAVNTSVTLSAELAGGSGVVYTWSLEEGLSWETSEPFTTHSFPTPGLHLVTMTAGNPLGSANATVEVDVQVPVSGLSIRASEPGGSFVAAGSSVPFWGQLATGTNVSWCWAVPGGSSKRGPHVTMVFPDAGTFSIRLNASNAVSWVSATYNLTAEEPIVGLVLWASSKVVAPGQLVHFQILLAAGSAVTFRLQVGGANPEVLPGPRFSHSFPRVGDHVVSVRGKNHVSWAQAQVRIVVLEAVSGLQVPNCCEPGIATGTERNFTARVQRGSRVAYAWYFSLQKVQGDSLVILSGRDVTYTPVAAGLLEIQVRAFNALGSENRTLVLEVQDAVQYVALQSGPCFTNRSAQFEAATSPSPRRVAYHWDFGDGSPGQDTDEPRAEHSYLRPGDYRVQVNASNLVSFFVAQATVTVQVLACREPEVDVVLPLQVLMRRSQRNYLEAHVDLRDCVTYQTEYRWEVYRTASCQRPGRPARVALPGVDVSRPRLVLPRLALPVGHYCFVFVVSFGDTPLTQSIQANVTVAPERLVPIIEGGSYRVWSDTRDLVLDGSESYDPNLEDGDQTPLSFHWACVASTQREAGGCALNFGPRGSSTVTIPRERLAAGVEYTFSLTVWKAGRKEEATNQTVLIRSGRVPIVSLECVSCKAQAVYEVSRSSYVYLEGRCLNCSSGSKRGRWAARTFSNKTLVLDETTTSTGSAGMRLVLRRGVLRDGEGYTFTLTVLGRSGEEEGCASIRLSPNRPPLGGSCRLFPLGAVHALTTKVHFECTGWHDAEDAGAPLVYALLLRRCRQGHCEEFCVYKGSLSSYGAVLPPGFRPHFEVGLAVVVQDQLGAAVVALNRSLAITLPEPNGSATGLTVWLHGLTASVLPGLLRQADPQHVIEYSLALVTVLNEYERALDVAAEPKHERQHRAQIRKNITETLVSLRVHTVDDIQQIAAALAQCMGPSRELVCRSCLKQTLHKLEAMMLILQAETTAGTVTPTAIGDSILNITGDLIHLASSDVRAPQPSELGAESPSRMVASQAYNLTSALMRILMRSRVLNEEPLTLAGEEIVAQGKRSDPRSLLCYGGAPGPGCHFSIPEAFSGALANLSDVVQLIFLVDSNPFPFGYISNYTVSTKVASMAFQTQAGAQIPIERLASERAITVKVPNNSDWAARGHRSSANSANSVVVQPQASVGAVVTLDSSNPAAGLHLQLNYTLLDGHYLSEEPEPYLAVYLHSEPRPNEHNCSASRRIRPESLQGADHRPYTFFISPGSRDPAGSYHLNLSSHFRWSALQVSVGLYTSLCQYFSEEDMVWRTEGLLPLEETSPRQAVCLTRHLTAFGASLFVPPSHVRFVFPEPTADVNYIVMLTCAVCLVTYMVMAAILHKLDQLDASRGRAIPFCGQRGRFKYEILVKTGWGRGSGTTAHVGIMLYGVDSRSGHRHLDGDRAFHRNSLDIFRIATPHSLGSVWKIRVWHDNKGLSPAWFLQHVIVRDLQTARSAFFLVNDWLSVETEANGGLVEKEVLAASDAALLRFRRLLVAELQRGFFDKHIWLSIWDRPPRSRFTRIQRATCCVLLICLFLGANAVWYGAVGDSAYSTGHVSRLSPLSVDTVAVGLVSSVVVYPVYLAILFLFRMSRSKVAGSPSPTPAGQQVLDIDSCLDSSVLDSSFLTFSGLHAEAFVGQMKSDLFLDDSKSLVCWPSGEGTLSWPDLLSDPSIVGSNLRQLARGQAGHGLGPEEDGFSLASPYSPAKSFSASDEDLIQQVLAEGVSSPAPTQDTHMETDLLSSLSSTPGEKTETLALQRLGELGPPSPGLNWEQPQAARLSRTGLVEGLRKRLLPAWCASLAHGLSLLLVAVAVAVSGWVGASFPPGVSVAWLLSSSASFLASFLGWEPLKVLLEALYFSLVAKRLHPDEDDTLVESPAVTPVSARVPRVRPPHGFALFLAKEEARKVKRLHGMLRSLLVYMLFLLVTLLASYGDASCHGHAYRLQSAIKQELHSRAFLAITRSEELWPWMAHVLLPYVHGNQSSPELGPPRLRQVRLQEALYPDPPGPRVHTCSAAGGFSTSDYDVGWESPHNGSGTWAYSAPDLLGAWSWGSCAVYDSGGYVQELGLSLEESRDRLRFLQLHNWLDNRSRAVFLELTRYSPAVGLHAAVTLRLEFPAAGRALAALSVRPFALRRLSAGLSLPLLTSVRPSPARPRASHRQRPAPSRGPAPAASHPSQRPAPSQPSLPPSCPRPPQVCLLLFAVHFAVAEARTWHREGRWRVLRLGAWARWLLVALTAATALVRLAQLGAADRQWTRFVRGRPRRFTSFDQVAQLSSAARGLAASLLFLLLVKAAQQLRFVRQWSVFGKTLCRALPELLGVTLGLVVLGVAYAQLAILLVSSCVDSLWSVAQALLVLCPGTGLSTLCPAESWHLSPLLCVGLWALRLWGALRLGAVILRWRYHALRGELYRPAWEPQDYEMVELFLRRLRLWMGLSKVKEFRHKVRFEGMEPLPSRSSRGSKVSPDVPPPSAGSDASHPSTSSSQLDGLSVSLGRLGTRCEPEPSRLQAVFEALLTQFDRLNQATEDVYQLEQQLHSLQGRRSSRAPAGSSRGPSPGLRPALPSRLARASRGVDLATGPSRTPLRAKNKVHPSST

SEQ ID NO: 886868 - protein, 4302 aa, Homo sapiens; identical to SEQ ID NO: 886865

SEQ ID NO: 886869 - protein, 94 aa, Homo sapiens
FARKPRVSVRDWTGVGCVCDTSPGTLLTRATCSLVCWPSGEGTLSWPDLLSDPSIVGSNLRQLARGQAGHGLGPEEDGFSLASPYSPAKSFSAS

SEQ ID NO: 886870 - protein, 99 aa, Homo sapiens
MACRAPGTSSPLCPAWDSPARREVCPGGDRLRAESSTEPRLTPFPPQRYSPVVEAGSDMVFRWTINDKQSLTFQNVVFNVIYQSAAVFKLSVGGRGWGG

SEQ ID NO: 886871 - protein, 4285 aa, Homo sapiens
MPPAAPARLALALGLGLWLGALAGGPGRGCGPCEPPCLCGPAPGAACRVNCSGRGLRTLGPALRIPADATALDVSHNLLRALDVGLLANLSALAELDISNNKISTLEEGIFANLFNLSEINLSGNPFECDCGLAWLPRWAEEQQVRVVQPEAATCAGPGSLAGQPLLGIPLLDSGCGEEYVACLPDNSSGTVAAVSFSAAHEGLLQPEACSAFCFSTGQGLAALSEQGWCLCGAAQPSSASFACLSLCSGPPPPPAPTCRGPTLLQHVFPASPGATLVGPHGPLASGQLAAFHIAAPLPVTATRWDFGDGSAEVDAAGPAASHRYVLPGRYHVTAVLALGAGSALLGTDVQVEAAPAALELVCPSSVQSDESLDLSIQNRGGSGLEAAYSIVALGEEPARAVHPLCPSDTEIFPGNGHCYRLVVEKAAWLQAQEQCQAWAGAALAMVDSPAVQRFLVSRVTRSLDVWIGFSTVQGVEVGPAPQGEAFSLESCQNWLPGEPHPATAEHCVRLGPTGWCNTDLCSAPHSYVCELQPGGPVQDAENLLVGAPSGDLQGPLTPLAQQDGLSAPHEPVEVMVFPGLRLSREAFLTTAEFGTQELRRPAQLRLQVYRLLSTAGTPENGSEPESRSPDNRTQLAPACMPGGRWCPGANICLPLDASCHPQACANGCTSGPGLPGAPYALWREFLFSVPAGPPAQYSVTLHGQDVLMLPGDLVGLQHDAGPGALLHCSPAPGHPGPRAPYLSANASSWLPHLPAQLEGTWACPACALRLLAATEQLTVLLGLRPNPGLRLPGRYEVRAEVGNGVSRHNLSCSFDVVSPVAGLRVIYPAPRDGRLYVPTNGSALVLQVDSGANATATARWPGGSVSARFENVCPALVATFVPGCPWETNDTLFSVVALPWLSEGEHVVDVVVENSASRANLSLRVTAEEPICGLRATPSPEARVLQGVLVRYSPVVEAGSDMVFRWTINDKQSLTFQNVVFNVIYQSAAVFKLSLTASNHVSNVTVNYNVTVERMNRMQGLQVSTVPAVLSPNATLALTAGVLVDSAVEVAFLWTFGDGEQALHQFQPPYNESFPVPDPSVAQVLVEHNVMHTYAAPGEYLLTVLASNAFENLTQQVPVSVRASLPSVAVGVSDGVLVAGRPVTFYPHPLPSPGGVLYTWDFGDGSPVLTQSQPAANHTYASRGTYHVRLEVNNTVSGAAAQADVRVFEELRGLSVDMSLAVEQGAPVVVSAAVQTGDNITWTFDMGDGTVLSGPEATVEHVYLRAQNCTVTVGAASPAGHLARSLHVLVFVLEVLRVEPAACIPTQPDARLTAYVTGNPAHYLFDWTFGDGSSNTTVRGCPTVTHNFTRSGTFPLALVLSSRVNRAHYFTSICVEPEVGNVTLQPERQFVQLGDEAWLVACAWPPFPYRYTWDFGTEEAAPTRARGPEVTFIYRDPGSYLVTVTASNNISAANDSALVEVQEPVLVTSIKVNGSLGLELQQPYLFSAVGRGRPASYLWDLGDGGWLEGPEVTHAYNSTGDFTVRVAGWNEVSRSEAWLNVTVKRRVRGLVVNASRTVVPLNGSVSFSTSLEAGSDVRYSWVLCDRCTPIPGGPTISYTFRSVGTFNIIVTAENEVGSAQDSIFVYVLQLIEGLQVVGGGRYFPTNHTVQLQAVVRDGTNVSYSWTAWRDRGPALAGSGKGFSLTVLEAGTYHVQLRATNMLGSAWADCTMDFVEPVGWLMVAASPNPAAVNTSVTLSAELAGGSGVVYTWSLEEGLSWETSEPFTTHSFPTPGLHLVTMTAGNPLGSANATVEVDVQVPVSGLSIRASEPGGSFVAAGSSVPFWGQLATGTNVSWCWAVPGGSSKRGPHVTMVFPDAGTFSIRLNASNAVSWVSATYNLTAEEPIVGLVLWASSKVVAPGQLVHFQILLAAGSAVTFRLQVGGANPEVLPGPRFSHSFPRVGDHVVSVRGKNHVSWAQAQVRIVVLEAVSGLQVPNCCEPGIATGTERNFTARVQRGSRVAYAWYFSLQKVQGDSLVILSGRDVTYTPVAAGLLEIQVRAFNALGSENRTLVLEVQDAVQYVALQSGPCFTNRSAQFEAATSPSPRRVAYHWDFGDGSPGQDTDEPRAEHSYLRPGDYRVQVNASNLVSFFVAQATVTVQVLACREPEVDVVLPLQVLMRRSQRNYLEAHVDLRDCVTYQTEYRWEVYRTASCQRPGRPARVALPGVDVSRPRLVLPRLALPVGHYCFVFVVSFGDTPLTQSIQANVTVAPERLVPIIEGGSYRVWSDTRDLVLDGSESYDPNLEDGDQTPLSFHWACVASTQREAGGCALNFGPRGSSTVTIPRERLAAGVEYTFSLTVWKAGRKEEATNQTVLIRSGRVPIVSLECVSCKAQAVYEVSRSSYVYLEGRCLNCSSGSKRGRWAARTFSNKTLVLDETTTSTGSAGMRLVLRRGVLRDGEGYTFTLTVLGRSGEEEGCASIRLSPNRPPLGGSCRLFPLGAVHALTTKVHFECTGWHDAEDAGAPLVYALLLRRCRQGHCEEFCVYKGSLSSYGAVLPPGFRPHFEVGLAVVVQDQLGAAVVALNRSLAITLPEPNGSATGLTVWLHGLTASVLPGLLRQADPQHVIEYSLALVTVLNEYERALDVAAEPKHERQHRAQIRKNITETLVSLRVHTVDDIQQIAAALAQCMGPSRELVCRSCLKQTLHKLEAMMLILQAETTAGTVTPTAIGDSILNITGDLIHLASSDVRAPQPSELGAESPSRMVASQAYNLTSALMRILMRSRVLNEEPLTLAGEEIVAQGKRSDPRSLLCYGGAPGPGCHFSIPEAFSGALANLSDVVQLIFLVDSNPFPFGYISNYTVSTKVASMAFQTQAGAQIPIERLASERAITVKVPNNSDWAARGHRSSANSANSVVVQPQASVGAVVTLDSSNPAAGLHLQLNYTLLDGHYLSEEPEPYLAVYLHSEPRPNEHNCSASRRIRPESLQGADHRPYTFFISPGSRDPAGSYHLNLSSHFRWSALQVSVGLYTSLCQYFSEEDMVWRTEGLLPLEETSPRQAVCLTRHLTAFGASLFVPPSHVRFVFPEPTADVNYIVMLTCAVCLVTYMVMAAILHKLDQLDASRGRAIPFCGQRGRFKYEILVKTGWGRGSGTTAHVGIMLYGVDSRSGHRHLDGDRAFHRNSLDIFRIATPHSLGSVWKIRVWHDNKGLSPAWFLQHVIVRDLQTARSAFFLVNDWLSVETEANGGLVEKEVLAASDAALLRFRRLLVAELQRGFFDKHIWLSIWDRPPRSRFTRIQRATCCVLLICLFLGANAVWYGAVGDSAYSTGHVSRLSPLSVDTVAVGLVSSVVVYPVYLAILFLFRMSRSKVAGSPSPTPAGQQVLDIDSCLDSSVLDSSFLTFSGLHAEAFVGQMKSDLFLDDSKSLVCWPSGEGTLSWPDLLSDPSIVGSNLRQLARGQAGHGLGPEEDGFSLASPYSPAKSFSASDEDLIQQVLAEGVSSPAPTQDTHMETDLLSSLSSTPGEKTETLALQRLGELGPPSPGLNWEQPQAARLSRTGLVEGLRKRLLPAWCASLAHGLSLLLVAVAVAVSGWVGASFPPGVSVAWLLSSSASFLASFLGWEPLKVLLEALYFSLVAKRLHPDEDDTLVESPAVTPVSARVPRVRPPHGFALFLAKEEARKVKRLHGMLRSLLVYMLFLLVTLLASYGDASCHGHAYRLQSAIKQELHSRAFLAITRSEELWPWMAHVLLPYVHGNQSSPELGPPRLRQVRLQEALYSRPSRPQGPHVLGRRRLQHQRLRRWLGESSQWLGDVGLFSAGSAGELGLSLEESRDRLRFLQLHNWLDNRSRAVFLELTRYSPAVGLHAAVTLRLEFPAAGRALAALSVRPFALRRLSAGLSLPLLTSVCLLLFAVHFAVAEARTWHREGRWRVLRLGAWARWLLVALTAATALVRLAQLGAADRQWTRFVRGRPRRFTSFDQVAQLSSAARGLAASLLFLLLVKAAQQLRFVRQWSVFGKTLCRALPELLGVTLGLVVLGVAYAQLAILLVSSCVDSLWSVAQALLVLCPGTGLSTLCPAESWHLSPLLCVGLWALRLWGALRLGAVILRWRYHALRGELYRPAWEPQDYEMVELFLRRLRLWMGLSKVKEFRHKVRFEGMEPLPSRSSRGSKVSPDVPPPSAGSDASHPSTSSSQLDGLSVSLGRLGTRCEPEPSRLQAVFEALLTQFDRLNQATEDVYQLEQQLHSLQGRRSSRAPAGSSRGPSPGLRPALPSRLARASRGVDLATGPSRTPLRAKNKVHPSST

SEQ ID NO: 886872 - protein, 3734 aa, Homo sapiens
MPPAAPARLALALGLGLWLGALAGGPGRGCGPCEPPCLCGPAPGAACRVNCSGRGLRTLGPALRIPADATALDVSHNLLRALDVGLLANLSALAELDISNNKISTLEEGIFANLFNLSEINLSGNPFECDCGLAWLPRWAEEQQVRVVQPEAATCAGPGSLAGQPLLGIPLLDSGCGEEYVACLPDNSSGTVAAVSFSAAHEGLLQPEACSAFCFSTGQGLAALSEQGWCLCGAAQPSSASFACLSLCSGPPPPPAPTCRGPTLLQHVFPASPGATLVGPHGPLASGQLAAFHIAAPLPVTATRWDFGDGSAEVDAAGPAASHRYVLPGRYHVTAVLALGAGSALLGTDVQVEAAPAALELVCPSSVQSDESLDLSIQNRGGSGLEAAYSIVALGEEPARAVHPLCPSDTEIFPGNGHCYRLVVEKAAWLQAQEQCQAWAGAALAMVDSPAVQRFLVSRVTRSLDVWIGFSTVQGVEVGPAPQGEAFSLESCQNWLPGEPHPATAEHCVRLGPTGWCNTDLCSAPHSYVCELQPGGPVQDAENLLVGAPSGDLQGPLTPLAQQDGLSAPHEPVEVMVFPGLRLSREAFLTTAEFGTQELRRPAQLRLQVYRLLSTAGTPENGSEPESRSPDNRTQLAPACMPGGRWCPGANICLPLDASCHPQACANGCTSGPGLPGAPYALWREFLFSVPAGPPAQYSVTLHGQDVLMLPGDLVGLQHDAGPGALLHCSPAPGHPGPRAPYLSANASSWLPHLPAQLEGTWACPACALRLLAATEQLTVLLGLRPNPGLRLPGRYEVRAEVGNGVSRHNLSCSFDVVSPVAGLRVIYPAPRDGRLYVPTNGSALVLQVDSGANATATARWPGGSVSARFENVCPALVATFVPGCPWETNDTLFSVVALPWLSEGEHVVDVVVENSASRANLSLRVTAEEPICGLRATPSPEARVLQGVLVRYSPVVEAGSDMVFRWTINDKQSLTFQNVVFNVIYQSAAVFKLSLTASNHVSNVTVNYNVTVERMNRMQGLQVSTVPAVLSPNATLALTAGVLVDSAVEVAFLWTFGDGEQALHQFQPPYNESFPVPDPSVAQVLVEHNVMHTYAAPGEYLLTVLASNAFENLTQQVPVSVRASLPSVAVGVSDGVLVAGRPVTFYPHPLPSPGGVLYTWDFGDGSPVLTQSQPAANHTYASRGTYHVRLEVNNTVSGAAAQADVRVFEELRGLSVDMSLAVEQGAPVVVSAAVQTGDNITWTFDMGDGTVLSGPEATVEHVYLRAQNCTVTVGAASPAGHLARSLHVLVFVLEVLRVEPAACIPTQPDARLTAYVTGNPAHYLFDWTFGDGSSNTTVRGCPTVTHNFTRSGTFPLALVLSSRVNRAHYFTSICVEPEVGNVTLQPERQFVQLGDEAWLVACAWPPFPYRYTWDFGTEEAAPTRARGPEVTFIYRDPGSYLVTVTASNNISAANDSALVEVQEPVLVTSIKVNGSLGLELQQPYLFSAVGRGRPASYLWDLGDGGWLEGPEVTHAYNSTGDFTVRVAGWNEVSRSEAWLNVTVKRRVRGLVVNASRTVVPLNGSVSFSTSLEAGSDVRYSWVLCDRCTPIPGGPTISYTFRSVGTFNIIVTAENEVGSAQDSIFVYVLQLIEGLQVVGGGRYFPTNHTVQLQAVVRDGTNVSYSWTAWRDRGPALAGSGKGFSLTVLEAGTYHVQLRATNMLGSAWADCTMDFVEPVGWLMVAASPNPAAVNTSVTLSAELAGGSGVVYTWSLEEGLSWETSEPFTTHSFPTPGLHLVTMTAGNPLGSANATVEVDVQVPVSGLSIRASEPGGSFVAAGSSVPFWGQLATGTNVSWCWAVPGGSSKRGPHVTMVFPDAGTFSIRLNASNAVSWVSATYNLTAEEPIVGLVLWASSKVVAPGQLVHFQILLAAGSAVTFRLQVGGANPEVLPGPRFSHSFPRVGDHVVSVRGKNHVSWAQAQVRIVVLEAVSGLQVPNCCEPGIATGTERNFTARVQRGSRVAYAWYFSLQKVQGDSLVILSGRDVTYTPVAAGLLEIQVRAFNALGSENRTLVLEVQDAVQYVALQSGPCFTNRSAQFEAATSPSPRRVAYHWDFGDGSPGQDTDEPRAEHSYLRPGDYRVQVNASNLVSFFVAQATVTVQVLACREPEVDVVLPLQVLMRRSQRNYLEAHVDLRDCVTYQTEYRWEVYRTASCQRPGRPARVALPGVDVSRPRLVLPRLALPVGHYCFVFVVSFGDTPLTQSIQANVTVAPERLVPIIEGGSYRVWSDTRDLVLDGSESYDPNLEDGDQTPLSFHWACVASTQREAGGCALNFGPRGSSTVTIPRERLAAGVEYTFSLTVWKAGRKEEATNQTVLIRSGRVPIVSLECVSCKAQAVYEVSRSSYVYLEGRCLNCSSGSKRGRWAARTFSNKTLVLDETTTSTGSAGMRLVLRRGVLRDGEGYTFTLTVLGRSGEEEGCASIRLSPNRPPLGGSCRLFPLGAVHALTTKVHFECTGWHDAEDAGAPLVYALLLRRCRQGHCEEFCVYKGSLSSYGAVLPPGFRPHFEVGLAVVVQDQLGAAVVALNRSLAITLPEPNGSATGLTVWLHGLTASVLPGLLRQADPQHVIEYSLALVTVLNEYERALDVAAEPKHERQHRAQIRKNITETLVSLRVHTVDDIQQIAAALAQCMGPSRELVCRSCLKQTLHKLEAMMLILQAETTAGTVTPTAIGDSILNITGDLIHLASSDVRAPQPSELGAESPSRMVASQAYNLTSALMRILMRSRVLNEEPLTLAGEEIVAQGKRSDPRSLLCYGGAPGPGCHFSIPEAFSGALANLSDVVQLIFLVDSNPFPFGYISNYTVSTKVASMAFQTQAGAQIPIERLASERAITVKVPNNSDWAARGHRSSANSANSVVVQPQASVGAVVTLDSSNPAAGLHLQLNYTLLDGHYLSEEPEPYLAVYLHSEPRPNEHNCSASRRIRPESLQGADHRPYTFFISPGSRDPAGSYHLNLSSHFRWSALQVSVGLYTSLCQYFSEEDMVWRTEGLLPLEETSPRQAVCLTRHLTAFGASLFVPPSHVRFVFPEPTADVNYIVMLTCAVCLVTYMVMAAILHKLDQLDASRGRAIPFCGQRGRFKYEILVKTGWGRGSGTTAHVGIMLYGVDSRSGHRHLDGDRAFHRNSLDIFRIATPHSLGSVWKIRVWHDNKGLSPAWFLQHVIVRDLQTARSAFFLVNDWLSVETEANGGLVEKEVLAASDAALLRFRRLLVAELQRGFFDKHIWLSIWDRPPRSRFTRIQRATCCVLLICLFLGANAVWYGAVGDSAYSTGHVSRLSPLSVDTVAVGLVSSVVVYPVYLAILFLFRMSRSKVAGSPSPTPAGQQVLDIDSCLDSSVLDSSFLTFSGLHAEAFVGQMKSDLFLDDSKSLVCWPSGEGTLSWPDLLSDPSIVGSNLRQLARGQAGHGLGPEEDGFSLASPYSPAKSFSASDEDLIQQVLAEGVSSPAPTQDTHMETDLLSSLSSTPGEKTETLALQRLGELGPPSPGLNWEQPQAARLSRTGLVEGLRKRLLPAWCASLAHGLSLLLVAVAVAVSGWVGASFPPGVSVAWLLSSSASFLASFLGWEPLKVLLEALYFSLVAKRLHPDEDDTLVESPAVTPVSARVPRVRPPHGFALFLAKEEARKVKRLHGMLRVSLGAACAPATSVSCLPPPTHARRTLLSPFPHLRRPLGVQCSAAFARSPSYPTPPTCCPSPCQ

SEQ ID NO: 886873 - protein, 151 aa, Homo sapiens
RWPVGKSGPQHPPLLTGTPENGSEPESRSPDNRTQLAPACMPGGRWCPGANICLPLDASCHPQACANGCTSGPGLPGAPYALWREFLFSVPAGPPAQYSVCGPDLGLFPASPQATFLSAAQGLGLCTRHTQPAGPSHVLATSDLRPLQCPR

SEQ ID NO: 886874 - protein, 739 aa, Homo sapiens
MDFLGYCSSHYESDLEATHTLEAEGSHGGDLTKRSSQQLRALAPGQRHRKETAWGLGPDCCHWGVGVWVGTESGALGYRQVNSQDLEQGKGFYSIISVLHLAPSKCYLQKLKLSQYSPPHTTKTHPTQCEEAGGWWGRQAKEKKTRSTQCNVDVYAFKAPINSYVENNTCSILKIHAIFSNCIDASGVIFRNVFIGKEAILAGSASASQEDPLSGLYLTLFAGEPPALSRGMGFSGGNLDLLKEGSSCEQNSSSWRILSFLWTHYLPFCTRGIPTLGSADYSTSGSHYYSALRISCQPSAVSLFTSVDEARAVIFQLMLCYALGLSRSPQGMQLSHKSFFAVKCVQICIFKQILTRKCVLGMCASGEENGKGRRQINSSTLEGQMGNQLGKVGQWAEADSEMIMNEDSSSTIQKKAHEHSVQMDQVHMCLDRLPLSSHKGISEIEPRQRSSPRRPQGPLPPARVRSSGVYQPEGCVSISSTWQRSGPCGLGNQISGNCKNSQNLSDFLGGIRIIEWFQNLNKVTASLYRRRKDGKLSFKPQHEEFKAAMKTVATEESNHRALPVIEQKEGPRVAAQLAERVVAKGPSRSLPALGSDNPNLTGSAGPASDTSSTRVFPVVRMSVETLVLYSWYMLIKYNLFEGRSGCGPLTLSAAQCLSQCWGSPGHVELELNIKHPSDITHKMTAPACFPLRHCYWKCQSSEIEPWAWLVSEVAQSQAVLAWMGGWPPPFRAGQEAVCR

SEQ ID NO: 886875 - protein, 145 aa, Homo sapiens
MGITPWPKGHTEPKGSYSLRKKPCYGTVAALDCAGCQEGMAEAASVGLAQSESTTIMGHVCAERHTHDRYVTSMCPYLPLPMDGNAMDFSFLSSARAKQFFTVFSRSSSHLSAPQTGLLQWITNLAGRPWPALTAASGAGMKQKQ

SEQ ID NO: 886876 - protein, 107 aa, Homo sapiens
MVGESWAQGLEPATCHLHGFGYTPSFICGTGNGDNTLAQGSHRTKRKLQPKEETLLWDCGCSGLRRLPGRNGGDASGVIFRNVSLEKKLFWRALLQLARKTPSVACI

SEQ ID NO: 886877 - protein, 145 aa, Homo sapiens; identical to SEQ ID NO: 886875

SEQ ID NO: 886878 - protein, 745 aa, Homo sapiens
MGVISQSEALSSSEPWHQDRGTEKRQHGGWGLLLPLGSRGVGGHRVGGLRVRQVNSQDLEQGKGFYSIIYSAFGSKQMLFTKTQIKPDTPHHTPPKHTPHSVKRQEVGEEGRQRRKRLDLLSVMWMCMLLRHLYIPMFKTIHVQSLKFTQFFPIDRCFWCYIQKCFIGKEAILAGSASASQEDPLSGLYLTLFAGEPPALSRGMGFSGGNLDLLKEGSSCEQNSSSWRILSFLWTHYLPFCTRGIPTLGSADYSTSGSHYYSALRISCQPSAVSLFTSVDEARAVIFQLMLCYALGLSRSPQGMQLSHKSFFAVKCVQICIFKQILTRKCVLGMCASGEENGKGRRQINSSTLEGQMGNQLGKVGQWAEADSEMIMNEDSSSTIQKKAHEHSVQMDQVHMCLDRLPLSSHKGISEIEPRQRSSPRRPQGPLPPARVRSSGVYQPEGCVSISSTWQRSGPCGLGNQISGNCKNSQNLSDFLGGIRIIEWFQNLNKVTASLYRRRKDGKLSFKPQHEEFKAAMKTVATEESNHRALPVIEQKEGPRVAAQLAERVVAKGPSRSLPALGSDNPNLTGSAGPASDTSSTRVFPVVRMSVETLVLYSWYMLIKYNLFEGRSGCGPLTLSAAQCLSQCWGSPGHVELELNIKHPSDITHKMTAPACFPLSIVNGNARAQKLSPGPGLYLRWLRAKLSSPGWEAGPHHLGQGRRRSVDDDREGVSGWTCRLPDLTYLATGNSTFLLGSFKKI

SEQ ID NO: 886879 - protein, 306 aa, Homo sapiens
MDTLDRVVKPKTKRAKRFLEKREPKLNENIKNAMLIKGGNANATVTKVLKDVYALKKPYGVLYKKKNITRPFEDQTSLEFFSKKSDCSLFMFGSHNKKRPNNLVIGRMYDYHVLDMIELGIENFVSLKDIKNSKCPEGTKPMLIFAGDDFDVTEDYRRLKSLLIDFFRGPTVSNIRLAGLEYVLHFTALNGKIYFRSYKLLLKKSGCRTPRIELEEMGPSLDLVLRRTHLASDDLYKLSMKMPKALKPKKKKNISHDTFGTTYGRIHMQKQDLSKLQTRKMKGLKKRPAERITEDHEKKSKRIKKN

SEQ ID NO: 886880 - protein, 260 aa, Homo sapiens
MDTLYRVKPKTKRAKRFLEKREPKLNENIKNAMLIKGGNANATVTKVLKDVYALKKPYGVLYKKKNITRPFEDQTSLEFFSKKSDCSLFMFGSHNKKRPNNLVIGRMYDYHVLDMIELDFFRGPTVSNIRLAGLEYVLHFTALNGKIYFRSYKLLLKKSGCRTPRIELEEMGPSLDLVLRRTHLASDDLYKLSMKMPKALKPKKKKNISHDTFGTTYGRIHMQKQDLSKLQTRKMKGLKKRPAERITEDHEKKSKRIKKN

SEQ ID NO: 886881 - protein, 306 aa, Homo sapiens; identical to SEQ ID NO: 886879

SEQ ID NO: 886882 - protein, 143 aa, Homo sapiens
LFPATSALHSVHSGMTGSYVLHFTALNGKIYFRSYKLLLKKSGCRTPRIELEEMGPSLDLVLRRTHLASDDLYKLSMKMPKALKPKKKKNISHDTFGTTYGRIHMQKQDLSKLQTRKMKGLKKRPAERITEDHEKKSKRIKKN

SEQ ID NO: 886883 - protein, 380 aa, Homo sapiens
ADVVLPARIKVGKMASSGGELGSLFDHHVQRAVCDTRAKYREGRRPRAVKVYTINLESQYLLIQGVPAVGVMKELVERFALYGAIEQYNALDEYPAEDFTEVYLIKFMNLQSARTAKRKMDEQSFFGGLLHVCYAPEFETVEETRKKLQMRKAYVVKTTENKDHYVTKKKLVTEHKDTEDFRQDFHSEMSGFCKAALNTSAGNSNPYLPYSCELPLCYFSSKCMCSSGGPVDRAPDSSKDGRNHHKTMGHYNHNDSLRKTQINSLKNSVACPGAQKAITSSEAVDRFMPRTTQLQERKRRREDDRKLGTFLQTNPTGNEIMIGPLLPDISKVDMHDDSLNTTANLIRHKLKEVISSVPKPPEDKPEDVHTSHPLKQRRRI

SEQ ID NO: 886884 - protein, 389 aa, Homo sapiens
ADVVLPARIKVGKMASSGGELGSLFDHHVQRAVCDTRAKYREGRRPRAVKVYTINLESQYLLIQGVPAVGVMKELVERFALYGAIEQYNALDEYPAEDFTEVYLIKFMNLQSARTAKRKMDEQSFFGGLLHVCYAPEFETVEETRKKLQMRKAYVVKTTENKDHYVTKKKLVTEHKDTEDFRQDFHSEMSGFCKAALNTSAGNSNPYLPYSCELPLCYFSSKCMCSSGGPVDRAPDSSKDGRNHHKTMGHYNHNDSLRKTQINSLKNSVACPGAQKAITSSEAVDRFMPRTTQLQERKRRREDDRKLGTFLQTNPTGNEIMIGPLLPDISKVDMHDDSLNTTANLIRHKLKEVRLFLKNYSKTRFGYRIKWRIICGNNSTVIFFHFLVF

SEQ ID NO: 886885 - protein, 362 aa, Homo sapiens
ADVVLPARIKVGKMASSGGELGSLFDHHVQRAVCDTRAKYREGRRPRAVKVYTINLESQYLLIQGVPAVGVMKELVERFALYGAIEQYNALDEYPAEDFTEVYLIKFMNLQSARTAKRKMDEQSFFGGLLHVCYAPEFETVEETRKKLQMRKAYVVKTTENKDHYVTKKKLVTEHKDTEDFRQDFHSEMSGFCKAALNTSAGNSNPYLPYSCELPLCYFSSDGRNHHKTMGHYNHNDSLRKTQINSLKNSVACPGAQKAITSSEAVDRFMPRTTQLQERKRRREDDRKLGTFLQTNPTGNEIMIGPLLPDISKVDMHDDSLNTTANLIRHKLKEVISSVPKPPEDKPEDVHTSHPLKQRRRI

SEQ ID NO: 886886 - protein, 192 aa, Homo sapiens
MSGFCKAALNTSAGNSNPYLPYSCELPLCYFSSKCMCSSGGPVDRAPDSSKDGRNHHKTMGHYNHNDSLRKTQINSLKNSVACPGAQKAITSSEAVDRFMPRTTQLQERKRRREDDRKLGTFLQTNPTGNEIMIGPLLPDISKVDMHDDSLNTTANLIRHKLKEVISSVPKPPEDKPEDVHTSHPLKQRRRI

SEQ ID NO: 886887 - protein, 380 aa, Homo sapiens; identical to SEQ ID NO: 886883

SEQ ID NO: 886888 - protein, 309 aa, Homo sapiens [sequence omitted]

SEQ ID NO: 886889 - protein, 264 aa, Homo sapiens
MGPPSAPPCRLHVPWKEVLLTASLLTFWNPPTTAKLTIESTPFNVAEGKEVLLLVHNLPQNLFGYSWYKGERVDGNSLIVGYVIGTQQATPGPAYSGRETIYPNASLLIQNVTQNDTGFYTLQVIKSDLVNEEATGQFHVYPELPKPSISSNNSNPVEDKDAVAFTCEPEIQNTTYLWWVNNQSLPVSPRLQLSNGNRTLTLLSVTRNDAGTYECEIQNPVSASRSDPVILNVLYGPDGPTISPSKGTYYRSRGKSEPLLPRSL

SEQ ID NO: 886890 - protein, 176 aa, Homo sapiens
PPKPFITSNNSNPVEDEDAVALTCEPEIQNTTYLWWVNNQSLPVSPRLQLSNDNRTLTLLSVTRNDVGPYECGIQNKLSVDHSDPVILNVLYGPDDPTISPSYTYYRPGVNLSLSCHAASNPPAQYSWLIDGNIQQYTQELFISNITEKNSGLYTCQANNSASGHSRTTVKTITVS

SEQ ID NO: 886891 - protein, 76 aa, Homo sapiens
PPKPFITSNNSNPVEDEDAVALTCEPEIQNTTSARGGIYTHPQQHWLATHNTDPCQLHKRWPSGRIYHLPELAKLK

SEQ ID NO: 886892 - protein, 93 aa, Homo sapiens
MESPSAPPHRWCIPWQRLLLTASLLTFWNPPTTAKLTIESTPFNVAEGKEVLLLVHNLPQNLFGYSWLEDEAVSRTSFQGTCNLQGGAEGGPM

SEQ ID NO: 886893 - protein, 264 aa, Homo sapiens; identical to SEQ ID NO: 886889

SEQ ID NO: 886894 - protein, 158 aa, Homo sapiens
  misc_feature (158)..(158): Xaa can be any naturally occurring amino acid
MGPPSAPPCRLHVPWKEVLLTASLLTFWNPPTTAKLTIESTPFNVAEGKEVLLLVHNLPQNLFGYSWYKGERVDGNSLIVGYVIGTQQATPGPAYSGRETIYPNASLLIQNVTQNDTGFYTLQVIKSDLVNEEATGQFHVYPELPKSSFSQSLITSEX

SEQ ID NO: 886895 - protein, 116 aa, Homo sapiens
SYVLSQNSGVQTAVIQSSWMSSMARMPPTISPLNTSYRSGENLNLSCHAASNPPAQYSWFVNGTFQQSTQELFIPNITVNNSGSYTCQAHNSDTGLNRTTVTTITVYANIVKPHLY

SEQ ID NO: 886896 - protein, 114 aa, Homo sapiens
MSSMAQMPPPFPPLKAHITDPGENLNLSCHAASNPPAQYSWFINGTFQQSTQELFIPNITVNNSGSYMCQAHNSATGLNRTTVTMITVSGSAPVLSAVATVGITIGVLARVALI

SEQ ID NO: 886897 - protein, 676 aa, Homo sapiens
MQLEHCLSPSIMLSKKFLNVSSSYPHSGGSELVLHDHPIISTTDNLERSSPLKKITRGMTNQSDTDNFPDSKDSPGDVQRSKLSPVLDGVSELRHSFDGSAADRYLLSQSSQPQSAATAPSAMFPYPGQHGPAHPAFSIGSPSRYMAHHPVITNGAYNSLLSNSSPQGYPTAGYPYPQQYGHSYQGAPFYQFSSTQPGLVPGKAQVYLCNRPLWLKFHRHQTEMIITKQGRRMFPFLSFNISGLDPTAHYNILVDVILADPNHWRFQGGKWVPCGKADTNVQGNRVYMHPDSPNTGAHWMRQEISFGKLKLTNNKGASNNNGQMVVLQSLHKYQPRLHVVEVNEDGTEDTSQPGRVQTFTFPETQFIAVTAYQNTDITQLKIDHNPFAKGFRDNYDTIYTGCDMDRLTPSPNDSPRSQIVPGARYAMAGSFLQDQFVSNYAKARFHPGRVRTAACRTTNGLLSPQQAEDPGAPSPQRWFVTPANNRLDFAASAYDTATDFAGNAATLLSYAAAGVKALPLQAAGCTGRPLGYYADPSGWGARSPPQYCGTKSGSVLPCWPNSAAAAARMAGANPYLGEEAEGLAAERSPLPPGAAEDAKPKDLSDSSWIETPSSIKSIDSSDSGIYEQAKRRRISPADTPVSESSSPLKSEVLAQRDCEKNCAKDISGYYGFYSHS

SEQ ID NO: 886898 - protein, 682 aa, Homo sapiens
MQLEHCLSPSIMLSKKFLNVSSSYPHSGGSELVLHDHPIISTTDNLERSSPLKKITRGMTNQSDTDNFPDSKDSPGDVQRSKLSPVLDGVSELRHSFDGSAADRYLLSQSSQPQSAATAPSAMFPYPGQHGPAHPAFSIGSPSRYMAHHPVITNGAYNSLLSNSSPQGYPTAGYPYPQQYGHSYQGAPFYQFSSTQPGLVPGKAQVYLCNRPLWLKFHRHQTEMIITKQGRRMFPFLSFNISGLDPTAHYNILVDVILADPNHWRFQGGKWVPCGKADTNVQGNRVYMHPDSPNTGAHWMRQEISFGKLKLTNNKGASNNNGQMVVLQSLHKYQPRLHVVEVNEDGTEDTSQPGRVQTFTFPETQFIAVTAYQNTDITQLKIDHNPFAKGFRDNYDTIYTGCDMDRLTPSPNDSPRSQIVPGARYAMAGSFLQDQFVSNYAKARFHPGAGAGPGPGTDRSVPHTNGLLSPQQAEDPGAPSPQRWFVTPANNRLDFAASAYDTATDFAGNAATLLSYAAAGVKALPLQAAGCTGRPLGYYADPSGWGARSPPQYCGTKSGSVLPCWPNSAAAAARMAGANPYLGEEAEGLAAERSPLPPGAAEDAKPKDLSDSSWIETPSSIKSIDSSDSGIYEQAKRRRISPADTPVSESSSPLKSEVLAQRDCEKNCAKDISGYYGFYSHS

SEQ ID NO: 886899 - protein, 94 aa, Homo sapiens
  misc_feature (4)..(4): Xaa can be any naturally occurring amino acid
  misc_feature (8)..(8): Xaa can be any naturally occurring amino acid
SCDXGRGXTAKMLRNLLALRQIGQRTISTASRRHFKNKVPEKQKLFQEDDEIPLYLKGGVADALLYRATMILTVGGTAYAIYELAVASFPKKQE

SEQ ID NO: 886900 - protein, 115 aa, Homo sapiens
MHTQDSEVVPVPAWPFSLVVFSCGGCWSVTAKMLRNLLALRQIGQRTISTASRRHFKNKVPEKQKLFQEDDEIPLYLKGGVADALLYRATMILTVGGTAYAIYELAVASFPKKQE

SEQ ID NO: 886901 - protein, 115 aa, Homo sapiens; identical to SEQ ID NO: 886900

SEQ ID NO: 886902 - protein, 94 aa, Homo sapiens; identical to SEQ ID NO: 886899
  misc_feature (4)..(4): Xaa can be any naturally occurring amino acid
  misc_feature (8)..(8): Xaa can be any naturally occurring amino acid

SEQ ID NO: 886903 - protein, 115 aa, Homo sapiens; identical to SEQ ID NO: 886900

SEQ ID NO: 886904 - protein, 115 aa, Homo sapiens; identical to SEQ ID NO: 886900

SEQ ID NO: 886905 - protein, 115 aa, Homo sapiens; identical to SEQ ID NO: 886900

SEQ ID NO: 886906 - protein, 245 aa, Homo sapiens
MRKKKTTKNHQKQIWGRRPTRKASLSTHHLSLEQARVTPSPAFNCNQSATKARFPTGHLRGRVTCGGGGFTTHNKNTCRGENTQTRGSGNQPHQVVGLSAEHTREASINQGEFANASSAAKQNNKHTAHEEDKQSAHDQKRNKTIANKTRRETSTDNSKSTVRARTETHPAALRSRTTDNDEANNYKMKKRAEPQNHSTSRTTRPSNTQNTHQDRQHRSRRPETHTAHHKPLQKRKITTDRTGND

SEQ ID NO: 886907 - protein, 115 aa, Homo sapiens; identical to SEQ ID NO: 886900

SEQ ID NO: 886908 - protein, 115 aa, Homo sapiens; identical to SEQ ID NO: 886900

SEQ ID NO: 886909 - protein, 103 aa, Homo sapiens
MHTQDSEVVPVPAWPFSLVVFSCGGCWSVTAKMLRNLLALRQIGQRTISTASRRHFKNKVPEKQKLFQEDDEIPLYLKGGVADALLYRATMILTVGASGYAIY

SEQ ID NO: 886910 - protein, 106 aa, Homo sapiens
MHTQDSEVVPVPAWPFSLVVFSCGGCWSVTAKMLRNLLALRQIGQRTISTASRRHFKNKVPEKQKLFQEDDEIPLYLKGGVADALLYRATMILTVGGKAFGMFEGL

SEQ ID NO: 886911 - protein, 115 aa, Homo sapiens; identical to SEQ ID NO: 886900

SEQ ID NO: 886912 - protein, 115 aa, Homo sapiens; identical to SEQ ID NO: 886900

SEQ ID NO: 886913 - protein, 115 aa, Homo sapiens; identical to SEQ ID NO: 886900

SEQ ID NO: 886914 - protein, 115 aa, Homo sapiens; identical to SEQ ID NO: 886900

SEQ ID NO: 886915 - protein, 166 aa, Homo sapiens
MAATMFRATLRGWRTGVQRGCGLRLLSQTQGPPDYPRFVESVDEYQFVERLLPATRIPDPPKHEHYPTPSGWQPPRDPPPNLPYFVRRSRMHNIPVYKDITHGNRQMTVIRKVEGDIWALQKDVEDFLSPLLGKTPVTQVNEVTGTLRIKGYFDQELKAWLLEKGF

SEQ ID NO: 886916 - protein, 178 aa, Homo sapiens
VTRGSTHASGQKMAATMFRATLRGWRTGVQRGCGLRLLSQTQGPPDYPRFVESVDEYQFVERLLPATRIPDPPKHEHYPTPSGWQPPRDPPPNLPYFVRRSRMHNIPVYKDITHGNRQMTVIRKVEGDIWALQKDVEDFLSPLLGKTPVTQVNEVTGTLRIKGYFDQELKAWLLEKGF

SEQ ID NO: 886917 - protein, 166 aa, Homo sapiens; identical to SEQ ID NO: 886915

SEQ ID NO: 886918 - protein, 146 aa, Homo sapiens
APANLPGQAARAGRGGTRQLRAQKAGVAGKDGSYHVPGYAAGMENRCPAGLRATAVDPPPNLPYFVRRSRMHNIPVYKDITHGNRQMTVIRKVEGDIWALQKDVEDFLSPLLGKTPVTQVNEVTGTLRIKGYFDQELKAWLLEKGF

SEQ ID NO: 886919 - protein, 150 aa, Homo sapiens
TPLIPSHTYRYPAAVESDEEKMAATMFRATLRGWRTGVQRGCGLRLLVRALSEELRASRGYPPPNLPYFVRRSRMHNIPVYKDITHGNRQMTVIRKVEGDIWALQKDVEDFLSPLLGKTPVTQVNEVTGTLRIKGYFDQELKAWLLEKGF

SEQ ID NO: 886920 - protein, 166 aa, Homo sapiens; identical to SEQ ID NO: 886915

SEQ ID NO: 886921 - protein, 166 aa, Homo sapiens; identical to SEQ ID NO: 886915

SEQ ID NO: 886922 - protein, 166 aa, Homo sapiens; identical to SEQ ID NO: 886915

SEQ ID NO: 886923 - protein, 166 aa, Homo sapiens; identical to SEQ ID NO: 886915

SEQ ID NO: 886924 - protein, 166 aa, Homo sapiens; identical to SEQ ID NO: 886915

SEQ ID NO: 886925 - protein, 119 aa, Homo sapiens
APANLPGQAARAGRGGTRQLRAQKAGVAGNPPPNLPYFVRRSRMHNIPVYKDITHGNRQMTVIRKVEGDIWALQKDVEDFLSPLLGKTPVTQVNEVTGTLRIKGYFDQELKAWLLEKGF

SEQ ID NO: 886926 - protein, 166 aa, Homo sapiens; identical to SEQ ID NO: 886915

SEQ ID NO: 886927 - protein, 166 aa, Homo sapiens; identical to SEQ ID NO: 886915

SEQ ID NO: 886928 - protein, 120 aa, Homo sapiens
TPLIPSHTYRYPAAVESDEEKMAATMFRATLRGWRTGVQRGCGLRLLSQTQGPPDYPRFVESVDEYQFVERLLPATRIPDPPKHEHYPTPSGWQPPRDPTLPPNWLRQLSVPDSPTWSLP

SEQ ID NO: 886929 - protein, 479 aa, Homo sapiens
MKSQGQHWYSSSDKNCKVSFREKLLIIDSNLGVQDVENLKFLCIGLVPNKKLEKSSSASDVFEHLLAEDLLSEEDPFFLAELLYIIRQKKLLQHLNCTKEEVERLLPTRQRVSLFRNLLYELSEGIDSENLKDMIFLLKDSLPKTEMTSLSFLAFLEKQGKIDEDNLTCLEDLCKTVVPKLLRNIEKYKREKAIQIVTPPVDKEAESYQGEEELVSQTDVKTFLEALPRAAVYRMNRNHRGLCVIVNNHSFTSLKDRQGTHKDAEILSHVFQWLGFTVHIHNNVTKVEMEMVLQKQKCNPAHADGDCFVFCILTHGRFGAVYSSDEALIPIREIMSHFTALQCPRLAEKPKLFFIQACQGEEIQPSVSIEADALNPEQAPTSLQDSIPAEADFLLGLATVPGYVSFRHVEEGSWYIQSLCNHLKKLVPRHEDILSILTAVNDDVSRRVDKQGTKKQMPQPAFTLRKKLVFPVPLDALSI

SEQ ID NO: 886930 - protein, 522 aa, Homo sapiens [sequence omitted]

SEQ ID NO: 886931 - protein, 521 aa, Homo sapiens
MKSQGQHWYSSSDKNCKVSFREKLLIIDSNLGVQDVENLKFLCIGLVPNKKLEKSSSASDVFEHLLAEDLLSEEDPFFLAELLYIIRQKKLLQHLNCTKEEVERLLPTRQRVSLFRNLLYELSEGIDSENLKDMIFLLKDSLPKTEMTSLSFLAFLEKQGKIDEDNLTCLEDLCKTVVPKLLRNIEKYKREKAIQIVTPPVDKEAESYQGEEELVSQTDVKTFLEALPQESWQNKHAGSNGNRATNGAPSLVSRGMQGASANTLNSETSTKRAAVYRMNRNHRGLCVIVNNHSFTSLKDRQGTHKDAEILSHVFQWLGFTVHIHNNVTKVEMEMVLQKQKCNPAHADGDCFVFCILTHGRFGAVYSSDEALIPIREIMSHFTALQCPRLAEKPKLFFIQACQGEEIQPSVSIEADALNPEQAPTSLQDSIPAEADFLLGLATVPGYVSFRHVEEGSWYIQSLCNHLKKLVPRMLKFLEKTMEIRGRKRTVWGAKQISATSLPTAISAQTPRPPMRRWSSVS

SEQ ID NO: 886932 - protein, 522 aa, Homo sapiens [sequence omitted]

SEQ ID NO: 886933 - protein, 245 aa, Homo sapiens [sequence omitted]

SEQ ID NO: 886934 - protein, 265 aa, Homo sapiens
MKSQGQHWYSSSDKNCKVSFREKLLIIDSNLGVQDVENLKFLCIGLVPNKKLEKSSSASDVFEHLLAEDLLSEEDPFFLAELLYIIRQKKLLQHLNCTKEEVERLLPTRQRVSLFRNLLYELSEGIDSENLKDMIFLLKDSLPKTEMTSLSFLAFLEKQGKIDEDNLTCLEDLCKTVVPKLLRNIEKYKREKAIQIVTPPVDKEAESYQGEEELVSQTDVKTFLEALPVGSVVCWSMLNNRLHPPTSPPCHPKKKRPLSLCRNKE

SEQ ID NO: 886935 - protein, 183 aa, Homo sapiens
  misc_feature (182)..(182): Xaa can be any naturally occurring amino acid
HKCKALFVILGVCLRNLLYELSEGIDSENLKDMIFLLKDSLPKTEMTSLSFLAFLEKQGKIDEDNLTCLEDLCKTVVPKLLRNIEKYKREKAIQIVTPPVDKEAESYQGEEELVSQTDVKTFLEALPVGSVVCWSMLNNRLHPPTSPPCHPKKKRPLSLCRNKERTIHSWKLERRLEQQQKXG

SEQ ID NO: 886936 - protein, 491 aa, Homo sapiens
MKSQGQHWYSSSDKNCKVSFREKLLIIDSNLGVQDVENLKFLCIGLVPNKKLEKSSSASDVFEHLLAEDLLSEEDPFFLAELLYIIRQKKLLQHLNCTKEEVERLLPTRQRVSLFRNLLYELSEGIDSENLKDMIFLLKDSLPKTEMTSLSFLAFLEKQGKIDEDNLTCLEDLCKTVVPKLLRNIEKYKREKAIQIVTPPVDKEAESYQGEEELVSQTDVKTFLEALPQEPGKISMQVVMRAAVYRMNRNHRGLCVIVNNHSFTSLKDRQGTHKDAEILSHVFQWLGFTVHIHNNVTKVEMEMVLQKQKCNPAHADGDCFVFCILTHGRFGAVYSSDEALIPIREIMSHFTALQCPRLAEKPKLFFIQACQGEEIQPSVSIEADALNPEQAPTSLQDSIPAEADFLLGLATVPGYVSFRHVEEGSWYIQSLCNHLKKLVPRHEDILSILTAVNDDVSRRVDKQGTKKQMPQPAFTLRKKLVFPVPLDALSI

SEQ ID NO: 886937 - protein, 163 aa, Homo sapiens
  misc_feature (151)..(151): Xaa can be any naturally occurring amino acid
  misc_feature (159)..(159): Xaa can be any naturally occurring amino acid
MKSQGQHWYSSSDKNCKVSFREKLLIIDSNLGVQDVENLKFLCIGLVPNKKLEKSSSASDVFEHLLAEDLLSEEDPFFLAELLYIIRQKKLLQHLNCTKEEVERLLPTRQRVSLFRNLLYELSEGIDSENLKDMIFLLKDSLPKTEMTSLXFLAFLEKXGPKL

SEQ ID NO: 886938 - protein, 522 aa, Homo sapiens [sequence omitted]

SEQ ID NO: 886939 - protein, 194 aa, Homo sapiens
MKSQGQHWYSSSDKNCKVSFREKLLIIDSNLGVQDVENLKFLCIGLVPNKKLEKSSSASDVFEHLLAEDLLSEEDPFFLAELLYIIRQKKLLQHLNCTKEEVERLLPTRQRVSLFRNLLYELSEGIDSENLKDMIFLLKDSLPKTEMTSLSFLAFLEKQGKIDEDNLTCLEDLCKTVVPKLLRNIEKYKREKGK

SEQ ID NO: 886940 - protein, 221 aa, Homo sapiens
REGDAVRRRVGAPVLGRLASPRRRGRRCCCGPHGAAVADPAQPGASGMSSAAADHWAWLLVLSFVFGCNVLRILLPSFSSFMSRVLQKDAEQESQMRAEIQDMKQELSTVNMMDEFARYARLERKINKMTDKLKTHVKARTAQLAKIKWVISVAFYVLQAALMISLIWKYYSVPVAVVPSKWITPLDRLVAFPTRVAGGVGITCWILVCNKVVAIVLHPFS

SEQ ID NO: 886941 - protein, 115 aa, Homo sapiens
FKVSPRDISGCACSSVVCGDWVPRLEVLSLESFPGFIFAFPCPPFCVVGCVIGRLLCSPEVSLQAALMISLIWKYYSVPVAVVPSKWITPLDRLVAFPTRVAGKNFLEDAVEECE

SEQ ID NO: 886942 - protein, 90 aa, Homo sapiens
MSSAAADHWAWLLVLSFVFGCNVLRILLPSFSSFKSRGLQKGAERELQNYSRDHDISRAFPINMLRVFKFHVEESSQCGIFTPLLASLLP

SEQ ID NO: 886943 - protein, 221 aa, Homo sapiens; identical to SEQ ID NO: 886940

SEQ ID NO: 886944 - protein, 169 aa, Homo sapiens
ADTLRRLAGRGFQALNGELSLLCGRRRRPMSRVLQKDAEQESQMRAEIQDMKQELSTVNMMDEFARYARLERKINKMTDKLKTHVKARTAQLAKIKWVISVAFYVLQAALMISLIWKYYSVPVAVVPSKWITPLDRLVAFPTRVAGGVGITCWILVCNKVVAIVLHPFS

SEQ ID NO: 886945 - protein, 140 aa, Homo sapiens
MSRVLQKDAEQESQMRAEIQDMKQELSTVNMMDEFARYARLERKINKMTDKLKTHVKARTAQLAKIKWVISVAFYVLQAALMISLIWKYYSVPVAVVPSKWITPLDRLVAFPTRVAGGVGITCWILVCNKVVAIVLHPFS

SEQ ID NO: 886946 - protein, 221 aa, Homo sapiens; identical to SEQ ID NO: 886940

SEQ ID NO: 886947 - protein, 209 aa, Homo sapiens
MDQAWEWSPSISLGGRLSASQDLPQNPVTQKRACEVRMCGQGLQWGSRGGSSQGLGLVAWRAARFSALPMSRVLQKDAEQESQMRAEIQDMKQELSTVNMMDEFARYARLERKINKMTDKLKTHVKARTAQLAKIKWVISVAFYVLQAALMISLIWKYYSVPVAVVPSKWITPLDRLVAFPTRVAGGVGITCWILVCNKVVAIVLHPFS

SEQ ID NO: 886948 - protein, 150 aa, Homo sapiens
REGDAVRRRVGAPVLGRLASPRRRGRRCCCGPHGAAVADPAQPGASGMSSAAADHWAWLLVLSFVFGCNVLRILLPSFSSFMSRVLQKDAEQESQMRAEIQDMKQELSTVNMMDEFARYARLERKINKMTDKLKTHGTVSLAAWRLHESG

SEQ ID NO: 886949 - protein, 151 aa, Homo sapiens
ADTLRRLAGRGFQALNGELSLLCGRRRRPMSRVLQKDAEQESQMRAEIQDMKQELSTVNMMDEFARYARLERKINKMTDKLKTHVKARTAQLAKIIIWKYYSVPVAVVPSKWITPLDRLVAFPTRVAGGVGITCWILVCNKVVAIVLHPFS

SEQ ID NO: 886950 - protein, 168 aa, Homo sapiens
REGDAVRRRVGAPVLGRLASPRRRGRRCCCGPHGAAVADPAQPGASGMSSAAADHWAWLLVLSFVFGCNVLRILLPSFSSFMSRVLQKDAEQESQMRAEIQDMKQELSTVNMMDEFARYARLERKINKMTDKLKTHVKARTAQLAKIKWVISVAFYVLQVVLELPVGF

SEQ ID NO: 886951 - protein, 66 aa, Homo sapiens
ERPPGQVHLPCYDLSPLYKCVGVLVQMSFEVYLRRVTGGVYAGGVGITCWILVCNKVVAIVLHPFS

SEQ ID NO: 886952 - protein, 220 aa, Homo sapiens
REGDAVRRRVGAPVLGRLASPRRRGRRCCCGPHGAAVADPAQPGASGMSSAAADHWAWLLVLSFVFGCNVLRILLPSFSSFMSRVLQKDAEQESQMRAEIQDMKQELSTVNMMDEFARYARLERKINKMTDKLKTHVKARTAQLAKIKWVISVAFYVLQAALMISLIWKYYSVPVAVVPSKWITPLDRLVAFPTRVAGDDGLIEFTTVTLESPKAWLVEA

SEQ ID NO: 886953 - protein, 150 aa, Homo sapiens; identical to SEQ ID NO: 886948

SEQ ID NO: 886954 - protein, 473 aa, Homo sapiens
AWARALPTECGFEPPHLAPLSDPEAPSMESPEPVKPEQGFVWQEASEFEADTAGSTVERHKKAQLDRLDINVQIDDSYLVEAGDRQKRWQCRMCEKSYTSKYNLVTHILGHNGIKPHSCPHCSKLFKQPSHLQTHLLTHQGTRPHKCQVCHKAFTQTSHLKRHMLLHSEVKPYSCHFCGRGFAYPSELKAHEVKHESGRCHVCVECGLDFSTLTQLKRHLASHQGPTLYQCLECDKSFHYRSQLQNHMLKHQNVRPFVCTECGMEFSQIHHLKQHSLTHKGVKEFKCEVCGREFTLQANMKRHMLIHTSVRPYQCHICFKTFVQKQTLKTHMIVHSPVKPFKCKVCGKSFNRMYNLLGHMHLHAGSKPFKCPYCSSKFNLKGNLSRHMKVKHGVMDIGLDSQGGWAKRNGQSRNDTNMTHSGASCPVRGVGRLAKAETSLGWAQVWKGGTLEGHDDNNDGIFMSSSKDLNEIT

SEQ ID NO: 886955 - protein, 473 aa, Homo sapiens; identical to SEQ ID NO: 886954

SEQ ID NO: 886956 - protein, 581 aa, Homo sapiens
AWARALPTECGFEPPHLAPLSDPEAPSMESPEPVKPEQGFVWQEASEFEADTAGSTVERHKKAQLDRLDINVQIDDSYLVEAGDRQKRWQCRMCEKSYTSKYNLVTHILGHNGIKPHSCPHCSKLFKQPSHLQTHLLTHQGTRPHKCQVCHKAFTQTSHLKRHMLLHSEVKPYSCHFCGRGFAYPSELKAHEVKHESGRCHVCVECGLDFSTLTQLKRHLASHQGPTLYQCLECDKSFHYRSQLQNHMLKHQNVRPFVCTECGMEFSQIHHLKQHSLTHKGVKEFKCEVCGREFTLQANMKRHMLIHTSVRPYQCHICFKTFVQKQTLKTHMIVHSPVKPFKCKVCGKSFNRMYNLLGHMHLHAGSKPFKCPYCSSKFNLKGNLSRHMKVKHGVMDIGLDSQDPMMELTGTDPSELDGQQEMEDFEENAYSYASVDSSAEASVLTEQAMKEMAYYNVLVAQAGPPLTGAGGEGMGVRPMGCRLHLLQPRNKLLPHCSEPSLPESFAPLGTFRPNGDCTTGPGCEPAQAQASQQGKENTRGPDLGLPGLLPWGVGEVGPLGTGHKGTGPRGLSRPSRALQGS

SEQ ID NO: 886957 - protein, 581 aa, Homo sapiens; identical to SEQ ID NO: 886956

SEQ ID NO: 886958 - protein, 473 aa, Homo sapiens; identical to SEQ ID NO: 886954

SEQ ID NO: 886959 - protein, 581 aa, Homo sapiens; identical to SEQ ID NO: 886956

SEQ ID NO: 886960 - protein, 158 aa, Homo sapiens
MNKQRGTYSEVSLAQDPKRQQRKLKGNKISISGTKQEIFQVELNLQNASSDHQGNDKTYHCKGLLPPPEKLTAEVLGIICIVLMATVLKTIVLIPCIGVLEQNNFSLNRRMQKARHCGHCPEEWITYSNSCYYIGKERRTWEERVCWPVLRRTLICFL

SEQ ID NO: 886961 - protein, 158 aa, Homo sapiens; identical to SEQ ID NO: 886960

SEQ ID NO: 886962 - protein, 158 aa, Homo sapiens; identical to SEQ ID NO: 886960

SEQ ID NO: 886963 - protein, 1154 aa, Homo sapiens
MQYLNIKEDCNAMAFCAKMRSSKKTEVNLEAPEPGVEVIFYLSDREPLRLGSGEYTAEELCIRAAQACRISPLCHNLFALYDENTKLWYAPNRTITVDDKMSLRLHYRMRFYFTNWHGTNDNEQSVWRHSPKKQKNGYEKKKIPDATPLLDASSLEYLFAQGQYDLVKCLAPIRDPKTEQDGHDIENECLGMAVLAISHYAMMKKMQLPELPKDISYKRYIPETLNKSIRQRNLLTRMRINNVFKDFLKEFNNKTICDSSVSTHDLKVKYLATLETLTKHYGAEIFETSMLLISSENEMNWFHSNDGGNVLYYEVMVTGNLGIQWRHKPNVVSVEKEKNKLKRKKLENKHKKDEEKNKIREEWNNFSYFPEITHIVIKESVVSINKQDNKKMELKLSSHEEALSFVSLVDGYFRLTADAHHYLCTDVAPPLIVHNIQNGCHGPICTEYAINKLRQEGSEEGMYVLRWSCTDFDNILMTVTCFEKSEQVQGAQKQFKNFQIEVQKGRYSLHGSDRSFPSLGDLMSHLKKQILRTDNISFMLKRCCQPKPREISNLLVATKKAQEWQPVYPMSQLSFDRILKKDLVQGEHLGRGTRTHIYSGTLMDYKDDEGTSEEKKIKVILKVLDPSHRDISLAFFEAASMMRQVSHKHIVYLYGVCVRDVENIMVEEFVEGGPLDLFMHRKSDVLTTPWKFKVAKQLASALSYLEDKDLVHGNVCTKNLLLAREGIDSECGPFIKLSDPGIPITVLSRQECIERIPWIAPECVEDSKNLSVAADKWSFGTTLWEICYNGEIPLKDKTLIEKERFYESRCRPVTPSCKELADLMTRCMNYDPNQRPFFRAIMRDINKLEEQNPDIVSEKKPATEVDPTHFEKRFLKRIRDLGEGHFGKVELCRYDPEGDNTGEQVAVKSLKPESGGNHIADLKKEIEILRNLYHENIVKYKGICTEDGGNGIKLIMEFLPSGSLKEYLPKNKNKINLKQQLKYAVQICKGMDYLGSRQYVHRDLAARNVLVESEHQVKIGDFGLTKAIETDKEYYTVKDDRDSPVFWYAPECLMQSKFYIASDVWSFGVTLHELLTYCDSDSSPMALFLKMIGPTHGQMTVTRLVNTLKEGKRLPCPPNCPDEVYQLMRKCWEFQPSNRTSFQNLIEGFEALLK

SEQ ID NO: 886964 - protein, 1154 aa, Homo sapiens; identical to SEQ ID NO: 886963

SEQ ID NO: 886965 - protein, 1154 aa, Homo sapiens; identical to SEQ ID NO: 886963

SEQ ID NO: 886966 - protein, 175 aa, Homo sapiens [sequence omitted]

SEQ ID NO: 886967 - protein, 175 aa, Homo sapiens [sequence omitted]

SEQ ID NO: 886968 - protein, 1174 aa, Homo sapiens
MQYLNIKEDCNAMAFCAKMRSSKKTEVNLEAPEPGVEVIFYLSDREPLRLGSGEYTAEELCIRAAQACRISPLCHNLFALYDENTKLWYAPNRTITVDDKMSLRLHYRMRFYFTNWHGTNDNEQSVWRHSPKKQKNGYEKKKIPDATPLLDASSLEYLFAQGQYDLVKCLAPIRDPKTEQDGHDIENECLGMAVLAISHYAMMKKMQLPELPKDISYKRYIPETLNKSIRQRNLLTRMRINNVFKDFLKEFNNKTICDSSVSTHDLKVKYLATLETLTKHYGAEIFETSMLLISSENEMNWFHSNDGGNVLYYEVMVTGNLGIQWRHKPNVVSVEKEKNKLKRKKLENKHKKDEEKNKIREEWNNFSYFPEITHIVIKESVVSINKQDNKKMELKLSSHEEALSFVSLVDGYFRLTADAHHYLCTDVAPPLIVHNIQNGCHGPICTEYAINKLRQEGSEEGMYVLRWSCTDFDNILMTVTCFEKSEQVQGAQKQFKNFQIEVQKGRYSLHGSDRSFPSLGDLMSHLKKQILRTDNISFMLKRCCQPKPREISNLLVATKKAQEWQPVYPMSQLSFDRILKKDLVQGEHLGRGTRTHIYSGTLMDYKDDEGTSEEKKIKVILKVLDPSHRDISLAFFEAASMMRQVSHKHIVYLYGVCVRDVENIMVEEFVEGGPLDLFMHRKSDVLTTPWKFKVAKQLASALSYLEDKDLVHGNVCTKNLLLAREGIDSECGPFIKLSDPGIPITVLSRQECIERIPWIAPECVEDSKNLSVAADKWSFGTTLWEICYNGEIPLKDKTLIEKERFYESRCRPVTPSCKELADLMTRCMNYDPNQRPFFRAIMRDINKLEEQNPDIVSEKKPATEVDPTHFEKRFLKRIRDLGEGHFGKVELCRYDPEGDNTGEQVAVKSLKPESGGNHIADLKKEIEILRNLYHENIVKYKGICTEDGGNGIKLIMEFLPSGSLKEYLPKNKNKINLKQQLKYAVQICKGMDYLGSRQYVHRDLAARNVLVESEHQVKIGDFGLTKAIETDKEYYTVKDDRDSPVFWYAPECLMQSKFYIASDVWSFGVTLHELLTYCDSDSSPMALFLKMIGPTHGQMTVTRLVNTLKEGKRLPCPPNCPDEVYQLMRKCWEFQPSNRTSFQNLIEGFEALLNVIHGFLFYKVDAAANLVVVV

SEQ ID NO: 886969 - protein, 666 aa, Homo sapiens
MQYLNIKEDCNAMAFCAKMRSSKKTEVNLEAPEPGVEVIFYLSDREPLRLGSGEYTAEELCIRAAQACRISPLCHNLFALYDENTKLWYAPNRTITVDDKMSLRLHYRMRFYFTNWHGTNDNEQSVWRHSPKKQKNGYEKKKIPDATPLLDASSLEYLFAQGQYDLVKCLAPIRDPKTEQDGHDIENECLGMAVLAISHYAMMKKMQLPELPKDISYKRYIPETLNKSIRQRNLLTRMRINNVFKDFLKEFNNKTICDSSVSTHDLKVKYLATLETLTKHYGAEIFETSMLLISSENEMNWFHSNDGGNVLYYEVMVTGNLGIQWRHKPNVVSVEKEKNKLKRKKLENKHKKDEEKNKIREEWNNFSYFPEITHIVIKESVVSINKQDNKKMELKLSSHEEALSFVSLVDGYFRLTADAHHYLCTDVAPPLIVHNIQNGCHGPICTEYAINKLRQEGSEEGMYVLRWSCTDFDNILMTVTCFEKSEQVQGAQKQFKNFQIEVQKGRYSLHGSDRSFPSLGDLMSHLKKQILRTDNISFMLKRCCQPKPREISNLLVATKKAQEWQPVYPMSQLSFDRILKKDLVQGEHLGRGTRTHIYSGTLMDYKDDEGTSEEKKIKVILKVLDPSHRDISLAFFEAASMMRQVSHKLFHHDILHVADTDAIEVH

SEQ ID NO: 886970 - protein, 368 aa, Homo sapiens
  misc_feature (356)..(356): Xaa can be any naturally occurring amino acid
MQYLNIKEDCNAMAFCAKMRSSKKTEVNLEAPEPGVEVIFYLSDREPLRLGSGEYTAEELCIRAAQACRISPLCHNLFALYDENTKLWYAPNRTITVDDKMSLRLHYRMRFYFTNWHGTNDNEQSVWRHSPKKQKNGYEKKKIPDATPLLDASSLEYLFAQGQYDLVKCLAPIRDPKTEQDGHDIENECLGMAVLAISHYAMMKKMQLPELPKDISYKRYIPETLNKSIRQRNLLTRMRINNVFKDFLKEFNNKTICDSSVSTHDLKVKYLATLETLTKHYGAEIFETSMLLISSENEMNWFHSNDGGNVLYYEVMVTGNLGIQWRHKPNVVSVEKEKNKLKRKKLENKQGVGRKXFLFSSPVRPTPR

SEQ ID NO: 886971 - protein, 1154 aa, Homo sapiens; identical to SEQ ID NO: 886963

SEQ ID NO: 886972 - protein, 581 aa, Homo sapiens
GICKPLHRVAQPGEHLGRGTRTHIYSGTLMDYKDDEGTSEEKKIKVILKVLDPSHRDISLAFFEAASMMRQVSHKHIVYLYGVCVRDVENIMVEEFVEGGPLDLFMHRKSDVLTTPWKFKVAKQLASALSYLEDKDLVHGNVCTKNLLLAREGIDSECGPFIKLSDPGIPITVLSRQECIERIPWIAPECVEDSKNLSVAADKWSFGTTLWEICYNGEIPLKDKTLIEKERFYESRCRPVTPSCKELADLMTRCMNYDPNQRPFFRAIMRDINKLEEQNPDIVSEKKPATEVDPTHFEKRFLKRIRDLGEGHFGKVELCRYDPEGDNTGEQVAVKSLKPESGGNHIADLKKEIEILRNLYHENIVKYKGICTEDGGNGIKLIMEFLPSGSLKEYLPKNKNKINLKQQLKYAVQICKGMDYLGSRQYVHRDLAARNVLVESEHQVKIGDFGLTKAIETDKEYYTVKDDRDSPVFWYAPECLMQSKFYIASDVWSFGVTLHELLTYCDSDSSPMALFLKMIGPTHGQMTVTRLVNTLKEGKRLPCPPNCPDEVYQLMRKCWEFQPSNRTSFQNLIEGFEALLK

SEQ ID NO: 886973 - protein, 175 aa, Homo sapiens [sequence omitted]

SEQ ID NO: 886974 - protein, 1047 aa, Homo sapiens
MQYLNIKEDCNAMAFCAKMRSSKKTEVNLEAPEPGVEVIFYLSDREPLRLGSGEYTAEELCIRAAQACRISPLCHNLFALYDENTKLWYAPNRTITVDDKMSLRLHYRMRFYFTNWHGTNDNEQSVWRHSPKKQKNGYEKKKIPDATPLLDASSLEYLFAQGQYDLVKCLAPIRDPKTEQDGHDIENECLGMAVLAISHYAMMKKMQLPELPKDISYKRYIPETLNKSIRQRNLLTRMRINNVFKDFLKEFNNKTICDSSVSTHDLKVKYLATLETLTKHYGAEIFETSMLLISSENEMNWFHSNDGGNVLYYEVMVTGNLGIQWRHKPNVVSVEKEKNKLKRKKLENKHKKDEEKNKIREEWNNFSYFPEITHIVIKESVVSINKQDNKKMELKLSSHEEALSFVSLVDGYFRLTADAHHYLCTDVAPPLIVHNIQNGCHGPICTEYAINKLRQEGSEEGMYVLRWSCTDFDNILMTVTCFEKSEQVQGAQKQFKNFQIEVQKGRYSLHGSDRSFPSLGDLMSHLKKQILRTDNISFMLKRCCQPKPREISNLLVATKKAQEWQPVYPMSQLSFDRILKKDLVQGEHLGRGTRTHIYSGTLMDYKDDEGTSEEKKIKVILKVLDPSHRDISLAFFEAASMMRQVSHKHIVYLYGVCVRDVENIMVEEFVEGGPLDLFMHRKSDVLTTPWKFKVAKQLASALSYLEDKDLVHGNVCTKNLLLAREGIDSECGPFIKLSDPGIPITVLSRQECIERIPWIAPECVEDSKNLSVAADKWSFGTTLWEICYNGEIPLKDKTLIEKERFYESRCRPVTPSCKELADLMTRCMNYDPNQRPFFRAIMRDINKLEEQNPDIVSEKKPATEVDPTHFEKRFLKRIRDLGEGHFGKVELCRYDPEGDNTGEQVAVKSLKPESGGNHIADLKKEIEILRNLYHENIVKYKGICTEDGGNGIKLIMEFLPSGSLKEYLPKNKNKINLKQQLKYAVQICKGMDYLGSRQYVHRDLAARNVLVESEHQVKIGDFGLTKAIETDKEYYTVKDDRDSPVFW

SEQ ID NO: 886975 - protein, 574 aa, Homo sapiens [sequence omitted]

SEQ ID NO: 886976 - protein, 179 aa, Homo sapiens
MQYLNIKEDCNAMAFCAKMRSSKKTEVNLEAPEPGVEVIFYLSDREPLRLGSGEYTAEELCIRAAQACRISPLCHNLFALYDENTKLWYAPNRTITVDDKMSLRLHYRMRFYFTNWHGTNDNEQSVWRHSPKKQKNGYEKKKIPDATPLLDASSLEYLFAQVGSLGPGEAGVCGMGEAL

SEQ ID NO: 886977 - protein, 114 aa, Homo sapiens
MAAIPSSGSLVATHDYYRRRLGSTSSNSSCSSTECPGEAIPHPPGLPKADPGHWWASFFFGKSTLPFMATVLESAEHSEPPQASSSMTACGLARDAPRKQPGGQSSTASAGPPS

SEQ ID NO: 886978 - protein, 114 aa, Homo sapiens; identical to SEQ ID NO: 886977

SEQ ID NO: 886979 - protein, 114 aa, Homo sapiens; identical to SEQ ID NO: 886977

SEQ ID NO: 886980 - protein, 114 aa, Homo sapiens; identical to SEQ ID NO: 886977

SEQ ID NO: 886981 - protein, 114 aa, Homo sapiens; identical to SEQ ID NO: 886977

SEQ ID NO: 886982 - protein, 114 aa, Homo sapiens; identical to SEQ ID NO: 886977

SEQ ID NO: 886983 - protein, 114 aa, Homo sapiens; identical to SEQ ID NO: 886977

SEQ ID NO: 886984 - protein, 114 aa, Homo sapiens; identical to SEQ ID NO: 886977

SEQ ID NO: 886985 - protein, 114 aa, Homo sapiens; identical to SEQ ID NO: 886977

SEQ ID NO: 886986 - protein, 114 aa, Homo sapiens; identical to SEQ ID NO: 886977

SEQ ID NO: 886987 - protein, 114 aa, Homo sapiens; identical to SEQ ID NO: 886977

SEQ ID NO: 886988 - protein, 114 aa, Homo sapiens; identical to SEQ ID NO: 886977

SEQ ID NO: 886989 - protein, 114 aa, Homo sapiens; identical to SEQ ID NO: 886977

SEQ ID NO: 886990 - protein, 114 aa, Homo sapiens; identical to SEQ ID NO: 886977

SEQ ID NO: 886991 - protein, 114 aa, Homo sapiens; identical to SEQ ID NO: 886977

SEQ ID NO: 886992 - protein, 223 aa, Homo sapiens
PGAGPFNPCRPRTGRAAPRRTPQGWAQPKPDGESRTEVEAGGAASPGPGKGRGRVGPGEEPVRPALRDAPRPPAYKWARRTRGSTPRAPLCRGAASRGLLCKWAPWPSAPVPATRDRAPRPARGRRPGRLGSTSSNSSCSSTECPGEAIPHPPGLPKADPGHWWASFFFGKSTLPFMATVLESAEHSEPPQASSSMTACGLARDAPRKQPGGQSSTASAGPPS

SEQ ID NO: 886993 - protein, 140 aa, Homo sapiens
MAAIPSSGSLVATHDYYRRRLGSTSSNSSCSSTECPGEAIPHPPGECRIAPFSPRSSRSWQHQDPTSLLSGLPKADPGHWWASFFFGKSTLPFMATVLESAEHSEPPQASSSMTACGLARDAPRKQPGGQSSTASAGPPS

SEQ ID NO: 886994 - protein, 239 aa, Homo sapiens
RARGLLTPADPGPAGPPQDERRRAGLSPSQTARVAPRWKLGARPRRGQERGGAGWGPGRSLCAPPSVTRRGPRAYKWARRTRGSTPRAPLCRGAASRGLLCKWAPWPSAPVPATRDRAPRPARGRRPDPTSQQAKAWRPSPPAARSWPPTTTTGAAWVPLPATAPAAVPSAPGKPFPTPQLLFREVHPPVHGHGVGVRRALGTSPGLQQHDRLWPGSGRPEEAARRSVQHSQRWAPVLT

SEQ ID NO: 886995 - protein, 114 aa, Homo sapiens; identical to SEQ ID NO: 886977

SEQ ID NO: 886996 - protein, 185 aa, Homo sapiens
RARGLLTPADPGPAGPPQDERRRAGLSPSQTARVAPRWKLGARPRRGQERGGAGWGPGRSLCAPPSVTRRGPRAYKWARRTRGSTPRAPLCRGAASRGLLCKWAPWPSAPVPATRDRAPRPARGRRPDPTSQQAKAWRPSPPAARSWPPTTTTGQHDRLWPGSGRPEEAARRSVQHSQRWAPVLT

SEQ ID NO: 886997 - protein, 205 aa, Homo sapiens
RARGLLTPADPGPAGPPQDERRRAGLSPSQTARVAPRWKLGARPRRGQERGGAGWGPGRSLCAPPSVTRRGPRAYKWARRTRGSTPRAPLCRGAASRGLLCKWAPWPSAPVPATRDRAPRPARGRRPDPTSQQAKAWRPSPPAARSWPPTTTTGAAWVPLPATAPAAVPSAPGKPFPTPQVSPRLTRVIGGPASFSGSPPPPPTL

SEQ ID NO: 886998 - protein, 128 aa, Homo sapiens
MAAIPSSGSLVATHDYYRRRLGSTSSNSSCSSTECPGEAIPHPPASPRVDPGLFVCGPRFLSRRMLPPSWIGSPDGLVVPLGKIVCGTSPHEALTVAVSSMTACGLARDAPRKQPGGQSSTASAGPPS

SEQ ID NO: 886999 - protein, 114 aa, Homo sapiens; identical to SEQ ID NO: 886977

SEQ ID NO: 887000 - protein, 74 aa, Homo sapiens
SPRRPDPASRSSVEPAAAFSGCAAGVRAAAAASRPSHQHSRHQKPVRAPLSTARPQHSLAFLTPGTVHLAPSGK

SEQ ID NO: 887001 - protein, 376 aa, Homo sapiens
MSKSVPAFLQDESDDRETDTASESSYQLSRHKKSPSSLTNLSSSSGMTSLSSVSGSVMSVYSGDFGNLEVKGNIQFAIEYVESLKELHVFVAQCKDLAAADVKKQRSDPYVKAYLLPDKGKMGKKKTLVVKKTLNPVYNEILRYKIEKQILKTQKLNLSIWHRDTFKRNSFLGEVELDLETWDWDNKQNKQLRWYPLKRKTAPVALEAENRGEMKLALQYVPEPVPGKKLPTTGEVHIWVKECLDLPLLRGSHLNSFVKCTILPDTSRKSRQKTRAVGKTTNPIFNHTMVYDGFRPEDLMEACVELTVWDHYKLTNQFLGGLRIGFGTGKSYGTEVDWMDSTSEEVALWEKMVNSPNTWIEATLPLRMLLIAKISK

SEQ ID NO: 887002 - protein, 910 aa, Homo sapiens
MIDLSFLTEEEQEAIMKVLQRDAALKRAEEERVRHLPEKIKDDQQLKNMSGQWFYEAKAKRHRDKIHGADIIRASMRKKRPQIAAEQSKDRENGAKESWVNNVNKDAFLPPELAGVVEEPEEDAAPASPSSSVVNPASSVIDMSQENTRKPNVSPEKRKNPFNSSKLPEGHSSQQTKNEQSKNGRTGLFQTSKEDELSESKEKSTVADTSIQKLEKSKQTLPGLSNGSQIKAPIPKARKMIYKSTDLNKDDNQSFPRQRTDSLKARGAPRGILKRNSSSSSTDSETLRYNHNFEPKSKIVSPGLTIHERISEKEHSLEDNSSPNSLEPLKHVRFSAVKDELPQSPGLIHGREVGEFSVLESDRLKNGMEDAGDTEEFQSDPKPSQYRKPSLFHQSTSSPYVSKSETHQPMTSGSFPINGLHSHSEVLTARPQSMENSPTINEPKDKSSELTRLESVLPRSPADELSHCVEPEPSQVPGGSSRDRQQGSEEEPSPVLKTLERSAARKMPSKSLEDISSDSSNQAKVDNQPEELVRSAEDDEKPDQKPVTNECVPRISTVPTQPDNPFSHPDKLKRMSKSVPAFLQDEVSGSVMSVYSGDFGNLEVKGNIQFAIEYVESLKELHVFVAQCKDLAAADVKKQRSDPYVKAYLLPDKGKMGKKKTLVVKKTLNPVYNEILRYKIEKQILKTQKLNLSIWHRDTFKRNSFLGEVELDLETWDWDNKQNKQLRWYPLKRKTAPVALEAENRGEMKLALQYVPEPVPGKKLPTTGEVHIWVKECLDLPLLRGSHLNSFVKCTILPDTSRKSRQKTRAVGKTTNPIFNHTMVYDGFRPEDLMEACVELTVWDHYKLTNQFLGGLRIGFGTGKSYGTEVDWMDSTSEEVALWEKMVNSPNTWIEATLPLRMLLIAKISK

SEQ ID NO: 887003 - protein, 934 aa, Homo sapiens
MIDLSFLTEEEQEAIMKVLQRDAALKRAEEERVRHLPEKIKDDQQLKNMSGQWFYEAKAKRHRDKIHGADIIRASMRKKRPQIAAEQSKDRENGAKESWVNNVNKDAFLPPELAGVVEEPEEDAAPASPSSSVVNPASSVIDMSQENTRKPNVSPEKRKNPFNSSKLPEGHSSQQTKNEQSKNGRTGLFQTSKEDELSESKEKSTVADTSIQKLEKSKQTLPGLSNGSQIKAPIPKARKMIYKSTDLNKDDNQSFPRQRTDSLKARGAPRGILKRNSSSSSTDSETLRYNHNFEPKSKIVSPGLTIHERISEKEHSLEDNSSPNSLEPLKHVRFSAVKDELPQSPGLIHGREVGEFSVLESDRLKNGMEDAGDTEEFQSDPKPSQYRKPSLFHQSTSSPYVSKSETHQPMTSGSFPINGLHSHSEVLTARPQSMENSPTINEPKDKSSELTRLESVLPRSPADELSHCVEPEPSQVPGGSSRDRQQGSEEEPSPVLKTLERSAARKMPSKSLEDISSDSSNQAKVDNQPEELVRSAEDVSTVPTQPDNPFSHPDKLKRMSKSVPAFLQDESDDRETDTASESSYQLSRHKKSPSSLTNLSSSSGMTSLSSVSGSVMSVYSGDFGNLEVKGNIQFAIEYVESLKELHVFVAQCKDLAAADVKKQRSDPYVKAYLLPDKGKMGKKKTLVVKKTLNPVYNEILRYKIEKQILKTQKLNLSIWHRDTFKRNSFLGEVELDLETWDWDNKQNKQLRWYPLKRKTAPVALEAENRGEMKLALQYVPEPVPGKKLPTTGEVHIWVKECLDLPLLRGSHLNSFVKCTILPDTSRKSRQKTRAVGKTTNPIFNHTMVYDGFRPEDLMEACVELTVWDHYKLTNQFLGGLRIGFGTGKSYGTEVDWMDSTSEEVALWEKMVNSPNTWIEATLPLRMLLIAKISK

SEQ ID NO: 887004 - protein, 336 aa, Homo sapiens
MSKSVPAFLQDEVSGSVMSVYSGDFGNLEVKGNIQFAIEYVESLKELHVFVAQCKDLAAADVKKQRSDPYVKAYLLPDKGKMGKKKTLVVKKTLNPVYNEILRYKIEKQILKTQKLNLSIWHRDTFKRNSFLGEVELDLETWDWDNKQNKQLRWYPLKRKTAPVALEAENRGEMKLALQYVPEPVPGKKLPTTGEVHIWVKECLDLPLLRGSHLNSFVKCTILPDTSRKSRQKTRAVGKTTNPIFNHTMVYDGFRPEDLMEACVELTVWDHYKLTNQFLGGLRIGFGTGKSYGTEVDWMDSTSEEVALWEKMVNSPNTWIEATLPLRMLLIAKISK

SEQ ID NO: 887005 - protein, 336 aa, Homo sapiens; identical to SEQ ID NO: 887004

SEQ ID NO: 887006 - protein, 365 aa, Homo sapiens
MSDDRETDTASESSYQLSRHKKSPSSLTNLSSSSGMTSLSSVSGSVMSVYSGDFGNLEVKGNIQFAIEYVESLKELHVFVAQCKDLAAADVKKQRSDPYVKAYLLPDKGKMGKKKTLVVKKTLNPVYNEILRYKIEKQILKTQKLNLSIWHRDTFKRNSFLGEVELDLETWDWDNKQNKQLRWYPLKRKTAPVALEAENRGEMKLALQYVPEPVPGKKLPTTGEVHIWVKECLDLPLLRGSHLNSFVKCTILPDTSRKSRQKTRAVGKTTNPIFNHTMVYDGFRPEDLMEACVELTVWDHYKLTNQFLGGLRIGFGTGKSYGTEVDWMDSTSEEVALWEKMVNSPNTWIEATLPLRMLLIAKISK

SEQ ID NO: 887007 - protein, 163 aa, Homo sapiens [sequence omitted]

SEQ ID NO: 887008 - protein, 934 aa, Homo sapiens; identical to SEQ ID NO: 887003

SEQ ID NO: 887009 - protein, 163 aa, Homo sapiens [sequence omitted]

SEQ ID NO: 887010 - protein, 133 aa, Homo sapiens
MFTILLKCSHNHASFCSTILPDTSRKSRQKTRAVGKTTNPIFNHTMVYDGFRPEDLMEACVELTVWDHYKLTNQFLGGLRIGFGTGKSYGTEVDWMDSTSEEVALWEKMVNSPNTWIEATLPLRMLLIAKISK

SEQ ID NO: 887011 - protein, 405 aa, Homo sapiens
MIDLSFLTEEEQEAIMKVLQRDAALKRAEEERVRHLPEKIKDDQQLKNMSGQWFYEAKAKRHRDKIHGADIIRASMRKKRPQIAAEQSKDRENGAKESWVNNVNKDAFLPPELAGVVEEPEEDAAPASPSSSVVNPASSVIDMSQENTRKPNVSPEKRKNPFNSSKLPEGHSSQQTKNEQSKNGRTGLFQTSKEDELSESKEKSTVADTSIQKLEKSKQTLPGLSNGSQIKAPIPKARKMIYKSTDLNKDDNQSFPRQRTDSLKARGAPRGILKRNSSSSSTDSETLRYNHNFEPKSKIVSPGLTIHERISEKEHSLEDNSSPNSLEPLKHVRFSAVKDELPQSPGLIHGREVGEFSVLESDRLKNGMEDAGDTEEFQSDPKPSQYRKPSLFHQSTSRPCGFVRD

SEQ ID NO: 887012 - protein, 376 aa, Homo sapiens; identical to SEQ ID NO: 887001

SEQ ID NO: 887013 - protein, 376 aa, Homo sapiens; identical to SEQ ID NO: 887001

SEQ ID NO: 887014 - protein, 336 aa, Homo sapiens; identical to SEQ ID NO: 887004

SEQ ID NO: 887015 - protein, 255 aa, Homo sapiens
MGKKKTLVVKKTLNPVYNEILRYKIEKQILKTQKLNLSIWHRDTFKRNSFLGEVELDLETWDWDNKQNKQLRWYPLKRKTAPVALEAENRGEMKLALQYVPEPVPGKKLPTTGEVHIWVKECLDLPLLRGSHLNSFVKCTILPDTSRKSRQKTRAVGKTTNPIFNHTMVYDGFRPEDLMEACVELTVWDHYKLTNQFLGGLRIGFGTGKSYGTEVDWMDSTSEEVALWEKMVNSPNTWIEATLPLRMLLIAKISK

SEQ ID NO: 887016 - protein, 934 aa, Homo sapiens; identical to SEQ ID NO: 887003

SEQ ID NO: 887017 - protein, 818 aa, Homo sapiens
MIDLSFLTEEEQEAIMKVLQRDAALKRAEEERVRHLPEKIKDDQQLKNMSGQWFYEAKAKRHRDKIHGADIIRASMRKKRPQIAAEQSKDRENGAKESWVNNVNKDAFLPPELAGVVEEPEEDAAPASPSSSVVNPASSVIDMSQENTRKPNVSPEKRKNPFNSSKLPEGHSSQQTKNEQSKNGRTGLFQTSKEDELSESKEKSTVADTSIQKLEKSKQTLPGLSNGSQIKAPIPKARKMIYKSTDLNKDDNQSFPRQRTDSLKARGAPRGILKRNSSSSSTDSETLRYNHNFEPKSKIVSPGLTIHERISEKEHSLEDNSSPNSLEPLKHVRFSAVKDELPQSPGLIHGREVGEFSVLESDRLKNGMEDAGDTEEFQSDPKPSQYRKPSLFHQSTSSPYVSKSETHQPMTSGSFPINGLHSHSEVLTARPQSMENSPTINEPKDKSSELTRLESVLPRSPADELSHCVEPEPSQVPGGSSRDRQQGSEEEPSPVLKTLERSAARKMPSKSLEDISSDSSNQAKVDNQPEELVRSAEDVSTVPTQPDNPFSHPDKLKRMSKSVPAFLQDESDDRETDTASESSYQLSRHKKSPSSLTNLSSSSGMTSLSSVSGSVMSVYSGDFGNLEVKGNIQFAIEYVESLKELHVFVAQCKDLAAADVKKQRSDPYVKAYLLPDKGKMGKKKTLVVKKTLNPVYNEILRYKIEKQILKTQKLNLSIWHRDTFKRNSFLGEVELDLETWDWDNKQNKQLRWYPLKRKTAPVALEAENRGEMKLALQYVPEPVPGKKLPTTGEVHIWVKECLDLPLLRGSHLNSFVKW

SEQ ID NO: 887018 - protein, 471 aa, Homo sapiens
MIDLSFLTEEEQEAIMKVLQRDAALKRAEEERVRHLPEKIKDDQQLKNMSGQWFYEAKAKRHRDKIHGADIIRASMRKKRPQIAAEQSKDRENGAKESWVNNVNKDAFLPPELAGVVEEPEEDAAPASPSSSVVNPASSVIDMSQENTRKPNVSPEKRKNPFNSSKLPEGHSSQQTKNEQSKNGRTGLFQTSKEDELSESKEKSTVADTSIQKLEKSKQTLPGLSNGSQIKAPIPKARKMIYKSTDLNKDDNQSFPRQRTDSLKARGAPRGILKRNSSSSSTDSETLRYNHNFEPKSKIVSPGLTIHERISEKEHSLEDNSSPNSLEPLKHVRFSAVKDELPQSPGLIHGREVGEFSVLESDRLKNGMEDAGDTEEFQSDPKPSQYRKPSLFHQSTSSPYVSKSETHQPMTSGSFPINGLHSHSEVLTARPQSMENSPTINEPKDKSSELTRLESVLPRSPAGKRVVTTRL

SEQ ID NO: 887019 - protein, 111 aa, Homo sapiens
MIDLSFLTEEEQEAIMKVLQRDAALKRAEEERVRHLPEKIKDDQQLKNMSGQWFYEAKAKRHRDKIHGADIIRASMRKKRPQIAGIQHPSESLFSTLSHRPGLPHGKEHLG

SEQ ID NO: 887020 - protein, 330 aa, Homo sapiens
MRFRLCHQRGCCPHERENTCTCKMIISSLQVIAADCKRVTVLKYFLEALCGQEEPLLAFKGGKYVSVAPVPDTMGKEMGSQEGTRLEDEEEDVVIEDFEEDSEAEGSGGEDDIRELRAKKLALARKIAEQQRRQEKIQAVLEDHSQMRQMELEIRPLFLVPDTNGFIDHLASLARLLESRKYILVVPLIVINELDGLAKGQETDHRAGGYARVVQEKARKSIEFLEQRFESRDSCLRALTSRGNELESIAFRSEDITGQLGNNDDLILSCCLHYCKDKAKDFMPASKEEPIRLLREVVLLTDDRNLRVKALTRNVPVRDIPAFLTWAQVG

SEQ ID NO: 887021 - protein, 411 aa, Homo sapiens [sequence omitted]

SEQ ID NO: 887022 - protein, 1388 aa, Homo sapiens
MKELKEARPRKDNRRPDLEIYKPGLSRLRNKPKIKEPPGSEEFKDEIVNDRDCSAVENGTQPVKDVCKELNNQEQNGPIDPENNRGQESFPRTAGQEDRSLKIIKRTKKPDLQIYQPGRRLQTVSKESASRVEEEEVLNQVEQLRVEEDECRGNVAKEEVANKPDRAEIEKSPGGGRVGAAKGEKGKRMGKGEGVRETHDDPARGRPGSAKRYSRSDKRRNRYRTRSTSSAGSNNSAEGAGLTDNGCRRRRQDRTKERPRLKKQVSVSSTDSLDEDRIDEPDGLGPRRSSERKRHLERNWSGRGEGEQKNSAKEYRGTLRVTFDAEAMNKESPMVRSARDDMDRGKPDKGLSSGGKGSEKQESKNPKQELRGRGRGILILPAHTTLSVNSAGSPESAPLGPRLLFGSGSKGSRSWGRGGTTRRLWDPNNPDQKPALKTQTPQLHFLDTDDEVSPTSWGDSRQAQASYYKFQNSDNPYYYPRTPGPASQYPYTGYNPLQYPVGPTNGVYPGPYYPGYPTPSGQYVCSPLPTSTMSPEEVEQHMRNLQQQELHRLLRVADNQELQLSNLLSRDRISPEGLEKMAQLRAELLQLYERCILLDIEFSDNQNVDQILWKNAFYQVIEKFRQLVKDPNVENPEQIRNRLLELLDEGSDFFDSLLQKLQVTYKFKLEDYMDGLAIRSKPLRKTVKYALISAQRCMICQGDIARYREQASDTANYGKARSWYLKAQHIAPKNGRPYNQLALLAVYTRRKLDAVYYYMRSLAASNPILTAKESLMSLFEETKRKAEQMEKKQHEEFDLSPDQWRKGKKSTFRHVGDDTTRLEIWIHPSHPRSSQGTESGKDSEQENGLGSLSPSDLNKRFILSFLHAHGKLFTRIGMETFPAVAEKVLKEFQVLLQHSPSPIGSTRMLQLMTINMFAVHNSQLKDCFSEECRSVIQEQAAALGLAMFSLLVRRCTCLLKESAKAQLSSPEDQDDQDDIKVSSFVPDLKELLPSVKVWSDWMLGYPDTWNPPPTSLDLPSHVAVDVWSTLADFCNILTAVNQSEVPLYKDPDDDLTLLILEEDRLLSGFVPLLAAPQDPCYVEKTSDKVIAADCKRVTVLKYFLEALCGQEEPLLAFKGGKYVSVAPVPDTMGKEMGSQEGTRLEDEEEDVVIEDFEEDSEAEGSGGEDDIRELRAKKLALARKIAEQQRRQEKIQAVLEDHSQMRQMELEIRPLFLVPDTNGFIDHLASLARLLESRKYILVVPLIVINELDGLAKGQETDHRAGGYARVVQEKARKSIEFLEQRFESRDSCLRALTSRGNELESIAFRSEDITGQLGNNDDLILSCCLHYCKDKAKDFMPASKEEPIRLLREVVLLTDDRNLRVKALTRNVPVRDIPAFLTWAQVG

SEQ ID NO: 887023 - protein, 600 aa, Homo sapiens
SLNPPDTPPMTNLDCAATGKKSTFRHVGDDTTRLEIWIHPSHPRSSQGTESGKDSEQENGLGSLSPSDLNKRFILSFLHAHGKLFTRIGMETFPAVAEKVLKEFQVLLQHSPSPIGSTRMLQLMTINMFAVHNSQLKDCFSEECRSVIQEQAAALGLAMFSLLVRRCTCLLKESAKAQLSSPEDQDDQDDIKVSSFVPDLKELLPSVKVWSDWMLGYPDTWNPPPTSLDLPSHVAVDVWSTLADFCNILTAVNQSEVPLYKDPDDDLTLLILEEDRLLSGFVPLLAAPQDPCYVEKTSDKVIAADCKRVTVLKYFLEALCGQEEPLLAFKGGKYVSVAPVPDTMGKEMGSQEGTRLEDEEEDVVIEDFEEDSEAEGSGGEDDIRELRAKKLALARKIAEQQRRQEKIQAVLEDHSQMRQMELEIRPLFLVPDTNGFIDHLASLARLLESRKYILVVPLIVINELDGLAKGQETDHRAGGYARVVQEKARKSIEFLEQRFESRDSCLRALTSRGNELESIAFRSEDITGQLGNNDDLILSCCLHYCKDKAKDFMPASKEEPIRLLREVVLLTDDRNLRVKALTRNVPVRDIPAFLTWAQVG

SEQ ID NO: 887024 - protein, 257 aa, Homo sapiens
GLKFDFVSVYQEEQQSEEDVVIEDFEEDSEAEGSGGEDDIRELRAKKLALARKIAEQQRRQEKIQAVLEDHSQMRQMELEIRPLFLVPDTNGFIDHLASLARLLESRKYILVVPLIVINELDGLAKGQETDHRAGGYARVVQEKARKSIEFLEQRFESRDSCLRALTSRGNELESIAFRSEDITGQLGNNDDLILSCCLHYCKDKAKDFMPASKEEPIRLLREVVLLTDDRNLRVKALTRNVPVRDIPAFLTWAQVG

SEQ ID NO: 887025 - protein, 105 aa, Homo sapiens
MSLTAALGPHLFYHPPQTYHTPFLLLLFLPLSTWVPHTSPVASPWTVMSLEERGIWSQARALGWPPPAPFLLTGLSFRLASSSGNVLTLLSSPFTPPCPPTLPPE

SEQ ID NO: 887026 - protein, 105 aa, Homo sapiens; identical to SEQ ID NO: 887025

SEQ ID NO: 887027 - protein, 1388 aa, Homo sapiens; identical to SEQ ID NO: 887022

SEQ ID NO: 887028 - protein, 1132 aa, Homo sapiens
MKELKEARPRKDNRRPDLEIYKPGLSRLRNKPKIKEPPGSEEFKDEIVNDRDCSAVENGTQPVKDVCKELNNQEQNGPIDPENNRGQESFPRTAGQEDRSLKIIKRTKKPDLQIYQPGRRLQTVSKESASRVEEEEVLNQVEQLRVEEDECRGNVAKEEVANKPDRAEIEKSPGGGRVGAAKGEKGKRMGKGEGVRETHDDPARGRPGSAKRYSRSDKRRNRYRTRSTSSAGSNNSAEGAGLTDNGCRRRRQDRTKERPRLKKQVSVSSTDSLDEDRIDEPDGLGPRRSSERKRHLERNWSGRGEGEQKNSAKEYRGTLRVTFDAEAMNKESPMVRSARDDMDRGKPDKGLSSGGKGSEKQESKNPKQELRGRGRGILILPAHTTLSVNSAGSPESAPLGPRLLFGSGSKGSRSWGRGGTTRRLWDPNNPDQKPALKTQTPQLHFLDTDDEVSPTSWGDSRQAQASYYKFQNSDNPYYYPRTPGPASQYPYTGYNPLQYPVGPTNGVYPGPYYPGYPTPSGQYVCSPLPTSTMSPEEVEQHMRNLQQQELHRLLRVADNQELQLSNLLSRDRISPEGLEKMAQLRAELLQLYERCILLDIEFSDNQNVDQILWKNAFYQVIEKFRQLVKDPNVENPEQIRNRLLELLDEGSDFFDSLLQKLQVTYKFKLEDYMDGLAIRSKPLRKTVKYALISAQRCMICQGDIARYREQASDTANYGKARSWYLKAQHIAPKNGRPYNQLALLAVYTRRKLDAVYYYMRSLAASNPILTAKESLMSLFEETKRKAEQMEKKQHEEFDLSPDQWRKGKKSTFRHVGDDTTRLEIWIHPSHPRSSQGTESGKDSEQENGLGSLSPSDLNKRFILSFLHAHGKLFTRIGMETFPAVAEKVLKEFQVLLQHSPSPIGSTRMLQLMTINMFAVHNSQLKDCFSEECRSVIQEQAAALGLAMFSLLVRRCTCLLKESAKAQLSSPEDQDDQDDIKVSSFVPDLKELLPSVKVWSDWMLGYPDTWNPPPTSLDLPSHVAVDVWSTLADFCNILTAVNQSEVPLYKDPDDDLTLLILEEDRLLSGFVPLLAAPQDPCYVEKTSDKVSPRPNIPPHSPLLLILQTFLFLGSFLCKWNMIKSLRRVLRENI

SEQ ID NO: 887029 - protein, 940 aa, Homo sapiens
MKELKEARPRKDNRRPDLEIYKPGLSRLRNKPKIKEPPGSEEFKDEIVNDRDCSAVENGTQPVKDVCKELNNQEQNGPIDPENNRGQESFPRTAGQEDRSLKIIKRTKKPDLQIYQPGRRLQTVSKESASRVEEEEVLNQVEQLRVEEDECRGNVAKEEVANKPDRAEIEKSPGGGRVGAAKGEKGKRMGKGEGVRETHDDPARGRPGSAKRYSRSDKRRNRYRTRSTSSAGSNNSAEGAGLTDNGCRRRRQDRTKERPRLKKQVSVSSTDSLDEDRIDEPDGLGPRRSSERKRHLERNWSGRGEGEQKNSAKEYRGTLRVTFDAEAMNKESPMVRSARDDMDRGKPDKGLSSGGKGSEKQESKNPKQELRGRGRGILILPAHTTLSVNSAGSPESAPLGPRLLFGSGSKGSRSWGRGGTTRRLWDPNNPDQKPALKTQTPQLHFLDTDDEVSPTSWGDSRQAQASYYKFQNSDNPYYYPRTPGPASQYPYTGYNPLQYPVGPTNGVYPGPYYPGYPTPSGQYVCSPLPTSTMSPEEVEQHMRNLQQQELHRLLRVADNQELQLSNLLSRDRISPEGLEKMAQLRAELLQLYERCILLDIEFSDNQNVDQILWKNAFYQVIEKFRQLVKDPNVENPEQIRNRLLELLDEGSDFFDSLLQKLQVTYKFKLEDYMDGLAIRSKPLRKTVKYALISAQRCMICQGDIARYREQASDTANYGKARSWYLKAQHIAPKNGRPYNQLALLAVYTRRKLDAVYYYMRSLAASNPILTAKESLMSLFEETKRKAEQMEKKQHEEFDLSPDQWRKGKKSTFRHVGDDTTRLEIWIHPSHPRSSQGTESGKDSEQENGLGSLSPSDLNKRFILSFLHAHGKLFTRIGMETFPAVAEKVLKEFQVLLQHSPSPIGSTRMLQLMTINMFAVHNSQLKAPPGSSMYLKVHRFD

SEQ ID NO: 887030 - protein, 1449 aa, Homo sapiens
GRSRSRTSGRVGLAARGGGGAATAVAAAAKMAEGLERVRISASELRGILATLAPQAGSRENMKELKEARPRKDNRRPDLEIYKPGLSRLRNKPKIKEPPGSEEFKDEIVNDRDCSAVENGTQPVKDVCKELNNQEQNGPIDPENNRGQESFPRTAGQEDRSLKIIKRTKKPDLQIYQPGRRLQTVSKESASRVEEEEVLNQVEQLRVEEDECRGNVAKEEVANKPDRAEIEKSPGGGRVGAAKGEKGKRMGKGEGVRETHDDPARGRPGSAKRYSRSDKRRNRYRTRSTSSAGSNNSAEGAGLTDNGCRRRRQDRTKERPRLKKQVSVSSTDSLDEDRIDEPDGLGPRRSSERKRHLERNWSGRGEGEQKNSAKEYRGTLRVTFDAEAMNKESPMVRSARDDMDRGKPDKGLSSGGKGSEKQESKNPKQELRGRGRGILILPAHTTLSVNSAGSPESAPLGPRLLFGSGSKGSRSWGRGGTTRRLWDPNNPDQKPALKTQTPQLHFLDTDDEVSPTSWGDSRQAQASYYKFQNSDNPYYYPRTPGPASQYPYTGYNPLQYPVGPTNGVYPGPYYPGYPTPSGQYVCSPLPTSTMSPEEVEQHMRNLQQQELHRLLRVADNQELQLSNLLSRDRISPEGLEKMAQLRAELLQLYERCILLDIEFSDNQNVDQILWKNAFYQVIEKFRQLVKDPNVENPEQIRNRLLELLDEGSDFFDSLLQKLQVTYKFKLEDYMDGLAIRSKPLRKTVKYALISAQRCMICQGDIARYREQASDTANYGKARSWYLKAQHIAPKNGRPYNQLALLAVYTRRKLDAVYYYMRSLAASNPILTAKESLMSLFEETKRKAEQMEKKQHEEFDLSPDQWRKGKKSTFRHVGDDTTRLEIWIHPSHPRSSQGTESGKDSEQENGLGSLSPSDLNKRFILSFLHAHGKLFTRIGMETFPAVAEKVLKEFQVLLQHSPSPIGSTRMLQLMTINMFAVHNSQLKDCFSEECRSVIQEQAAALGLAMFSLLVRRCTCLLKESAKAQLSSPEDQDDQDDIKVSSFVPDLKELLPSVKVWSDWMLGYPDTWNPPPTSLDLPSHVAVDVWSTLADFCNILTAVNQSEVPLYKDPDDDLTLLILEEDRLLSGFVPLLAAPQDPCYVEKTSDKVIAADCKRVTVLKYFLEALCGQEEPLLAFKGGKYVSVAPVPDTMGKEMGSQEGTRLEDEEEDVVIEDFEEDSEAEGSGGEDDIRELRAKKLALARKIAEQQRRQEKIQAVLEDHSQMRQMELEIRPLFLVPDTNGFIDHLASLARLLESRKYILVVPLIVINELDGLAKGQETDHRAGGYARVVQEKARKSIEFLEQRFESRDSCLRALTSRGNELESIAFRSEDITGQLGNNDDLILSCCLHYCKDKAKDFMPASKEEPIRLLREVVLLTDDRNLRVKALTRNVPVRDIPAFLTWAQVG

SEQ ID NO: 887031 - protein, 1221 aa, Homo sapiens
MVKSNQWGNCKEEKAAWNDSPKKNREGVRETHDDPARGRPGSAKRYSRSDKRRNRYRTRSTSSAGSNNSAEGAGLTDNGCRRRRQDRTKERPRLKKQVSVSSTDSLDEDRIDEPDGLGPRRSSERKRHLERNWSGRGEGEQKNSAKEYRGTLRVTFDAEAMNKESPMVRSARDDMDRGKPDKGLSSGGKGSEKQESKNPKQELRGRGRGILILPAHTTLSVNSAGSPESAPLGPRLLFGSGSKGSRSWGRGGTTRRLWDPNNPDQKPALKTQTPQLHFLDTDDEVSPTSWGDSRQAQASYYKFQNSDNPYYYPRTPGPASQYPYTGYNPLQYPVGPTNGVYPGPYYPGYPTPSGQYVCSPLPTSTMSPEEVEQHMRNLQQQELHRLLRVADNQELQLSNLLSRDRISPEGLEKMAQLRAELLQLYERCILLDIEFSDNQNVDQILWKNAFYQVIEKFRQLVKDPNVENPEQIRNRLLELLDEGSDFFDSLLQKLQVTYKFKLEDYMDGLAIRSKPLRKTVKYALISAQRCMICQGDIARYREQASDTANYGKARSWYLKAQHIAPKNGRPYNQLALLAVYTRRKLDAVYYYMRSLAASNPILTAKESLMSLFEETKRKAEQMEKKQHEEFDLSPDQWRKGKKSTFRHVGDDTTRLEIWIHPSHPRSSQGTESGKDSEQENGLGSLSPSDLNKRFILSFLHAHGKLFTRIGMETFPAVAEKVLKEFQVLLQHSPSPIGSTRMLQLMTINMFAVHNSQLKDCFSEECRSVIQEQAAALGLAMFSLLVRRCTCLLKESAKAQLSSPEDQDDQDDIKVSSFVPDLKELLPSVKVWSDWMLGYPDTWNPPPTSLDLPSHVAVDVWSTLADFCNILTAVNQSEVPLYKDPDDDLTLLILEEDRLLSGFVPLLAAPQDPCYVEKTSDKVIAADCKRVTVLKYFLEALCGQEEPLLAFKGGKYVSVAPVPDTMGKEMGSQEGTRLEDEEEDVVIEDFEEDSEAEGSGGEDDIRELRAKKLALARKIAEQQRRQEKIQAVLEDHSQMRQMELEIRPLFLVPDTNGFIDHLASLARLLESRKYILVVPLIVINELDGLAKGQETDHRAGGYARVVQEKARKSIEFLEQRFESRDSCLRALTSRGNELESIAFRSEDITGQLGNNDDLILSCCLHYCKDKAKDFMPASKEEPIRLLREVVLLTDDRNLRVKALTRNVPVRDIPAFLTWAQVG

SEQ ID NO: 887032 - protein, 511 aa, Homo sapiens
METFPAVAEKVLKEFQVLLQHSPSPIGSTRMLQLMTINMFAVHNSQLKDCFSEECRSVIQEQAAALGLAMFSLLVRRCTCLLKESAKAQLSSPEDQDDQDDIKVSSFVPDLKELLPSVKVWSDWMLGYPDTWNPPPTSLDLPSHVAVDVWSTLADFCNILTAVNQSEVPLYKDPDDDLTLLILEEDRLLSGFVPLLAAPQDPCYVEKTSDKVIAADCKRVTVLKYFLEALCGQEEPLLAFKGGKYVSVAPVPDTMGKEMGSQEGTRLEDEEEDVVIEDFEEDSEAEGSGGEDDIRELRAKKLALARKIAEQQRRQEKIQAVLEDHSQMRQMELEIRPLFLVPDTNGFIDHLASLARLLESRKYILVVPLIVINELDGLAKGQETDHRAGGYARVVQEKARKSIEFLEQRFESRDSCLRALTSRGNELESIAFRSEDITGQLGNNDDLILSCCLHYCKDKAKDFMPASKEEPIRLLREVVLLTDDRNLRVKALTRNVPVRDIPAFLTWAQVG

SEQ ID NO: 887033 - protein, 184 aa, Homo sapiens [sequence omitted]

SEQ ID NO: 887034 - protein, 1388 aa, Homo sapiens; identical to SEQ ID NO: 887022

SEQ ID NO: 887035 - protein, 1388 aa, Homo sapiens; identical to SEQ ID NO: 887022

SEQ ID NO: 887036 - protein, 147 aa, Homo sapiens
ALSQAVAGAVVLLSCCPFKLRLDRGRASCRWSRLQREQPPRPPHSSRQDLVPLAIFQPRSQESGGCRKRRVFRLTRARPGGPRGGRGHDSGSRRLPFHALPAGDEGKMSVSRFKAKLKLLASIFHENQEAQLRLTLHCNMRMGQQKK

SEQ ID NO: 887037 - protein, 132 aa, Homo sapiens
MAETYRRSRQHEQLPGQRHMDLLTGYSKLIQSRLKLLLHLGSQPPVGKTFFFSCWCHPLFHGSKTTPNVWYKFSETALSILNSCQASQLGVRKMPGDMSSSPRVREFSALVAIKEKIHILPTNAKVGSKLGS

SEQ ID NO: 887038 - protein, 176 aa, Homo sapiens
EVPGRPSNQVAPGAVLAPSSLPAAELAAQGESQSLEDLSNTSRPTSEVYKISFIFPNGDKYDGDCTRTSSGIYERNGIGIHTTPNGIVYTGSWKDDKMNGFGRLEHFSGAVYEGQFKDNMFHGLGTYTFPNGAKYTGNFNENRVEGEGEYTDIQGLEWSGNFHFTAAPDLKLKLHM

SEQ ID NO: 887039 - protein, 151 aa, Homo sapiens
EVPGRPSNQVAPGAVLAPSSLPAAELAAQGESQSLEDLSNTSRPTSEVYKISFIFPNGDKYDGDCTRTSSGIYERNGIGIHTTPNGIVYTGSWKDDKMNGFGRLEHFSGAVYEGQFKDNMFHGLGTYTFPNGAKYTGNFNENSFILQLLQT

SEQ ID NO: 887040 - protein, 176 aa, Homo sapiens; identical to SEQ ID NO: 887038

SEQ ID NO: 887041 - protein, 165 aa, Homo sapiens
EVPGRPSNQVAPGAVLAPSSLPAAELAAQGESQSLEDLSNTSRPTSEVYKISFIFPNGDKYDGDCTRTSSGIYERNGIGIHTTPNGIVYTGSWKDDKMNGFGRLEHFSGAVYEGQFKDNMFHGLGTYTFPNGAKYTGNFNENRIGKLKIKKNHCISKRLFSGMFA

SEQ ID NO: 887042 - protein, 151 aa, Homo sapiens
MSDNDDIEVESDADKRAHHNALERKRRDHIKDSFHSLRDSVPSLQGEKASRAQILDKATEYIQYMRRKNHTHQQDIDDLKRQNALLEQQVRALEKARSSAQLQTNYPSSDNSLYTNAKGSTISAFDGGSDSSSESEPEEPQSRKKLRMEAS

SEQ ID NO: 887043 - protein, 160 aa, Homo sapiens
MSDNDDIEVESDEEQPRFQSAADKRAHHNALERKRRDHIKDSFHSLRDSVPSLQGEKASRAQILDKATEYIQYMRRKNHTHQQDIDDLKRQNALLEQQVRALEKARSSAQLQTNYPSSDNSLYTNAKGSTISAFDGGSDSSSESEPEEPQSRKKLRMEAS

SEQ ID NO: 887044 - protein, 150 aa, Homo sapiens
GWRRLDAVSSGICSFSGATRAVCERDKNYKSRLPQRCEPGHVAGADRACVPPLIRCCSEEEQPRFQSAADKRAHHNALERKRRDHIKDSFHSLRDSVPSLQGEKASRAQILDKATEYIQYMRRKNHTHQQDIDDLKRQNALLEQQGESES

SEQ ID NO: 887045 - protein, 160 aa, Homo sapiens; identical to SEQ ID NO: 887043

SEQ ID NO: 887046 - protein, 103 aa, Homo sapiens
MSDNDDIEVESDEEQPRFQSAADKRAHHNALERKRRDHIKDSFHSLRDSVPSLQGEKASRAQILDKATEYIQYMRRKNHTHQQDIDDLKRQNALLEQQGESES

SEQ ID NO: 887047 - protein, 96 aa, Homo sapiens
MSDNDDIEVESDEEQPRFQSAADKRAHHNALERKRRDHIKDSFHSLRDSVPSLQGEKLYFLFWKLCTPVLHRQSLMQKCHTFISSYQVHKKKECKI

SEQ ID NO: 887048 - protein, 151 aa, Homo sapiens; identical to SEQ ID NO: 887042

SEQ ID NO: 887049 - protein, 70 aa, Homo sapiens
  misc_feature (1)..(1): Xaa can be any naturally occurring amino acid
  misc_feature (14)..(14): Xaa can be any naturally occurring amino acid
  misc_feature (47)..(47): Xaa can be any naturally occurring amino acid
  misc_feature (57)..(57): Xaa can be any naturally occurring amino acid
XFGKEFTPEVQAAXAEDEVTGVASALSSQIPTELTAHDAELSKDRLXSCKQSNNKSXLLRDHKKVSSRSQ

SEQ ID NO: 887050 - protein, 103 aa, Homo sapiens; identical to SEQ ID NO: 887046

SEQ ID NO: 887051 - protein, 103 aa, Homo sapiens; identical to SEQ ID NO: 887046

SEQ ID NO: 887052 - protein, 126 aa, Homo sapiens
MSDNDDIEVESDEEQPRFQSAADKRAHHNALERKRRDHIKDSFHSLRDSVPSLQGEKASRAQILDKATEYIQYMRRKNHTHQQDIDDLKRQNALLEQQVRALEKARSMAIWGWDREGVLGGIEVLY

SEQ ID NO: 887053 - protein, 160 aa, Homo sapiens; identical to SEQ ID NO: 887043

SEQ ID NO: 887054 - protein, 133 aa, Homo sapiens
MSDNDDIEVESDEEQPRFQSAADKRAHHNALERKRRDHIKDSFHSLRDSVPSLQGEKASRAQILDKATEYIQYMRRKNHTHQQDIDDLKRQNALLEQQGEHPSSWGSWPCCAPARSGFGTWACRVRASHGVCA

SEQ ID NO: 887055 - protein, 1045 aa, Homo sapiens
MGEIEQRPTPGSRLGAPENSGISTLERGQKPPPTPSGKLVSIKIQMLDDTQEAFEVPQRAPGKVLLDAVCNHLNLVEGDYFGLEFPDHKKITVWLDLLKPIVKQIRRPKHVVVKFVVKFFPPDHTQLQEELTRYLFALQVKQDLAQGRLTCNDTSAALLISHIVQSEIGDFDEALDREHLAKNKYIPQQDALEDKIVEFHHNHIGQTPAESDFQLLEIARRLEMYGIRLHPAKDREGTKINLAVANTGILVFQGFTKINAFNWAKVRKLSFKRKRFLIKLRPDANSAYQDTLEFLMASRDFCKSFWKICVEHHAFFRLFEEPKPKPKPVLFSRGSSFRFSGRTQKQVLDYVKEGGHKKVQFERKHSKIHSIRSLASQPTELNSEVLEQSQQSTSLTFGEGAESPGGQSCRRGKEPKVSAGEPGSHPSPAPRRSPAGNKQADGAASAPTEEEEEVVKDRTQQSKPQPPQPSTGSLTGSPHLSELSVNSQGGVAPANVTLSPNLSPDTKQASPLISPLLNDQACPRTDDEDEGRRKRFPTDKAYFIAKEVSTTERTYLKDLEVITSWFQSTVSKEDAMPEALKSLIFPNFEPLHKFHTNFLKEIEQRLALWEGRSNAQIRDYQRIGDVMLKNIQGMKHLAAHLWKHSEALEALENGIKSSRRLENFCRDFELQKVCYLPLNTFLLRPLHRLMHYKQVLERLCKHHPPSHADFRDCRAALAEITEMVAQLHGTMIKMENFQKLHELKKDLIGIDNLVVPGREFIRLGSLSKLSGKGLQQRMFFLFNDVLLYTSRGLTASNQFKVHGQLPLYGMTIEESEDEWGVPHCLTLRGQRQSIIVAASSRSEMEKWVEDIQMAIDLAEKSSSPAPEFLASSPPDNKSPDEATAADQESEDDLSASRTSLERQAPHRGNTMVHVCWHRNTSVSMVDFSIAVENQLSGNLLRKFKNSNGWQKLWVVFTNFCLFFYKSHQDNHPLASLPLLGYSLTIPSESENIQKDYVFKLHFKSHVYYFRAESEYTFERWMEVIRSATSSASRPHVLSHKESLVY

SEQ ID NO: 887056 - protein, 1045 aa, Homo sapiens; identical to SEQ ID NO: 887055

SEQ ID NO: 887057 - protein, 1045 aa, Homo sapiens; identical to SEQ ID NO: 887055

SEQ ID NO: 887058 - protein, 1045 aa, Homo sapiens; identical to SEQ ID NO: 887055

SEQ ID NO: 887059 - protein, 1027 aa, Homo sapiens
MGEIEQRPTPGSRLGAPENSGISTLERGQKPPPTPSGKLVSIKIQMLDDTQEAFEVPQRAPGKVLLDAVCNHLNLVEGDYFGLEFPDHKKITVWLDLLKPIVKQIRRPKHVVVKFVVKFFPPDHTQLQEELTRYLFALQVKQDLAQGRLTCNDTSAALLISHIVQSEIGDFDEALDREHLAKNKYIPQQDALEDKIVEFHHNHIGQTPAESDFQLLEIARRLEMYGIRLHPAKDREGTKINLAVANTGILVFQGFTKINAFNWAKVRKLSFKRKRFLIKLRPDANSAYQDTLEFLMASRDFCKSFWKPKPVLFSRGSSFRFSGRTQKQVLDYVKEGGHKKVQFERKHSKIHSIRSLASQPTELNSEVLEQSQQSTSLTFGEGAESPGGQSCRRGKEPKVSAGEPGSHPSPAPRRSPAGNKQADGAASAPTEEEEEVVKDRTQQSKPQPPQPSTGSLTGSPHLSELSVNSQGGVAPANVTLSPNLSPDTKQASPLISPLLNDQACPRTDDEDEGRRKRFPTDKAYFIAKEVSTTERTYLKDLEVITSWFQSTVSKEDAMPEALKSLIFPNFEPLHKFHTNFLKEIEQRLALWEGRSNAQIRDYQRIGDVMLKNIQGMKHLAAHLWKHSEALEALENGIKSSRRLENFCRDFELQKVCYLPLNTFLLRPLHRLMHYKQVLERLCKHHPPSHADFRDCRAALAEITEMVAQLHGTMIKMENFQKLHELKKDLIGIDNLVVPGREFIRLGSLSKLSGKGLQQRMFFLFNDVLLYTSRGLTASNQFKVHGQLPLYGMTIEESEDEWGVPHCLTLRGQRQSIIVAASSRSEMEKWVEDIQMAIDLAEKSSSPAPEFLASSPPDNKSPDEATAADQESEDDLSASRTSLERQAPHRGNTMVHVCWHRNTSVSMVDFSIAVENQLSGNLLRKFKNSNGWQKLWVVFTNFCLFFYKSHQDNHPLASLPLLGYSLTIPSESENIQKDYVFKLHFKSHVYYFRAESEYTFERWMEVIRSATSSASRPHVLSHKESLVY

SEQ ID NO: 887060 - protein, 922 aa, Homo sapiens
MGEIEQRPTPGSRLGAPENSGISTLERGQKPPPTPSGKLVSIKIQMLDDTQEAFEVPQRAPGKVLLDAVCNHLNLVEGDYFGLEFPDHKKITVWLDLLKPIVKQIRRPKHVVVKFVVKFFPPDHTQLQEELTRYLFALQVKQDLAQGRLTCNDTSAALLISHIVQSEIGDFDEALDREHLAKNKYIPQQDALEDKIVEFHHNHIGQTPAESDFQLLEIARRLEMYGIRLHPAKDREGTKINLAVANTGILVFQGFTKINAFNWAKVRKLSFKRKRFLIKLRPDANSAYQDTLEFLMASRDFCKSFWKICVEHHAFFRLFEEPKPKPKPVLFSRGSSFRFSGRTQKQVLDYVKEGGHKKVQFERKHSKIHSIRSLASQPTELNSEVLEQSQQSTSLTFGEGAESPGGQSCRRGKEPKVSAGEPGSHPSPAPRRSPAGNKQADGAASAPTEEEEEVVKDRTQQSKPQPPQPSTGSLTGSPHLSELSVNSQGGVAPANVTLSPNLSPDTKQASPLISPLLNDQACPRTDDEDEGRRKRFPTDKAYFIAKEVSTTERTYLKDLEVITSWFQSTVSKEDAMPEALKSLIFPNFEPLHKFHTNFLKEIEQRLALWEGRSNAQIRDYQRIGDVMLKNIQGMKEFIRLGSLSKLSGKGLQQRMFFLFNDVLLYTSRGLTASNQFKVHGQLPLYGMTIEESEDEWGVPHCLTLRGQRQSIIVAASSRSEMEKWVEDIQMAIDLAEKSSSPAPEFLASSPPDNKSPDEATAADQESEDDLSASRTSLERQAPHRGNTMVHVCWHRNTSVSMVDFSIAVENQLSGNLLRKFKNSNGWQKLWVVFTNFCLFFYKSHQDNHPLASLPLLGYSLTIPSESENIQKDYVFKLHFKSHVYYFRAESEYTFERWMEVIRSATSSASRPHVLSHKESLVY

SEQ ID NO: 887061 - protein, 786 aa, Homo sapiens
MYVDEAVYSYGGASLEEACHPARQMHSAYQDTLEFLMASRDFCKSFWKICVEHHAFFRLFEEPKPKPKPVLFSRGSSFRFSGRTQKQVLDYVKEGGHKKVQFERKHSKIHSIRSLASQPTELNSEVLEQSQQSTSLTFGEGAESPGGQSCRRGKEPKVSAGEPGSHPSPAPRRSPAGNKQADGAASAPTEEEEEVVKDRTQQSKPQPPQPSTGSLTGSPHLSELSVNSQGGVAPANVTLSPNLSPDTKQASPLISPLLNDQACPRTDDEDEGRRKRFPTDKAYFIAKEVSTTERTYLKDLEVITSWFQSTVSKEDAMPEALKSLIFPNFEPLHKFHTNFLKEIEQRLALWEGRSNAQIRDYQRIGDVMLKNIQGMKHLAAHLWKHSEALEALENGIKSSRRLENFCRDFELQKVCYLPLNTFLLRPLHRLMHYKQVLERLCKHHPPSHADFRDCRAALAEITEMVAQLHGTMIKMENFQKLHELKKDLIGIDNLVVPGREFIRLGSLSKLSGKGLQQRMFFLFNDVLLYTSRGLTASNQFKVHGQLPLYGMTIEESEDEWGVPHCLTLRGQRQSIIVAASSRSEMEKWVEDIQMAIDLAEKSSSPAPEFLASSPPDNKSPDEATAADQESEDDLSASRTSLERQAPHRGNTMVHVCWHRNTSVSMVDFSIAVENQLSGNLLRKFKNSNGWQKLWVVFTNFCLFFYKSHQDNHPLASLPLLGYSLTIPSESENIQKDYVFKLHFKSHVYYFRAESEYTFERWMEVIRSATSSASRPHVLSHKESLVY

SEQ ID NO: 887062 - protein, 1045 aa, Homo sapiens; identical to SEQ ID NO: 887055

SEQ ID NO: 887063 - protein, 657 aa, Homo sapiens
MGEIEQRPTPGSRLGAPENSGISTLERGQKPPPTPSGKLVSIKIQMLDDTQEAFEVPQRAPGKVLLDAVCNHLNLVEGDYFGLEFPDHKKITVWLDLLKPIVKQIRRPKHVVVKFVVKFFPPDHTQLQEELTRYLFALQVKQDLAQGRLTCNDTSAALLISHIVQSEIGDFDEALDREHLAKNKYIPQQDALEDKIVEFHHNHIGQTPAESDFQLLEIARRLEMYGIRLHPAKDREGTKINLAVANTGILVFQGFTKINAFNWAKVRKLSFKRKRFLIKLRPDANSAYQDTLEFLMASRDFCKSFWKICVEHHAFFRLFEEPKPKPKPVLFSRGSSFRFSGRTQKQVLDYVKEGGHKKVQFERKHSKIHSIRSLASQPTELNSEVLEQSQQSTSLTFGEGAESPGGQSCRRGKEPKVSAGEPGSHPSPAPRRSPAGNKQADGAASAPTEEEEEVVKDRTQQSKPQPPQPSTGSLTGSPHLSELSVNSQGGVAPANVTLSPNLSPDTKQASPLISPLLNDQACPRTDDEDEGRRKRFPTDKAYFIAKEVSTTERTYLKDLEVITSWFQSTVSKEDAMPEALKSLIFPNFEPLHKFHTNFLKEIEQRLALWEGRSNAQIRDYQRIGDVMLKNIQGMKAGVRWRDLGSLQPPPPKFRAIL

SEQ ID NO: 887064 - protein, 151 aa, Homo sapiens
AAAARFAPLLPARVALAPASRRPWRPGARSPPTPPAPPSPPPRATFDGSDLSRPPPALLARPRRRRPRVLIAGAAAPSAAGGLGAADPGARAGRGSRRSRRRCGDGVLLLLPRLECNGVISAHRNLHLPGSSDSPVSTSQIFSKPLSSWEK

SEQ ID NO: 887065 - protein, 117 aa, Homo sapiens
MGEIEQRPTPGSRLGAPENSGISTLERGQKPPPTPSGKLVSIKIQMLDDTQEAFEVPMVSSSSFLKATGSSWTGWVLRCSMKPKHHSHLIEKFGEDRILTHLTGSISYTNWAGSRSL

SEQ ID NO: 887066 - protein, 161 aa, Homo sapiens
MHYKQVLERLCKHHPPSHADFRDCRAALAEITEMVAQLHGTMIKMENFQKLHELKKDLIGIDNLVVPGRVSSSGLTMHCAGSRKEASEGLTFEPFEERPLQSKMSSFHPPGRQLEKHNSVVSSESLCSEEIKQSSDLIFCFFSLRGDSLLYLFPYHIPQKI

SEQ ID NO: 887067 - protein, 1045 aa, Homo sapiens; identical to SEQ ID NO: 887055

SEQ ID NO: 887068 - protein, 1045 aa, Homo sapiens; identical to SEQ ID NO: 887055

SEQ ID NO: 887069 - protein, 822 aa, Homo sapiens [sequence omitted]

SEQ ID NO: 887070 - protein, 470 aa, Homo sapiens [sequence omitted]

SEQ ID NO: 887071 - protein, 850 aa, Homo sapiens [sequence omitted]

SEQ ID NO: 887072 - protein, 160 aa, Homo sapiens
MEAERPQEEEDGEQGPPQDEEGWPPPNSTTRPWRSAPPSPPPPGTRHTALGPRSASLLSLQTELLLDLVAEAQSRRLEEQRATFYTPQNPSSLAPAPLRPLEDREQLYSTILSHQCQRMEAQRSEPPLPPGGQELLELLLRVQGGGRMEEQRSRPPTHTC

SEQ ID NO: 887073 - protein, 160 aa, Homo sapiens; identical to SEQ ID NO: 887072

SEQ ID NO: 887074 - protein, 160 aa, Homo sapiens; identical to SEQ ID NO: 887072

SEQ ID NO: 887075 - protein, 160 aa, Homo sapiens; identical to SEQ ID NO: 887072

SEQ ID NO: 887076 - protein, 128 aa, Homo sapiens [sequence omitted]

SEQ ID NO: 887077 - protein, 128 aa, Homo sapiens [sequence omitted]

SEQ ID NO: 887078 - protein, 128 aa, Homo sapiens [sequence omitted]

SEQ ID NO: 887079 - protein, 110 aa, Homo sapiens
PTIPYPKKKTPTSRSRDAANFEQFLQERIKVNGKAGNLGGGVVTIERSKSKITVTSEVPFSKRYLKYLTKKYLKKNNLRDWLRVVANSKESYELRYFQINQDEEEEEDED

SEQ ID NO: 887080 - protein, 241 aa, Homo sapiens
MDAANFEQFLQERIKVNGKAGNLGGGVVTIERSKSKITVTSEVPFSKRYLKYLTKKYLKKNNLRDWLRVVANSKESYELRYFQINQDEEDPFVSIAVHCWDKHYGFQLYQSDPSGNYGGWKAHAGNIIALSCVTVETRLKEGTNDLEVRTGLAINVLHKTMDVSKLSAEQRENLHPYNERCTTGIRVLTQTKGAVVKHEERSKLGKQTQQHKLCAPPRNLKRGPPGKHGTVQHVRWVQNRA

SEQ ID NO: 887081 - protein, 236 aa, Homo sapiens
MDAANFEQFLQERIKVNGKAGNLGGGVVTIERSKSKITVTSEVPFSKRYLKYLTKKKKRKKKIGGILYLRGGEKRGYGKWAVGSLGGSRGPQVFWVQGGETVAGLPIKGEGGIKLGKGRVTLICLEKGRRRTAQTAPRHRKRGHNPGTTEQRGASKATITQEHKRTTFESINNMDDTLNRKTDVHRKERYSKKRPETSKPDKEQKKGSRQLNEQTTKRELRRAINAQRRFAQAKED

SEQ ID NO: 887082 - protein, 128 aa, Homo sapiens [sequence omitted]

SEQ ID NO: 887083 - protein, 96 aa, Homo sapiens
VASELRALCVCVVRSPPFLTPLPPWLLWLVWLRVRPRLQGRHVGLAEPGIYPGSLGTAPCSVLLGWAGRSAGAGQSPCRSQHVVGGGGRGPRKSLW

SEQ ID NO: 887084 - protein, 128 aa, Homo sapiens [sequence omitted]

SEQ ID NO: 887085 - protein, 128 aa, Homo sapiens [sequence omitted]

SEQ ID NO: 887086 - protein, 134 aa, Homo sapiens
MWDGASLRGSSPQLPTKSVARHQVLKFTLDCTHPVEDGIMDAANFEQFLQERIKVNGKAGNLGGGVVTIERSKSKITVTSEVPFSKRYLKYLTKKYLKKNNLRDWLRVVANSKESYELRYFQINQDEEEEEDED

SEQ ID NO: 887087 - protein, 128 aa, Homo sapiens [sequence omitted]

SEQ ID NO: 887088 - protein, 115 aa, Homo sapiens
AAAYYYYYCSEFKLLTMYGDMDAANFEQFLQERIKVNGKAGNLGGGVVTIERSKSKITVTSEVPFSKRYLKYLTKKYLKKNNLRDWLRVVANSKESYELRYFQINQDEEEEEDED

SEQ ID NO: 887089 - protein, 109 aa, Homo sapiens
MAPVKKLVVKGGRIMDAANFEQFLQERIKVNGKAGNLGGGVVTIERSKSKITVTSEVPFSKRYLKYLTKKYLKKNNLRDWLRVVANSKESYELRYFQINQDEEEEEDED

SEQ ID NO: 887090 - protein, 106 aa, Homo sapiens
MCFYYKYEDGIMDAAKNEQFLQERIKVNGKAGNLGGGVVTIERSKSKITVTSEVPFSKRYLKYLTKKYLKKNNLRDWLRVVANSKESYELRYFQINQDEEEEEDED

SEQ ID NO: 887091 - protein, 110 aa, Homo sapiens; identical to SEQ ID NO: 887079

SEQ ID NO: 887092 - protein, 128 aa, Homo sapiens [sequence omitted]

SEQ ID NO: 887093 - protein, 128 aa, Homo sapiens [sequence omitted]

SEQ ID NO: 887094 - protein, 128 aa, Homo sapiens [sequence omitted]

SEQ ID NO: 887095 - protein, 128 aa, Homo sapiens [sequence omitted]

SEQ ID NO: 887096 - protein, 109 aa, Homo sapiens; identical to SEQ ID NO: 887089

SEQ ID NO: 887097 - protein, 113 aa, Homo sapiens
MDAANFEQFLQERIKVNGKAGNLGGGVVTIERSKSKITVTSEVPFSKRYLKYLTKKYLKKNNLRDWLRVVANSKESYELRYFQINQDEEENEIYILVFLLFFVRRRGREFSSS

SEQ ID NO: 887098 - protein, 114 aa, Homo sapiens
YPISSPSYLFLSHTKITLDLPAANFEQFLQERIKVNGKAGNLGGGVVTIERSKSKITVTSEVPFSKRYLKYLTKKYLKKNNLRDWLRVVANSKESYELRYFQINQDEEEEEDED

SEQ ID NO: 887099 - protein, 112 aa, Homo sapiens
  misc_feature (13)..(13): Xaa can be any naturally occurring amino acid
  misc_feature (19)..(19): Xaa can be any naturally occurring amino acid
EIINSITYLERNXNLKRTXAANFEQFLQERIKVNGKAGNLGGGVVTIERSKSKITVTSEVPFSKRYLKYLTKKYLKKNNLRDWLRVVANSKESYELRYFQINQDEEEEEDED

SEQ ID NO: 887100 - protein, 107 aa, Homo sapiens
VASELRALCVCVVRSPPFLTPLPPWLLWLVWLRVRPRLQGRHVGLAEPGIYPGSLGTAPCSVLLGWAGRSAGAGQSPCRSQHVVGGGGRGPRLVREIREVSEARGPS

SEQ ID NO: 887101 - protein, 134 aa, Homo sapiens
MVLSDPGDSEGDGGINRMQLWKQVLKFTLDCTHPVEDGIMDAANFEQFLQERIKVNGKAGNLGGGVVTIERSKSKITVTSEVPFSKRYLKYLTKKYLKKNNLRDWLRVVANSKESYELRYFQINQDEEEEEDED

SEQ ID NO: 887102 - protein, 128 aa, Homo sapiens
HSGWNTWSYQRPSAEWPIDLSKLRHVVLVEDGIMDAANFEQFLQERIKVNGKAGNLGGGVVTIERSKSKITVTSEVPFSKRYLKYLTKKYLKKNNLRDWLRVVANSKESYELRYFQINQDEEEEEDED

SEQ ID NO: 887103 - protein, 107 aa, Homo sapiens
  misc_feature (7)..(7): Xaa can be any naturally occurring amino acid
NLLMQDXKKPSDHGCCHFEQFLQERIKVNGKAGNLGGGVVTIERSKSKITVTSEVPFSKRYLKYLTKKYLKKNNLRDWLRVVANSKESYELRYFQINQDEEEEEDED

SEQ ID NO: 887104 - protein, 114 aa, Homo sapiens; identical to SEQ ID NO: 887098

SEQ ID NO: 887105 - protein, 109 aa, Homo sapiens; identical to SEQ ID NO: 887089

SEQ ID NO: 887106 - protein, 112 aa, Homo sapiens; identical to SEQ ID NO: 887099
  misc_feature (13)..(13): Xaa can be any naturally occurring amino acid
  misc_feature (19)..(19): Xaa can be any naturally occurring amino acid

SEQ ID NO: 887107 - protein, 128 aa, Homo sapiens [sequence omitted]

SEQ ID NO: 887108 - protein, 128 aa, Homo sapiens [sequence omitted]

SEQ ID NO: 887109 - protein, 128 aa, Homo sapiens [sequence omitted]

SEQ ID NO: 887110 - protein, 128 aa, Homo sapiens [sequence omitted]

SEQ ID NO: 887111 - protein, 128 aa, Homo sapiens [sequence omitted]

SEQ ID NO: 887112 - protein, 128 aa, Homo sapiens [sequence omitted]

SEQ ID NO: 887113 - protein, 128 aa, Homo sapiens [sequence omitted]

SEQ ID NO: 887114 - protein, 128 aa, Homo sapiens [sequence omitted]

SEQ ID NO: 887115 - protein, 128 aa, Homo sapiens [sequence omitted]

SEQ ID NO: 887116 - protein, 149 aa, Homo sapiens
MAADIPRVTTPLSSLVQVPQEEDRQEEEVTTMILEDDSWVQEAVLQEDGPESEPFPQSAGKGGPQEEVTRGPQGALGRLRELCRRWLRPEVHTKEQMLTMLPKEIQAWLQEHRPESSEEAAALVEDLTQTLQDSAVAVFASLPVEVTSL

SEQ ID NO: 887117 - protein, 163 aa, Homo sapiens [sequence omitted]

SEQ ID NO: 887118 - protein, 152 aa, Homo sapiens
MAVAVDQQIQTPSVQDLQIVKLEEDSHWEQEISLQGNYPGPETSCQSFWHFRYQEASRPREALLQLQKLCCQWLRPEKCTKEQILELLVLEQFPTVLLQEIQIWVRQQHPESGEEAVALVEDLQKEPGRQRLEPCLMWLWEFLQRRAGVARR

SEQ ID NO: 887119 - protein, 163 aa, Homo sapiens [sequence omitted]

SEQ ID NO: 887120 - protein, 152 aa, Homo sapiens; identical to SEQ ID NO: 887118

SEQ ID NO: 887121 - protein, 163 aa, Homo sapiens [sequence omitted]

SEQ ID NO: 887122 - protein, 163 aa, Homo sapiens [sequence omitted]

SEQ ID NO: 887123 - protein, 163 aa, Homo sapiens [sequence omitted]

SEQ ID NO: 887124 - protein, 614 aa, Homo sapiens
MAADIPRVTTPLSSLVQVPQEEDRQEEEVTTMILEDDSWVQEAVLQEDGPESEPFPQSAGKGGPQEEVTRGPQGALGRLRELCRRWLRPEVHTKEQMLTMLPKEIQAWLQEHRPESSEEAAALVEDLTQTLQDSDFEIQSENGENCNQDMFENESRKIFSEMPEGESAQHSDGESDFERDAGIQRLQGHTPGEDHGEVVSQDREVGQLIGLQGTYLGEKPYECPQCGKTFSRKSHLITHERTHTGEKYYKCDECGKSFSDGSNFSRHQTTHTGEKPYKCRDCGKSFSRSANLITHQRIHTGEKPFQCAECGKSFSRSPNLIAHQRTHTGEKPYSCPECGKSFGNRSSLNTHQGIHTGEKPYECKECGESFSYNSNLIRHQRIHTGEKPYKCTDCGQRFSQSSALITHRRTHTGEKPYQCSECGKSFSRSSNLATHRRTHMVEKPYKCGVCGKSFSQSSSLIAHQGMHTGEKPYELPDHVGKSFSWSSNLLKHQRIHTGEKPYKCSECGKCFSQRSQLVVHQRTHTGEKPYKCLMCGKSFSRGSILVMHQRAHLGDKPYRCPECGKGFSWNSVLIIHQRIHTGEKPYKCPECGKGFSNSSNFITHQRTHMKEKLY

SEQ ID NO: 887125 - protein, 163 aa, Homo sapiens [sequence omitted]

SEQ ID NO: 887126 - protein, 614 aa, Homo sapiens; identical to SEQ ID NO: 887124

SEQ ID NO: 887127 - protein, 614 aa, Homo sapiens; identical to SEQ ID NO: 887124

SEQ ID NO: 887128 - protein, 140 aa, Homo sapiens [sequence omitted]

SEQ ID NO: 887129 - protein, 199 aa, Homo sapiens
MAADIPRVTTPLSSLVQVPQEEDRQEEEVTTMILEDDSWVQEAVLQEDGPESEPFPQSAGKGGPQEEVTRGPQGALGRLRELCRRWLRPEVHTKEQMLTMLPKEIQAWLQEHRPESSEEAAALVEDLTQTLQDSDFEIQSENGENCNQDMFENESRKIFSEMPEGESAQHSDGESDFERDAGIQRLQGHTPESVRSTET

SEQ ID NO: 887130 - protein, 145 aa, Homo sapiens
MAADIPRVTTPLSSLVQVPQEEDRQEEEVTTMILEDDSWVQEAVLQEDGPESEPFPQSAGKGGPQEEVTRGPQGALGRLRELCRRWLRPEVHTKEQMLTMLPKEIQAWLQEHRPESSEEAAALVEDLTQTLQDSETASCVHGCPV

SEQ ID NO: 887131 - protein, 149 aa, Homo sapiens; identical to SEQ ID NO: 887116

SEQ ID NO: 887132 - protein, 122 aa, Homo sapiens
GRAEPLARRERQAGQACAAAAAAVAAAPTMSAAKENPCRKFQANIFNKSKCQNCFKPRESHLLNDEDLTQAKPIYGGWLLLAPDGTDFDNPVHRSRKWQRRFFILYEHGLLRYALDEMMSSQ

SEQ ID NO: 887133 - protein, 92 aa, Homo sapiens
GRAEPLARRERQAGQACAAAAAAVAAAPTMSAAKENPCRKFQANIFNKSKCQNCFKPRESHLLNDEDLTQQNTHPLEMKRGAHIYDARMFSC

SEQ ID NO: 887134 - protein, 1027 aa, Homo sapiens
GRAEPLARRERQAGQACAAAAAAVAAAPTMSAAKENPCRKFQANIFNKSKCQNCFKPRESHLLNDEDLTQAKPIYGGWLLLAPDGTDFDNPVHRSRKWQRRFFILYEHGLLRYALDEMPTTLPQGTINMNQCTDVVDGEGRTGQKFSLCILTPEKEHFIRAETKEIVSGWLEMLMVYPRTNKQNQKKKRKVEPPTPQEPGPAKVAVTSSSSSSSSSIPSAEKVPTTKSTLWQEEMRTKDQPDGSSLSPAQSPSQSQPPAASSLREPGLESKEEESAMSSDRMDCGRKVRVESGYFSLEKTKQDLKAEEQQLPPPLSPPSPSTPNHRRSQVIEKFEALDIEKAEHMETNAVGPSPSSDTRQGRSEKRAFPRKRPDLLNFKKGWLTKQYEDGQWKKHWFVLADQSLRYYRDSVAEEAADLDGEIDLSACYDVTEYPVQRNYGFQIHTKEGEFTLSAMTSGIRRNWIQTIMKHVHPTTAPDVTSSLPEEKNKSSCSFETCPRPTEKQEAELGEPDPEQKRSRARERRREGRSKTFDWAEFRPIQQALAQERVGGVGPADTHEPLRPEAEPGELERERARRREERRKRFGMLDATDGPGTEDAALRMEVDRSPGLPMSDLKTHNVHVEIEQRWHQVETTPLREEKQVPIAPVHLSSEDGGDRLSTHELTSLLEKELEQSQKEASDLLEQNRLLQDQLRVALGREQSAREGYVLQATCERGFAAMEETHQKKIEDLQRQHQRELEKLREEKDRLLAEETAATISAIEAMKNAHREEMERELEKSQRSQISSVNSDVEALRRQYLEELQSVQRELEVLSEQYSQKCLENAHLAQALEAERQALRQCQRENQELNAHNQELNNRLAAEITRLRTLLTGDGGGEATGSPLAQGKDAYELEVLLRVKESEIQYLKQEISSLKDELQTALRDKKYASDKYKDIYTELSIAKAKADCDISRLKEQLKAATEALGEKSPDSATVSGYDIMKSKSNPDFLKKDRSCVTRQLRNIRSKSLKEGLTVQERLKLFESRDLKKD

SEQ ID NO: 887135 - protein, 902 aa, Homo sapiens
MAVGCSWLQMGPTLTTQCTGLGNGSDGSSSFTSTASCATPWMRWWLEMLMVYPRTNKQNQKKKRKVEPPTPQEPGPAKVAVTSSSSSSSSSIPSAEKVPTTKSTLWQEEMRTKDQPDGSSLSPAQSPSQSQPPAASSLREPGLESKEEESAMSSDRMDCGRKVRVESGYFSLEKTKQDLKAEEQQLPPPLSPPSPSTPNHRRSQVIEKFEALDIEKAEHMETNAVGPSPSSDTRQGRSEKRAFPRKRPDLLNFKKGWLTKQYEDGQWKKHWFVLADQSLRYYRDSVAEEAADLDGEIDLSACYDVTEYPVQRNYGFQIHTKEGEFTLSAMTSGIRRNWIQTIMKHVHPTTAPDVTSSLPEEKNKSSCSFETCPRPTEKQEAELGEPDPEQKRSRARERRREGRSKTFDWAEFRPIQQALAQERVGGVGPADTHEPLRPEAEPGELERERARRREERRKRFGMLDATDGPGTEDAALRMEVDRSPGLPMSDLKTHNVHVEIEQRWHQVETTPLREEKQVPIAPVHLSSEDGGDRLSTHELTSLLEKELEQSQKEASDLLEQNRLLQDQLRVALGREQSAREGYVLQATCERGFAAMEETHQKKIEDLQRQHQRELEKLREEKDRLLAEETAATISAIEAMKNAHREEMERELEKSQRSQISSVNSDVEALRRQYLEELQSVQRELEVLSEQYSQKCLENAHLAQALEAERQALRQCQRENQELNAHNQELNNRLAAEITRLRTLLTGDGGGEATGSPLAQGKDAYELEVLLRVKESEIQYLKQEISSLKDELQTALRDKKYASDKYKDIYTELSIAKAKADCDISRLKEQLKAATEALGEKSPDSATVSGYDIMKSKSNPDFLKKDRSCVTRQLRNIRSKSLKEGLTVQERLKLFESRDLKKD

SEQ ID NO: 887136 - protein, 1065 aa, Homo sapiens
GRAEPLARRERQAGQACAAAAAAVAAAPTMSAAKENPCRKFQANIFNKSKCQNCFKPRESHLLNDEDLTQAKPIYGGWLLLAPDGTDFDNPVHRSRKWQRRFFILYEHGLLRYALDEMPTTLPQGTINMNQCTDVVDGEGRTGQKFSLCILTPEKEHFIRAETKEIVSGWLEMLMVYPRTNKQNQKKKRKVEPPTPQEPGPAKVAVTSSSSSSSSSIPSAEKVPTTKSTLWQEEMRTKDQPDGSSLSPAQSPSQSQPPAASSLREPGLESKEEESAMSSDRMDCGRKVRVESGYFSLEKTKQDLKAEEQQLPPPLSPPSPSTPNHRRSQVIEKFEALDIEKAEHMETNAVGPSPSSDTRQGRSEKRAFPRKRDFTNEAPPAPLPDASASPLSPHRRAKSLDRRSTEPSVTPDLLNFKKGWLTKQYEDGQWKKHWFVLADQSLRYYRDSVAEEAADLDGEIDLSACYDVTEYPVQRNYGFQIHTKEGEFTLSAMTSGIRRNWIQTIMKHVHPTTAPDVTSSLPEEKNKSSCSFETCPRPTEKQEAELGEPDPEQKRSRARERRREGRSKTFDWAEFRPIQQALAQERVGGVGPADTHEPLRPEAEPGELERERARRREERRKRFGMLDATDGPGTEDAALRMEVDRSPGLPMSDLKTHNVHVEIEQRWHQVETTPLREEKQVPIAPVHLSSEDGGDRLSTHELTSLLEKELEQSQKEASDLLEQNRLLQDQLRVALGREQSAREGYVLQATCERGFAAMEETHQKKIEDLQRQHQRELEKLREEKDRLLAEETAATISAIEAMKNAHREEMERELEKSQRSQISSVNSDVEALRRQYLEELQSVQRELEVLSEQYSQKCLENAHLAQALEAERQALRQCQRENQELNAHNQELNNRLAAEITRLRTLLTGDGGGEATGSPLAQGKDAYELEVLLRVKESEIQYLKQEISSLKDELQTALRDKKYASDKYKDIYTELSIAKAKADCDISRLKEQLKAATEALGEKSPDSATVSGYDIMKSKSNPDFLKKDRSCVTRQLRNIRSKSLKEGLTVQERLKLFESRDLKKD

SEQ ID NO: 887137 - protein, 2334 aa, Homo sapiens
GRAEPLARRERQAGQACAAAAAAVAAAPTMSAAKENPCRKFQANIFNKSKCQNCFKPRESHLLNDEDLTQAKPIYGGWLLLAPDGTDFDNPVHRSRKWQRRFFILYEHGLLRYALDEMPTTLPQGTINMNQCTDVVDGEGRTGQKFSLCILTPEKEHFIRAETKEIVSGWLEMLMVYPRTNKQNQKKKRKVEPPTPQEPGPAKVAVTSSSSSSSSSIPSAEKVPTTKSTLWQEEMRTKDQPDGSSLSPAQSPSQSQPPAASSLREPGLESKEEESAMSSDRMDCGRKVRVESGYFSLEKTKQDLKAEEQQLPPPLSPPSPSTPNHRRSQVIEKFEALDIEKAEHMETNAVGPSPSSDTRQGRSEKRAFPRKRDFTNEAPPAPLPDASASPLSPHRRAKSLDRRSTEPSVTPDLLNFKKGWLTKQYEDGQWKKHWFVLADQSLRYYRDSVAEEAADLDGEIDLSACYDVTEYPVQRNYGFQIHTKEGEFTLSAMTSGIRRNWIQTIMKHVHPTTAPDVTSSLPEEKNKSSCSFETCPRPTEKQEAELGEPDPEQKRSRARERRREGRSKTFDWAEFRPIQQALAQERVGGVGPADTHEPLRPEAEPGELERERARRREERRKRFGMLDATDGPGTEDAALRMEVDRSPGLPMSDLKTHNVHVEIEQRWHQVETTPLREEKQVPIAPVHLSSEDGGDRLSTHELTSLLEKELEQSQKEASDLLEQNRLLQDQLRVALGREQSAREGYVLQTEVAASPSGAWQRLHRVNQDLQSELEAQCQRQELITHQIQTLKRSYGEAKDTIRHHEAEIRSLQARLSNAAAELAIKEQALAKLKGDLKREQGRVREQLEERQHSEAALSSQLRASEQKLKSAEALLLEKTQELRGLETQQALQRDRQKEVQRLQERIADLSQQLGASEQAQRLMEEKLQRNYELLLESCEKEKQALLQNLKEVEDKASAYEDQLQGQAQQVETLQKEKLSATFEGSEQVHQLEEQLEAREASVRRLAEHVQSLCDERDLLRQRFQELTERVATSDEDVAELREKLRRREADNQSLEHSYQRVSSQLQSMHTLLREKEEELERIKEAHEKVLEKKEQDLNEALVKMVALGSSLEETEIKLQAKEEILRKFASESPKDMEEPRSTPEETERDGTLLPGQPVQATRAPLGLPHTRLEDEDEDLGAPPGEEYGDGSPSREDSMVPPKSVEVLDREGHQQGTAKLDQGAPGVKRQRIRFSTIQCQRYIHPEGSEKTWTSSTSSDTSQDRSPSEESMSSEPAPSVLPATGDSDTYLSIIHSLETKLYVTEEKLKDVTVRLESQQGQSREALLALHHQWAGTEAQLREQLRASLLQVGALASQLEQERQERARRVEGHVGELGDFQVKNSQALMCLENCREQLRSLPRASQEDEQDARAASLASVESALVSAIQALQHWPAPAHGGARAQLETGGTEENGKPASLQQCSQSELTEQEQVRLLSDQIALEASLISQIADSLKNTTSDVSRMLHEISWSGQPPMESAGAPVDTWARKVLVDGEFWSQVESLRKHLGTLGGEAVGASGDGQQSIPQGLAPILANATWVRAELSFATQSVRESFHRRLQSIQETLRGTQTALRQHKCLLREILGAYQTPDFERVMQQVLEALRLPAGHEDGVQLSWDLSPLGEVLGRDSDSSQEPFDVSDQSPGAFVAIQEELAQQLKEKASLLEEIAAALPSLPPVESLRDCQKLLQVSQSLSYNTCLGGLGQYSSLLVQDAIIQAQVCYASCRIRLEYEKELQLCKESWQTREPSCSEQAQAARALREEYEELLRKQKSEYLDVIAIVERENAELKAKAAQLDHQQQCLEDAESKHSMSMFTLRGRYEEEIRCVVEQLTRTESTLQAERSRVLSQLDASVRDRQDMERHHGEQIQTLEDRFQLKVRELQTIHEEELRTLQEHYSQSLRCLQDTLCLHQGPHPKALPAPAPNWQATQGEADSMTGLRERIQELEAQMDVMREELGHKDLEGDAATLREKYQRDLESLKATCERGFAAMEETHQKKIEDLQRQHQRELEKLREEKDRLLAEETAATISAIEAMKNAHREEMERELEKSQRSQISSVNSDVEALRRQYLEELQSVQRELEVLSEQYSQKCLENAHLAQALEAERQALRQCQRENQELNAHNQELNNRLAAEITRLRTLLTGDGGGEATGSPLAQGKDAYELEVLLRVKESEIQYLKQEISSLKDELQTALRDKKYASDKYKDIYTELSIAKAKADCDISRLKEQLKAATEALGEKSPDSATVSGYDIMKSKSNPDFLKKDRSCVTRQLRNIRSKSLKEGLTVQERLKLFESRDLKKD

SEQ ID NO: 887138 - protein, 2321 aa, Homo sapiens
GRAEPLARRERQAGQACAAAAAAVAAAPTMSAAKENPCRKFQANIFNKSKCQNCFKPRESHLLNDEDLTQAKPIYGGWLLLAPDGTDFDNPVHRSRKWQRRFFILYEHGLLRYALDEMPTTLPQGTINMNQCTDVVDGEGRTGQKFSLCILTPEKEHFIRAETKEIVSGWLEMLMVYPRTNKQNQKKKRKVEPPTPQEPGPAKVAVTSSSSSSSSSIPSAEKVPTTKSTLWQEEMRTKDQPDGSSLSPAQSPSQSQPPAASSLREPGLESKEEESAMSSDRMDCGRKVRVESGYFSLEKTKQDLKAEEQQLPPPLSPPSPSTPNHRRSQVIEKFEALDIEKAEHMETNAVGPSPSSDTRQGRSEKRAFPRKRDFTNEAPPAPLPDASASPLSPHRRAKSLDRRSTEPSVTPDLLNFKKGWLTKQYEDGQWKKHWFVLADQSLRYYRDSVAEEAADLDGEIDLSACYDVTEYPVQRNYGFQIHTKEGEFTLSAMTSGIRRNWIQTIMKHVHPTTAPDVTSSLPEEKNKSSCSFETCPRPTEKQEAELGEPDPEQKRSRARERRREGRSKTFDWAEFRPIQQALAQERVGGVGPADTHEPLRPEAEPGELERERARRREERRKRFGMLDATDGPGTEDAALRMEVDRSPGLPMSDLKTHNVHVEIEQRWHQVETTPLREEKQVPIAPVHLSSEDGGDRLSTHELTSLLEKELEQSQKEASDLLEQNRLLQDQLRVALGREQSAREGYVLQTEVAASPSGAWQRLHRVNQDLQSELEAQCQRQELITHQIQTLKRSYGEAKDTIRHHEAEIRSLQARLSNAAAELAIKEQALAKLKGDLKREQGRVREQLEERQHSEAALSSQLRASEQKLKSAEALLLEKTQELRGLETQQALQRDRQKEVQRLQERIADLSQQLGASEQAQRLMEEKLQRNYELLLESCEKEKQALLQNLKEVEDKASAYEDQLQGQAQQVETLQKEKLSATFEGSEQVHQLEEQLEAREASVRRLAEHVQSLCDERDLLRQRFQELTERVATSDEDVAELREKLRRREADNQSLEHSYQRVSSQLQSMHTLLREKEEELERIKEAHEKVLEKKEQDLNEALVKMVALGSSLEETEIKLQAKEEILRKFASESPKDMEEPRSTPEETERDGTLLPGQPVQATRAPLGLPHTRLEDEDEDLGAPPGEEYGDGSPSREDSMVPPKSVEVLDREGHQQGTAKLDQGAPGVKRQRIRFSTIQCQRYIHPEGSEKTWTSSTSSDTSQDRSPSEESMSSEPAPSVLPATGDSDTYLSIIHSLETKLYVTEEKLKDVTVRLESQQGQSREALLALHHQWAGTEAQLREQLRASLLQVGALASQLEQERQERARRVEGHVGELGDFQVKNSQALMCLENCREQLRSLPRASQEDEQDARAASLASVESALVSAIQALQHWPAPAHGGARAQLETGGTEENGKPASLQQCSQSELTEQEQVRLLSDQIALEASLISQIADSLKNTTSDVSRMLHEISWSGQPPMESAGAPVDTWARKVLVDGEFWSQVESLRKHLGTLGGEAVGASGDGQQSIPQGLAPILANATWVRAELSFATQSVRESFHRRLQSIQETLRGTQTALRQHKCLLREILGAYQTPDFERVMQQVLEALRLPAGHEDGVQLSWDLSPLGEVLGRDSDSSQEPFDVSDQSPGAFVAIQEELAQQLKEKASLLEEIAAALPSLPPVESLRDCQKLLQVSQSLSYNTCLGGLGQYSSLLVQDAIIQAQVCYASCRIRLEYEKELQLCKESWQTREPSCSEQAQAARALREEYEELLRKQKSEYLDVIAIVERENAELKAKAAQLDHQQQCLEDAESKHSMSMFTLRGRYEEEIRCVVEQLTRTESTLQAERSRVLSQLDASVRDRQDMERHHGEQIQTLEDRFQLKVRELQTIHEEELRTLQEHYSQSLRCLQDTLCLHQGPHPKALPAPAPNWQATQGEADSMTGLRERIQELEAQMDVMREELGHKDLEGDAATLREKYQRDLESLKATCERGFAAMEETHQKKIEDLQRQHQRELEKLREEKDRLLAEETAATISAIEAMKNAHREEMERELEKSQRSQISSVNSDVEALRRQYLEELQSVQRELEVLSEQYSQKCLENAHLAQALEAERQALRQCQRENQELNAHNQELNNRLAAEITRLRTLLTGDGGGEATGSPLAQGKDAYELEVLLRVKESEIQYLKQEISSLKDELQTALRDKKYASDKYKDIYTELSIAKAKADCDISRLKEQLKAATEALGEKSPDSATVSGYDIMKSKSNPDFLKKDRSCVTRQLRNIRSKSVIEQVSWDT

SEQ ID NO: 887139 - protein, 1634 aa, Homo sapiens
MGKKNKVVQRIKAKAIKELSVVVPGQRCDTQNWEARVLLTSIYIGFFKTEVAASPSGAWQRLHRVNQDLQSELEAQCQRQELITHQIQTLKRSYGEAKDTIRHHEAEIRSLQARLSNAAAELAIKEQALAKLKGDLKREQGRVREQLEERQHSEAALSSQLRASEQKLKSAEALLLEKTQELRGLETQQALQRDRQKEVQRLQERIADLSQQLGASEQAQRLMEEKLQRNYELLLESCEKEKQALLQNLKEVEDKASAYEDQLQGQAQQVETLQKEKLSATFEGSEQVHQLEEQLEAREASVRRLAEHVQSLCDERDLLRQRFQELTERVATSDEDVAELREKLRRREADNQSLEHSYQRVSSQLQSMHTLLREKEEELERIKEAHEKVLEKKEQDLNEALVKMVALGSSLEETEIKLQAKEEILRKFASESPKDMEEPRSTPEETERDGTLLPGQPVQATRAPLGLPHTRLEDEDEDLGAPPGEEYGDGSPSREDSMVPPKSVEVLDREGHQQGTAKLDQGAPGVKRQRIRFSTIQCQRYIHPEGSEKTWTSSTSSDTSQDRSPSEESMSSEPAPSVLPATGDSDTYLSIIHSLETKLYVTEEKLKDVTVRLESQQGQSREALLALHHQWAGTEAQLREQLRASLLQVGALASQLEQERQERARRVEGHVGELGDFQVKNSQALMCLENCREQLRSLPRASQEDEQDARAASLASVESALVSAIQALQHWPAPAHGGARAQLETGGTEENGKPASLQQCSQSELTEQEQVRLLSDQIALEASLISQIADSLKNTTSDVSRMLHEISWSGQPPMESAGAPVDTWARKVLVDGEFWSQVESLRKHLGTLGGEAVGASGDGQQSIPQGLAPILANATWVRAELSFATQSVRESFHRRLQSIQETLRGTQTALRQHKCLLREILGAYQTPDFERVMQQVLEALRLPAGHEDGVQLSWDLSPLGEVLGRDSDSSQEPFDVSDQSPGAFVAIQEELAQQLKEKASLLEEIAAALPSLPPVESLRDCQKLLQVSQSLSYNTCLGGLGQYSSLLVQDAIIQAQVCYASCRIRLEYEKELQLCKESWQTREPSCSEQAQAARALREEYEELLRKQKSEYLDVIAIVERENAELKAKAAQLDHQQQCLEDAESKHSMSMFTLRGRYEEEIRCVVEQLTRTESTLQAERSRVLSQLDASVRDRQDMERHHGEQIQTLEDRFQLKVRELQTIHEEELRTLQEHYSQSLRCLQDTLCLHQGPHPKALPAPAPNWQATQGEADSMTGLRERIQELEAQMDVMREELGHKDLEGDAATLREKYQRDLESLKATCERGFAAMEETHQKKIEDLQRQHQRELEKLREEKDRLLAEETAATISAIEAMKNAHREEMERELEKSQRSQISSVNSDVEALRRQYLEELQSVQRELEVLSEQYSQKCLENAHLAQALEAERQALRQCQRENQELNAHNQELNNRLAAEITRLRTLLTGDGGGEATGSPLAQGKDAYELEVLLRVKESEIQYLKQEISSLKDELQTALRDKKYASDKYKDIYTELSIAKAKADCDISRLKEQLKAATEALGEKSPDSATVSGYDIMKSKSNPDFLKKDRSCVTRQLRNIRSKSLKEGLTVQERLKLFESRDLKKD

SEQ ID NO: 887140 - protein, 526 aa, Homo sapiens
TRLPRVLGEPDPEQKRSRARERRREGRSKTFDWAEFRPIQQALAQERVGGVGPADTHEPLRPEAEPGELERERARRREERRKRFGMLDATDGPGTEDAALRMEVDRSPGLPMSDLKTHNVHVEIEQRWHQVETTPLREEKQVPIAPVHLSSEDGGDRLSTHELTSLLEKELEQSQKEASDLLEQNRLLQDQLRVALGREQSAREGYVLQATCERGFAAMEETHQKKIEDLQRQHQRELEKLREEKDRLLAEETAATISAIEAMKNAHREEMERELEKSQRSQISSVNSDVEALRRQYLEELQSVQRELEVLSEQYSQKCLENAHLAQALEAERQALRQCQRENQELNAHNQELNNRLAAEITRLRTLLTGDGGGEATGSPLAQGKDAYELEVLLRVKESEIQYLKQEISSLKDELQTALRDKKYASDKYKDIYTELSIAKAKADCDISRLKEQLKAATEALGEKSPDSATVSGYDIMKSKSNPDFLKKDRSCVTRQLRNIRSKSLKEGLTVQERLKLFESRDLKKD

SEQ ID NO: 887141 - protein, 1012 aa, Homo sapiens
GRAEPLARRERQAGQACAAAAAAVAAAPTMSAAKENPCRKFQANIFNKSKCQNCFKPRESHLLNDEDLTQAKPIYGGWLLLAPDGTDFDNPVHRSRKWQRRFFILYEHGLLRYALDEMPTTLPQGTINMNQCTDVVDGEGRTGQKFSLCILTPEKEHFIRAETKEIVSGWLEMLMVYPRTNKQNQKKKRKVEPPTPQEPGPAKVAVTSSSSSSSSSIPSAEKVPTTKSTLWQEEMRTKDQPDGSSLSPAQSPSQSQPPAASSLREPGLESKEEESAMSSDRMDCGRKVRVESGYFSLEKTKQDLKAEEQQLPPPLSPPSPSTPNHRRSQVIEKFEALDIEKAEHMETNAVGPSPSSDTRQGRSEKRAFPRKRDFTNEAPPAPLPDASASPLSPHRRAKSLDRRSTEPSVTPDLLNFKKGWLTKQYEDGQWKKHWFVLADQSLRYYRDSVAEEAADLDGEIDLSACYDVTEYPVQRNYGFQIHTKEGEFTLSAMTSGIRRNWIQTIMKHVHPTTAPDVTSSLPEEKNKSSCSFETCPRPTEKQEAELGEPDPEQKRSRARERRREGRSKTFDWAEFRPIQQALAQERVGGVGPADTHEPLRPEAEPGELERERARRREERRKRFGMLDATDGPGTEDAALRMEVDRSPGLPMSDLKTHNVHVEIEQRWHQVETTPLREEKQVPIAPVHLSSEDGGDRLSTHELTSLLEKELEQSQKEASDLLEQNRLLQDQLRVALGREQSAREGYVLQATCERGFAAMEETHQKKIEDLQRQHQRELEKLREEKDRLLAEETAATISAIEAMKNAHREEMERELEKSQRSQISSVNSDVEALRRQYLEELQSVQRELEVLSEQYSQKCLENAHLAQALEAERQALRQCQRENQELNAHNQVLLRVKESEIQYLKQEISSLKDELQTALRDKKYASDKYKDIYTELSIAKAKADCDISRLKEQLKAATEALGEKSPDSATVSGYDIMKSKSNPDFLKKDRSCVTRQLRNIRSKSVIEQVSWDT

SEQ ID NO: 887142 - protein, 1025 aa, Homo sapiens
GRAEPLARRERQAGQACAAAAAAVAAAPTMSAAKENPCRKFQANIFNKSKCQNCFKPRESHLLNDEDLTQAKPIYGGWLLLAPDGTDFDNPVHRSRKWQRRFFILYEHGLLRYALDEMPTTLPQGTINMNQCTDVVDGEGRTGQKFSLCILTPEKEHFIRAETKEIVSGWLEMLMVYPRTNKQNQKKKRKVEPPTPQEPGPAKVAVTSSSSSSSSSIPSAEKVPTTKSTLWQEEMRTKDQPDGSSLSPAQSPSQSQPPAASSLREPGLESKEEESAMSSDRMDCGRKVRVESGYFSLEKTKQDLKAEEQQLPPPLSPPSPSTPNHRRSQVIEKFEALDIEKAEHMETNAVGPSPSSDTRQGRSEKRAFPRKRDFTNEAPPAPLPDASASPLSPHRRAKSLDRRSTEPSVTPDLLNFKKGWLTKQYEDGQWKKHWFVLADQSLRYYRDSVAEEAADLDGEIDLSACYDVTEYPVQRNYGFQIHTKEGEFTLSAMTSGIRRNWIQTIMKHVHPTTAPDVTSSLPEEKNKSSCSFETCPRPTEKQEAELGEPDPEQKRSRARERRREGRSKTFDWAEFRPIQQALAQERVGGVGPADTHEPLRPEAEPGELERERARRREERRKRFGMLDATDGPGTEDAALRMEVDRSPGLPMSDLKTHNVHVEIEQRWHQVETTPLREEKQVPIAPVHLSSEDGGDRLSTHELTSLLEKELEQSQKEASDLLEQNRLLQDQLRVALGREQSAREGYVLQATCERGFAAMEETHQKKIEDLQRQHQRELEKLREEKDRLLAEETAATISAIEAMKNAHREEMERELEKSQRSQISSVNSDVEALRRQYLEELQSVQRELEVLSEQYSQKCLENAHLAQALEAERQALRQCQRENQELNAHNQVLLRVKESEIQYLKQEISSLKDELQTALRDKKYASDKYKDIYTELSIAKAKADCDISRLKEQLKAATEALGEKSPDSATVSGYDIMKSKSNPDFLKKDRSCVTRQLRNIRSKSLKEGLTVQERLKLFESRDLKKD

SEQ ID NO: 887143 - protein, 841 aa, Homo sapiens
GRAEPLARRERQAGQACAAAAAAVAAAPTMSAAKENPCRKFQANIFNKSKCQNCFKPRESHLLNDEDLTQAKPIYGGWLLLAPDGTDFDNPVHRSRKWQRRFFILYEHGLLRYALDEMPTTLPQGTINMNQCTDVVDGEGRTGQKFSLCILTPEKEHFIRAETKEIVSGWLEMLMVYPRTNKQNQKKKRKVEPPTPQEPGPAKVAVTSSSSSSSSSIPSAEKVPTTKSTLWQEEMRTKDQPDGSSLSPAQSPSQSQPPAASSLREPGLESKEEESAMSSDRMDCGRKVRVESGYFSLEKTKQDLKAEEQQLPPPLSPPSPSTPNHRRSQVIEKFEALDIEKAEHMETNAVGPSPSSDTRQGRSEKRAFPRKRDFTNEAPPAPLPDASASPLSPHRRAKSLDRRSTEPSVTPDLLNFKKGWLTKQYEDGQWKKHWFVLADQSLRYYRDSVAEEAADLDGEIDLSACYDVTEYPVQRNYGFQIHTKEGEFTLSAMTSGIRRNWIQTIMKHVHPTTAPDVTSSLPEEKNKSSCSFETCPRPTEKQEAELGEPDPEQKRSRARERRREGRSKTFDWAEFRPIQQALAQERVGGVGPADTHEPLRPEAEPGELERERARRREERRKRFGMLDATDGPGTEDAALRMEVDRSPGLPMSDLKTHNVHVEIEQRWHQVETTPLREEKQVPIAPVHLSSEDGGDRLSTHELTSLLEKELEQSQKEASDLLEQNRLLQDQLRVALGREQSAREGYVLQATCERGFAAMEETHQKKIEDLQRQHQRELEKLREEKDRLLAEETAATISAIEAMKNAHREEMERELEKSQRSQISSVNSDVEALRRQYLSYCG

SEQ ID NO: 887144 - protein, 1065 aa, Homo sapiens; identical to SEQ ID NO: 887136

SEQ ID NO: 887145 - protein, 1065 aa, Homo sapiens; identical to SEQ ID NO: 887136

SEQ ID NO: 887146 - protein, 220 aa, Homo sapiens
GRAEPLARRERQAGQACAAAAAAVAAAPTMSAAKENPCRKFQANIFNKSKCQNCFKPRESHLLNDEDLTQAKPIYGGWLLLAPDGTDFDNPVHRSRKWQRRFFILYEHGLLRYALDEMPTTLPQGTINMNQCTDVVDGEGRTGQKFSLCILTPEKEHFIRAETKEIVSGWLEMLMVYPRTNKQNQKKKRKVEPPTPQEPGPAKVAVTSRQQQQQQQHPQC

SEQ ID NO: 887147 - protein, 648 aa, Homo sapiens
GRAEPLARRERQAGQACAAAAAAVAAAPTMSAAKENPCRKFQANIFNKSKCQNCFKPRESHLLNDEDLTQAKPIYGGWLLLAPDGTDFDNPVHRSRKWQRRFFILYEHGLLRYALDEMPTTLPQGTINMNQCTDVVDGEGRTGQKFSLCILTPEKEHFIRAETKEIVSGWLEMLMVYPRTNKQNQKKKRKVEPPTPQEPGPAKVAVTSSSSSSSSSIPSAEKVPTTKSTLWQEEMRTKDQPDGSSLSPAQSPSQSQPPAASSLREPGLESKEEESAMSSDRMDCGRKVRVESGYFSLEKTKQDLKAEEQQLPPPLSPPSPSTPNHRRSQVIEKFEALDIEKAEHMETNAVGPSPSSDTRQGRSEKRAFPRKRDFTNEAPPAPLPDASASPLSPHRRAKSLDRRSTEPSVTPDLLNFKKGWLTKQYEDGQWKKHWFVLADQSLRYYRDSVAEEAADLDGEIDLSACYDVTEYPVQRNYGFQIHTKEGEFTLSAMTSGIRRNWIQTIMKHVHPTTAPDVTSCSLCHFKVLLRVKESEIQYLKQEISSLKDELQTALRDKKYASDKYKDIYTELSIAKAKADCDISRLKEQLKAATEALGEKSPDSATVSGYDIMKSKSNPDFLKKDRSCVTRQLRNIRSKSVIEQVSWDT

SEQ ID NO: 887148 - protein, 1065 aa, Homo sapiens; identical to SEQ ID NO: 887136

SEQ ID NO: 887149 - protein, 1065 aa, Homo sapiens; identical to SEQ ID NO: 887136

SEQ ID NO: 887150 - protein, 1065 aa, Homo sapiens; identical to SEQ ID NO: 887136

SEQ ID NO: 887151 - protein, 1065 aa, Homo sapiens; identical to SEQ ID NO: 887136

SEQ ID NO: 887152 - protein, 1065 aa, Homo sapiens; identical to SEQ ID NO: 887136

SEQ ID NO: 887153 - protein, 136 aa, Homo sapiens
SRLPSDSKDAYELEVLLRVKESEIQYLKQEISSLKDELQTALRDKKYASDKYKDIYTELSIAKAKADCDISRLKEQLKAATEALGEKSPDSATVSGYDIMKSKSNPDFLKKDRSCVTRQLRNIRSKSVIEQVSWDT

SEQ ID NO: 887154 - protein, 525 aa, Homo sapiens
GRAEPLARRERQAGQACAAAAAAVAAAPTMSAAKENPCRKFQANIFNKSKCQNCFKPRESHLLNDEDLTQAKPIYGGWLLLAPDGTDFDNPVHRSRKWQRRFFILYEHGLLRYALDEMPTTLPQGTINMNQCTDVVDGEGRTGQKFSLCILTPEKEHFIRAETKEIVSGWLEMLMVYPRTNKQNQKKKRKVEPPTPQEPGPAKVAVTSSSSSSSSSIPSAEKVPTTKSTLWQEEMRTKDQPDGSSLSPAQSPSQSQPPAASSLREPGLESKEEESAMSSDRMDCGRKVRVESGYFSLEKTKQDLKAEEQQLPPPLSPPSPSTPNHRRSQVIEKFEALDIEKAEHMETNAVGPSPSSDTRQGRSEKRAFPRKRDFTNEAPPAPLPDASASPLSPHRRAKSLDRRSTEPSVTPDLLNFKKGWLTKQYEDGQWKKHWFVLADQSLRYYRDSVAEEAADLDGEIDLSACYDVTEYPVQRNYGFQIHTKEGEFTLSAMTSGIRRNWIQTIMKHVHPTTAPDVTSSLNPGT

SEQ ID NO: 887155 - protein, 1054 aa, Homo sapiens
GRAEPLARRERQAGQACAAAAAAVAAAPTMSAAKENPCRKFQANIFNKSKCQNCFKPRESHLLNDEDLTQAKPIYGGWLLLAPDGTDFDNPVHRSRKWQRRFFILYEHGLLRYALDEMPTTLPQGTINMNQCTDVVDGEGRTGQKFSLCILTPEKEHFIRAETKEIVSGWLEMLMVYPRTNKQNQKKKRKVEPPTPQEPGPAKVAVTSSSSSSSSSIPSAEKVPTTKSTLWQEEMRTKDQPDGSSLSPAQSPSQSQPPAASSLREPGLESKEEESAMSSDRMDCGRKVRVESGYFSLEKTKQDLKAEEQQLPPPLSPPSPSTPNHRRSQVIEKFEALDIEKAEHMETNAVGPSPSSDTRQGRSEKRAFPRKRDFTNEAPPAPLPDASASPLSPHRRAKSLDRRSTEPSVTPDLLNFKKGWLTKQYEDGQWKKHWFVLADQSLRYYRDSVAEEAADLDGEIDLSACYDVTEYPVQRNYGFQIHTKEGEFTLSAMTSGIRRNWIQTIMKHVHPTTAPDVTSSLPEEKNKSSCSFETCPRPTEKQEAELGEPDPEQKRSRARERRREGRSKTFDWAEFRPIQQALAQERVGGVGPADTHEPLRPEAEPGELERERARRREERRKRFGMLDATDGPGTEDAALRMEVDRSPGLPMSDLKTHNVHVEIEQRWHQVETTPLREEKQVPIAPVHLSSEDGGDRLSTHELTSLLEKELEQSQKEASDLLEQNRLLQDQLRVALGREQSAREGYVLQATCERGFAAMEETHQKKIEDLQRQHQRELEKLREEKDRLLAEETAATISAIEAMKNAHREEMERELEKSQRSQISSVNSDVEALRRQYLEELQSVQRELEVLSEQYSQKCLENAHLAQALEAERQALRQCQRENQELNAHNQELNNRLAAEITRLRTLLTGDGGGEATGSPLAQGKDAYELEVLLRVKESEIQYLKQEISSLKDELQTALRDKKYASDKYKDIYTELSIAKAKADCDISRLKEQLKAATEALGEKSPDSATVSGYDIMKSKSNPDFLKKDRSCVTRQLRNIRSKVSLGSSPLVGGA

SEQ ID NO: 887156 - protein, 370 aa, Homo sapiens
GRAEPLARRERQAGQACAAAAAAVAAAPTMSAAKENPCRKFQANIFNKSKCQNCFKPRESHLLNDEDLTQAKPIYGGWLLLAPDGTDFDNPVHRSRKWQRRFFILYEHGLLRYALDEMPTTLPQGTINMNQCTDVVDGEGRTGQKFSLCILTPEKEHFIRAETKEIVSGWLEMLMVYPRTNKQNQKKKRKVEPPTPQEPGPAKVAVTSSSSSSSSSIPSAEKVPTTKSTLWQEEMRTKDQPDGSSLSPAQSPSQSQPPAASSLREPGLESKEEESAMSSDRMDCGRKVRVESGYFSLEKTKQDLKAEEQQLPPPLSPPSPSTPNHRYSCPESPSQELGGPLPSPGPRLPHQMVCSISLSSLDVASQPPAY

SEQ ID NO: 887157 - protein, 329 aa, Homo sapiens
GRAEPLARRERQAGQACAAAAAAVAAAPTMSAAKENPCRKFQANIFNKSKCQNCFKPRESHLLNDEDLTQAKPIYGGWLLLAPDGTDFDNPVHRSRKWQRRFFILYEHGLLRYALDEMPTTLPQGTINMNQCTDVVDGEGRTGQKFSLCILTPEKEHFIRAETKEIVSGWLEMLMVYPRTNKQNQKKKRKVEPPTPQEPGPAKVAVTSSSSSSSSSIPSAEKVPTTKSTLWQEEMRTKDQPDGSSLSPAQSPSQSQPPAASSLREPGLESKEVGSAFAFKASRQYATLADVPKAIRISHREAFQVERRRLERRTRARSPGREEVARLFG

SEQ ID NO: 887158 - protein, 269 aa, Homo sapiens
GRAEPLARRERQAGQACAAAAAAVAAAPTMSAAKENPCRKFQANIFNKSKCQNCFKPRESHLLNDEDLTQAKPIYGGWLLLAPDGTDFDNPVHRSRKWQRRFFILYEHGLLRYALDEMPTTLPQGTINMNQCTDVVDGEGRTGQKFSLCILTPEKEHFIRAETKEIVSGWLEMLMVYPRTNKQNQKKKRKVEPPTPQEPGPAKVAAAAAAAAAKVPAKKITAASKKAPAQKVPAQKATGQKAAPAPKAQKGQKAPAQKAPAPKAFGKKA

SEQ ID NO: 887159 - protein, 102 aa, Homo sapiens
LDIEKAEHMETNAVGPSPSSDTRQGRSEKRAFPRKRVSSWGWAAPQGWLGGGSACTPCAKSPPHRPGMCSCQASLQPPPLHSDFLRAGLSPAASYQSLLRLC

SEQ ID NO: 887160 - protein, 92 aa, Homo sapiens
VDRSPGLPMSDLKTHNVHVEIEQRWHQVETTPLREEKQVPIAPVHLSSEDGGDRLSTHELTSLLEKEVIAWDQIPTLLPAAFPEHQLCPAVA

SEQ ID NO: 887161 - protein, 804 aa, Homo sapiens
MAAHRPGPLKQQNKAHKGGRHRGRGSAQRDGKGRLALKTLSKKVRKELSRVDQRHRASQLRKQKKEAVLAEKRQLGGKDGPPHQVLVVPLHSRISLPEAMQLLQDRDTGTVHLNELGNTQNFMLLCPRLKHRWFFTSARPGDLHVVLDMAKVADTILFLLDPLEGWDSTGDYCLSCLFAQGLPTYTLAVQGISGLPLKKQIDTRKKLSKAVEKRFPHDKLLLLDTQQEAGMLLRQLANQKQQHLAFRDRRAYLFAHAVDFVPSEENNLVGTLKISGYVRGQTLNVNRLLHIVGYGDFQMKQIDAPGDPFPLNPRGIKPQKDPDMAMEICATDAVDDMEEGLKVLMKADPGRQESLQAEVIPDPMEGEQTWPTEEELSEAKDFLKESSKVVKKVPKGTSSYQAEWILDGGSQSGGEGDEYEYDDMEHEDFMEEESQDESSEEEEEYETMTIGESVHDDLYDKKVDEEAEAKMLEKYKQERLEEMFPDEVDTPRDVAARIRFQKYRGLKSFRTSPWDPKENLPQDYARIFQFQNFTNTRKSIFKEVEEKEVEGAEVGWYVTLHVSEVPVSVVECFRQGTPLIAFSLLPHEQKMSVLNMVVRRDPGNTEPVKAKEELIFHCGFRRFRASPLFSQHTAADKHKLQRFLTADMALVATVYAPITFPPASVLLFKQKSNGMHSLIATGHLMSVDPDRMVIKRVVLSGHPFKIFTKMAVVRYMFFNREDVLWFKPVELRTKWGRRGHIKEPLGTHGHMKCSFDGKLKSQDTVLMNLYKRVFPKWTYDPYVPEPVPWLKSEISSTVPQGGME

SEQ ID NO: 887162 - protein, 804 aa, Homo sapiens; identical to SEQ ID NO: 887161

SEQ ID NO: 887163 - protein, 763 aa, Homo sapiens
RSGRGRSAGGTASDGHAPPPDSAAGGVLAEKRQLGGKDGPPHQVLVVPLHSRISLPEAMQLLQDRDTGTVHLNELGNTQNFMLLCPRLKHRWFFTSARPGDLHVVLDMAKVADTILFLLDPLEGWDSTGDYCLSCLFAQGLPTYTLAVQGISGLPLKKQIDTRKKLSKAVEKRFPHDKLLLLDTQQEAGMLLRQLANQKQQHLAFRDRRAYLFAHAVDFVPSEENNLVGTLKISGYVRGQTLNVNRLLHIVGYGDFQMKQIDAPGDPFPLNPRGIKPQKDPDMAMEICATDAVDDMEEGLKVLMKADPGRQESLQAEVIPDPMEGEQTWPTEEELSEAKDFLKESSKVVKKVPKGTSSYQAEWILDGGSQSGGEGDEYEYDDMEHEDFMEEESQDESSEEEEEYETMTIGESVHDDLYDKKVDEEAEAKMLEKYKQERLEEMFPDEVDTPRDVAARIRFQKYRGLKSFRTSPWDPKENLPQDYARIFQFQNFTNTRKSIFKEVEEKEVEGAEVGWYVTLHVSEVPVSVVECFRQGTPLIAFSLLPHEQKMSVLNMVVRRDPGNTEPVKAKEELIFHCGFRRFRASPLFSQHTAADKHKLQRFLTADMALVATVYAPITFPPASVLLFKQKSNGMHSLIATGHLMSVDPDRMVIKRVVLSGHPFKIFTKMAVVRYMFFNREDVLWFKPVELRTKWGRRGHIKEPLGTHGHMKCSFDGKLKSQDTVLMNLYKRVFPKWTYDPYVPEPVPWLKSEISSTVPQGGME

SEQ ID NO: 887164 - protein, 735 aa, Homo sapiens
MAAHRPGPLKQQNKAHKGGRHRGRGSAQRDGKGRLALKTLSKKVRKELSRVDQRHRASQLRKQKKEAVLAEKRQLGGKDGPPHQVLVVPLHSRISLPEAMQLLQDRDTGTVHLNELGNTQNFMLLCPRLKHRWFFTSARPGDLHVVLDMAKVADTILFLLDPLEGWDSTGDYCLSCLFAQGLPTYTLAVQGISGLPLKKQIDTRKKLSKAVEKRFPHDKLLLLDTQQEAGMLLRQLANQKQQHLAFRDRRAYLFAHAVDFVPSEENNLVGTLKISGYVRGQTLNVNRLLHIVGYGDFQMKQIDAPGDPFPLNPRGIKPQKDPDMAMEICATDAVDDMEEGLKVLMKADPGRQESLQAEVIPDPMEGEQTWPTEEELSEAKDFLKESSKVVKKVPKGTSSYQAEWILDGGSQSGGEGDEYEYDDMEHEDFMEEESQDESSEEEEEYETMTIGESVHDDLYDKKVDEEAEAKMLEKYKQERLEEMFPDEVDTPRDVAARIRFQKYRGLKSFRTSPWDPKENLPQDYARIFQFQNFTNTRKSIFKEVEEKEVEGAEVGWYVTLHVSEVPVSVVECFRQGTPLIAFSLLPHEQKMSVLNMVVRRDPGNTEPVKAKEELIFHCGFRRFRASPLFSQHTAADKHKLQRFLTADMALVATVYAPITFPPASVLLFKQKSNGMHSLIATGHLMSVDPDRMVIKRVVLSGHPFKIFTKMAVVRYMFFNRGGYEGGGWDLIAFVV

SEQ ID NO: 887165 - protein, 390 aa, Homo sapiens
MTVCKKQAGTAGIPGYREESQDESSEEEEEYETMTIGESVHDDLYDKKVDEEAEAKMLEKYKQERLEEMFPDEVDTPRDVAARIRFQKYRGLKSFRTSPWDPKENLPQDYARIFQFQNFTNTRKSIFKEVEEKEVEGAEVGWYVTLHVSEVPVSVVECFRQGTPLIAFSLLPHEQKMSVLNMVVRRDPGNTEPVKAKEELIFHCGFRRFRASPLFSQHTAADKHKLQRFLTADMALVATVYAPITFPPASVLLFKQKSNGMHSLIATGHLMSVDPDRMVIKRVVLSGHPFKIFTKMAVVRYMFFNREDVLWFKPVELRTKWGRRGHIKEPLGTHGHMKCSFDGKLKSQDTVLMNLYKRVFPKWTYDPYVPEPVPWLKSEISSTVPQGGME

SEQ ID NO: 887166 - protein, 689 aa, Homo sapiens
MAAHRPGPLKQQNKAHKGGRHRGRGSAQRDGKGRLALKTLSKKVRKELSRVDQRHRASQLRKQKKEAVLAEKRQLGGKDGPPHQVLVVPLHSRISLPEAMQLLQDRDTGTVHLNELGNTQNFMLLCPRLKHRWFFTSARPGDLHVVLDMAKVADTILFLLDPLEGWDSTGDYCLSCLFAQGLPTYTLAVQGISGLPLKKQIDTRKKLSKAVEKRFPHDKLLLLDTQQEAGMLLRQLANQKQQHLAFRDRRAYLFAHAVDFVPSEENNLVGTLKISGYVRGQTLNVNRLLHIVGYGDFQMKQIDAPGDPFPLNPRGIKPQKDPDMAMEICATDAVDDMEEGLKVLMKADPGRQESLQAEVIPDPMEGEQTWPTEEELSEAKDFLKESSKVVKKVPKGTSSYQAEWILDGGSQSGGEGDEYEYDDMEHEDFMEEESQDESSEEEEEYETMTIGESVHDDLYDKKVDEEAEAKMLEKYKQERLEEMFPDEVDTPRDVAARIRFQKYRGLKSFRTSPWDPKENLPQDYARIFQFQNFTNTRKSIFKEVEEKEVEGAEVGWYVTLHVSEVPVSVVECFRQGTPLIAFSLLPHEQKMSVLNMVVRRDPGNTEPVKAKEELIFHCGFRRFRASPLFSQHTAADKHKLQRFLTADMALVATVYAPITFPPASVLLFKQKSNGKLSHRDEQTLQVLNR

SEQ ID NO: 887167 - protein, 425 aa, Homo sapiens
MAAHRPGPLKQQNKAHKGGRHRGRGSAQRDGKGRLALKTLSKKVRKELSRVDQRHRASQLRKQKKEAVLAEKRQLGGKDGPPHQVLVVPLHSRISLPEAMQLLQDRDTGTVHLNELGNTQNFMLLCPRLKHRWFFTSARPGDLHVVLDMAKVADTILFLLDPLEGWDSTGDYCLSCLFAQGLPTYTLAVQGISGLPLKKQIDTRKKLSKAVEKRFPHDKLLLLDTQQEAGMLLRQLANQKQQHLAFRDRRAYLFAHAVDFVPSEENNLVGTLKISGYVRGQTLNVNRLLHIVGYGDFQMKQIDAPGDPFPLNPRGIKPQKDPDMAMEICATDAVDDMEEGLKVLMKADPGRQESLQAEVIPDPMEGEQTWPTEEELSEAKDFLKESSKVVKKVPKGTSSYQAEWILDGGSQSGGEGDEYEYDDME

SEQ ID NO: 887168 - protein, 804 aa, Homo sapiens; identical to SEQ ID NO: 887161

SEQ ID NO: 887169 - protein, 804 aa, Homo sapiens; identical to SEQ ID NO: 887161

SEQ ID NO: 887170 - protein, 599 aa, Homo sapiens
MAAHRPGPLKQQNKAHKGGRHRGRGSAQRDGKGRLALKTLSKKVRKELSRVDQRHRASQLRKQKKEAVLAEKRQLGGKDGPPHQVLVVPLHSRISLPEAMQLLQDRDTGTVHLNELGNTQNFMLLCPRLKHRWFFTSARPGDLHVVLDMAKVADTILFLLDPLEGWDSTGDYCLSCLFAQGLPTYTLAVQGISGLPLKKQIDTRKKLSKAVEKRFPHDKLLLLDTQQEAGMLLRQLANQKQQHLAFRDRRAYLFAHAVDFVPSEENNLVGTLKISGYVRGQTLNVNRLLHIVGYGDFQMKQIDAPGDPFPLNPRGIKPQKDPDMAMEICATDAVDDMEEGLKVLMKADPGRQESLQAEVIPDPMEGEQTWPTEEELSEAKDFLKESSKVVKKVPKGTSSYQAEWILDGGSQSGGEGDEYEYDDMEHEDFMEEESQDESSEEEEEYETMTIGESVHDDLYDKKVDEEAEAKMLEKYKQERLEEMFPDEVDTPRDVAARIRFQKYRGLKSFRTSPWDPKENLPQDYARIFQFQNFTNTRKSIFKEVEEKEVEGAEVGWYVTLHVSEVPVSVVECFRQGTPLIAFSLLPHEQKRTNINCRDS

SEQ ID NO: 887171 - protein, 708 aa, Homo sapiens
MAAHRPGPLKQQNKAHKGGRHRGRGSAQRDGKGRLALKTLSKKVRKELSRVDQRHRASQLRKQKKEAVLAEKRQLGGKDGPPHQVLVVPLHSRISLPEAMQLLQDRDTGTVHLNELGNTQNFMLLCPRLKHRWFFTSARPGDLHVVLDMAKVADTILFLLDPLEGWDSTGDYCLSCLFAQGLPTYTLAVQGISGLPLKKQIDTRKKLSKAVEKRFPHDKLLLLDTQQEAGMLLRQLANQKQQHLAFRDRRAYLFAHAVDFVPSEENNLVGTLKISGYVRGQTLNVNRLLHIVGYGDFQMKQIDAPGDPFPLNPRGIKPQKDPDMAMEICATDAVDDMEEGLKVLMKADPGRQESLQAEVIPDPMEGEQTWPTEEELSEAKDFLKESSKVVKKVPKGTSSYQAEWILDGGSQSGGEGDEYEYDDMEHEDFMEEESQDESSEEEEEYETMTIGESVHDDLYDKKVDEEAEAKMLEKYKQERLEEMFPDEVDTPRDVAARIRFQKYRGLKSFRTSPWDPKENLPQDYARIFQFQNFTNTRKSIFKEVEEKEVEGAEVGWYVTLHVSEVPVSVVECFRQGTPLIAFSLLPHEQKMSVLNMVVRRDPGNTEPVKAKEELIFHCGFRRFRASPLFSQHTAADKHKLQRFLTADMALVATVYAPITFPPASVLLFKQKSNGMHSLFVTGPLIVTDSDTIGIPIPVLRGPPLQNYY

SEQ ID NO: 887172 - protein, 206 aa, Homo sapiens [sequence omitted]

SEQ ID NO: 887173 - protein, 206 aa, Homo sapiens [sequence omitted]

SEQ ID NO: 887174 - protein, 192 aa, Homo sapiens
HSAFPRVVPCSVCSSSHQLSWKEELRVATQEKEGSSGRCMLTLLGLSFILAGLIVGGACIYKYFMPKSTIYRGEMCFFDSEDPANSLRGGEPNFLPVTEEADIREDDNIAIIDVPVPSFSDSDPAAIIHDFEKGMTAYLDLLLGNCYLMPLNTSIVMPPKKSGRALWQTGEWQISASNLCGSRRPSCCGGNS

SEQ ID NO: 887175 - protein, 162 aa, Homo sapiens
MVKIAFNTPTAVQKEEARQDVEALLSRTVRTQILTGKSTIYRGEMCFFDSEDPANSLRGGEPNFLPVTEEADIREDDNIAIIDVPVPSFSDSDPAAIIHDFEKGMTAYLDLLLGNCYLMPLNTSIVMPPKKSGRALWQTGEWQISASNLCGSRRPSCCGGNS

SEQ ID NO: 887176 - protein, 215 aa, Homo sapiens
MVKIAFNTPTAVQKEEARQDVEALLSRTVRTQILTGKELRVATQEKEGSSGRCMLTLLGLSFILAGLIVGGACIYKYFMPKVVIFPFCLLSTIYRGEMCFFDSEDPANSLRGGEPNFLPVTEEADIREDDNIAIIDVPVPSFSDSDPAAIIHDFEKGMTAYLDLLLGNCYLMPLNTSIVMPPKKSGRALWQTGEWQISASNLCGSRRPSCCGGNS

SEQ ID NO: 887177 - protein, 181 aa, Homo sapiens
MVKIAFNTPTAVQKEEARQDVEALLSRTVRTQILTGKELRVATQEKEGSSGRCMLTLLGLSFILAGLIVGGACIYKYFMPKSTIYRGEMCFFDSEDPANSLRGGEPNFLPVTEEADIREDDNIAIIDVPVPSFSDSDPAAIIHDFEKGMTAYLDLLLGNCYLMPLNTSIVMPPKKLWFEKT

SEQ ID NO: 887178 - protein, 128 aa, Homo sapiens
MPKSTIYRGEMCFFDSEDPANSLRGGEPNFLPVTEEADIREDDNIAIIDVPVPSFSDSDPAAIIHDFEKGMTAYLDLLLGNCYLMPLNTSIVMPPKKSGRALWQTGEWQISASNLCGSRRPSCCGGNS

SEQ ID NO: 887179 - protein, 206 aa, Homo sapiens [sequence omitted]

SEQ ID NO: 887180 - protein, 203 aa, Homo sapiens
MVKIAFNTPTAVQKEEARQDVEALLSRTVRTQILTGKELRVATQEKEGSSGRCMLTLLGLSFILAGLIVGGACIYKYFMPKSTIYRGEMCFFDSEDPANSLRGGEPNFLPVTEEADIREDDNIAIIDVPVPSFSDSDPAAIIHDFEKGMTAYLDLLLGNCYLMPLNTSIVMPPKKSGRYLPHASLPKSSTSRPAANLAVVVGA

SEQ ID NO: 887181 - protein, 1937 aa, Homo sapiens
MSASSDAEMAVFGEAAPYLRKSEKERIEAQNKPFDAKTSVFVAEPKESYVKSTIQSKEGGKVTVKTEGGATLTVREDQVFPMNPPKYDKIEDMAMMTHLHEPGVLYNLKERYAAWMIYTYSGLFCVTVNPYKWLPVYKPEVVAAYRGKKRQEAPPHIFSISDNAYQFMLTDRENQSILITGESGAGKTVNTKRVIQYFATIAVTGEKKKDESGKMQGTLEDQIISANPLLEAFGNAKTVRNDNSSRFGKFIRIHFGTTGKLASADIETYLLEKSRVTFQLKAERSYHIFYQITSNKKPDLIEMLLITTNPYDYAFVSQGEITVPSIDDQEELMATDSAIDILGFTPEEKVSIYKLTGAVMHYGNMKFKQKQREEQAEPDGTEVADKAAYLQSLNSADLLKALCYPRVKVGNEYVTKGQTVQQVYNAVGALAKAVYEKMFLWMVTRINQQLDTKQPRQYFIGVLDIAGFEIFDFNSLEQLCINFTNEKLQQFFNHHMFVLEQEEYKKEGIEWTFIDFGMDLAACIELIEKPLGIFSILEEECMFPKATDTSFKNKLYDQHLGKSANFQKPKVVKGKAEAHFSLIHYAGTVDYNITGWLDKNKDPLNDTVVGLYQKSAMKTLASLFSTYASAEADSSAKKGAKKKGSSFQTVSALFRENLNKLMTNLRSTHPHFVRCIIPNETKTPGAMEHELVLHQLRCNGVLEGIRICRKGFPSRILYGDFKQRYKVLNASAIPEGQFIDSKKASEKLLASIDIDHTQYKFGHTKVFFKAGLLGLLEEMRDEKLAQIITRTQAVCRGFLMRVEYQKMLQRREALFCIQYNVRAFMNVKHWPWMKLFFKIKPLLKSAETEKEMATMKEEFQKTKDELAKSEAKRKELEEKMVTLLKEKNDLQLQVQSEADSLADAEERCEQLIKNKIQLEAKIKEVTERAEEEEEINAELTAKKRKLEDECSELKKDIDDLELTLAKVEKEKHATENKVKNLTEEMAGLDETIAKLSKEKKALQETHQQTLDDLQAEEDKVNILTKAKTKLEQQVDDLEGSLEQEKKLRMDLERAKRKLEGDLKLAQESTMDMENDKQQLDEKLEKKEFEISNLISKIEDEQAVEIQLQKKIKELQARIEELGEEIEAERASRAKAEKQRSDLSRELEEISERLEEAGGATSAQVELNKKREAEFQKLRRDLEEATLQHEAMVAALRKKHADSMAELGEQIDNLQRVKQKLEKEKSELKMETDDLSSNAEAISKAKGNLEKMCRSLEDQVSELKTKEEEQQRLINDLTAQRARLQTEAGEYSRQLDEKDALVSQLSRSKQASTQQIEELKHQLEEETKAKNALAHALQSSRHDCDLLREQYEEEQEGKAELQRALSKANSEVAQWRTKYETDAIQRTEELEEAKKKLAQRLQEAEEHVEAVNAKCASLEKTKQRLQNEVEDLMLDVERSNAACAALDKKQRNFDKVLSEWKQKYEETQAELEASQKESRSLSTELFKVKNVYEESLDQLETLRRENKNLQQEISDLTEQIAEGGKQIHELEKIKKQVEQEKCEIQAALEEAEASLEHEEGKILRIQLELNQVKSEVDRKIAEKDEEIDQLKRNHTRVVETMQSTLDAEIRSRNDALRVKKKMEGDLNEMEIQLNHANRLAAESLRNYRNTQGILKETQLHLDDALRGQEDLKEQLAIVERRANLLQAEIEELWATLEQTERSRKIAEQELLDASERVQLLHTQNTSLINTKKKLENDVSQLQSEVEEVIQESRNAEEKAKKAITDAAMMAEELKKEQDTSAHLERMKKNLEQTVKDLQHRLDEAEQLALKGGKKQIQKLEARVRELEGEVENEQKRNAEAVKGLRKHERRVKELTYQTEEDRKNVLRLQDLVDKLQAKVKSYKRQAEEAEEQSNANLSKFRKLQHELEEAEERADIAESQVNKLRVKSREVHTKISAE

SEQ ID NO: 887182 - protein, 1919 aa, Homo sapiens
MSASSDAEMAVFGEAAPYLRKSEKERIEAQNKPFDAKTSVFVAEPKESYVKSTIQSKEGGKVTVKTEGGATLTVREDQVFPMNPPKYDKIEDMAMMTHLHEPGVLYNLKERYAAWMIYTYSGLFCVTVNPYKWLPVYKPEVVAAYRGKKRQEAPPHIFSISDNAYQFMLTDRENQSILITGESGAGKTVNTKRVIQYFATIAVTGEKKKDESGKMQGTLEDQIISANPLLEAFGNAKTVRNDNSSRFGKFIRIHFGTTGKLASADIETYLLEKSRVTFQLKAERSYHIFYQITSNKKPDLIEMLLITTNPYDYAFVSQGEITVPSIDDQEELMATDSAIDILGFTPEEKVSIYKLTGAVMHYGNMKFKQKQREEQAEPDGTEVADKAAYLQSLNSADLLKALCYPRVKVGNEYVTKGQTVQQVYNAVGALAKAVYEKMFLWMVTRINQQLDTKQPRQYFIGVLDIAGFEIFDFNSLEQLCINFTNEKLQQFFNHHMFVLEQEEYKKEGIEWTFIDFGMDLAACIELIEKPLGIFSILEEECMFPKATDTSFKNKLYDQHLGKSANFQKPKVVKGKAEAHFSLIHYAGTVDYNITGWLDKNKDPLNDTVVGLYQKSAMKTLASLFSTYASAEADSSAKKGAKKKGSSFQTVSALFRENLNKLMTNLRSTHPHFVRCIIPNETKTPGAMEHELVLHQLRCNGVLEGIRICRKGFPSRILYGDFKQRYKVLNASAIPEGQFIDSKKASEKLLASIDIDHTQYKFGHTKVFFKAGLLGLLEEMRDEKLAQIITRTQAVCRGFLMRVEYQKMLQRREALFCIQYNVRAFMNVKHWPWMKLFFKIKPLLKSAETEKEMATMKEEFQKTKDELAKSEAKRKELEEKMVTLLKEKNDLQLQVQSEADSLADAEERCEQLIKNKIQLEAKIKEVTERAEEEEEINAELTAKKRKLEDECSELKKDIDDLELTLAKVEKEKHATENKVKNLTEEMAGLDETIAKLSKEKKALQETHQQTLDDLQAEEDKVNILTKAKTKLEQQVDDLEGSLEQEKKLRMDLERAKRKLEGDLKLAQESTMDMENDKQQLDEKLEKKEFEISNLISKIEDEQAVEIQLQKKIKELQARIEELGEEIEAERASRAKAEKQRSDLSRELEEISERLEEAGGATSAQVELNKKREAEFQKLRRDLEEATLQHEAMVAALRKKHADSMAELGEQIDNLQRVKQKLEKEKSELKMETDDLSSNAEAISKAKGNLEKMCRSLEDQVSELKTKEEEQQRLINDLTAQRARLQTEAGEYSRQLDEKDALVSQLSRSKQASTQQIEELKHQLEEETKAKNALAHALQSSRHDCDLLREQYEEEQEGKAELQRALSKANSEVAQWRTKYETDAIQRTEELEEAKKKLAQRLQEAEEHVEAVNAKCASLEKTKQRLQNEVEDLMLDVERSNAACAALDKKQRNFDKVLSEWKQKYEETQAELEASQKESRSLSTELFKVKNVYEESLDQLETLRRENKNLQQEISDLTEQIAEGGKQIHELEKIKKQVEQEKCEIQAALEEAEASLEHEEGKILRIQLELNQVKSEVDRKIAEKDEEIDQLKRNHTRVVETMQSTLDAEIRSRNDALRVKKKMEGDLNEMEIQLNHANRLAAESLRNYRNTQGILKETQLHLDDALRGQEDLKEQLAIVERRANLLQAEIEELWATLEQTERSRKIAEQELLDASERVQLLHTQNTSLINTKKKLENDVSQLQSEVEEVIQESRNAEEKAKKAITDAAMMAEELKKEQDTSAHLERMKKNLEQTVKDLQHRLDEAEQLALKGGKKQIQKLEARVRELEGEVENEQKRNAEAVKGLRKHERRVKELTYQTEEDRKNVLRLQDLVDKLQAKVKSYKRQAEEAEGTIPMPNLILNFRKTSKHGAWEVVPLVTWF

SEQ ID NO: 887183 - protein, 91 aa, Homo sapiens
AMSASSDAEMAVFGEAAPYLRKSEKERIEAQNKPFDAKTSVFVAEPKESYVKSTIQSKEGGKVTVKTEGGAVSENREKILPILFLGSKVEA

SEQ ID NO: 887184 - protein, 184 aa, Homo sapiens
MKPDETPMFDPSLLKEVDWSQNTATFSPAISPTHPGEGLVLRPLCTADLNRGFFKVLGQLTETGVVSPEQFMKSFEHMKKSGDYYVTVVEDVTLGQIVATATLIIEHKFIHSCAKRGRVEDVVVSDECRGKQLGKLLLSTLTLLSKKLNCYKITLECLPQNVGFYKKFGYTVSEENYMCRRFLK

SEQ ID NO: 887185 - protein, 270 aa, Homo sapiens
PGRVAPWPPPPLACARPCVRGQRRGGGVGAATSGPRFPTVARAVEEEVGLALKPDPDPVLCTLVGESPTRLARSADRRASTDLTRKMKPDETPMFDPSLLKEVDWSQNTATFSPAISPTHPGEGLVLRPLCTADLNRGFFKVLGQLTETGVVSPEQFMKSFEHMKKSGDYYVTVVEDVTLGQIVATATLIIEHKFIHSCAKRGRVEDVVVSDECRGKQLGKLLLSTLTLLSKKLNCYKITLECLPQNVGFYKKFGYTVSEENYMCRRFLK

SEQ ID NO: 887186 - protein, 270 aa, Homo sapiens; identical to SEQ ID NO: 887185

SEQ ID NO: 887187 - protein, 270 aa, Homo sapiens; identical to SEQ ID NO: 887185

SEQ ID NO: 887188 - protein, 270 aa, Homo sapiens; identical to SEQ ID NO: 887185

SEQ ID NO: 887189 - protein, 207 aa, Homo sapiens
PGRVAPWPPPPLACARPCVRGQRRGGGVGAATSGPRFPTVARAVEEEVGLALKPDPDPVLCTLVGESPTRLARSADRRASTDLTRKMKPDETPMFDPSLLKEVDWSQNTATFSPAISPTHPGEGLVLRPLCTADLNRGFFKVLGQLTETGVVSPEQFMKSFEHMKKSGDYYVTVVEDVTLGQIVATATLIIEHKFIHSCAKVCAAYK

SEQ ID NO: 887190 - protein, 227 aa, Homo sapiens
PGRVAPWPPPPLACARPCVRGQRRGGGVGAATSGPRFPTVARAVEEEVGLALKPDPDPVLCTLVGESPTRLARSADRRASTDLTRKMKPDETPMFDPSLLKEVDWSQNTATFSPAISPTHPGEGLVLRPLCTADLNRGFFKVLGQLTETGVVSPEQFMKSFEHMKKSGDYYVTVVEDVTLGQIVATATLIIEHKFIHSCAKYTAGIIMQCLRCARPAGGGGGWWGGG

SEQ ID NO: 887191 - protein, 270 aa, Homo sapiens; identical to SEQ ID NO: 887185

SEQ ID NO: 887192 - protein, 270 aa, Homo sapiens; identical to SEQ ID NO: 887185

SEQ ID NO: 887193 - protein, 270 aa, Homo sapiens; identical to SEQ ID NO: 887185

SEQ ID NO: 887194 - protein, 115 aa, Homo sapiens
MRATAPGPHFLKRHCPTPSPRLESSGVIIAHCILQFLGSSHPSCLSLPSSWNYRCVPSHLALHFSVGSYYIAQAGLKLLSSSDPLPQPPEYLGLHMSATVSGRSHLWPLFACEKV

SEQ ID NO: 887195 - protein, 270 aa, Homo sapiens; identical to SEQ ID NO: 887185

SEQ ID NO: 887196 - protein, 546 aa, Homo sapiens
MGSRNSSSAGSGSGDPSEGLPRRGAGLRRSEEEEEEDEDVDLAQVLAYLLRRGQVRLVQGGGAANLQFIQALLDSEEENDRAWDGRLGDRYNPPVDATPDTRELEFNEIKTQVELATGQLGLRRAAQKHSFPRMLHQRERGLCHRGSFSLGEQSRVISHFLPNDLGFTDSYSQKAFCGIYSKDGQIFMSACQDQTIRLYDCRYGRFRKFKSIKARDVGWSVLDVAFTPDGNHFLYSSWSDYIHICNIYGEGDTHTALDLRPDERRFAVFSIAVSSDGREVLGGANDGCLYVFDREQNRRTLQIESHEDDVNAVAFADISSQILFSGGDDAICKVWDRRTMREDDPKPVGALAGHQDGITFIDSKGDARYLISNSKDQTIKLWDIRRFSSREGMEASRQAATQQNWDYRWQQVPKKAWRKLKLPGDSSLMTYRGHGVLHTLIRCRFSPIHSTGQQFIYSGCSTGKVVVYDLLSGHIVKKLTNHKACVRDVSWHPFEEKIVSSSWDGNLRLWQYRQAEYFQDDMPESEECASAPAPVPQSSTPFSSPQ

SEQ ID NO: 887197 - protein, 546 aa, Homo sapiens; identical to SEQ ID NO: 887196

SEQ ID NO: 887198 - protein, 546 aa, Homo sapiens; identical to SEQ ID NO: 887196

SEQ ID NO: 887199 - protein, 546 aa, Homo sapiens; identical to SEQ ID NO: 887196

SEQ ID NO: 887200 - protein, 500 aa, Homo sapiens
MWIWPRGQVRLVQGGGAANLQFIQALLDSEEENDRAWDGRLGDRYNPPVDATPDTRELEFNEIKTQVELATGQLGLRRAAQKHSFPRMLHQRERGLCHRGSFSLGEQSRVISHFLPNDLGFTDSYSQKAFCGIYSKDGQIFMSACQDQTIRLYDCRYGRFRKFKSIKARDVGWSVLDVAFTPDGNHFLYSSWSDYIHICNIYGEGDTHTALDLRPDERRFAVFSIAVSSDGREVLGGANDGCLYVFDREQNRRTLQIESHEDDVNAVAFADISSQILFSGGDDAICKVWDRRTMREDDPKPVGALAGHQDGITFIDSKGDARYLISNSKDQTIKLWDIRRFSSREGMEASRQAATQQNWDYRWQQVPKKAWRKLKLPGDSSLMTYRGHGVLHTLIRCRFSPIHSTGQQFIYSGCSTGKVVVYDLLSGHIVKKLTNHKACVRDVSWHPFEEKIVSSSWDGNLRLWQYRQAEYFQDDMPESEECASAPAPVPQSSTPFSSPQ

SEQ ID NO: 887201 - protein, 413 aa, Homo sapiens
MLHQRERGLCHRGSFSLGEQSRVISHFLPNDLGFTDSYSQKAFCGIYSKDGQIFMSACQDQTIRLYDCRYGRFRKFKSIKARDVGWSVLDVAFTPDGNHFLYSSWSDYIHICNIYGEGDTHTALDLRPDERRFAVFSIAVSSDGREVLGGANDGCLYVFDREQNRRTLQIESHEDDVNAVAFADISSQILFSGGDDAICKVWDRRTMREDDPKPVGALAGHQDGITFIDSKGDARYLISNSKDQTIKLWDIRRFSSREGMEASRQAATQQNWDYRWQQVPKKAWRKLKLPGDSSLMTYRGHGVLHTLIRCRFSPIHSTGQQFIYSGCSTGKVVVYDLLSGHIVKKLTNHKACVRDVSWHPFEEKIVSSSWDGNLRLWQYRQAEYFQDDMPESEECASAPAPVPQSSTPFSSPQ

SEQ ID NO: 887202 - protein, 546 aa, Homo sapiens; identical to SEQ ID NO: 887196

SEQ ID NO: 887203 - protein, 359 aa, Homo sapiens
MSACQDQTIRLYDCRYGRFRKFKSIKARDVGWSVLDVAFTPDGNHFLYSSWSDYIHICNIYGEGDTHTALDLRPDERRFAVFSIAVSSDGREVLGGANDGCLYVFDREQNRRTLQIESHEDDVNAVAFADISSQILFSGGDDAICKVWDRRTMREDDPKPVGALAGHQDGITFIDSKGDARYLISNSKDQTIKLWDIRRFSSREGMEASRQAATQQNWDYRWQQVPKKAWRKLKLPGDSSLMTYRGHGVLHTLIRCRFSPIHSTGQQFIYSGCSTGKVVVYDLLSGHIVKKLTNHKACVRDVSWHPFEEKIVSSSWDGNLRLWQYRQAEYFQDDMPESEECASAPAPVPQSSTPFSSPQ

SEQ ID NO: 887204 - protein, 525 aa, Homo sapiens [sequence omitted]

SEQ ID NO: 887205 - protein, 455 aa, Homo sapiens
MGSRNSSSAGSGSGDPSEGLPRRGAGLRRSEEEEEEDEDVDLAQVLAYLLRRGQVRLVQGGGAANLQFIQALLDSEEENDRAWDGRLGDRYNPPVDATPDTRELEFNEIKTQVELATGQLGLRRAAQKHSFPRMLHQRERGLCHRGSFSLGEQSRVISHFLPNDLGFTDSYSQKAFCGIYSKDGQIFMSACQDQTIRLYDCRYGRFRKFKSIKARDVGWSVLDVAFTPDGNHFLYSSWSDYIHICNIYGEGDTHTALDLRPDERRFAVFSIAVSSDGREVLGGANDGCLYVFDREQNRRTLQIESHEDDVNAVAFADISSQILFSGGDDAICKVWDRRTMREDDPKPVGALAGHQDGITFIDSKGDARYLISNSKDQTIKLWDIRRFSSREGMEASRQAATQQNWDYRWQQVPKKAGATECCTPSSAAGSPPFIALASSSSTVAAPLAKWLCTTF

SEQ ID NO: 887206 - protein, 546 aa, Homo sapiens; identical to SEQ ID NO: 887196

SEQ ID NO: 887207 - protein, 277 aa, Homo sapiens
PGLQEFGTWKYYDGANDGCLYVFDREQNRRTLQIESHEDDVNAVAFADISSQILFSGGDDAICKVWDRRTMREDDPKPVGALAGHQDGITFIDSKGDARYLISNSKDQTIKLWDIRRFSSREGMEASRQAATQQNWDYRWQQVPKKAWRKLKLPGDSSLMTYRGHGVLHTLIRCRFSPIHSTGQQFIYSGCSTGKVVVYDLLSGHIVKKLTNHKACVRDVSWHPFEEKIVSSSWDGNLRLWQYRQAEYFQDDMPESEECASAPAPVPQSSTPFSSPQ

SEQ ID NO: 887208 - protein, 546 aa, Homo sapiens; identical to SEQ ID NO: 887196

SEQ ID NO: 887209 - protein, 457 aa, Homo sapiens
MGSRNSSSAGSGSGDPSEGLPRRGAGLRRSEEEEEEDEDVDLAQVLAYLLRRGQVRLVQGGGAANLQFIQALLDSEEENDRAWDGRLGDRYNPPVDATPDTRELEFNEIKTQVELATGQLGLRRAAQKHSFPRMLHQRERGLCHRGSFSLGEQSRVISHFLPNDLGFTDSYSQKAFCGIYSKDGQIFMSACQDQTIRLYDCRYGRFRKFKSIKARDVGWSVLDVAFTPDGNHFLYSSWSDYIHICNIYGEGDTHTALDLRPDERRFAVFSIAVSSDGREVLGGANDGCLYVFDREQNRRTLQIESHEDDVNAVAFADISSQILFSGGDDAICKVWDRRTMREDDPKPVGALAGHQDGITFIDSKGDARYLISNSKDQTIKLWDIRRFSSREGMEASRQAATQQNWDYRWQQVPKKAWRKLKLPGDSSLMTYCQPGLPGLHVEDSTGQSQDRCPGLSS

SEQ ID NO: 887210 - protein, 488 aa, Homo sapiens [sequence omitted]

SEQ ID NO: 887211 - protein, 472 aa, Homo sapiens
MGSRNSSSAGSGSGDPSEGLPRRGAGLRRSEEEEEEDEDVDLAQVLAYLLRRGQVRLVQGGGAANLQFIQALLDSEEENDRAWDGRLGDRYNPPVDATPDTRELEFNEIKTQVELATGQLGLRRAAQKHSFPRMLHQRERGLCHRGSFSLGEQSRVISHFLPNDLGFTDSYSQKAFCGIYSKDGQIFMSACQDQTIRLYDCRYGRFRKFKSIKARDVGWSVLDVAFTPDGNHFLYSSWSDYIHICNIYGEGDTHTALDLRPDERRFAVFSIAVSSDGREVLGGANDGCLYVFDREQNRRTLQIESHEDDVNAVAFADISSQILFSGGDDAICKVWDRRTMREDDPKPVGALAGHQDGITFIDSKVGQKSGLYSQAAKVLVAQEGMKADWCGNLTSSLLTKVCKSWSLGKGLKPGNMNSICTHQSSRSRAGLSVQEKWKTGQVQRLTPVILALWEAEVGGSLELRRSRPACET

SEQ ID NO: 887212 - protein, 283 aa, Homo sapiens
MGSRNSSSAGSGSGDPSEGLPRRGAGLRRSEEEEEEDEDVDLAQVLAYLLRRGQVRLVQGGGAANLQFIQALLDSEEENDRAWDGRLGDRYNPPVDATPDTRELEFNEIKTQVELATGQLGLRRAAQKHSFPRMLHQRERGLCHRGSFSLGEQSRVISHFLPNDLGFTDSYSQKAFCGIYSKDGQIFMSACQDQTIRLYDCRYGRFRKFKSIKARDVGWSVLDVAFTPDGNHFLYSSWSDYIHICNIYGEGDTHTALDLRPDERRFAVFSIAVSSDGREVLGG

SEQ ID NO: 887213 - protein, 159 aa, Homo sapiens
MGSRNSSSAGSGSGDPSEGLPRRGAGLRRSEEEEEEDEDVDLAQVLAYLLRRGQVRLVQGGGAANLQFIQALLDSEEENDRAWDGRLGDRYNPPVDATPDTRELEFNEIKTQVELATGQLGLRRAAQKHSFPRMLHQRERGLCHRGSFSLGEQSRVISQ

SEQ ID NO: 887214 - protein, 208 aa, Homo sapiens
MGSRNSSSAGSGSGDPSEGLPRRGAGLRRSEEEEEEDEDVDLAQVLAYLLRRGQVRLVQGGGAANLQFIQALLDSEEENDRAWDGRLGDRYNPPVDATPDTRELEFNEIKTQVELATGQLGLRRAAQKHSFPRMLHQRERGLCHRGSFSLGEQSRVISHFLPNDLGFTDSYSQKAFCGIYSKDGQIFMSACQEQNPIFRRRRRIQAQR

SEQ ID NO: 887215 - protein, 228 aa, Homo sapiens
MWIWPRGQVRLVQGGGAANLQFIQALLDSEEENDRAWDGRLGDRYNPPVDATPDTRELEFNEIKTQVELATGQLGLRRAAQKHSFPRMLHQRERGLCHRGSFSLGEQSRVISHFLPNDLGFTDSYSQKAFCGIYSKDGQIFMSACQEPKIDLYMRNRRSIIQSLRPEVANVGFAYPREPPTPSGICCIRGGPPPLQNAGSVLRKKARFSTPNSKGVPGTGHARPAPQP

SEQ ID NO: 887216 - protein, 546 aa, Homo sapiens; identical to SEQ ID NO: 887196

SEQ ID NO: 887217 - protein, 546 aa, Homo sapiens; identical to SEQ ID NO: 887196

SEQ ID NO: 887218 - protein, 413 aa, Homo sapiens; identical to SEQ ID NO: 887201

SEQ ID NO: 887219 - protein, 500 aa, Homo sapiens; identical to SEQ ID NO: 887200

SEQ ID NO: 887220 - protein, 546 aa, Homo sapiens; identical to SEQ ID NO: 887196

SEQ ID NO: 887221 - protein, 125 aa, Homo sapiens
GDCPLTIRWRKSHHLKIGKAFVSGHRTLLRTGGTKQSQSRFPNLGFTLHPYPAWRKLKLPGDSSLMTYRGHGVLHTLIRCRFSPIHSTGQQFIYSGCSTGKVVGKDCVRTGGLRKGRNDSLPFHL

SEQ ID NO: 887222 - protein, 73 aa, Homo sapiens
AVTSPTGRLERARRADGTCSLFRLSPGRVMWLRHRRPRYVCHFQFSESIDCNLAAYMYLCLYSILGTQPPGQK

SEQ ID NO: 887223 - protein, 336 aa, Homo sapiens
MSFFGFGQSVEVEILLNDAESRKRAEHKTEDGKKEKYFLFYDGETVSGKVSLALKNPNKRLEHQGIKIEFIGQIELYYDRGNHHEFVSLVKDLARPGEITQSQAFDFEFTHVEKPYESYTGQNVKLRYFLRATISRRLNDVVKEMDIVVHTLSTYPELNSSIKMEVGIEDCLHIEFEYNKSKYHLKDVIVGKIYFLLVRIKIKHMEIDIIKRETTGTGPNVYHENDTIAKYEIMDGAPVRGESIPIRLFLAGYELTPTMRDINKKFSVRYYLNLVLIDEEERRYFKQQEVVLWRKGDIVRKSMSHQAAIASQRFEGTTSLGEVRTPSQLSDNNCRQ

SEQ ID NO: 887224 - protein, 472 aa, Homo sapiens
MSFFGFGQSVEVEILLNDAESRKRAEHKTEDGKKEKYFLFYDGETVSGKVSLALKNPNKRLEHQGIKIEFIGQIELYYDRGNHHEFVSLVKDLARPGEITQSQAFDFEFTHVEKPYESYTGQNVKLRGFVFKRLYGRKKGVETSIAVPQKIKTELPYDLAIPLLDPEADPKEWKTGSRTDICTPIFTAALFAITKRKKQPKCPSVGKWTQEMCFVRTVDCYTAFKRKDILSYATTWVNLKDIVLRERSLSQKDKYCLIPYDMSYFLRATISRRLNDVVKEMDIVVHTLSTYPELNSSIKMEVGIEDCLHIEFEYNKSKYHLKDVIVGKIYFLLVRIKIKHMEIDIIKRETTGTGPNVYHENDTIAKYEIMDGAPVRGESIPIRLFLAGYELTPTMRDINKKFSVRYYLNLVLIDEEERRYFKQQEVVLWRKGDIVRKSMSHQAAIASQRFEGTTSLGEVRTPSQLSDNNCRQ

SEQ ID NO: 887225 - protein, 129 aa, Homo sapiens
MHSSGISAVVRVTWYKGEGITLPPVLTPGPPPTGESIPIRLFLAGYELTPTMRDINKKFSVRYYLNLVLIDEEERRYFKQQEVVLWRKGDIVRKSMSHQAAIASQRFEGTTSLGEVRTPSQLSDNNCRQ

SEQ ID NO: 887226 - protein, 104 aa, Homo sapiens
YIEDAHLRGESIPIRLFLAGYELTPTMRDINKKFSVRYYLNLVLIDEEERRYFKQQEVVLWRKGDIVRKSMSHQAAIASQRFEGTTSLGEVRTPSQLSDNNCRQ

SEQ ID NO: 887227 - protein, 336 aa, Homo sapiens; identical to SEQ ID NO: 887223

SEQ ID NO: 887228 - protein, 336 aa, Homo sapiens; identical to SEQ ID NO: 887223

SEQ ID NO: 887229 - protein, 229 aa, Homo sapiens
MSFFGFGQSVEVEILLNDAESRKRAEHKTEDGKKEKYFLFYDGETVSGKVSLALKNPNKRLEHQGIKIEFIGQIELYYDRGNHHEFVSLVKDLARPGEITQSQAFDFEFTHVEKPYESYTGQNVKLRYFLRATISRRLNDVVKEMDIVVHTLSTYPELNSSIKMEVGIEDCLHIEFEYNKSNFSCFPLLLRTISEYHSIIMCSLHLCLQKSKRRNQILAMICCFLPELK

SEQ ID NO: 887230 - protein, 88 aa, Homo sapiens
MSFFGFGQSVEVEILLNDAESRKRAEHKTEDGKKEKYFLFYDGETVSGKVSLALKNPNKRLEHQGIKIEFIGQIGESTPGTPSPSADS

SEQ ID NO: 887231 - protein, 487 aa, Homo sapiens
  misc_feature (130)..(130): Xaa can be any naturally occurring amino acid
  misc_feature (134)..(134): Xaa can be any naturally occurring amino acid
  misc_feature (137)..(137): Xaa can be any naturally occurring amino acid
  misc_feature (143)..(143): Xaa can be any naturally occurring amino acid
  misc_feature (169)..(169): Xaa can be any naturally occurring amino acid
  misc_feature (172)..(172): Xaa can be any naturally occurring amino acid
  misc_feature (188)..(189): Xaa can be any naturally occurring amino acid
EHAGSASVRCTAGGWAARSAARRWTPPGRRRPPTPGSVRLPPAALHGRPSPAHCHRPRDWLGLARPRALLLGALLLGRRSPQPPASPGRAPPPWSRLSVGAHCPAAAAEPGSPAAAERARASGPLAFFKXGKKXKGXKKRELXKKERKGGAKKLLGLGKKVEVEKIIKXEKXKKRDEKKKEEGKKKKXXILEKGETVSGKVSLALKNPNKRLEHQGIKIEFIGQIELYYDRGNHHEFVSLVKDLARPGEITQSQAFDFEFTHVEKPYESYTGQNVKLRYFLRATISRRLNDVVKEMDIVVHTLSTYPELNSSIKMEVGIEDCLHIEFEYNKSKYHLKDVIVGKIYFLLVRIKIKHMEIDIIKRETTGTGPNVYHENDTIAKYEIMDGAPVRGESIPIRLFLAGYELTPTMRDINKKFSVRYYLNLVLIDEEERRYFKQQEVVLWRKGDIVRKSMSHQAAIASQRFEGTTSLGEVRTPSQLSDNNCRQ

SEQ ID NO: 887232 - protein, 336 aa, Homo sapiens; identical to SEQ ID NO: 887223

SEQ ID NO: 887233 - protein, 77 aa, Homo sapiens
YPARKSRIGMDSPPLVLIDEEERRYFKQQEVVLWRKGDIVRKSMSHQAAIASQRFEGTTSLGEVRTPSQLSDNNCRQ

SEQ ID NO: 887234 - protein, 336 aa, Homo sapiens; identical to SEQ ID NO: 887223

SEQ ID NO: 887235 - protein, 127 aa, Homo sapiens
MSFFGFGQSVEVEILLNDAESRKRAEHKTEDGKKEKYFLFYDGETVSGKVSLALKNPNKRLEHQGIKIEFIGQIELYYDRGNHHEFVSLVKDLARPGEITQSQAFDFEFTHVEKPYESYTGQNVKLR

SEQ ID NO: 887236 - protein, 1290 aa, Homo sapiens
MEKYHVLEMIGEGSFGRVYKGRRKYSAQVVALKFIPKLGRSEKELRNLQREIEIMRGLRHPNIVHMLDSFETDKEVVVVTDYAEGELFQILEDDGKLPEDQVQAIAAQLVSALYYLHSHRILHRDMKPQNILLAKGGGIKLCDFGFARAMSTNTMVLTSIKGTPLYMSPELVEERPYDHTADLWSVGCILYELAVGTPPFYATSIFQLVSLILKDPVRWPSTISPCFKNFLQGLLTKDPRQRLSWPDLLYHPFIAGHVTIITEPAGPDLGTPFTSRLPPELQVLKDEQAHRLAPKGNQSRILTQAYKRMAEEAMQKKHQNTGPALEQEDKTSKVAPGTAPLPRLGATPQESSLLAGILASELKSSWAKSGTGEVPSAPRENRTTPDCERAFPEERPEVLGQRSTDVVDLENEEPDSDNEWQHLLETTEPVPIQLKAPLTLLCNPDFCQRIQSQLHEAGGQILKGILEGASHILPAFRVLSSLLSSCSDSVALYSFCREAGLPGLLLSLLRHSQESNSLQQQSWYGTFLQDLMAVIQAYFACTFNLERSQTSDSLQVFQEAANLFLDLLGKLLAQPDDSEQTLRRDSLMCFTVLCEAMDGNSRAISKAFYSSLLTTQQVVLDGLLHGLTVPQLPVHTPQGAPQVSQPLREQSEDIPGAISSALAAICTAPVGLPDCWDAKEQVCWHLANQLTEDSSQLRPSLISGLQHPILCLHLLKVLYSCCLVSEGLCRLLGQEPLALESLFMLIQGKVKVVDWEESTEVTLYFLSLLVFRLQNLPCGMEKLGSDVATLFTHSHVVSLVSAAACLLGQLGQQGVTFDLQPMEWMAAATHALSAPAEQGKASLIRDMSSSEMWTVLWHRFSMVLRLPEEASAQEGELSLSSPPSPEPDWTLISPQGMAALLSLAMATFTQEPQLCLSCLSQHGSILMSILKHLLCPSFLNQLRQAPHGSEFLPVVVLSVCQLLCFPFALDMDADLLIGVLADLRDSEVAAHLLQVCCYHLPLMQVELPISLLTRLALMDPTSLNQFVNTVSASPRTIVSFLSVALLSDQPLLTSDLLSLLAHTARVLSPSHLSFIQELLAGSDESYRPLRSLLGHPENSVRAHTYRLLGHLLQHSMALRGALQSQSGLLSLLLLGLGDKDPVVRCSASFAVGNAAYQAGPLGPALAAAVPSMTQLLGDPQAGIRRNVASALGNLGPEGLGEELLQCEVPQRLLEMACGDPQPNVKEAALIALRSLQQEPGIHQVLVSLGASEKLSLLSLGNQSLPHSSPRPASAKHCRKLIHLLRPAHSM

SEQ ID NO: 887237 - protein, 139 aa, Homo sapiens
  misc_feature (6)..(6): Xaa can be any naturally occurring amino acid
  misc_feature (54)..(54): Xaa can be any naturally occurring amino acid
HGFLIXQLHLFSGDHHLYCIPSFRIIHPLVAIDSNLGSNGLVNTSTSPTTALSXIMNSFGWHTTVATPPIIIQGLTTVCPPVTAVPPSLSTPGSGERMTDGIFFLSVELPAGTAHQRPTAATVLARPLISPLYCWSCHQ

SEQ ID NO: 887238 - protein, 1315 aa, Homo sapiens
MEKYHVLEMIGEGSFGRVYKGRRKYSAQVVALKFIPKLGRSEKELRNLQREIEIMRGLRHPNIVHMLDSFETDKEVVVVTDYAEGELFQILEDDGKLPEDQVQAIAAQLVSALYYLHSHRILHRDMKPQNILLAKGGGIKLCDFGFARAMSTNTMVLTSIKGTPLYMSPELVEERPYDHTADLWSVGCILYELAVGTPPFYATSIFQLVSLILKDPVRWPSTISPCFKNFLQGLLTKDPRQRLSWPDLLYHPFIAGHVTIITEPAGPDLGTPFTSRLPPELQVLKDEQAHRLAPKGNQSRILTQAYKRMAEEAMQKKHQNTGPALEQEDKTSKVAPGTAPLPRLGATPQESSLLAGILASELKSSWAKSGTGEVPSAPRENRTTPDCERAFPEERPEVLGQRSTDVVDLENEEPDSDNEWQHLLETTEPVPIQLKAPLTLLCNPDFCQRIQSQLHEAGGQILKGILEGASHILPAFRVLSSLLSSCSDSVALYSFCREAGLPGLLLSLLRHSQESNSLQQQSWYGTFLQDLMAVIQAYFACTFNLERSQTSDSLQVFQEAANLFLDLLGKLLAQPDDSEQTLRRDSLMCFTVLCEAMDGNSRAISKAFYSSLLTTQQVVLDGLLHGLTVPQLPVHTPQGAPQVSQPLREQSEDIPGAISSALAAICTAPVGLPDCWDAKEQVCWHLANQLTEDSSQLRPSLISGLQHPILCLHLLKVLYSCCLVSEGLCRLLGQEPLALESLFMLIQGKVKVVDWEESTEVTLYFLSLLVFRLQNLPCGMEKLGSDVATLFTHSHVVSLVSAAACLLGQLGQQGVTFDLQPMEWMAAATHALSAPAEVRLTPPGSCGFYDGLLILLLQLLTEQGKASLIRDMSSSEMWTVLWHRFSMVLRLPEEASAQEGELSLSSPPSPEPDWTLISPQGMAALLSLAMATFTQEPQLCLSCLSQHGSILMSILKHLLCPSFLNQLRQAPHGSEFLPVVVLSVCQLLCFPFALDMDADLLIGVLADLRDSEVAAHLLQVCCYHLPLMQVELPISLLTRLALMDPTSLNQFVNTVSASPRTIVSFLSVALLSDQPLLTSDLLSLLAHTARVLSPSHLSFIQELLAGSDESYRPLRSLLGHPENSVRAHTYRLLGHLLQHSMALRGALQSQSGLLSLLLLGLGDKDPVVRCSASFAVGNAAYQAGPLGPALAAAVPSMTQLLGDPQAGIRRNVASALGNLGPEGLGEELLQCEVPQRLLEMACGDPQPNVKEAALIALRSLQQEPGIHQVLVSLGASEKLSLLSLGNQSLPHSSPRPASAKHCRKLIHLLRPAHSM

SEQ ID NO: 887239 - protein, 1315 aa, Homo sapiens; identical to SEQ ID NO: 887238

SEQ ID NO: 887240 - protein, 1299 aa, Homo sapiens
MEKYHVLEMIGEGSFGRVYKGRRKYSAQVVALKFIPKLGRSEKELRNLQREIEIMRGLRHPNIVHMLDSFETDKEVVVVTDYAEGELFQILEDDGKLPEDQVQAIAAQLVSALYYLHSHRILHRDMKPQNILLAKGGGIKLCDFGFARAMSTNTMVLTSIKGTPLYMSPELVEERPYDHTADLWSVGCILYELAVGTPPFYATSIFQLVSLILKDPVRWPSTISPCFKNFLQGLLTKDPRQRLSWPDLLYHPFIAGHVTIITEPAGPDLGTPFTSRLPPELQVLKDEQAHRLAPKGNQSRILTQAYKRMAEEAMQKKHQNTGPALEQEDKTSKVAPGTAPLPRLGATPQESSLLAGILASELKSSWAKSGTGEVPSAPRENRTTPDCERAFPEERPEVLGQRSTDVVDLENEEPDSDNEWQHLLETTEPVPIQLKAPLTLLCNPDFCQRIQSQLHEAGGQILKGILEGASHILPAFRVLSSLLSSCSDSVALYSFCREAGLPGLLLSLLRHSQESNSLQQQSWYGTFLQDLMAVIQAYFACTFNLERSQTSDSLQVFQEAANLFLDLLGKLLAQPDDSEQTLRRDSLMCFTVLCEAMDGNSRAISKAFYSSLLTTQQVVLDGLLHGLTVPQLPVHTPQGAPQVSQPLREQSEDIPGAISSALAAICTAPVGLPDCWDAKEQVCWHLANQLTEDSSQLRPSLISGLQHPILCLHLLKVLYSCCLVSEGLCRLLGQEPLALESLFMLIQGKVKVVDWEESTEVTLYFLSLLVFRLQNLPCGMEKLGSDVATLFTHSHVVSLVSAAACLLGQLGQQGVTFDLQPMEWMAAATHALSAPAEVRLTPPGSCGFYDGLLILLLQLLTEQGKASLIRDMSSSEMWTVLWHRFSMVLRLPEEASAQEGELSLSSPPSPEPDWTLISPQGMAALLSLAMATFTQEPQLCLSCLSQHGSILMSILKHLLCPSFLNQLLPGLLCFPFALDMDADLLIGVLADLRDSEVAAHLLQVCCYHLPLMQVELPISLLTRLALMDPTSLNQFVNTVSASPRTIVSFLSVALLSDQPLLTSDLLSLLAHTARVLSPSHLSFIQELLAGSDESYRPLRSLLGHPENSVRAHTYRLLGHLLQHSMALRGALQSQSGLLSLLLLGLGDKDPVVRCSASFAVGNAAYQAGPLGPALAAAVPSMTQLLGDPQAGIRRNVASALGNLGPEGLGEELLQCEVPQRLLEMACGDPQPNVKEAALIALRSLQQEPGIHQVLVSLGASEKLSLLSLGNQSLPHSSPRPASAKHCRKLIHLLRPAHSM

SEQ ID NO: 887241 - protein, 1188 aa, Homo sapiens
TGTEGLGEELLQCEVPQRLLEMACGDPQPNVKEAALIALRSLQQELTSIKGTPLYMSPELVEERPYDHTADLWSVGCILYELAVGTPPFYATSIFQLVSLILKDPVRWPSTISPCFKNFLQGLLTKDPRQRLSWPDLLYHPFIAGHVTIITEPAGPDLGTPFTSRLPPELQVLKDEQAHRLAPKGNQSRILTQAYKRMAEEAMQKKHQNTGPALEQEDKTSKVAPGTAPLPRLGATPQESSLLAGILASELKSSWAKSGTGEVPSAPRENRTTPDCERAFPEERPEVLGQRSTDVVDLENEEPDSDNEWQHLLETTEPVPIQLKAPLTLLCNPDFCQRIQSQLHEAGGQILKGILEGASHILPAFRVLSSLLSSCSDSVALYSFCREAGLPGLLLSLLRHSQESNSLQQQSWYGTFLQDLMAVIQAYFACTFNLERSQTSDSLQVFQEAANLFLDLLGKLLAQPDDSEQTLRRDSLMCFTVLCEAMDGNSRAISKAFYSSLLTTQQVVLDGLLHGLTVPQLPVHTPQGAPQVSQPLREQSEDIPGAISSALAAICTAPVGLPDCWDAKEQVCWHLANQLTEDSSQLRPSLISGLQHPILCLHLLKVLYSCCLVSEGLCRLLGQEPLALESLFMLIQGKVKVVDWEESTEVTLYFLSLLVFRLQNLPCGMEKLGSDVATLFTHSHVVSLVSAAACLLGQLGQQGVTFDLQPMEWMAAATHALSAPAEVRLTPPGSCGFYDGLLILLLQLLTEQGKASLIRDMSSSEMWTVLWHRFSMVLRLPEEASAQEGELSLSSPPSPEPDWTLISPQGMAALLSLAMATFTQEPQLCLSCLSQHGSILMSILKHLLCPSFLNQLLPGLLCFPFALDMDADLLIGVLADLRDSEVAAHLLQVCCYHLPLMQVELPISLLTRLALMDPTSLNQFVNTVSASPRTIVSFLSVALLSDQPLLTSDLLSLLAHTARVLSPSHLSFIQELLAGSDESYRPLRSLLGHPENSVRAHTYRLLGHLLQHSMALRGALQSQSGLLSLLLLGLGDKDPVVRCSASFAVGNAAYQAGPLGPALAAAVPSMTQLLGDPQAGIRRNVASALGNLGPEGLGEELLQCEVPQRLLEMACGDPQPNVKEAALIALRSLQQEPGIHQVLVSLGASEKLSLLSLGNQSLPHSSPRPASAKHCRKLIHLLRPAHSM

SEQ ID NO: 887242 - protein, 1150 aa, Homo sapiens
MSTNTMVLTSIKGTPLYMSPELVEERPYDHTADLWSVGCILYELAVGTPPFYATSIFQLVSLILKDPVRWPSTISPCFKNFLQGLLTKDPRQRLSWPDLLYHPFIAGHVTIITEPAGPDLGTPFTSRLPPELQVLKDEQAHRLAPKGNQSRILTQAYKRMAEEAMQKKHQNTGPALEQEDKTSKVAPGTAPLPRLGATPQESSLLAGILASELKSSWAKSGTGEVPSAPRENRTTPDCERAFPEERPEVLGQRSTDVVDLENEEPDSDNEWQHLLETTEPVPIQLKAPLTLLCNPDFCQRIQSQLHEAGGQILKGILEGASHILPAFRVLSSLLSSCSDSVALYSFCREAGLPGLLLSLLRHSQESNSLQQQSWYGTFLQDLMAVIQAYFACTFNLERSQTSDSLQVFQEAANLFLDLLGKLLAQPDDSEQTLRRDSLMCFTVLCEAMDGNSRAISKAFYSSLLTTQQVVLDGLLHGLTVPQLPVHTPQGAPQVSQPLREQSEDIPGAISSALAAICTAPVGLPDCWDAKEQVCWHLANQLTEDSSQLRPSLISGLQHPILCLHLLKVLYSCCLVSEGLCRLLGQEPLALESLFMLIQGKVKVVDWEESTEVTLYFLSLLVFRLQNLPCGMEKLGSDVATLFTHSHVVSLVSAAACLLGQLGQQGVTFDLQPMEWMAAATHALSAPAEVRLTPPGSCGFYDGLLILLLQLLTEQGKASLIRDMSSSEMWTVLWHRFSMVLRLPEEASAQEGELSLSSPPSPEPDWTLISPQGMAALLSLAMATFTQEPQLCLSCLSQHGSILMSILKHLLCPSFLNQLLPGLLCFPFALDMDADLLIGVLADLRDSEVAAHLLQVCCYHLPLMQVELPISLLTRLALMDPTSLNQFVNTVSASPRTIVSFLSVALLSDQPLLTSDLLSLLAHTARVLSPSHLSFIQELLAGSDESYRPLRSLLGHPENSVRAHTYRLLGHLLQHSMALRGALQSQSGLLSLLLLGLGDKDPVVRCSASFAVGNAAYQAGPLGPALAAAVPSMTQLLGDPQAGIRRNVASALGNLGPEGLGEELLQCEVPQRLLEMACGDPQPNVKEAALIALRSLQQEPGIHQVLVSLGASEKLSLLSLGNQSLPHSSPRPASAKHCRKLIHLLRPAHSM

SEQ ID NO: 887243 - protein, 273 aa, Homo sapiens
MDPTSLNQFVNTVSASPRTIVSFLSVALLSDQPLLTSDLLSLLAHTARVLSPSHLSFIQELLAGSDESYRPLRSLLGHPENSVRAHTYRLLGHLLQHSMALRGALQSQSGLLSLLLLGLGDKDPVVRCSASFAVGNAAYQAGPLGPALAAAVPSMTQLLGDPQAGIRRNVASALGNLGPEGLGEELLQCEVPQRLLEMACGDPQPNVKEAALIALRSLQQEPGIHQVLVSLGASEKLSLLSLGNQSLPHSSPRPASAKHCRKLIHLLRPAHSM

SEQ ID NO: 887244 - protein, 1926 aa, Homo sapiens
LELIEKLLQNRITIVDRFLNSSNDHRFQALQDNCKKILGENAKPNYGCQVTIQSEQEKQLMKQYRREEKRIARREKKAGEDLEVSEGLMCFDPKELRIQREQALLNARSVPILSRQRDADVEKIHYPHVYDSQAEAMKTSAFIAGAKMILPEGIQRENNKLYEEVRIPYSEPMPLSFEEKPVYIQDLDEIGQLAFKGMKRLNRIQSIVFETAYNTNENMLICAPTGAGKTNIAMLTVLHEIRQHFQQGVIKKNEFKIVYVAPMKALAAEMTDYFSRRLEPLGIIVKELTGDMQLSKSEILRTQMLVTTPEKWDVVTRKSVGDVALSQIVRLLILDEVHLLHEDRGPVLESIVARTLRQVESTQSMIRILGLSATLPNYLDVATFLHVNPYIGLFFFDGRFRPVPLGQTFLGIKCANKMQQLNNMDEVCYENVLKQVKAGHQVMVFVHARNATVRTAMSLIERAKNCGHIPFFFPTQGHDYVLAEKQVQRSRNKQVRELFPDGFSIHHAGMLRQDRNLVENLFSNGHIKVLVCTATLAWGVNLPAHAVIIKGTQIYAAKRGSFVDLGILDVMQIFGRAGRPQFDKFGEGIIITTHDKLSHYLTLLTQRNPIESQFLESLADNLNAEIALGTVTNVEEAVKWISYTYLYVRMRANPLAYGISHKAYQIDPTLRKHREQLVIEVGRKLDKAQMIRFEERTGYFSSTDLGRTASHYYIKYNTIETFNELFDAHKTEGDIFAIVSKAEEFDQIKVREEEIEELDTLLSNFCELSTPGGVENSYGKINILLQTYISRGEMDSFSLISDSAYVAQNAARIVRALFEIALRKRWPTMTYRLLNLSKVIDKRLWGWASPLRQFSILPPHILTRLEEKKLTVDKLKDMRKDEIGHILHHVNIGLKVKQCVHQIPSVMMEASIQPITRTVLRVTLSIYADFTWNDQVHGTVGEPWWIWVEDPTNDHIYHSEYFLALKKQVISKEAQLLVFTIPIFEPLPSQYYIRAVSDRWLGAEAVCIINFQHLILPERHPPHTELLDLQPLPITALGCKAYEALYNFSHFNPVQTQIFHTLYHTDCNVLLGAPTGSGKTVAAELAIFRVFNKYPTSKAVYIAPLKALVRERMDDWKVRIEEKLGKKVIELTGDVTPDMKSIAKADLIVTTPEKWDGVSRSWQNRNYVQQVTILIIDEIHLLGEERGPVLEVIVSRTNFISSHTEKPVRIVGLSTALANARDLADWLNIKQMGLFNFRPSVRPVPLEVHIQGFPGQHYCPRMASMNKPAFQAIRSHSPAKPVLIFVSSRRQTRLTALELIAFLATEEDPKQWLNMDEREMENIIATVRDSNLKLTLAFGIGMHHAGLHERDRKTVEELFVNCKVQVLIATSTLAWGVNFPAHLVIIKGTEYYDGKTRRYVDFPITDVLQMMGRAGRPQFDDQGKAVILVHDIKKDFYKKFLYEPFPVESSLLGVLSDHLNAEIAGGTITSKQDALDYITWTYFFRRLIMNPSYYNLGDVSHDSVNKFLSHLIEKSLIELELSYCIEIGEDNRSIEPLTYGRIASYYYLKHQTVKMFKDRLKPECSTEELLSILSDAEEYTDLPVRHNEDHMNSELAKCLPIESNPHSFDSPHTKAHLLLQAHLSRAMLPCPDYDTDTKTVLDQALRVCQAMLDVAANQGWLVTVLNITNLIQMVIQGRWLKDSSLLTLPNIENHHLHLFKKWKPIMKGPHARGRTSIECLPELIHACGGKDHVFSSMVESELHAAKTKQAWNFLSHLPVINVGISVKGSWDDLVEGHNELSVSTLTADKRDDNKWIKLHADQEYVLQVSLQRVHFGFHKGKPESCAVTPRFPKSKDEGWFLILGEVDKRELIALKRVGYIRNHHVASLSFYTPEIPGRYIYTLYFMSDCYLGLDQQYDIYLNVTQASLSAQVNTKVSDSLTDLALK

SEQ ID NO: 887245 - protein, 1926 aa, Homo sapiens; identical to SEQ ID NO: 887244

SEQ ID NO: 887246 - protein, 326 aa, Homo sapiens
MALSGSTPAPCWEEDECLDYYGMLSLHRMFEVVGGQLTECELELLAFLLDEAPGAAGGLARARSGLELLLELERRGQCDESNLRLLGQLLRVLARHDLLPHLARKRRRPVSPERYSYGTSSSSKRTEGSCRRRRQSSSSANSQQGQWETGSPPTKRQRRSRGRPSGGARRRRRGAPAAPQQQSEPARPSSEGKVTCDIRLRVRAEYCEHGPALEQGVASRRPQALARQLDVFGQATAVLRSRDLGSVVCDIKFSELSYLDAFWGDYLSGALLQALRGVFLTEALREAVGREAVRLLVSVDEADYEAGRRRLLLMEEEGGRRPTEAS

SEQ ID NO: 887247 - protein, 326 aa, Homo sapiens; identical to SEQ ID NO: 887246

SEQ ID NO: 887248 - protein, 361 aa, Homo sapiens
  misc_feature (6)..(6): Xaa can be any naturally occurring amino acid
AGLYAXELWLRPSPRSHRTPESGRVLSLFRLPPPGMALSGSTPAPCWEEDECLDYYGMLSLHRMFEVVGGQLTECELELLAFLLDEAPGAAGGLARARSGLELLLELERRGQCDESNLRLLGQLLRVLARHDLLPHLARKRRRPVSPERYSYGTSSSSKRTEGSCRRRRQSSSSANSQQGQWETGSPPTKRQRRSRGRPSGGARRRRRGAPAAPQQQSEPARPSSEGKVTCDIRLRVRAEYCEHGPALEQGVASRRPQALARQLDVFGQATAVLRSRDLGSVVCDIKFSELSYLDAFWGDYLSGALLQALRGVFLTEALREAVGREAVRLLVSVDEADYEAGRRRLLLMEEEGGRRPTEAS

SEQ ID NO: 887249 - protein, 131 aa, Homo sapiens
MQRTRGPQGHNTRGTAATHTPWPKRGDNTRRGPLPHTHREETQNTHHRQRQDARERSTTERTPGNPDEHKQHKPRRGDRLTSTRPRPSTPPSSRGRWDTSHHSDAGNQRQIREVTDHQYEDARANIHPIRW

SEQ ID NO: 887250 - protein, 326 aa, Homo sapiens; identical to SEQ ID NO: 887246

SEQ ID NO: 887251 - protein, 326 aa, Homo sapiens; identical to SEQ ID NO: 887246

SEQ ID NO: 887252 - protein, 362 aa, Homo sapiens
MALSGSTPAPCWEEDECLDYYGMLSLHRMFEVVGGQLTECELELLAFLLDEAPGAAGGLARARSGLELLLELERRGQCDESNLRLLGQLLRVLARHDLLPHLARKRRRPVSPERYSYGTSSSSKRTEGSCRRRRQSSSSANSQQGQWETGSPPTKRQRRSRGRPSGGARRRRRGAPAAPQQQSEPARPSSEGKVTCAVQESRVAAICYLWTDHPESLQFMAGKGKGSQAGTSDIRLRVRAEYCEHGPALEQGVASRRPQALARQLDVFGQATAVLRSRDLGSVVCDIKFSELSYLDAFWGDYLSGALLQALRGVFLTEALREAVGREAVRLLVSVDEADYEAGRRRLLLMEEEGGRRPTEAS

SEQ ID NO: 887253 - protein, 131 aa, Homo sapiens; identical to SEQ ID NO: 887249

SEQ ID NO: 887254 - protein, 326 aa, Homo sapiens; identical to SEQ ID NO: 887246

SEQ ID NO: 887255 - protein, 326 aa, Homo sapiens; identical to SEQ ID NO: 887246

SEQ ID NO: 887256 - protein, 326 aa, Homo sapiens
MALSGSTPAPCWEEDECLDYYGMLSLHRMFEVVGGQLTECELELLAFLLDEAPGAAGGLARARSGLELLLELERRGQCDESNLRLLGQLLRVLARHDLLPHLARKRRRPVSPERYSYGTSSSSKRTEGSCRRRRQSSSSANSQQGQWETGSPPTKRQRRSRGRPSGGARRRRRGAPAAPQQQSEPARPSSEGKVTCDIRLRVRAEYCEHGPALEQGVASRRPQALARQLDVFGQATAVLRSRDLGSVVCDIKFSELSYLDAFWGDYLSGALLQALRGVFLTEALREAVGREAVRLLVSVDEADYEAGRRRLLLMREGRHRALSDCR

SEQ ID NO: 887257 - protein, 167 aa, Homo sapiens
MALSGSTPAPCWEEDECLDYYGMLSLHRMFEVVGGQLTECELELLAFLLDEAPGAAGGLARARSGLELLLELERRGQCDESNLRLLGQLLRVLARHDLLPHLARKRRRPVSPERYSYGTSSSSKRTEGSCRRRRQSSSLRSSLGLCPGLLPSTHFFGLRASLSGPLI

SEQ ID NO: 887258 - protein, 249 aa, Homo sapiens
MALSGSTPAPCWEEDECLDYYGMLSLHRMFEVVGGQLTECELELLAFLLDEAPGAAGGLARARSGLELLLELERRGQCDESNLRLLGQLLRVLARHDLLPHLARKRRRPVSPERYSYGTSSSSKRTEGSCRRRRQSSSSANSQQGQWETGSPPTKRQRRSRGRPSGGARRRRRGAPAAPQQQSEPARPSSEGKVTCAQPTWASATSVGTGAGVHMGPAHLAHTSPASQGPAQLQFTDLTLLTFPPAVQS

SEQ ID NO: 887259 - protein, 211 aa, Homo sapiens
MALSGSTPAPCWEEDECLDYYGMLSLHRMFEVVGGQLTECELELLAFLLDEAPGAAGGLARARSGLELLLELERRGQCDESNLRLLGQLLRVLARHDLLPHLARKRRRPVSPERYSYGTSSSSKRTEGSCRRRRQSSSSANSQQGQWETGSPPTKRQRRSRGRPSGGARRRRRGVHMGPAHLAHTSPASQGPAQLQFTDLTLLTFPPAVQS

SEQ ID NO: 887260 - protein, 216 aa, Homo sapiens
MALSGSTPAPCWEEDECLDYYGMLSLHRMFEVVGGQLTECELELLAFLLDEAPGAAGGLARARSGLELLLELERRGQCDESNLRLLGQLLRVLARHDLLPHLARKRRRPVSPERYSYGTSSSSKRTEGSCRRRRQSSSSANSQQGQWETGSPPTKRQRRSRGRPSGGARRRRRGAPAAPHIIPRPTVAHGAKTSKQPPSWKGNAKALGVMEKTFYK

SEQ ID NO: 887261 - protein, 399 aa, Homo sapiens
MAEAMDLGKDPNGPTHSSTLFVRDDGSSMSFYVRPSPAKRRLSTLILHGGGTVCRVQEPGAVLLAQPGEALAEASGDFISTQYILDCVERNERLELEAYRLGPASAADTGSEAKPGALAEGAAEPEPQRHAGRIAFTDADDVAILTYVKENARSPSSVTGNALWKAMEKSSLTQHSWQSLKDRYLKHLRGQEHKYLLGDAPVSPSSQKLKRKAEEDPEAADSGEPQNKRTPDLPEEEYVKEEIQENEEAVKKMLVEATREFEEVVVDESPPDFEIHITMCDDDPPTPEEDSETQPDEEEEEEEEKVSQPEVGAAIKIIRQLMEKFNLDLSTVTQAFLKNSGELEATSAFLASGQRADGYPIWSRQDDIDLQKDDEDTREALVKKFGAQNVARRIEFRKK

SEQ ID NO: 887262 - protein, 399 aa, Homo sapiens; identical to SEQ ID NO: 887261

SEQ ID NO: 887263 - protein, 140 aa, Homo sapiens
SVPSSTETLIHPGVEEVVVDESPPDFEIHITMCDDDPPTPEEDSETQPDEEEEEEEEKVSQPEVSISSQSWLILSSTFGRFYCIWAGYAFSTSGSHSHHPECSAVARSQLSAASISQAQAILPPQPPEKLELQECATASG

SEQ ID NO: 887264 - protein, 399 aa, Homo sapiens; identical to SEQ ID NO: 887261

SEQ ID NO: 887265 - protein, 399 aa, Homo sapiens; identical to SEQ ID NO: 887261

SEQ ID NO: 887266 - protein, 399 aa, Homo sapiens; identical to SEQ ID NO: 887261

SEQ ID NO: 887267 - protein, 399 aa, Homo sapiens; identical to SEQ ID NO: 887261

SEQ ID NO: 887268 - protein, 147 aa, Homo sapiens
MLVEATREFEEVVVDESPPDFEIHITMCDDDPPTPEEDSETQPDEEEEEEEEKVSQPEVGAAIKIIRQLMEKFNLDLSTVTQAFLKNSGELEATSAFLASGQRADGYPIWSRQDDIDLQKDDEDTREALVKKFGAQNVARRIEFRKK

SEQ ID NO: 887269 - protein, 152 aa, Homo sapiens
SVPSSTETLIHPGVEEVVVDESPPDFEIHITMCDDDPPTPEEDSETQPDEEEEEEEEKVSQPEVGAAIKIIRQLMEKFNLDLSTVTQAFLKNSGELEATSAFLASGQRADGYPIWSRQDDIDLQKDDEDTREALVKKFGAQNVARRIEFRKK

SEQ ID NO: 887270 - protein, 121 aa, Homo sapiens [sequence omitted]

SEQ ID NO: 887271 - protein, 121 aa, Homo sapiens [sequence omitted]

SEQ ID NO: 887272 - protein, 123 aa, Homo sapiens
NLSPGVEEVVVIDCVMMITTEEDEEEEEKVSQPEVGAAIKIIRQLMEKFNLDLSTVTQAFLKNSGELEATSAFLASGQRADGYPIWSRQDDIDLQKDDEDTREALVKKFGAQNVARRIEFRKK

SEQ ID NO: 887273 - protein, 121 aa, Homo sapiens [sequence omitted]

SEQ ID NO: 887274 - protein, 387 aa, Homo sapiens
MAEAMDLGKDPNGPTHSSTLFVRDDGSSMSFYVRPSPAKRRLSTLILHGGGTVCRVQEPGAVLLAQPGEALAEASGDFISTQYILDCVERNERLELEAYRLGPASAADTGSEAKPGALAEGAAEPEPQRHAGRIAFTDADDVAILTYVKENARSPSSVTGNALWKAMEKSSLTQHSWQSLKDRYLKHLRGQEHKYLLGDAPVSPSSQKLKRKAEEDPEAADSGEPQNKRTPDLPEEEYVKEEIQENEEAVKKMLVEATREFEEVVVDESPPDFEIHITMCDDDPPTPEEDSETQPDEEEEEEEEKVSQPEVSISSQSWLILSSTFGRFYCIWAGYAFSTSGSHSHHPECSAVARSQLSAASISQAQAILPPQPPEKLELQECATASG

SEQ ID NO: 887275 - protein, 277 aa, Homo sapiens
MAEAMDLGKDPNGPTHSSTLFVRDDGSSMSFYVRPSPAKRRLSTLILHGGGTVCRVQEPGAVLLAQPGEALAEASGDFISTQYILDCVERNERLELEAYRLGPASAADTGSEAKPGALAEGAAEPEPQRHAGRIAFTDADDVAILTYVKENARSPSSVTGNALWKAMEKSSLTQHSWQSLKDRYLKHLRGQEHKYLLGDAPVSPSSQKLKRKAEEDPEAADSGEPQNKRTPDLPEEECCIHFANLVFGYPALWLFFFWSPSQSSLPDVFLYLPLSFP

SEQ ID NO: 887276 - protein, 210 aa, Homo sapiens
AAVRGAGPGARPGGGGGCGDGGRVGVRSGSVRGAAMLQLRDSVDSAGTSPTAVLAAGEEVGAGGGPGGGRPGAGTPLRQTLWPLSIHDPTRRARVKEYFVFRPGSIEQAVEEIRVVVRPVEDGEIQGVWLLTEVDHWNNEKERLVLVTEQSLLICKYDFISLQCQQVVRIALNAVDTISYGEFQFPPKSLNKREGLGFEFSGTSKVVLPS

SEQ ID NO: 887277 - protein, 210 aa, Homo sapiens; identical to SEQ ID NO: 887276

SEQ ID NO: 887278 - protein, 170 aa, Homo sapiens
AAVRGAGPGARPGGGGGCGDGGRVGVRSGSVRGAAMLQLRDSVDSAGTSPTAVLAAGEEVGAGGGPGGGRPGAGTPLRQTLWPLSIHDPTRRARVKEYFVFRPGSIEQAVEEIRVVVRPVEDGEIQVVRIALNAVDTISYGEFQFPPKSLNKREGLGFEFSGTSKVVLPS

SEQ ID NO: 887279 - protein, 248 aa, Homo sapiens
RGGPRGGAGGASGWWRWLRRRRSRRRQVGVGKGCGNAATAGLGGLGRYEPHGGAGGRRGGGGRRRPGRGAAGGGDAAAPDTLASQHPRPHAPRPRQGVLRVPARQHRAGSGGDPRGGAARGGRRDPGSVAAYRARRFGIRIQWDKQSRPSFINRWNPWSTNVPYATFTEHPMAGADEKTASLCQLESFKALLIQAVKKAQKESPLPGQANGVLILERPLLIETYVGLMSFINNEAKLGYSMTRGKIGF

SEQ ID NO: 887280 - protein, 210 aa, Homo sapiens; identical to SEQ ID NO: 887276

SEQ ID NO: 887281 - protein, 217 aa, Homo sapiens
AAVRGAGPGARPGGGGGCGDGGRVGVRSGSVRGAAMLQLRDSVDSAGTSPTAVLAAGEEVGAGGGPGGGRPGAGTPLRQTLWPLSIHDPTRRARVKEYFVFRARRFGIRIQWDKQSRPSFINRWNPWSTNVPYATFTEHPMAGADEKTASLCQLESFKALLIQAVKKAQKESPLPGQANGVLILERPLLIETYVGLMSFINNEAKLGYSMTRGKIGF

SEQ ID NO: 887282 - protein, 210 aa, Homo sapiens; identical to SEQ ID NO: 887276

SEQ ID NO: 887283 - protein, 396 aa, Homo sapiens
MTNEEPLPKKVRLSETDFKVMARDELILRWKQYEAYVQALEGKYTDLNSNDVTGLRESEEKLKQQQQESARRENILVMRLATKEQEMQECTTQIQYLKQVQQPSVAQLRSTMVDPAINLFFLKMKGELEQTKDKLEQAQNELSAWKFTPDSQTGKKLMAKCRMLIQENQELGRQLSQGRIAQLEAELALQKKYSEELKSSQDELNDFIIQLDEEVEGMQSTILVLQQQLKETRQQLAQYQQQQSQASAPSTSRTTASEPVEQSEATSKDCSRLTNGPSNGSSSRQRTSGSGFHREGNTTEDDFPSSPGNGNKSSNSSEERTGRGGSGYVNQLSAGYESVDSPTGSENSLTHQSNDTDSSHDPQEEKAVSGKGNRTVGSRHVQNGLDSSVNVQGSVL

SEQ ID NO: 887284 - protein, 202 aa, Homo sapiens
AERSRAAGRGRAAGPGFLPQRHFVAARPTNKGERRGCGGTRSAAGPAAELSGCAVARGARAAGQAARPRPMRPVAPARLLPGEVGAGRLAGADAGDLRGLRADAQPPPAGKGRAGPERPHGPGAAPVSREPLYLPACGEHFRRFEAILSLSSVPKARVERGALAAGETGHSRRPEDALPGLSGGARFFLASGSPPSPPLGLS

SEQ ID NO: 887285 - protein, 151 aa, Homo sapiens
MTNEEPLPKKVRLSETDFKVMARDELILRWKQYEAYVQALEGKYTDLNSNDVTGLRESEEKLKQQQQESARRENILVMRLATKEQEMQECTTQIQYLKQVQQPSVAQLRSTMVDPAINLFFLKMKGELEQTKDKLEQAQNELSAWKFTPDR

SEQ ID NO: 887286 - protein, 151 aa, Homo sapiens; identical to SEQ ID NO: 887285

SEQ ID NO: 887287 - protein, 151 aa, Homo sapiens; identical to SEQ ID NO: 887285

SEQ ID NO: 887288 - protein, 396 aa, Homo sapiens; identical to SEQ ID NO: 887283

SEQ ID NO: 887289 - protein, 375 aa, Homo sapiens
MYGFFFIRWKQYEAYVQALEGKYTDLNSNDVTGLRESEEKLKQQQQESARRENILVMRLATKEQEMQECTTQIQYLKQVQQPSVAQLRSTMVDPAINLFFLKMKGELEQTKDKLEQAQNELSAWKFTPDSQTGKKLMAKCRMLIQENQELGRQLSQGRIAQLEAELALQKKYSEELKSSQDELNDFIIQLDEEVEGMQSTILVLQQQLKETRQQLAQYQQQQSQASAPSTSRTTASEPVEQSEATSKDCSRLTNGPSNGSSSRQRTSGSGFHREGNTTEDDFPSSPGNGNKSSNSSEERTGRGGSGYVNQLSAGYESVDSPTGSENSLTHQSNDTDSSHDPQEEKAVSGKGNRTVGSRHVQNGLDSSVNVQGSVL

SEQ ID NO: 887290 - protein, 311 aa, Homo sapiens
MRIKFQTQIQYLKQVQQPSVAQLRSTMVDPAINLFFLKMKGELEQTKDKLEQAQNELSAWKFTPDSQTGKKLMAKCRMLIQENQELGRQLSQGRIAQLEAELALQKKYSEELKSSQDELNDFIIQLDEEVEGMQSTILVLQQQLKETRQQLAQYQQQQSQASAPSTSRTTASEPVEQSEATSKDCSRLTNGPSNGSSSRQRTSGSGFHREGNTTEDDFPSSPGNGNKSSNSSEERTGRGGSGYVNQLSAGYESVDSPTGSENSLTHQSNDTDSSHDPQEEKAVSGKGNRTVGSRHVQNGLDSSVNVQGSVL

SEQ ID NO: 887291 - protein, 277 aa, Homo sapiens [sequence omitted]

SEQ ID NO: 887292 - protein, 396 aa, Homo sapiens; identical to SEQ ID NO: 887283

SEQ ID NO: 887293 - protein, 336 aa, Homo sapiens
MTNEEPLPKKVRLSETDFKVMARDELILRWKQYEAYVQALEGKYTDLNSNDVTGLRESEEKLKQQQQESARRENILVMRLATKEQEMQECTTQIQYLKQVQQPSVAQLRSTMVDPAINLFFLKMKGELEQTKDKLEQAQNELSAWKFTPDSQTGKKLMAKCRMLIQENQELGRQLSQGRIAQLEAELALQKKYSEELKSSQDELNDFIIQLDEEVEGMQSTILVLQQQLKETRQQLAQYQQQQSQASAPSTSRTTASEPVEQSEATSKDCSRLTNGPSNGSSSRQRTSGSGFQHRGTPPRTMTNDGQQPSVNDLQHTSSRGDNLRKVEAATKAIGK

SEQ ID NO: 887294 - protein, 235 aa, Homo sapiens
MTNEEPLPKKVRLSETDFKVMARDELILRWKQYEAYVQALEGKYTDLNSNDVTGLRESEEKLKQQQQESARRENILVMRLATKEQEMQECTTQIQYLKQVQQPSVAQLRSTMVDPAINLFFLKMKGELEQTKDKLEQAQNELSAWKFTPDSQTGKKLMAKCRMLIQENQELGRQLSQGRIAQLEAELALQKKYSEELKSSQDGKGFVSFWNVVSTLHWLFKTASHEYYRLDSVHC

SEQ ID NO: 887295 - protein, 159 aa, Homo sapiens [sequence omitted]

SEQ ID NO: 887296 - protein, 151 aa, Homo sapiens; identical to SEQ ID NO: 887285

SEQ ID NO: 887297 - protein, 86 aa, Homo sapiens
AERSRAAGRGRAAGPGFLPQRHFVAARPTNKGERRGCGGTRSAAGPAAELSGCAVARGARAAGQAARPRPMRPVAPARLLPGEDSR

SEQ ID NO: 887298 - protein, 151 aa, Homo sapiens; identical to SEQ ID NO: 887285

SEQ ID NO: 887299 - protein, 151 aa, Homo sapiens; identical to SEQ ID NO: 887285

SEQ ID NO: 887300 - protein, 361 aa, Homo sapiens
FDGDSLRQYTDLNSNDVTGLRESEEKLKQQQQESARRENILVMRLATKEQEMQECTTQIQYLKQVQQPSVAQLRSTMVDPAINLFFLKMKGELEQTKDKLEQAQNELSAWKFTPDSQTGKKLMAKCRMLIQENQELGRQLSQGRIAQLEAELALQKKYSEELKSSQDELNDFIIQLDEEVEGMQSTILVLQQQLKETRQQLAQYQQQQSQASAPSTSRTTASEPVEQSEATSKDCSRLTNGPSNGSSSRQRTSGSGFHREGNTTEDDFPSSPGNGNKSSNSSEERTGRGGSGYVNQLSAGYESVDSPTGSENSLTHQSNDTDSSHDPQEEKAVSGKGNRTVGSRHVQNGLDSSVNVQGSVL

SEQ ID NO: 887301 - protein, 164 aa, Homo sapiens
  misc_feature (7)..(7): Xaa can be any naturally occurring amino acid
RRQYPRXVARLGGVTNEEALPKKVRLSETDFKVMARDELILRWKQYEAYVQALEGKYTDLNSNDVTGLRESEEKLKQQQQESARRENILVMRLATKEQEMQECTTQIQYLKQVQQPSVAQLRSTMVDPAINLFFLKMKGELEQTKDKLEQAQNELSAWKFTPDR

SEQ ID NO: 887302 - protein, 396 aa, Homo sapiens; identical to SEQ ID NO: 887283

SEQ ID NO: 887303 - protein, 170 aa, Homo sapiens
MTNEEPLPKKVRLSETDFKVMARDELILRWKQYEAYVQALEGKYTDLNSNDVTGLRESEEKLKQQQQESARRENILVMRLATKEQEMQECTTQIQYLKQVQQPSVAQLRSTMVDPAINLFFLKMKGELEQTKDKLEQAQNELSAWKFTPDRGLMASDYSEEVATSEKFPF

SEQ ID NO: 887304 - protein, 159 aa, Homo sapiens [sequence omitted]

SEQ ID NO: 887305 - protein, 347 aa, Homo sapiens
SCQRKQQRISTWQMVLSTSVKTKFHGFLDAQPGVVSEGPPGNWEQKPVSRHLLSVEAVLSRLLPVGVQLRKERGSQARSLPGLPLRPLGRVLLRRQLQGRIQAGGASSEKRGAAPNYAEAGTPTLHTSPRPHLRPCTHTHTRTPTPPRCKAGFKRTSLRFLPAPHHRTREEEAGEKQNFFPLSCPFLRTCSEAEEPVLEEMVMGLGVLLLVFVLGLGLTPPTLAQDNSRYTHFLTQHYDAKPQGRDDRYCESIMRRRGLTSPCKDINTFIHGNKRSIKAICENKNGNPHRENLRISKSSFQVTTCKLHGGSPWPPCQYRATAGFRNVVVACENGLPVHLDQSIFRRP

SEQ ID NO: 887306 - protein, 184 aa, Homo sapiens
WRGLQVHTTGTHLQEQTAGTHLPLKGNCQIFEPVLEEMVMGLGVLLLVFVLGLGLTPPTLAQDNSRYTHFLTQHYDAKPQGRDDRYCESIMRRRGLTSPCKDINTFIHGNKRSIKAICENKNGNPHRENLRISKSSFQVTTCKLHGGSPWPPCQYRATAGFRNVVVACENGLPVHLDQSIFRRP

SEQ ID NO: 887307 - protein, 147 aa, Homo sapiens
MVMGLGVLLLVFVLGLGLTPPTLAQDNSRYTHFLTQHYDAKPQGRDDRYCESIMRRRGLTSPCKDINTFIHGNKRSIKAICENKNGNPHRENLRISKSSFQVTTCKLHGGSPWPPCQYRATAGFRNVVVACENGLPVHLDQSIFRRP

SEQ ID NO: 887308 - protein, 147 aa, Homo sapiens
MALQRTHSLLLLLLLTLLGLGLVQPSYGQDGMYQRFLRQHVHPEETGGSDRYCNLMMQRRKMTLYHCKRFNTFIHEDIWNIRSICSTTNIQCKNGKMNCHEGVVKVTDCRDTGSSRAPNCRYRAIASTRRVVIACEGNPQVPVHFDG

SEQ ID NO: 887309 - protein, 147 aa, Homo sapiens; identical to SEQ ID NO: 887307

SEQ ID NO: 887310 - protein, 184 aa, Homo sapiens; identical to SEQ ID NO: 887306

SEQ ID NO: 887311 - protein, 147 aa, Homo sapiens; identical to SEQ ID NO: 887308

SEQ ID NO: 887312 - protein, 147 aa, Homo sapiens; identical to SEQ ID NO: 887308

SEQ ID NO: 887313 - protein, 190 aa, Homo sapiens
WRGLQVHTTGTHLQEQTAGTHLPLKGNCQIFVRFFLLGTSKILMALQRTHSLLLLLLLTLLGLGLVQPSYGQDGMYQRFLRQHVHPEETGGSDRYCNLMMQRRKMTLYHCKRFNTFIHEDIWNIRSICSTTNIQCKNGKMNCHEGVVKVTDCRDTGSSRAPNCRYRAIASTRRVVIACEGNPQVPVHFDG

SEQ ID NO: 887314 - protein, 347 aa, Homo sapiens; identical to SEQ ID NO: 887305

SEQ ID NO: 887315 - protein, 147 aa, Homo sapiens; identical to SEQ ID NO: 887307

SEQ ID NO: 887316 - protein, 347 aa, Homo sapiens; identical to SEQ ID NO: 887305

SEQ ID NO: 887317 - protein, 184 aa, Homo sapiens; identical to SEQ ID NO: 887306

SEQ ID NO: 887318 - protein, 147 aa, Homo sapiens; identical to SEQ ID NO: 887307

SEQ ID NO: 887319 - protein, 147 aa, Homo sapiens; identical to SEQ ID NO: 887307

SEQ ID NO: 887320 - protein, 113 aa, Homo sapiens
MVMGLGVLLLVFVLGLGLTPPTLAQDNSRYTHFLTQHYDAKPQGRDDRYCESIMRRRGLTSPCKDINTFIHGNKRSIKAICENKNGNPHRWRFPLASMPVPSHSGVQKRCCCL

SEQ ID NO: 887321 - protein, 147 aa, Homo sapiens; identical to SEQ ID NO: 887308

SEQ ID NO: 887322 - protein, 196 aa, Homo sapiens
SCQRKQQRISTWQMVLSTSVKTKFHGFLDAQPGVVSEGPPGNWEQKPVSRHLLSVEAVLSRLLPVGVQLRKERGSQARSLPGLPLRPLGRVLLRRQLQGRIQAGGASSEKRGAVPTTQRLARRPSTPHHAPISVRVHTLTQGRQPHLDAKQDSKEHLCVFYRLPIIVLGRKKRVRNKTSFHCPARFCGLVLRPRHL

SEQ ID NO: 887323 - protein, 201 aa, Homo sapiens
SCQRKQQRISTWQMVLSTSVKTKFHGFLDAQPGVVSEGPPGNWEQKPVSRHLLSVEAVLSRLLPVGVQLRKERGSQARSLPGLPLRPLGRVLLRRQLQGRIQAGGASSEKRGAVPTTQRLARRPSTPHHAPISVRVHTLTQGRQPHLDAKQDSKEHLCVFYRLPIIVLGRKKRVRNKTSFHCPARFCGLVLRPRSLCWKRW

SEQ ID NO: 887324 - protein, 255 aa, Homo sapiens
MASSRASSTATKTKAPDDLVAPVVKKPHIYYGSLEEKERERLAKGESGILGKDGLKAGIEAGNINITSGEVFEIEEHISERQAEVLAEFERRKRARQINVSTDDSEVKACLRALGEPITLFGEGPAERRERLRNILSVVGTDALKKTKKDDEKSKKSKEEYQQTWYHEGPNSLKVARLWIANYSLPRAMKRLEEARLHKEIPETTRTSQMQELHKSLRVRCSQQLSHILKVLHVYLIFLLWLTSGKVEATRVIPP

SEQ ID NO: 887325 - protein, 521 aa, Homo sapiens
MASSRASSTATKTKAPDDLVAPVVKKPHIYYGSLEEKERERLAKGESGILGKDGLKAGIEAGNINITSGEVFEIEEHISERQAEVLAEFERRKRARQINVSTDDSEVKACLRALGEPITLFGEGPAERRERLRNILSVVGTDALKKTKKDDEKSKKSKEEYQQTWYHEGPNSLKVARLWIANYSLPRAMKRLEEARLHKEIPETTRTSQMQELHKSLRSLNNFCSQIGDDRPISYCHFSPNSKMLATACWSGLCKLWSVPDCNLLHTLRGHNTNVGAIVFHPKSTVSLDPKDVNLASCAADGSVKLWSLDSDEPVADIEGHTVRVARVMWHPSGRFLGTTCYDRSWRLWDLEAQEEILHQEGHSMGVYDIAFHQDGSLAGTGGLDAFGRVWDLRTGRCIMFLEGHLKEIYGINFSPNGYHIATGSGDNTCKVWDLRQRRCVYTIPAHQNLVTGVKFEPIHGNFLLTGAYDNTAKIWTHPGWSPLKTLAGHEGKVMGLDISSDGQLIATCSYDRTFKLWMAE

SEQ ID NO: 887326 - protein, 521 aa, Homo sapiens; identical to SEQ ID NO: 887325

SEQ ID NO: 887327 - protein, 333 aa, Homo sapiens [sequence omitted]

SEQ ID NO: 887328 - protein, 329 aa, Homo sapiens
MASSRASSTATKTKAPDDLVAPVVKKPHIYYGSLEEKERERLAKGESGILGKDGLKAGIEAGNINITSGEVFEIEEHISERQAEVLAEFERRKRARQINVSTDDSEVKACLRALGEPITLFGEGPAERRERLRNILSVVGTDALKKTKKDDEKSKKSKEEYQQTWYHEGPNSLKVARLWIANYSLPRAMKRLEEARLHKEIPETTRTSQMQELHKSLRSLNNFCSQIGDDRPISYCHFSPNSKMLATACWSGLCKLWSVPDCNLLHTLRGHNTNVGAIVFHPKSTVSLDPKDVNLASCAADGSVKLWSLDSDEPVADIEGHELCRHCFY

SEQ ID NO: 887329 - protein, 311 aa, Homo sapiens [sequence omitted]

SEQ ID NO: 887330 - protein, 521 aa, Homo sapiens; identical to SEQ ID NO: 887325

SEQ ID NO: 887331 - protein, 540 aa, Homo sapiens
  misc_feature (21)..(21): Xaa can be any naturally occurring amino acid
RSLIGGSVGFAGARGSEPGWXPRELFHAATKTKAPDDLVAPVVKKPHIYYGSLEEKERERLAKGESGILGKDGLKAGIEAGNINITSGEVFEIEEHISERQAEVLAEFERRKRARQINVSTDDSEVKACLRALGEPITLFGEGPAERRERLRNILSVVGTDALKKTKKDDEKSKKSKEEYQQTWYHEGPNSLKVARLWIANYSLPRAMKRLEEARLHKEIPETTRTSQMQELHKSLRSLNNFCSQIGDDRPISYCHFSPNSKMLATACWSGLCKLWSVPDCNLLHTLRGHNTNVGAIVFHPKSTVSLDPKDVNLASCAADGSVKLWSLDSDEPVADIEGHTVRVARVMWHPSGRFLGTTCYDRSWRLWDLEAQEEILHQEGHSMGVYDIAFHQDGSLAGTGGLDAFGRVWDLRTGRCIMFLEGHLKEIYGINFSPNGYHIATGSGDNTCKVWDLRQRRCVYTIPAHQNLVTGVKFEPIHGNFLLTGAYDNTAKIWTHPGWSPLKTLAGHEGKVMGLDISSDGQLIATCSYDRTFKLWMAE

SEQ ID NO: 887332 - protein, 333 aa, Homo sapiens [sequence omitted]

SEQ ID NO: 887333 - protein, 500 aa, Homo sapiens
MASSRASSTATKTKAPDDLVAPVVKKPHIYYGSLEEKERERLAKGESGILGKDGLKAGIEAGNINITSGEVFEIEEHISERQAEVLAEFERRKRARQINVSTDDSEVKACLRALGEPITLFGEGPAERRERLRNILSVVGTDALKKTKKDDEKSKKSKEEYQQTWYHEGPNSLKVARLWIANYSLPRAMKRLEEARLHKEIPETTRTSQMQELHKSLRSLNNFCSQIGDDRPISYCHFSPNSKMLATACWSGLCKLWSVPDCNLLHTLRGHNTNVGAIVFHPKSTVSLDPKDVNLASCAADGSVKLWSLDSDEPVADIEGHTVRVARVMWHPSGRFLGTTCYDRSWRLWDLEAQEEILHQEGHSMGVYDIAFHQDGSLAGTGGLDAFGRVWDLRTGRCIMFLEGHLKEIYGINFSPNGYHIATGSGDNTCKVWDLRQRRCVYTIPAHQNLVTGVKFEHFSFPWRMGCEAVDRSHADGYTVKKTSPLPIEFAWNADSIRQL

SEQ ID NO: 887334 - protein, 2028 aa, Homo sapiens
GSHRRVPLGDEASKGRIRQQYLLFCYICCSAASIGDIQANKIWNGPPANSNRPALKDLTGDQSRSLPYKLISLLNEKGQDTGATIDLVIGYDPPSAPHPNDLSGPSVPGMGGDGEEDEGDEDRLDNAVRGPGPKGPVGTVSEAQLARRLTKVKNSRRMLSNKPQDFQIRVRVIEGRQLSGNNIRPVVKVHVCGQTHRTRIKRGNNPFFDELFFYNVNMTPSELMDEIISIRVYNSHSLRADCLMGEFKIDVGFVYDEPGHAVMRKWLLLNDPEDTSSGSKGYMKVSMFVLGTGDEPPPERRDRDNDSDDVESNLLLPAGIALRWVTFLLKIYRAEDIPQMDDAFSQTVKEIFGGNADKKNLVDPFVEVSFAGKKVCTNIIEKNANPEWNQVVNLQIKFPSVCEKIKLTIYDWDRLTKNDVVGTTYLHLSKIAASGGEVEDFSSSGTGAASYTVNTGETEVGFVPTFGPCYLNLYGSPREYTGFPDPYDELNTGKGEGVAYRGRILVELATFLEKTPPDKKLEPISNDDLLVVEKYQRRRKYSLSAVFHSATMLQDVGEAIQFEVSIGNYGNKFDTTCKPLASTTQYSRAVFDGNYYYYLPWAHTKPVVTLTSYWEDISHRLDAVNTLLAMAERLQTNIEALKSGIQGKIPANQLAELWLKLIDEVIEDTRYTLPLTEGKANVTVLDTQIRKLRSRSLSQIHEAAVRMRSEATDVKSTLAEIEDWLDKLMQLTEEPQNSMPDIIIWMIRGEKRLAYARIPAHQVLYSTSGENASGKYCGKTQTIFLKYPQEKNNGPKVPVELRVNIWLGLSAVEKKFNSFAEGTFTVFAEMYENQALMFGKWGTSGLVGRHKFSDVTGKIKLKREFFLPPKGWEWEGEWIVDPERSLLTEADAGHTEFTDEVYQNESRYPGGDWKPAEDTYTDANGDKAASPSELTCPPGWEWEDDAWSYDINRAVDEKGWEYGITIPPDHKPKSWVAAEKMYHTHRRRRLVRKRKKDLTQTASSTARAMEELQDQEGWEYASLIGWKFHWKQRSSDTFRRRRWRRKMAPSETHGAAAIFKLEGALGADTTEDGDEKSLEKQKHSATTVFGANTPIVSCNFDRVYIYHLRCYVYQARNLLALDKDSFSDPYAHICFLHRSKTTEIIHSTLNPTWDQTIIFDEVEIYGEPQTVLQNPPKVIMELFDNDQVGKDEFLGRSIFSPVVKLNSEMDITPKLLWHPVMNGDKACGDVLVTAELILRGKDGSNLPILPPQRAPNLYMVPQGIRPVVQLTAIEILAWGLRNMKNFQMASITSPSLVVECGGERVESVVIKNLKKTPNFPSSVLFMKVFLPKEELYMPPLVIKVIDHRQFGRKPVVGQCTIERLDRFRCDPYAGKEDIVPQLKASLLSAPPCRDIVIEMEDTKPLLASKLTEKEEEIVDWWSKFYASSGEHEKCGQYIQKGYSKLKIYNCELENVAEFEGLTDFSDTFKLYRGKSDENEDPSVVGEFKGSFRIYPLPDDPSVPAPPRQFRELPDSVPQECTVRIYIVRGLELQPQDNNGLCDPYIKITLGKKVIEDRDHYIPNTLNPVFGRMYELSCYLPQEKDLKISVYDYDTFTRDEKVGETIIDLENRFLSRFGSHCGIPEEYCVSGVNTWRDQLRPTQLLQNVARFKGFPQPILSEDGSRIRYGGRDYSLDEFEANKILHQHLGAPEERLALHILRTQGLVPEHVETRTLHSTFQPNISQGKLQMWVDVFPKSLGPPGPPFNITPRKAKKYYLRVIIWNTKDVILDEKSITGEEMSDIYVKGWIPGNEENKQKTDVHYRSLDGEGNFNWRFVFPFDYLPAEQLCIVAKKEHFWSIDQTEFRIPPRLIIQIWDNDKFSLDDYLGFLELDLRHTIIPAKSPEKCRLDMIPDLKAMNPLKAKTASLFEQKSMKGWWPCYAEKDGARVMAGKVEMTLEILNEKEADERPAGKGRDEPNMNPKLDLPNRPETSFLWFTNPCKTMKFIVWRRFKWVIIGLLFLLILLLFVAVLLYSLPNYLSMKIVKPNV

SEQ ID NO: 887335 - protein, 2109 aa, Homo sapiens
  misc_feature (12)..(12): Xaa can be any naturally occurring amino acid
NPPFTGRELLSXGGATRSSSALGEILPSLGENFSPRAVRPGAPAPESPLRLLKLAFYQLRTMLRVIVESASNIPKTKFGKPDPIVSVIFKDEKKKTKKVDNELNPVWNEILEFDLRGIPLDFSSSLGIIVKDFETIGQNKLIGTATVALKDLTGDQSRSLPYKLISLLNEKGQDTGATIDLVIGYDPPSAPHPNDLSGPSVPGMGGDGEEDEGDEDRLDNAVRGPGPKGPVGTVSEAQLARRLTKVKNSRRMLSNKPQDFQIRVRVIEGRQLSGNNIRPVVKVHVCGQTHRTRIKRGNNPFFDELFFYNVNMTPSELMDEIISIRVYNSHSLRADCLMGEFKIDVGFVYDEPGHAVMRKWLLLNDPEDTSSGSKGYMKVSMFVLGTGDEPPPERRDRDNDSDDVESNLLLPAGIALRWVTFLLKIYRAEDIPQMDDAFSQTVKEIFGGNADKKNLVDPFVEVSFAGKKVCTNIIEKNANPEWNQVVNLQIKFPSVCEKIKLTIYDWDRLTKNDVVGTTYLHLSKIAASGGEVEVNTGETEVGFVPTFGPCYLNLYGSPREYTGFPDPYDELNTGKGEGVAYRGRILVELATFLEKTPPDKKLEPISNDDLLVVEKYQRRRKYSLSAVFHSATMLQDVGEAIQFEVSIGNYGNKFDTTCKPLASTTQYSRAVFDGNYYYYLPWAHTKPVVTLTSYWEDISHRLDAVNTLLAMAERLQTNIEALKSGIQGKIPANQLAELWLKLIDEVIEDTRYTLPLTEGKANVTVLDTQIRKLRSRSLSQIHEAAVRMRSEATDVKSTLAEIEDWLDKLMQLTEEPQNSMPDIIIWMIRGEKRLAYARIPAHQVLYSTSGENASGKYCGKTQTIFLKYPQEKNNGPKVPVELRVNIWLGLSAVEKKFNSFAEGTFTVFAEMYENQALMFGKWGTSGLVGRHKFSDVTGKIKLKREFFLPPKGWEWEGEWIVDPERSLLTEADAGHTEFTDEVYQNESRYPGGDWKPAEDTYTDANGDKAASPSELTCPPGWEWEDDAWSYDINRAVDEKGWEYGITIPPDHKPKSWVAAEKMYHTHRRRRLVRKRKKDLTQTASSTARAMEELQDQEGWEYASLIGWKFHWKQRSSDTFRRRRWRRKMAPSETHGAAAIFKLEGALGADTTEDGDEKSLEKQKHSATTVFGANTPIVSCNFDRVYIYHLRCYVYQARNLLALDKDSFSDPYAHICFLHRSKTTEIIHSTLNPTWDQTIIFDEVEIYGEPQTVLQNPPKVIMELFDNDQVGKDEFLGRSIFSPVVKLNSEMDITPKLLWHPVMNGDKACGDVLVTAELILRGKDGSNLPILPPQRAPNLYMVPQGIRPVVQLTAIEILAWGLRNMKNFQMASITSPSLVVECGGERVESVVIKNLKKTPNFPSSVLFMKVFLPKEELYMPPLVIKVIDHRQFGRKPVVGQCTIERLDRFRCDPYAGKEDIVPQLKASLLSAPPCRDIVIEMEDTKPLLASKLTEKEEEIVDWWSKFYASSGEHEKCGQYIQKGYSKLKIYNCELENVAEFEGLTDFSDTFKLYRGKSDENEDPSVVGEFKGSFRIYPLPDDPSVPAPPRQFRELPDSVPQECTVRIYIVRGLELQPQDNNGLCDPYIKITLGKKVIEDRDHYIPNTLNPVFGRMYELSCYLPQEKDLKISVYDYDTFTRDEKVGETIIDLENRFLSRFGSHCGIPEEYCVSGVNTWRDQLRPTQLLQNVARFKGFPQPILSEDGSRIRYGGRDYSLDEFEANKILHQHLGAPEERLALHILRTQGLVPEHVETRTLHSTFQPNISQGKLQMWVDVFPKSLGPPGPPFNITPRKAKKYYLRVIIWNTKDVILDEKSITGEEMSDIYVKGWIPGNEENKQKTDVHYRSLDGEGNFNWRFVFPFDYLPAEQLCIVAKKEHFWSIDQTEFRIPPRLIIQIWDNDKFSLDDYLGFLELDLRHTIIPAKSPEKCRLDMIPDLKAMNPLKAKTASLFEQKSMKGWWPCYAEKDGARVMAGKVEMTLEILNEKEADERPAGKGRDEPNMNPKLDLPNRPETSFLWFTNPCKTMKFIVWRRFKWVIIGLLFLLILLLFVAVLLYSLPNYLSMKIVKPNV

SEQ ID NO: 887336 - protein, 1947 aa, Homo sapiens
MADKTVSWKPEPLDIYRIRASLTGFLSDILGDGEEDEGDEDRLDNAVRGPGPKGPVGTVSEAQLARRLTKVKNSRRMLSNKPQDFQIRVRVIEGRQLSGNNIRPVVKVHVCGQTHRTRIKRGNNPFFDELFFYNVNMTPSELMDEIISIRVYNSHSLRADCLMGEFKIDVGFVYDEPGHAVMRKWLLLNDPEDTSSGSKGYMKVSMFVLGTGDEPPPERRDRDNDSDDVESNLLLPAGIALRWVTFLLKIYRAEDIPQMDDAFSQTVKEIFGGNADKKNLVDPFVEVSFAGKKVCTNIIEKNANPEWNQVVNLQIKFPSVCEKIKLTIYDWDRLTKNDVVGTTYLHLSKIAASGGEVEDFSSSGTGAASYTVNTGETEVGFVPTFGPCYLNLYGSPREYTGFPDPYDELNTGKGEGVAYRGRILVELATFLEKTPPDKKLEPISNDDLLVVEKYQRRRKYSLSAVFHSATMLQDVGEAIQFEVSIGNYGNKFDTTCKPLASTTQYSRAVFDGNYYYYLPWAHTKPVVTLTSYWEDISHRLDAVNTLLAMAERLQTNIEALKSGIQGKIPANQLAELWLKLIDEVIEDTRYTLPLTEGKANVTVLDTQIRKLRSRSLSQIHEAAVRMRSEATDVKSTLAEIEDWLDKLMQLTEEPQNSMPDIIIWMIRGEKRLAYARIPAHQVLYSTSGENASGKYCGKTQTIFLKYPQEKNNGPKVPVELRVNIWLGLSAVEKKFNSFAEGTFTVFAEMYENQALMFGKWGTSGLVGRHKFSDVTGKIKLKREFFLPPKGWEWEGEWIVDPERSLLTEADAGHTEFTDEVYQNESRYPGGDWKPAEDTYTDANGDKAASPSELTCPPGWEWEDDAWSYDINRAVDEKGWEYGITIPPDHKPKSWVAAEKMYHTHRRRRLVRKRKKDLTQTASSTARAMEELQDQEGWEYASLIGWKFHWKQRSSDTFRRRRWRRKMAPSETHGAAAIFKLEGALGADTTEDGDEKSLEKQKHSATTVFGANTPIVSCNFDRVYIYHLRCYVYQARNLLALDKDSFSDPYAHICFLHRSKTTEIIHSTLNPTWDQTIIFDEVEIYGEPQTVLQNPPKVIMELFDNDQVGKDEFLGRSIFSPVVKLNSEMDITPKLLWHPVMNGDKACGDVLVTAELILRGKDGSNLPILPPQRAPNLYMVPQGIRPVVQLTAIEILAWGLRNMKNFQMASITSPSLVVECGGERVESVVIKNLKKTPNFPSSVLFMKVFLPKEELYMPPLVIKVIDHRQFGRKPVVGQCTIERLDRFRCDPYAGKEDIVPQLKASLLSAPPCRDIVIEMEDTKPLLASKLTEKEEEIVDWWSKFYASSGEHEKCGQYIQKGYSKLKIYNCELENVAEFEGLTDFSDTFKLYRGKSDENEDPSVVGEFKGSFRIYPLPDDPSVPAPPRQFRELPDSVPQECTVRIYIVRGLELQPQDNNGLCDPYIKITLGKKVIEDRDHYIPNTLNPVFGRMYELSCYLPQEKDLKISVYDYDTFTRDEKVGETIIDLENRFLSRFGSHCGIPEEYCVSGVNTWRDQLRPTQLLQNVARFKGFPQPILSEDGSRIRYGGRDYSLDEFEANKILHQHLGAPEERLALHILRTQGLVPEHVETRTLHSTFQPNISQGKLQMWVDVFPKSLGPPGPPFNITPRKAKKYYLRVIIWNTKDVILDEKSITGEEMSDIYVKGWIPGNEENKQKTDVHYRSLDGEGNFNWRFVFPFDYLPAEQLCIVAKKEHFWSIDQTEFRIPPRLIIQIWDNDKFSLDDYLGFLELDLRHTIIPAKSPEKCRLDMIPDLKAMNPLKAKTASLFEQKSMKGWWPCYAEKDGARVMAGKVEMTLEILNEKEADERPAGKGRDEPNMNPKLDLPNRPETSFLWFTNPCKTMKFIVWRRFKWVIIGLLFLLILLLFVAVLLYSLPNYLSMKIVKPNV

SEQ ID NO: 887337 - protein, 2055 aa, Homo sapiens
  misc_feature (12)..(12): Xaa can be any naturally occurring amino acid
NPPFTGRELLSXGGATRSSSALGEILPSLGENFSPRAVRPGAPAPESPLRLLKLAFYQLRTMLRVIVESASNIPKTKFGKPDPIVSVIFKDEKKKTKKVDNELNPVWNEILEFDLRGIPLDFSSSLGIIVKDFETIGQNKLIGTATVALKDLTGDQSRSLPYKLISLLNEKGQDTGATIDLVIGYDPPSAPHPNDLSGPSVPGMGGDGEEDEGDEDRLDNAVRGPGPKGPVGTVSEAQLARRLTKVKNSRRMLSNKPQDFQIRVRVIEGRQLSGNNIRPVVKVHVCGQTHRTRIKRGNNPFFDELFFYNVNMTPSELMDEIISIRVYNSHSLRADCLMGEFKIDVGFVYDEPGHAVMRKWLLLNDPEDTSSGSKGYMKVSMFVLGTGDEPPPERRDRDNDSDDVESNLLLPAGIALRWVTFLLKIYRAEDIPQSMYCFNLAPELLIMCVMKCVKNQTLIVIRVPIVCFSSERASWAYFHSFWPSGKLPEQAHGTASWLLIMFLVEYLPLAHLTLSLAILYLLFILEDVKRYEQSALPTPFIPNENVNCYYQIKVFAIHYIFVFSIEKGFHHVDQDGLALLTYDPPALASQSPGITGMSHCAQPVATILMYKRTFKILPNFWELNLISADNYYLPVDDAFSQTVKEIFGGNADKKNLVDPFVEVSFAGKKVCTNIIEKNANPEWNQVVNLQIKFPSVCEKIKLTIYDWDRLTKNDVVGTTYLHLSKIAASGGEVEVNTGETEVGFVPTFGPCYLNLYGSPREYTGFPDPYDELNTGKGEGVAYRGRILVELATFLEKTPPDKKLEPISNDDLLVVEKYQRRRKYSLSAVFHSATMLQDVGEAIQFEVSIGNYGNKFDTTCKPLASTTQYSRAVFDGNYYYYLPWAHTKPVVTLTSYWEDISHRLDAVNTLLAMAERLQTNIEALKSGIQGKIPANQLAELWLKLIDEVIEDTRYTLPLTEGKANVTVLDTQIRKLRSRSLSQIHEAAVRMRSEATDVKSTLAEIEDWLDKLMQLTEEPQNSMPDIIIWMIRGEKRLAYARIPAHQVLYSTSGENASGKYCGKTQTIFLKYPQEKNNGPKVPVELRVNIWLGLSAVEKKFNSFAEGTFTVFAEMYENQALMFGKWGTSGLVGRHKFSDVTGKIKLKREFFLPPKGWEWEGEWIVDPERSLLTEADAGHTEFTDEVYQNESRYPGGDWKPAEDTYTDANGDKAASPSELTCPPGWEWEDDAWSYDINRAVDEKGWEYGITIPPDHKPKSWVAAEKMYHTHRRRRLVRKRKKDLTQTASSTARAMEELQDQEGWEYASLIGWKFHWKQRSSDTFRRRRWRRKMAPSETHGAAAIFKLEGALGADTTEDGDEKSLEKQKHSATTVFGANTPIVSCNFDRVYIYHLRCYVYQARNLLALDKDSFSDPYAHICFLHRSKTTEIIHSTLNPTWDQTIIFDEVEIYGEPQTVLQNPPKVIMELFDNDQVGKDEFLGRSIFSPVVKLNSEMDITPKLLWHPVMNGDKACGDVLVTAELILRGKDGSNLPILPPQRAPNLYMVPQGIRPVVQLTAIEILAWGLRNMKNFQMASITSPSLVVECGGERVESVVIKNLKKTPNFPSSVLFMKVFLPKEELYMPPLVIKVIDHRQFGRKPVVGQCTIERLDRFRCDPYAGKEDIVPQLKASLLSAPPCRDIVIEMEDTKPLLASKLTEKCLSSMSTALSKMASPATVHMYEKEEEIVDWWSKFYASSGEHEKCGQYIQKGYSKLKIYNCELENVAEFEGLTDFSDTFKLYRGKSDENEDPSVVGEFKGSFRIYPLPDDPSVPAPPRQFRELPDSVPQECTVRIYIVRGLELQPQDNNGLCDPYIKITLGKKVIEDRDHYIPNTLNPVFGRMYELSCYLPQEKDLKISVYDYDTFTRDEKVGETIIDLENRFLSRFGSHCGIPEEYCVSGVNTWRDQLRPTQLLQNVARFKGFPQPILSEDGSRIRYGGRDYSLDEFEANKILHQHLGAPEERLALHILRTQGLVPEHVETRTLHSTFQPNISQILPACDHLEHQGRYLGREKHHRRGNE

SEQ ID NO: 887338 - protein, 2109 aa, Homo sapiens; identical to SEQ ID NO: 887335
  misc_feature (12)..(12): Xaa can be any naturally occurring amino acid

SEQ ID NO: 887339 - protein, 1574 aa, Homo sapiens
  misc_feature (12)..(12): Xaa can be any naturally occurring amino acid
NPPFTGRELLSXGGATRSSSALGEILPSLGENFSPRAVRPGAPAPESPLRLLKLAFYQLRTMLRVIVESASNIPKTKFGKPDPIVSVIFKDEKKKTKKVDNELNPVWNEILEFDLRGIPLDFSSSLGIIVKDFETIGQNKLIGTATVALKDLTGDQSRSLPYKLISLLNEKGQDTGATIDLVIGYDPPSAPHPNDLSGPSVPGMGGDGEEDEGDEDRLDNAVRGPGPKGPVGTVSEAQLARRLTKVKNSRRMLSNKPQDFQIRVRVIEGRQLSGNNIRPVVKVHVCGQTHRTRIKRGNNPFFDELFFYNVNMTPSELMDEIISIRVYNSHSLRADCLMGEFKIDVGFVYDEPGHAVMRKWLLLNDPEDTSSGSKGYMKVSMFVLGTGDEPPPERRDRDNDSDDVESNLLLPAGIALRWVTFLLKIYRAEDIPQMDDAFSQTVKEIFGGNADKKNLVDPFVEVSFAGKKVCTNIIEKNANPEWNQVVNLQIKFPSVCEKIKLTIYDWDRLTKNDVVGTTYLHLSKIAASGGEVEDFSSSGTGAASYTVNTGETEVGFVPTFGPCYLNLYGSPREYTGFPDPYDELNTGKGEGVAYRGRILVELATFLEKTPPDKKLEPISNDDLLVVEKYQRRRKYSLSAVFHSATMLQDVGEAIQFEVSIGNYGNKFDTTCKPLASTTQYSRAVFDGNYYYYLPWAHTKPVVTLTSYWEDISHRLDAVNTLLAMAERLQTNIEALKSGIQGKIPANQLAELWLKLIDEVIEDTRYTLPLTEGKANVTVLDTQIRKLRSRSLSQIHEAAVRMRSEATDVKSTLAEIEDWLDKLMQLTEEPQNSMPDIIIWMIRGEKRLAYARIPAHQVLYSTSGENASGKYCGKTQTIFLKYPQEKNNGPKVPVELRVNIWLGLSAVEKKFNSFAEGTFTVFAEMYENQALMFGKWGTSGLVGRHKFSDVTGKIKLKREFFLPPKGWEWEGEWIVDPERSLLTEADAGHTEFTDEVYQNESRYPGGDWKPAEDTYTDANGDKAASPSELTCPPGWEWEDDAWSYDINRAVDEKGWEYGITIPPDHKPKSWVAAEKMYHTHRRRRLVRKRKKDLTQTASSTARAMEELQDQEGWEYASLIGWKFHWKQRSSDTFRRRRWRRKMAPSETHGAAAIFKLEGALGADTTEDGDEKSLEKQKHSATTVFGANTPIVSCNFDRVYIYHLRCYVYQARNLLALDKDSFSDPYAHICFLHRSKTTEIIHSTLNPTWDQTIIFDEVEIYGEPQTVLQNPPKVIMELFDNDQVGKDEFLGRSIFSPVVKLNSEMDITPKLLWHPVMNGDKACGDVLVTAELILRGKDGSNLPILPPQRAPNLYMVPQGIRPVVQLTAIEILAWGLRNMKNFQMASITSPSLVVECGGERVESVVIKNLKKTPNFPSSVLFMKVFLPKEELYMPPLVIKVIDHRQFGRKPVVGQCTIERLDRFRCDPYAGKEDIVPQLKASLLSAPPCRDIVIEMEDTKPLLASKLTEKEEEIVDWWSKFYASSGEHEKCGQYIQKGYSKLKIYNCELENVAEFEGLTDFSDTFKLYRGKSDASAG

SEQ ID NO: 887340 - protein, 1621 aa, Homo sapiens
  misc_feature (12)..(12): Xaa can be any naturally occurring amino acid
NPPFTGRELLSXGGATRSSSALGEILPSLGENFSPRAVRPGAPAPESPLRLLKLAFYQLRTMLRVIVESASNIPKTKFGKPDPIVSVIFKDEKKKTKKVDNELNPVWNEILEFDLRGIPLDFSSSLGIIVKDFETIGQNKLIGTATVALKDLTGDQSRSLPYKLISLLNEKGQDTGATIDLVIGYDPPSAPHPNDLSGPSVPGMGGDGEEDEGDEDRLDNAVRGPGPKGPVGTVSEAQLARRLTKVKNSRRMLSNKPQDFQIRVRVIEGRQLSGNNIRPVVKVHVCGQTHRTRIKRGNNPFFDELFFYNVNMTPSELMDEIISIRVYNSHSLRADCLMGEFKIDVGFVYDEPGHAVMRKWLLLNDPEDTSSGSKGYMKVSMFVLGTGDEPPPERRDRDNDSDDVESNLLLPAGIALRWVTFLLKIYRAEDIPQMDDAFSQTVKEIFGGNADKKNLVDPFVEVSFAGKKVCTNIIEKNANPEWNQVVNLQIKFPSVCEKIKLTIYDWDRLTKNDVVGTTYLHLSKIAASGGEVEDFSSSGTGAASYTVNTGETEVGFVPTFGPCYLNLYGSPREYTGFPDPYDELNTGKGEGVAYRGRILVELATFLEKTPPDKKLEPISNDDLLVVEKYQRRRKYSLSAVFHSATMLQDVGEAIQFEVSIGNYGNKFDTTCKPLASTTQYSRAVFDGNYYYYLPWAHTKPVVTLTSYWEDISHRLDAVNTLLAMAERLQTNIEALKSGIQGKIPANQLAELWLKLIDEVIEDTRYTLPLTEGKANVTVLDTQIRKLRSRSLSQIHEAAVRMRSEATDVKSTLAEIEDWLDKLMQLTEEPQNSMPDIIIWMIRGEKRLAYARIPAHQVLYSTSGENASGKYCGKTQTIFLKYPQEKNNGPKVPVELRVNIWLGLSAVEKKFNSFAEGTFTVFAEMYENQALMFGKWGTSGLVGRHKFSDVTGKIKLKREFFLPPKGWEWEGEWIVDPERSLLTEADAGHTEFTDEVYQNESRYPGGDWKPAEDTYTDANGDKAASPSELTCPPGWEWEDDAWSYDINRAVDEKGWEYGITIPPDHKPKSWVAAEKMYHTHRRRRLVRKRKKDLTQTASSTARAMEELQDQEGWEYASLIGWKFHWKQRSSDTFRRRRWRRKMAPSETHGAAAIFKLEGALGADTTEDGDEKSLEKQKHSATTVFGANTPIVSCNFDRVYIYHLRCYVYQARNLLALDKDSFSDPYAHICFLHRSKTTEIIHSTLNPTWDQTIIFDEVEIYGEPQTVLQNPPKVIMELFDNDQVGKDEFLGRSIFSPVVKLNSEMDITPKLLWHPVMNGDKACGDVLVTAELILRGKDGSNLPILPPQRAPNLYMVPQGIRPVVQLTAIEILAWGLRNMKNFQMASITSPSLVVECGGERVESVVIKNLKKTPNFPSSVLFMKVFLPKEELYMPPLVIKVIDHRQFGRKPVVGQCTIERLDRFRCDPYAGKEDIVPQLKASLLSAPPCRDIVIEMEDTKPLLASKLTEKEEEIVDWWSKFYASSGEHEKCGQYIQKGYSKLKIYNCELENVAEFEGLTDFSDTFKLYRGKSDENEDPSVVGEFKGSFRIYPLPDDPSVPAPPRQFRELPDSVPICRGSSRSPH

SEQ ID NO: 887341 - protein, 1523 aa, Homo sapiens
  misc_feature (12)..(12): Xaa can be any naturally occurring amino acid
NPPFTGRELLSXGGATRSSSALGEILPSLGENFSPRAVRPGAPAPESPLRLLKLAFYQLRTMLRVIVESASNIPKTKFGKPDPIVSVIFKDEKKKTKKVDNELNPVWNEILEFDLRGIPLDFSSSLGIIVKDFETIGQNKLIGTATVALKDLTGDQSRSLPYKLISLLNEKGQDTGATIDLVIGYDPPSAPHPNDLSGPSVPGMGGDGEEDEGDEDRLDNAVRGPGPKGPVGTVSEAQLARRLTKVKNSRRMLSNKPQDFQIRVRVIEGRQLSGNNIRPVVKVHVCGQTHRTRIKRGNNPFFDELFFYNVNMTPSELMDEIISIRVYNSHSLRADCLMGEFKIDVGFVYDEPGHAVMRKWLLLNDPEDTSSGSKGYMKVSMFVLGTGDEPPPERRDRDNDSDDVESNLLLPAGIALRWVTFLLKIYRAEDIPQMDDAFSQTVKEIFGGNADKKNLVDPFVEVSFAGKKVCTNIIEKNANPEWNQVVNLQIKFPSVCEKIKLTIYDWDRLTKNDVVGTTYLHLSKIAASGGEVEDFSSSGTGAASYTVNTGETEVGFVPTFGPCYLNLYGSPREYTGFPDPYDELNTGKGEGVAYRGRILVELATFLEKTPPDKKLEPISNDDLLVVEKYQRRRKYSLSAVFHSATMLQDVGEAIQFEVSIGNYGNKFDTTCKPLASTTQYSRAVFDGNYYYYLPWAHTKPVVTLTSYWEDISHRLDAVNTLLAMAERLQTNIEALKSGIQGKIPANQLAELWLKLIDEVIEDTRYTLPLTEGKANVTVLDTQIRKLRSRSLSQIHEAAVRMRSEATDVKSTLAEIEDWLDKLMQLTEEPQNSMPDIIIWMIRGEKRLAYARIPAHQVLYSTSGENASGKYCGKTQTIFLKYPQEKNNGPKVPVELRVNIWLGLSAVEKKFNSFAEGTFTVFAEMYENQALMFGKWGTSGLVGRHKFSDVTGKIKLKREFFLPPKGWEWEGEWIVDPERSLLTEADAGHTEFTDEVYQNESRYPGGDWKPAEDTYTDANGDKAASPSELTCPPGWEWEDDAWSYDINRAVDEKGWEYGITIPPDHKPKSWVAAEKMYHTHRRRRLVRKRKKDLTQTASSTARAMEELQDQEGWEYASLIGWKFHWKQRSSDTFRRRRWRRKMAPSETHGAAAIFKLEGALGADTTEDGDEKSLEKQKHSATTVFGANTPIVSCNFDRVYIYHLRCYVYQARNLLALDKDSFSDPYAHICFLHRSKTTEIIHSTLNPTWDQTIIFDEVEIYGEPQTVLQNPPKVIMELFDNDQVGKDEFLGRSIFSPVVKLNSEMDITPKLLWHPVMNGDKACGDVLVTAELILRGKDGSNLPILPPQRAPNLYMVPQGIRPVVQLTAIEILAWGLRNMKNFQMASITSPSLVVECGGERVESVVIKNLKKTPNFPSSVLFMKVFLPKEELYMPPLVIKVIDHRQFGRKPVVGQCTIERLDRFRCDPYAGKEDIVPQLKASLLSAPPCRDIVIEMEDTKPLLASKLTEKELISGCCQFYLLCLDV

SEQ ID NO: 887342 - protein, 506 aa, Homo sapiens
  misc_feature (12)..(12): Xaa can be any naturally occurring amino acid
NPPFTGRELLSXGGATRSSSALGEILPSLGENFSPRAVRPGAPAPESPLRLLKLAFYQLRTMLRVIVESASNIPKTKFGKPDPIVSVIFKDEKKKTKKVDNELNPVWNEILEFDLRGIPLDFSSSLGIIVKDFETIGQNKLIGTATVALKDLTGDQSRSLPYKLISLLNEKGQDTGATIDLVIGYDPPSAPHPNDLSGPSVPGMGGDGEEDEGDEDRLDNAVRGPGPKGPVGTVSEAQLARRLTKVKNSRRMLSNKPQDFQIRVRVIEGRQLSGNNIRPVVKVHVCGQTHRTRIKRGNNPFFDELFFYNVNMTPSELMDEIISIRVYNSHSLRADCLMGEFKIDVGFVYDEPGHAVMRKWLLLNDPEDTSSGSKGYMKVSMFVLGTGDEPPPERRDRDNDSDDVESNLLLPAGIALRWVTFLLKIYRAEDIPQMDDAFSQTVKEIFGGNADKKNLVDPFVEVSFAGKKVCTNIIEKNANPEWNQVVNLQIKFPSVCEKIKLTIYDW

SEQ ID NO: 887343 - protein, 221 aa, Homo sapiens
  misc_feature (12)..(12): Xaa can be any naturally occurring amino acid
NPPFTGRELLSXGGATRSSSALGEILPSLGENFSPRAVRPGAPAPESPLRLLKLAFYQLRTMLRVIVESASNIPKTKFGKPDPIVSVIFKDEKKKTKKVDNELNPVWNEILEFDLRGIPLDFSSSLGIIVKDFETIGQNKLIGTATVALKDLTGDQSRSLPYKLISLLNEKGQDTGATIDLVIGYDPPSAPHPNDLSGPSVPGMGGKLTLLKAQPPPGGGC

SEQ ID NO: 887344 - protein, 305 aa, Homo sapiens
  misc_feature (12)..(12): Xaa can be any naturally occurring amino acid
NPPFTGRELLSXGGATRSSSALGEILPSLGENFSPRAVRPGAPAPESPLRLLKLAFYQLRTMLRVIVESASNIPKTKFGKPDPIVSVIFKGSMSQIRIEAGVSACEPGWPFCPKFHADSQAVKLNLAEIRLHRPLRPISTLRLDDSSKQSSKQKDEKKKTKKVDNELNPVWNEILEFDLRGIPLDFSSSLGIIVKDFETIGQNKLIGTATVALKDLTGDQSRSLPYKLISLLNEKGQDTGATIDLVIGYDPPSAPHPNDLSGPSVPGMGGDGEEEEGDVNTGERNKHEDVGADPARPDGGTNSMF

SEQ ID NO: 887345 - protein, 2122 aa, Homo sapiens
  misc_feature (12)..(12): Xaa can be any naturally occurring amino acid
NPPFTGRELLSXGGATRSSSALGEILPSLGENFSPRAVRPGAPAPESPLRLLKLAFYQLRTMLRVIVESASNIPKTKFGKPDPIVSVIFKDEKKKTKKVDNELNPVWNEILEFDLRGIPLDFSSSLGIIVKDFETIGQNKLIGTATVALKDLTGDQSRSLPYKLISLLNEKGQDTGATIDLVIGYDPPSAPHPNDLSGPSVPGMGGDGEEDEGDEDRLDNAVRGPGPKGPVGTVSEAQLARRLTKVKNSRRMLSNKPQDFQIRVRVIEGRQLSGNNIRPVVKVHVCGQTHRTRIKRGNNPFFDELFFYNVNMTPSELMDEIISIRVYNSHSLRADCLMGEFKIDVGFVYDEPGHAVMRKWLLLNDPEDTSSGSKGYMKVSMFVLGTGDEPPPERRDRDNDSDDVESNLLLPAGIALRWVTFLLKIYRAEDIPQMDDAFSQTVKEIFGGNADKKNLVDPFVEVSFAGKKVCTNIIEKNANPEWNQVVNLQIKFPSVCEKIKLTIYDWDRLTKNDVVGTTYLHLSKIAASGGEVEDFSSSGTGAASYTVNTGETEVGFVPTFGPCYLNLYGSPREYTGFPDPYDELNTGKGEGVAYRGRILVELATFLEKTPPDKKLEPISNDDLLVVEKYQRRRKYSLSAVFHSATMLQDVGEAIQFEVSIGNYGNKFDTTCKPLASTTQYSRAVFDGNYYYYLPWAHTKPVVTLTSYWEDISHRLDAVNTLLAMAERLQTNIEALKSGIQGKIPANQLAELWLKLIDEVIEDTRYTLPLTEGKANVTVLDTQIRKLRSRSLSQIHEAAVRMRSEATDVKSTLAEIEDWLDKLMQLTEEPQNSMPDIIIWMIRGEKRLAYARIPAHQVLYSTSGENASGKYCGKTQTIFLKYPQEKNNGPKVPVELRVNIWLGLSAVEKKFNSFAEGTFTVFAEMYENQALMFGKWGTSGLVGRHKFSDVTGKIKLKREFFLPPKGWEWEGEWIVDPERSLLTEADAGHTEFTDEVYQNESRYPGGDWKPAEDTYTDANGDKAASPSELTCPPGWEWEDDAWSYDINRAVDEKGWEYGITIPPDHKPKSWVAAEKMYHTHRRRRLVRKRKKDLTQTASSTARAMEELQDQEGWEYASLIGWKFHWKQRSSDTFRRRRWRRKMAPSETHGAAAIFKLEGALGADTTEDGDEKSLEKQKHSATTVFGANTPIVSCNFDRVYIYHLRCYVYQARNLLALDKDSFSDPYAHICFLHRSKTTEIIHSTLNPTWDQTIIFDEVEIYGEPQTVLQNPPKVIMELFDNDQVGKDEFLGRSIFSPVVKLNSEMDITPKLLWHPVMNGDKACGDVLVTAELILRGKDGSNLPILPPQRAPNLYMVPQGIRPVVQLTAIEILAWGLRNMKNFQMASITSPSLVVECGGERVESVVIKNLKKTPNFPSSVLFMKVFLPKEELYMPPLVIKVIDHRQFGRKPVVGQCTIERLDRFRCDPYAGKEDIVPQLKASLLSAPPCRDIVIEMEDTKPLLASKLTEKEEEIVDWWSKFYASSGEHEKCGQYIQKGYSKLKIYNCELENVAEFEGLTDFSDTFKLYRGKSDENEDPSVVGEFKGSFRIYPLPDDPSVPAPPRQFRELPDSVPQECTVRIYIVRGLELQPQDNNGLCDPYIKITLGKKVIEDRDHYIPNTLNPVFGRMYELSCYLPQEKDLKISVYDYDTFTRDEKVGETIIDLENRFLSRFGSHCGIPEEYCVSGVNTWRDQLRPTQLLQNVARFKGFPQPILSEDGSRIRYGGRDYSLDEFEANKILHQHLGAPEERLALHILRTQGLVPEHVETRTLHSTFQPNISQGKLQMWVDVFPKSLGPPGPPFNITPRKAKKYYLRVIIWNTKDVILDEKSITGEEMSDIYVKGWIPGNEENKQKTDVHYRSLDGEGNFNWRFVFPFDYLPAEQLCIVAKKEHFWSIDQTEFRIPPRLIIQIWDNDKFSLDDYLGFLELDLRHTIIPAKSPEKCRLDMIPDLKAMNPLKAKTASLFEQKSMKGWWPCYAEKDGARVMAGKVEMTLEILNEKEADERPAGKGRDEPNMNPKLDLPNRPETSFLWFTNPCKTMKFIVWRRFKWVIIGLLFLLILLLFVAVLLYSLPNYLSMKIVKPNV

SEQ ID NO: 887346 - protein, 2101 aa, Homo sapiens
MKHVFFNQGLMTHQTLTAPKGILFGSCLVNALLVNWLVKKSNPNMRGEEGFDDLIETLKPDPIVSVIFKDEKKKTKKVDNELNPVWNEILEFDLRGIPLDFSSSLGIIVKDFETIGQNKLIGTATVALKDLTGDQSRSLPYKLISLLNEKGQDTGATIDLVIGYDPPSAPHPNDLSGPSVPGMGGDGEEDEGDEDRLDNAVRGPGPKGPVGTVSEAQLARRLTKVKNSRRMLSNKPQDFQIRVRVIEGRQLSGNNIRPVVKVHVCGQTHRTRIKRGNNPFFDELFFYNVNMTPSELMDEIISIRVYNSHSLRADCLMGEFKIDVGFVYDEPGHAVMRKWLLLNDPEDTSSGSKGYMKVSMFVLGTGDEPPPERRDRDNDSDDVESNLLLPAGIALRWVTFLLKIYRAEDIPQMDDAFSQTVKEIFGGNADKKNLVDPFVEVSFAGKKVCTNIIEKNANPEWNQVVNLQIKFPSVCEKIKLTIYDWDRLTKNDVVGTTYLHLSKIAASGGEVEDFSSSGTGAASYTVNTGETEVGFVPTFGPCYLNLYGSPREYTGFPDPYDELNTGKGEGVAYRGRILVELATFLEKTPPDKKLEPISNDDLLVVEKYQRRRKYSLSAVFHSATMLQDVGEAIQFEVSIGNYGNKFDTTCKPLASTTQYSRAVFDGNYYYYLPWAHTKPVVTLTSYWEDISHRLDAVNTLLAMAERLQTNIEALKSGIQGKIPANQLAELWLKLIDEVIEDTRYTLPLTEGKANVTVLDTQIRKLRSRSLSQIHEAAVRMRSEATDVKSTLAEIEDWLDKLMQLTEEPQNSMPDIIIWMIRGEKRLAYARIPAHQVLYSTSGENASGKYCGKTQTIFLKYPQEKNNGPKVPVELRVNIWLGLSAVEKKFNSFAEGTFTVFAEMYENQALMFGKWGTSGLVGRHKFSDVTGKIKLKREFFLPPKGWEWEGEWIVDPERSLLTEADAGHTEFTDEVYQNESRYPGGDWKPAEDTYTDANGDKAASPSELTCPPGWEWEDDAWSYDINRAVDEKGWEYGITIPPDHKPKSWVAAEKMYHTHRRRRLVRKRKKDLTQTASSTARAMEELQDQEGWEYASLIGWKFHWKQRSSDTFRRRRWRRKMAPSETHGAAAIFKLEGALGADTTEDGDEKSLEKQKHSATTVFGANTPIVSCNFDRVYIYHLRCYVYQARNLLALDKDSFSDPYAHICFLHRSKTTEIIHSTLNPTWDQTIIFDEVEIYGEPQTVLQNPPKVIMELFDNDQVGKDEFLGRSIFSPVVKLNSEMDITPKLLWHPVMNGDKACGDVLVTAELILRGKDGSNLPILPPQRAPNLYMVPQGIRPVVQLTAIEILAWGLRNMKNFQMASITSPSLVVECGGERVESVVIKNLKKTPNFPSSVLFMKVFLPKEELYMPPLVIKVIDHRQFGRKPVVGQCTIERLDRFRCDPYAGKEDIVPQLKASLLSAPPCRDIVIEMEDTKPLLASKLTEKEEEIVDWWSKFYASSGEHEKCGQYIQKGYSKLKIYNCELENVAEFEGLTDFSDTFKLYRGKSDENEDPSVVGEFKGSFRIYPLPDDPSVPAPPRQFRELPDSVPQECTVRIYIVRGLELQPQDNNGLCDPYIKITLGKKVIEDRDHYIPNTLNPVFGRMYELSCYLPQEKDLKISVYDYDTFTRDEKVGETIIDLENRFLSRFGSHCGIPEEYCVSGVNTWRDQLRPTQLLQNVARFKGFPQPILSEDGSRIRYGGRDYSLDEFEANKILHQHLGAPEERLALHILRTQGLVPEHVETRTLHSTFQPNISQGKLQMWVDVFPKSLGPPGPPFNITPRKAKKYYLRVIIWNTKDVILDEKSITGEEMSDIYVKGWIPGNEENKQKTDVHYRSLDGEGNFNWRFVFPFDYLPAEQLCIVAKKEHFWSIDQTEFRIPPRLIIQIWDNDKFSLDDYLGFLELDLRHTIIPAKSPEKCRLDMIPDLKAMNPLKAKTASLFEQKSMKGWWPCYAEKDGARVMAGKVEMTLEILNEKEADERPAGKGRDEPNMNPKLDLPNRPETSFLWFTNPCKTMKFIVWRRFKWVIIGLLFLLILLLFVAVLLYSLPNYLSMKIVKPNV

SEQ ID NO: 887347 - protein, 1868 aa, Homo sapiens
  misc_feature (12)..(12): Xaa can be any naturally occurring amino acid
NPPFTGRELLSXGGATRSSSALGEILPSLGENFSPRAVRPGAPAPESPLRLLKLAFYQLRTMLRVIVESASNIPKTKFGKPDPIVSVIFKDEKKKTKKVDNELNPVWNEILEFDLRGIPLDFSSSLGIIVKDFETIGQNKLIGTATVALKDLTGDQSRSLPYKLISLLNEKGQDTGATIDLVIGYDPPSAPHPNDLSGPSVPGMGGDGEEDEGDEDRLDNAVRGPGPKGPVGTVSEAQLARRLTKVKNSRRMLSNKPQDFQIRVRVIEGRQLSGNNIRPVVKVHVCGQTHRTRIKRGNNPFFDELFFYNVNMTPSELMDEIISIRVYNSHSLRADCLMGEFKIDVGFVYDEPGHAVMRKWLLLNDPEDTSSGSKGYMKVSMFVLGTGDEPPPERRDRDNDSDDVESNLLLPAGIALRWVTFLLKIYRAEDIPQMDDAFSQTVKEIFGGNADKKNLVDPFVEVSFAGKKVCTNIIEKNANPEWNQVVNLQIKFPSVCEKIKLTIYDWDRLTKNDVVGTTYLHLSKIAASGGEVEDFSSSGTGAASYTVNTGETEVGFVPTFGPCYLNLYGSPREYTGFPDPYDELNTGKGEGVAYRGRILVELATFLEKTPPDKKLEPISNDDLLVVEKYQRRRKYSLSAVFHSATMLQDVGEAIQFEVSIGNYGNKFDTTCKPLASTTQYSRAVFDGNYYYYLPWAHTKPVVTLTSYWEDISHRLDAVNTLLAMAERLQTNIEALKSGIQGKIPANQLAELWLKLIDEVIEDTRYTLPLTEGKANVTVLDTQIRKLRSRSLSQIHEAAVRMRSEATDVKSTLAEIEDWLDKLMQLTEEPQNSMPDIIIWMIRGEKRLAYARIPAHQVLYSTSGENASGKYCGKTQTIFLKYPQEKNNGPKVPVELRVNIWLGLSAVEKKFNSFAEGTFTVFAEMYENQALMFGKWGTSGLVGRHKFSDVTGKIKLKREFFLPPKGWEWEGEWIVDPERSLLTEADAGHTEFTDEVYQNESRYPGGDWKPAEDTYTDANGDKAASPSELTCPPGWEWEDDAWSYDINRAVDEKGWEYGITIPPDHKPKSWVAAEKMYHTHRRRRLVRKRKKDLTQTASSTARAMEELQDQEGWEYASLIGWKFHWKQRSSDTFRRRRWRRKMAPSETHGAAAIFKLEGALGADTTEDGDEKSLEKQKHSATTVFGANTPIVSCNFDRVYIYHLRCYVYQARNLLALDKDSFSDPYAHICFLHRSKTTEIIHSTLNPTWDQTIIFDEVEIYGEPQTVLQNPPKVIMELFDNDQVGKDEFLGRSIFSPVVKLNSEMDITPKLLWHPVMNGDKACGDVLVTAELILRGKDGSNLPILPPQRAPNLYMVPQGIRPVVQLTAIEILAWGLRNMKNFQMASITSPSLVVECGGERVESVVIKNLKKTPNFPSSVLFMKVFLPKEELYMPPLVIKVIDHRQFGRKPVVGQCTIERLDRFRCDPYAGKEDIVPQLKASLLSAPPCRDIVIEMEDTKPLLASKLTEKCFKQYVNSTQQNGFSSDSACMYEKEEEIVDWWSKFYASSGEHEKCGQYIQKGYSKLKIYNCELENVAEFEGLTDFSDTFKLYRGKSDENEDPSVVGEFKGSFRIYPLPDDPSVPAPPRQFRELPDSVPQECTVRIYIVRGLELQPQDNNGLCDPYIKITLGKKVIEDRDHYIPNTLNPVFGRMYELSCYLPQEKDLKISVYDYDTFTRDEKVGETIIDLENRFLSRFGSHCGIPEEYCVSGVNTWRDQLRPTQLLQNVARFKGFPQPILSEDGSRIRYGGRDYSLDEFEANKILHQHLGAPEERLALHILRTQGLVPEHVETRTLHSTFQPNISQILPACDHLEHQGRYLGREKHHRRGNE

SEQ ID NO: 887348 - protein, 2109 aa, Homo sapiens; identical to SEQ ID NO: 887335
  misc_feature (12)..(12): Xaa can be any naturally occurring amino acid

SEQ ID NO: 887349 - protein, 1601 aa, Homo sapiens
  misc_feature (12)..(12): Xaa can be any naturally occurring amino acid
NPPFTGRELLSXGGATRSSSALGEILPSLGENFSPRAVRPGAPAPESPLRLLKLAFYQLRTMLRVIVESASNIPKTKFGKPDPIVSVIFKDEKKKTKKVDNELNPVWNEILEFDLRGIPLDFSSSLGIIVKDFETIGQNKLIGTATVALKDLTGDQSRSLPYKLISLLNEKGQDTGATIDLVIGYDPPSAPHPNDLSGPSVPGMGGDGEEDEGDEDRLDNAVRGPGPKGPVGTVSEAQLARRLTKVKNSRRMLSNKPQDFQIRVRVIEGRQLSGNNIRPVVKVHVCGQTHRTRIKRGNNPFFDELFFYNVNMTPSELMDEIISIRVYNSHSLRADCLMGEFKIDVGFVYDEPGHAVMRKWLLLNDPEDTSSGSKGYMKVSMFVLGTGDEPPPERRDRDNDSDDVESNLLLPAGIALRWVTFLLKIYRAEDIPQMDDAFSQTVKEIFGGNADKKNLVDPFVEVSFAGKKVCTNIIEKNANPEWNQVVNLQIKFPSVCEKIKLTIYDWDRLTKNDVVGTTYLHLSKIAASGGEVEDFSSSGTGAASYTVNTGETEVGFVPTFGPCYLNLYGSPREYTGFPDPYDELNTGKGEGVAYRGRILVELATFLEKTPPDKKLEPISNDDLLVVEKYQRRRKYSLSAVFHSATMLQDVGEAIQFEVSIGNYGNKFDTTCKPLASTTQYSRAVFDGNYYYYLPWAHTKPVVTLTSYWEDISHRLDAVNTLLAMAERLQTNIEALKSGIQGKIPANQLAELWLKLIDEVIEDTRYTLPLTEGKANVTVLDTQIRKLRSRSLSQIHEAAVRMRSEATDVKSTLAEIEDWLDKLMQLTEEPQNSMPDIIIWMIRGEKRLAYARIPAHQVLYSTSGENASGKYCGKTQTIFLKYPQEKNNGPKVPVELRVNIWLGLSAVEKKFNSFAEGTFTVFAEMYENQALMFGKWGTSGLVGRHKFSDVTGKIKLKREFFLPPKGWEWEGEWIVDPERSLLTEADAGHTEFTDEVYQNESRYPGGDWKPAEDTYTDANGDKAASPSELTCPPGWEWEDDAWSYDINRAVDEKGWEYGITIPPDHKPKSWVAAEKMYHTHRRRRLVRKRKKDLTQTASSTARAMEELQDQEGWEYASLIGWKFHWKQRSSDTFRRRRWRRKMAPSETHGAAAIFKLEGALGADTTEDGDEKSLEKQKHSATTVFGANTPIVSCNFDRVYIYHLRCYVYQARNLLALDKDSFSDPYAHICFLHRSKTTEIIHSTLNPTWDQTIIFDEVEIYGEPQTVLQNPPKVIMELFDNDQVGKDEFLGRSIFSPVVKLNSEMDITPKLLWHPVMNGDKACGDVLVTAELILRGKDGSNLPILPPQRAPNLYMVPQGIRPVVQLTAIEILAWGLRNMKNFQMASITSPSLVVECGGERVESVVIKNLKKTPNFPSSVLFMKVFLPKEELYMPPLVIKVIDHRQFGRKPVVGQCTIERLDRFRCDPYAGKEDIVPQLKASLLSAPPCRDIVIEMEDTKPLLASKLTEKEEEIVDWWSKFYASSGEHEKCGQYIQKGYSKLKVPGSMLLWVENQHPLKLATGRAKRMTKRSLGWVLMSRAQENLCLPGEPSCMSFGFAKIPGT

SEQ ID NO: 887350 - protein, 1280 aa, Homo sapiens
  misc_feature (12)..(12): Xaa can be any naturally occurring amino acid
NPPFTGRELLSXGGATRSSSALGEILPSLGENFSPRAVRPGAPAPESPLRLLKLAFYQLRTMLRVIVESASNIPKTKFGKPDPIVSVIFKDEKKKTKKVDNELNPVWNEILEFDLRGIPLDFSSSLGIIVKDFETIGQNKLIGTATVALKDLTGDQSRSLPYKLISLLNEKGQDTGATIDLVIGYDPPSAPHPNDLSGPSVPGMGGDGEEDEGDEDRLDNAVRGPGPKGPVGTVSEAQLARRLTKVKNSRRMLSNKPQDFQIRVRVIEGRQLSGNNIRPVVKVHVCGQTHRTRIKRGNNPFFDELFFYNVNMTPSELMDEIISIRVYNSHSLRADCLMGEFKIDVGFVYDEPGHAVMRKWLLLNDPEDTSSGSKGYMKVSMFVLGTGDEPPPERRDRDNDSDDVESNLLLPAGIALRWVTFLLKIYRAEDIPQMDDAFSQTVKEIFGGNADKKNLVDPFVEVSFAGKKVCTNIIEKNANPEWNQVVNLQIKFPSVCEKIKLTIYDWDRLTKNDVVGTTYLHLSKIAASGGEVEDFSSSGTGAASYTVNTGETEVGFVPTFGPCYLNLYGSPREYTGFPDPYDELNTGKGEGVAYRGRILVELATFLEKTPPDKKLEPISNDDLLVVEKYQRRRKYSLSAVFHSATMLQDVGEAIQFEVSIGNYGNKFDTTCKPLASTTQYSRAVFDGNYYYYLPWAHTKPVVTLTSYWEDISHRLDAVNTLLAMAERLQTNIEALKSGIQGKIPANQLAELWLKLIDEVIEDTRYTLPLTEGKANVTVLDTQIRKLRSRSLSQIHEAAVRMRSEATDVKSTLAEIEDWLDKLMQLTEEPQNSMPDIIIWMIRGEKRLAYARIPAHQVLYSTSGENASGKYCGKTQTIFLKYPQEKNNGPKVPVELRVNIWLGLSAVEKKFNSFAEGTFTVFAEMYENQALMFGKWGTSGLVGRHKFSDVTGKIKLKREFFLPPKGWEWEGEWIVDPERSLLTEADAGHTEFTDEVYQNESRYPGGDWKPAEDTYTDANGDKAASPSELTCPPGWEWEDDAWSYDINRAVDEKGWEYGITIPPDHKPKSWVAAEKMYHTHRRRRLVRKRKKDLTQTASSTARAMEELQDQEGWEYASLIGWKFHWKQRSSDTFRRRRWRRKMAPSETHGAAAIFKLEGALGADTTEDGDEKSLEKQKHSATTVFGANTPIVSCNFDRVYIYHLRCYVYQARNLLALDKDSFSDPYAHICFLHRSKTTEIIHSTLNPTRSLQTSEFHFTFIGVCLSSCHCIGDRWWGPTGHG

SEQ ID NO: 887351 - protein, 436 aa, Homo sapiens
  misc_feature (12)..(12): Xaa can be any naturally occurring amino acid
NPPFTGRELLSXGGATRSSSALGEILPSLGENFSPRAVRPGAPAPESPLRLLKLAFYQLRTMLRVIVESASNIPKTKFGKPDPIVSVIFKDEKKKTKKVDNELNPVWNEILEFDLRGIPLDFSSSLGIIVKDFETIGQNKLIGTATVALKDLTGDQSRSLPYKLISLLNEKGQDTGATIDLVIGYDPPSAPHPNDLSGPSVPGMGGDGEEDEGDEDRLDNAVRGPGPKGPVGTVSEAQLARRLTKVKNSRRMLSNKPQDFQIRVRVIEGRQLSGNNIRPVVKVHVCGQTHRTRIKRGNNPFFDELFFYNVNMTPSELMDEIISIRVYNSHSLRADCLMGEFKIDVGFVYDEPGHAVMRKWLLLNDPEDTSSGSKGYMKVSMFVLGTGDEPPPERRDRDNDSDDVESNLLLPAGIALRWVTFLLKIYRAEDIPQSMY

SEQ ID NO: 887352 - protein, 241 aa, Homo sapiens
  misc_feature (12)..(12): Xaa can be any naturally occurring amino acid
NPPFTGRELLSXGGATRSSSALGEILPSLGENFSPRAVRPGAPAPESPLRLLKLAFYQLRTMLRVIVESASNIPKTKFGKPDPIVSVIFKDEKKKTKKVDNELNPVWNEILEFDLRGIPLDFSSSLGIIVKDFETIGQNKLIGTATVALKDLTGDQSRSLPYKLISLLNEKGQDTGATIDLVIGYDPPSAPHPNDLSGPSVPGMGGDGEEEEGDVNTGERNKHEDVGADPARPDGGTNSMF

SEQ ID NO: 887353 - protein, 110 aa, Homo sapiens
MCSEFLLLTYFFSLSLRKTTLFAAHVSGAVLTFGMGSLYMFVQTILSYQMQPKIHGKQVFWIRLLLVIWCGVSALSMLTCSSVLHSGNFGTDLEQKLHWNPEDKVRTYSL

SEQ ID NO: 887354 - protein, 266 aa, Homo sapiens
MWWFQQGLSFLPSALVIWTSAAFIFSYITAVTLHHIDPALPYISDTGTVAPEKCLFGAMLNIAAVLCIATIYVRYKQVHALSPEENVIIKLNKAGLVLGILSCLGLSIVANFQKTTLFAAHVSGAVLTFGMGSLYMFVQTILSYQMQPKIHGKQVFWIRLLLVIWCGVSALSMLTCSSVLHSGNFGTDLEQKLHWNPEDKGYVLHMITTAAEWSMSFSFFGFFLTYIRDFQKISLRVEANLHGLTLYDTAPCPINNERTRLLSRDI

SEQ ID NO: 887355 - protein, 266 aa, Homo sapiens; identical to SEQ ID NO: 887354

SEQ ID NO: 887356 - protein, 266 aa, Homo sapiens; identical to SEQ ID NO: 887354

SEQ ID NO: 887357 - protein, 266 aa, Homo sapiens; identical to SEQ ID NO: 887354

SEQ ID NO: 887358 - protein, 266 aa, Homo sapiens; identical to SEQ ID NO: 887354

SEQ ID NO: 887359 - protein, 266 aa, Homo sapiens; identical to SEQ ID NO: 887354

SEQ ID NO: 887360 - protein, 266 aa, Homo sapiens; identical to SEQ ID NO: 887354

SEQ ID NO: 887361 - protein, 215 aa, Homo sapiens
MWWFQQGLSFLPSALVIWTSAAFIFSYITAVTLHHIDPALPYISDTGTVAPEKCLFGAMLNIAAVLCIATIYVRYKQVHALSPEENVIIKLNKAGLVLGILSCLGLSIVANFQKTTLFAAHVSGAVLTFGMGSLYMFVQTILSYQMQPKIHGKQVFWIRLLLVIWCGVSALSMLTCSSVLHSGNFGTDLEQKLHWNPEDKILSKYEEHCDGRRVF

SEQ ID NO: 887362 - protein, 136 aa, Homo sapiens
MGSLYMFVQTILSYQMQPKIHGKQVFWIRLLLVIWCGVSALSMLTCSSVLHSGNFGTDLEQKLHWNPEDKGYVLHMITTAAEWSMSFSFFGFFLTYIRDFQKISLRVEANLHGLTLYDTAPCPINNERTRLLSRDI

SEQ ID NO: 887363 - protein, 122 aa, Homo sapiens
MWWFQQGLSFLPSALVIWTSAAFIFSYITAVTLHHIDPALPYISDTGTVAPEKCLFGAMLNIAAVLCIATIYVRYKQVHALSPEENVIIKLNKAGLVLGILSCLGLSIVANFQKTTLFAAHC

SEQ ID NO: 887364 - protein, 270 aa, Homo sapiens
MWWFQQGLSFLPSALVIWTSAAFIFSYITAVTLHHIDPALPYISDTGTVAPEKCLFGAMLNIAAVLCIATIYVRYKQVHALSPEENVIIKLNKAGLVLGILSCLGLSIVANFQKTTLFAAHVSGAVLTFGMGSLYMFVQTILSYQMQPKIHGKQVFWIRLLLVIWCGVSALSMLTCSSVLHSGNFGTDLEQKLHWNPEDKGYVLHMITTAAEWSMSFSFFGFFLTYIRDFQVRRHNIRFIQSDFLLLVQEGRLRELSIGNSPAFLKINCL

SEQ ID NO: 887365 - protein, 109 aa, Homo sapiens
PVTALRSLTLTPTSTPLEISPPTPADWVTDRRQHVHDTFSDCRKGEQGLNEQRRRRAPRCRERAPGPAGLLGSAPRGPALSPFSIGASAPAASASRSGKAKRSGDPQTA

SEQ ID NO: 887366 - protein, 124 aa, Homo sapiens
PVTALRSLTLTPTSTPLEISPPTPADWVTDRRQHVHDTFSDCRKGEQGLNEQRRRRAPRCRERAPGPAGLLGSAPRGPALSPFSIGASAPAASASRSGKCLMPSSVSRVFSWSQAKRSGDPQTA

SEQ ID NO: 887367 - protein, 136 aa, Homo sapiens; identical to SEQ ID NO: 887362

SEQ ID NO: 887368 - protein, 109 aa, Homo sapiens; identical to SEQ ID NO: 887365

SEQ ID NO: 887369 - protein, 215 aa, Homo sapiens; identical to SEQ ID NO: 887361

SEQ ID NO: 887370 - protein, 36 aa, Homo sapiens
MAHAHTPSCGYLTDLTIRRLHRQLSYSVDSQLTWIE

SEQ ID NO: 887371 - protein, 198 aa, Homo sapiens
  misc_feature (178)..(178): Xaa can be any naturally occurring amino acid
MNLEKLSKPELLTLFSILEGELEARDLVIEALKAQHRDTFIEERYGKYNISDPLMALQRDFETLKEKNDGEKQPVCTNPLSILKVVMKQCKNMQERMLSQLAAAESRHRKVILDLEEERQRHAQDTAEGDDVTYMLEKERERLTQQLNLKNPSEKVWNREAPKQLEKSVRPSRFILLXLVQKAPPGTEEDRSSLPGFG

SEQ ID NO: 887372 - protein, 639 aa, Homo sapiens
MNLEKLSKPELLTLFSILEGELEARDLVIEALKAQHRDTFIEERYGKYNISDPLMALQRDFETLKEKNDGEKQPVCTNPLSILKVVMKQCKNMQERMLSQLAAAESRHRKVILDLEEERQRHAQDTAEGDDVTYMLEKERERLTQQLEFEKSQVKKFEKEQKKLSSQLEEERSRHKQLSSMLVLECKKATNKAAEEGQKAGELSLKLEKEKSRVSKLEEELAAERKRGLQTEAQVEKQLSEFDIEREQLRAKLNREENRTKTLKEEMESLKKIVKDLEASHQHSSPNEQLKKPVTVSKGTATEPLMLMSVFCQTESFPAERTHGSNIAKMTNTGLPGPATPAYSYAKTNGHCDPEIQTTRELTAGNNVENQVPPREKSVALAQEKPVENGGCPVGIETPVPMPSPLSSSGSSLSPSSTASSSLTSSPCSSPVLTKRLLGSSASSPGYQSSYQVGINQRFHAARHKFQSQADQDQQASGLQSPPSRDLSPTLIDNSAAKQLARNTVTQVLSRFTSQQGPIKPVSPNSSPFGTDYRNLANTANPRGDTSHSPTPGKVSSPLSPLSPGIKSPTIPRAERGNPPPIPPKKPGLTPSPSATTPLTKTHSQAASLTTAEDLASSCSSNTVVANGKDVELLLPTSS

SEQ ID NO: 887373 - protein, 639 aa, Homo sapiens; identical to SEQ ID NO: 887372

SEQ ID NO: 887374 - protein, 505 aa, Homo sapiens [sequence omitted]

SEQ ID NO: 887375 - protein, 639 aa, Homo sapiens; identical to SEQ ID NO: 887372

SEQ ID NO: 887376 - protein, 639 aa, Homo sapiens; identical to SEQ ID NO: 887372

SEQ ID NO: 887377 - protein, 628 aa, Homo sapiens [sequence omitted]

SEQ ID NO: 887378 - protein, 339 aa, Homo sapiens
MLEKERERLTQQLEFEKSQVKKFEKEQKKLSSQLEEERSRHKQLSSMLVLECKKATNKAAEEGQKAGELSLKLEKEKSRVSKLEEELAAERKRGLQTEAQVEKQLSEFDIEREQLRAKLNREENRTKTLKEEMESLKKIVKDLEASHQHSSPNEQLKKPVTVSKGTATEPLMLMSVFCQTESFPAERTHGSNIAKMTNTGLPGPATPAYSYAKTNGHCDPEIQTTRELTAGNNVENQVPPREKSVALAQEKPVENGGCPVGIETPVPMPSPLSSSGSSLSPSSTASSSLTSSPCSSPVLTKRLLGSSASSPGYQSSYQVGINQRFHAARHKFQSSALDL

SEQ ID NO: 887379 - protein, 639 aa, Homo sapiens; identical to SEQ ID NO: 887372

SEQ ID NO: 887380 - protein, 639 aa, Homo sapiens; identical to SEQ ID NO: 887372

SEQ ID NO: 887381 - protein, 639 aa, Homo sapiens; identical to SEQ ID NO: 887372

SEQ ID NO: 887382 - protein, 639 aa, Homo sapiens; identical to SEQ ID NO: 887372

SEQ ID NO: 887383 - protein, 558 aa, Homo sapiens
MNLEKLSKPELLTLFSILEGELEARDLVIEALKAQHRDTFIEERYGKYNISDPLMALQRDFETLKEKNDGEKQPVCTNPLSILKVVMKQCKNMQERMLSQLAAAESRHRKVILDLEEERQRHAQDTAEGDDVTYMLEKERERLTQQLEFEKSQVKKFEKEQKKLSSQLEEERSRHKQLSSMLVLECKKATNKAAEEGQKAGELSLKLEKEKSRVSKLEEELAAERKRGLQTEAQVEKQLSEFDIEREQLRAKLNREENRTKTLKEEMESLKKIVKDLEASHQHSSPNEQLKKPVTVSKGTATEPLMLMSVFCQTESFPAERTHGSNIAKMTNTGLPGPATPAYSYAKTNGHCDPEIQTTRELTAGNNVENQVPPREKSVALAQEKPVENGGCPVGIETPVPMPSPLSSSGSSLSPSSTASSSLTSSPCSSPVLTKRLLGSSASSPGYQSSYQVGINQRFHAARHKFQSQADQDQQASGLQSPPSRDLSPTLIDNSAAKQLARNTVTQVLSRFTSQQGPIKPVSPNSSPFGTDYRNAASLTTAEDLASSCSSNTVVANG

SEQ ID NO: 887384 - protein, 1269 aa, Homo sapiens
MGDVKNFLYAWCGKRKMTPSYEIRAVGNKNRQKFMCEVQVEGYNYTGMGNSTNKKDAQSNAARDFVNYLVRINEIKSEEVPAFGVASPPPLTDTPDTTANAEGDLPTTMGGPLPPHLALKAENNSEVGASGYGVPGPTWDRGANLKDYYSRKEEQEVQATLESEEVDLNAGLHGNWTLENAKARLNQYFQKEKIQGEYKYTQVGPDHNRSFIAEMTIYIKQLGRRIFAREHGSNKKLAAQSCALSLVRQLYHLGVVEAYSGLTKKKEGETVEPYKVNLSQDLEHQLQNIIQELNLEILPPPEDPSVPVALNIGKLAQFEPSQRQNQVGVVPWSPPQSNWNPWTSSNIDEGPLAFATPEQISMDLKNELMYQLEQDHDLQAILQERELLPVKKFESEILEAISQNSVVIIRGATGCGKTTQVPQFILDDFIQNDRAAECNIVVTQPRRISAVSVAERVAFERGEEPGKSCGYSVRFESILPRPHASIMFCTVGVLLRKLEAGIRGISHVIVDEIHERDINTDFLLVVLRDVVQAYPEVRIVLMSATIDTSMFCEYFFNCPIIEVYGRTYPVQEYFLEDCIQMTHFVPPPKDKKKKDKDDDGGEDDDANCNLICGDEYGPETRLSMSQLNEKETPFELIEALLKYIETLNVPGAVLVFLPGWNLIYTMQKHLEMNPHFGSHRYQILPLHSQIPREEQRKVFDPVPVGVTKVILSTNIAETSITINDVVYVIDSCKQKVKLFTAHNNMTNYATVWASKTNLEQRKGRAGRVRPGFCFHLCSRARFERLETHMTPEMFRTPLHEIALSIKLLRLGGIGQFLAKAIEPPPLDAVIEAEHTLRELDALDANDELTPLGRILAKLPIEPRFGKMMIMGCIFYVGDAICTIAAATCFPEPFINEGKRLGYIHRNFAGNRFSDHVALLSVFQAWDDARMGGEEAEIRFCEHKRLNMATLRMTWEAKVQLKEILINSGFPEDCLLTQVFTNTGPDNNLDVVISLLAFGVYPNVCYHKEKRKILTTEGRNALIHKSSVNCPFSSQDMKYPSPFFVFGEKIRTRAISAKGMTLVTPLQLLLFASKKVQSDGQIVLVDDWIKLQISHEAAACITGLRAAMEALVVEVTKQPAIISQLDPVNERMLNMIRQISRPSAAGINLMIGSTRYGDGPRPPKMARYDNGSGYRRGGSSYSGGGYGGGYSSGGYGSGGYGGSANSFGQDMVQVLVEAIEEFPEVALEATLEETTEGLVEATEDLGDSSEEVVGGPMELATWTLKRRWRL

SEQ ID NO: 887385 - protein, 306 aa, Homo sapiens
MGDVKNFLYAWCGKRKMTPSYEIRAVGNKNRQKFMCEVQVEGYNYTGMGNSTNKKDAQSNAARDFVNYLVRINEIKSEEVPAFGVASPPPLTDTPDTTANAEGDLPTTMGGPLPPHLALKAENNSEVGASGYGVPGPTWDRGANLKDYYSRKEEQEVQATLESEEVDLNAGLHGNWTLENAKARLNQYFQKEKIQGEYKYTQVGPDHNRSFIAEMTIYIKQLGRRILGETMVTYELGPACGLSWSTTVHWRGELSGSKNRGTRSSKNFRFSETKSRYMPEMCLHYEDKLQECGHTWKEGKQTREKR

SEQ ID NO: 887386 - protein, 275 aa, Homo sapiens
VQAVSPASAGITGSPAAMTWQIKVLSSRDGVHHAGQAGLKLLIRTRAISAKGMTLVTPLQLLLFASKKVQSDGQIVLVDDWIKLQISHEAAACITGLRAAMEALVVEVTKQPAIISQLDPVNERMLNMIRQISRPSAAGINLMIGSTRYGDGPRPPKMARYDNGSGYRRGGSSYSGGGYGGGYSSGGYGSGGYGGSANSFRAGYGAGVGGGYRGVSRGGFRGNSGGDYRGPSGGYRGSGGFQRGGGRGAYGTGYLDIEEEVAAIKLGYVSSVCRQ

SEQ ID NO: 887387 - protein, 101 aa, Homo sapiens
  misc_feature (33)..(33): Xaa can be any naturally occurring amino acid
MCCKNRIKRSRGNHFYQTCRIRHEMQKHLEMNXHFGSHRYQILPLHSQIPREEQRKVFDPVPVGVTKVILSTNIAETSITINDVVYVIDSCKYLLSEALIM

SEQ ID NO: 887388 - protein, 1178 aa, Homo sapiens
MGDVKNFLYAWCGKRKMTPSYEIRAVGNKNRQKFMCEVQVEGYNYTGMGNSTNKKDAQSNAARDFVNYLVRINEIKSEEVPAFGVASPPPLTDTPDTTANAEGDLPTTMGGPLPPHLALKAENNSEVGASGYGVPGPTWDRGANLKDYYSRKEEQEVQATLESEEVDLNAGLHGNWTLENAKARLNQYFQKEKIQGEYKYTQVGPDHNRSFIAEMTIYIKQLGRRIFAREHGSNKKLAAQSCALSLVRQLYHLGVVEAYSGLTKKKEGETVEPYKVNLSQDLEHQLQNIIQELNLEILPPPEDPSVPVALNIGKLAQFEPSQRQNQVGVVPWSPPQSNWNPWTSSNIDEGPLAFATPEQISMDLKNELMYQLEQDHDLQAILQERELLPVKKFESEILEAISQNSVVIIRGATGCGKTTQVPQFILDDFIQNDRAAECNIVVTQPRRISAVSVAERVAFERGEEPGKSCGYSVRFESILPRPHASIMFCTVGVLLRKLEAGIRGISHVIVDEIHERDINTDFLLVVLRDVVQAYPEVRIVLMSATIDTSMFCEYFFNCPIIEVYGRTYPVQEYFLEDCIQMTHFVPPPKDKKKKDKDDDGGEDDDANCNLICGDEYGPETRLSMSQLNEKETPFELIEALLKYIETLNVPGAVLVFLPGWNLIYTMQKHLEMNPHFGSHRYQILPLHSQIPREEQRKVFDPVPVGVTKVILSTNIAETSITINDVVYVIDSCKQKVKLFTAHNNMTNYATVWASKTNLEQRKGRAGRVRPGFCFHLCSRARFERLETHMTPEMFRTPLHEIALSIKLLRLGGIGQFLAKAIEPPPLDAVIEAEHTLRELDALDANDELTPLGRILAKLPIEPRFGKMMIMGCIFYVGDAICTIAAATCFPEPFINEGKRLGYIHRNFAGNRFSDHVALLSVFQAWDDARMGGEEAEIRFCEHKRLNMATLRMTWEAKVQLKEILINSGFPEDCLLTQVFTNTGPDNNLDVVISLLAFGVYPNVCYHKEKRKILTTEGRNALIHKSSVNCPFSSQDMKYPSPFFVFGEKIRTRAISAKGMTLVTPLQLLLFASKKVQSDGQIVLVDDWIKLQISHEAAACITGLRAAMEALVVEVTKQPAIISQLDPVNERMLNMIRQISRPSAAGINLMIGSTRYGDGPRPPLLYPLPLSYRAILGST

SEQ ID NO: 887389 - protein, 1007 aa, Homo sapiens
MGDVKNFLYAWCGKRKMTPSYEIRAVGNKNRQKFMCEVQVEGYNYTGMGNSTNKKDAQSNAARDFVNYLVRINEIKSEEVPAFGVASPPPLTDTPDTTANAEGDLPTTMGGPLPPHLALKAENNSEVGASGYGVPGPTWDRGANLKDYYSRKEEQEVQATLESEEVDLNAGLHGNWTLENAKARLNQYFQKEKIQGEYKYTQVGPDHNRSFIAEMTIYIKQLGRRIFAREHGSNKKLAAQSCALSLVRQLYHLGVVEAYSGLTKKKEGETVEPYKVNLSQDLEHQLQNIIQELNLEILPPPEDPSVPVALNIGKLAQFEPSQRQNQVGVVPWSPPQSNWNPWTSSNIDEGPLAFATPEQISMDLKNELMYQLEQDHDLQAILQERELLPVKKFESEILEAISQNSVVIIRGATGCGKTTQVPQFILDDFIQNDRAAECNIVVTQPRRISAVSVAERVAFERGEEPGKSCGYSVRFESILPRPHASIMFCTVGVLLRKLEAGIRGISHVIVDEIHERDINTDFLLVVLRDVVQAYPEVRIVLMSATIDTSMFCEYFFNCPIIEVYGRTYPVQEYFLEDCIQMTHFVPPPKDKKKKDKDDDGGEDDDANCNLICGDEYGPETRLSMSQLNEKETPFELIEALLKYIETLNVPGAVLVFLPGWNLIYTMQKHLEMNPHFGSHRYQILPLHSQIPREEQRKVFDPVPVGVTKVILSTNIAETSITINDVVYVIDSCKQKVKLFTAHNNMTNYATVWASKTNLEQRKGRAGRVRPGFCFHLCSRARFERLETHMTPEMFRTPLHEIALSIKLLRLGGIGQFLAKAIEPPPLDAVIEAEHTLRELDALDANDELTPLGRILAKLPIEPRFGKMMIMGCIFYVGDAICTIAAATCFPEPFINEGKRLGYIHRNFAGNRFSDHVALLSVFQAWDDARMGGEEAEIRFCEHKRLNMATLRMTWEAKVQLKEILINSGFPEDVVAPVFLPGRYIGCVFPRLGLPGASRRGVPWGLLP

SEQ ID NO: 887390 - protein, 1269 aa, Homo sapiens; identical to SEQ ID NO: 887384

SEQ ID NO: 887391 - protein, 1326 aa, Homo sapiens
MGDVKNFLYAWCGKRKMTPSYEIRAVGNKNRQKFMCEVQVEGYNYTGMGNSTNKKDAQSNAARDFVNYLVRINEIKSEEVPAFGVASPPPLTDTPDTTANAEGDLPTTMGGPLPPHLALKAENNSEVGASGYGVPGPTWDRGANLKDYYSRKEEQEVQATLESEEVDLNAGLHGNWTLENAKARLNQYFQKEKIQGEYKYTQVGPDHNRWRRMRLSADFNLAEKHTGIDVINERVDVVPLKASGLGPLKPLCLKSFIAEMTIYIKQLGRRIFAREHGSNKKLAAQSCALSLVRQLYHLGVVEAYSGLTKKKEGETVEPYKVNLSQDLEHQLQNIIQELNLEILPPPEDPSVPVALNIGKLAQFEPSQRQNQVGVVPWSPPQSNWNPWTSSNIDEGPLAFATPEQISMDLKNELMYQLEQDHDLQAILQERELLPVKKFESEILEAISQNSVVIIRGATGCGKTTQVPQFILDDFIQNDRAAECNIVVTQPRRISAVSVAERVAFERGEEPGKSCGYSVRFESILPRPHASIMFCTVGVLLRKLEAGIRGISHVIVDEIHERDINTDFLLVVLRDVVQAYPEVRIVLMSATIDTSMFCEYFFNCPIIEVYGRTYPVQEYFLEDCIQMTHFVPPPKDKKKKDKDDDGGEDDDANCNLICGDEYGPETRLSMSQLNEKETPFELIEALLKYIETLNVPGAVLVFLPGWNLIYTMQKHLEMNPHFGSHRYQILPLHSQIPREEQRKVFDPVPVGVTKVILSTNIAETSITINDVVYVIDSCKQKVKLFTAHNNMTNYATVWASKTNLEQRKGRAGRVRPGFCFHLCSRARFERLETHMTPEMFRTPLHEIALSIKLLRLGGIGQFLAKAIEPPPLDAVIEAEHTLRELDALDANDELTPLGRILAKLPIEPRFGKMMIMGCIFYVGDAICTIAAATCFPEPFINEGKRLGYIHRNFAGNRFSDHVALLSVFQAWDDARMGGEEAEIRFCEHKRLNMATLRMTWEAKVQLKEILINSGFPEDCLLTQVFTNTGPDNNLDVVISLLAFGVYPNVCYHKEKRKILTTEGRNALIHKSSVNCPFSSQDMKYPSPFFVFGEKIRTRAISAKGMTLVTPLQLLLFASKKVQSDGQIVLVDDWIKLQISHEAAACITGLRAAMEALVVEVTKQPAIISQLDPVNERMLNMIRQISRPSAAGINLMIGSTRYGDGPRPPKMARYDNGSGYRRGGSSYSGGGYGGGYSSGGYGSGGYGGSANSFRAGYGAGVGGGYRGVSRGGFRGNSGGDYRGPSGGYRGSGGFQRGGGRGAYGTGYLDIEEEVAAIKLGYVSSVCRQ

SEQ ID NO: 887392 - protein, 897 aa, Homo sapiens
MGDVKNFLYAWCGKRKMTPSYEIRAVGNKNRQKFMCEVQVEGYNYTGMGNSTNKKDAQSNAARDFVNYLVRINEIKSEEVPAFGVASPPPLTDTPDTTANAEGDLPTTMGGPLPPHLALKAENNSEVGASGYGVPGPTWDRGANLKDYYSRKEEQEVQATLESEEVDLNAGLHGNWTLENAKARLNQYFQKEKIQGEYKYTQVGPDHNRSFIAEMTIYIKQLGRRIFAREHGSNKKLAAQSCALSLVRQLYHLGVVEAYSGLTKKKEGETVEPYKVNLSQDLEHQLQNIIQELNLEILPPPEDPSVPVALNIGKLAQFEPSQRQNQVGVVPWSPPQSNWNPWTSSNIDEGPLAFATPEQISMDLKNELMYQLEQDHDLQAILQERELLPVKKFESEILEAISQNSVVIIRGATGCGKTTQVPQFILDDFIQNDRAAECNIVVTQPRRISAVSVAERVAFERGEEPGKSCGYSVRFESILPRPHASIMFCTVGVLLRKLEAGIRGISHVIVDEIHERDINTDFLLVVLRDVVQAYPEVRIVLMSATIDTSMFCEYFFNCPIIEVYGRTYPVQEYFLEDCIQMTHFVPPPKDKKKKDKDDDGGEDDDANCNLICGDEYGPETRLSMSQLNEKETPFELIEALLKYIETLNVPGAVLVFLPGWNLIYTMQKHLEMNPHFGSHRYQILPLHSQIPREEQRKVFDPVPVGVTKVILSTNIAETSITINDVVYVIDSCKQKVKLFTAHNNMTNYATVWASKTNLEQRKGRAGRVRPGFCFHLCSRARFERLETHMTPEMFRTPLHEIALSIKLLRLGGIGQFLAKAIEPPPLDAVIEAEHTLRELDALDANDELTPLGRILAKLPIEPRFGKMMIMGCIFYVGDAICTIAAATCRFPSLMKGS

SEQ ID NO: 887393 - protein, 845 aa, Homo sapiens
MGDVKNFLYAWCGKRKMTPSYEIRAVGNKNRQKFMCEVQVEGYNYTGMGNSTNKKDAQSNAARDFVNYLVRINEIKSEEVPAFGVASPPPLTDTPDTTANAEGDLPTTMGGPLPPHLALKAENNSEVGASGYGVPGPTWDRGANLKDYYSRKEEQEVQATLESEEVDLNAGLHGNWTLENAKARLNQYFQKEKIQGEYKYTQVGPDHNRSFIAEMTIYIKQLGRRIFAREHGSNKKLAAQSCALSLVRQLYHLGVVEAYSGLTKKKEGETVEPYKVNLSQDLEHQLQNIIQELNLEILPPPEDPSVPVALNIGKLAQFEPSQRQNQVGVVPWSPPQSNWNPWTSSNIDEGPLAFATPEQISMDLKNELMYQLEQDHDLQAILQERELLPVKKFESEILEAISQNSVVIIRGATGCGKTTQVPQFILDDFIQNDRAAECNIVVTQPRRISAVSVAERVAFERGEEPGKSCGYSVRFESILPRPHASIMFCTVGVLLRKLEAGIRGISHVIVDEIHERDINTDFLLVVLRDVVQAYPEVRIVLMSATIDTSMFCEYFFNCPIIEVYGRTYPVQEYFLEDCIQMTHFVPPPKDKKKKDKDDDGGEDDDANCNLICGDEYGPETRLSMSQLNEKETPFELIEALLKYIETLNVPGAVLVFLPGWNLIYTMQKHLEMNPHFGSHRYQILPLHSQIPREEQRKVFDPVPVGVTKVILSTNIAETSITINDVVYVIDSCKQKVKLFTAHNNMTNYATVWASKTNLEQRKGRAGRVRPGFCFHLCSRARFERLETHMTPEMFRTPLHEIALSIKLLRLGGIGQFLAKAIEPPPLDAVIEAEHTLRGTYKYKPT

SEQ ID NO: 887394 - protein, 1263 aa, Homo sapiens
MGDVKNFLYAWCGKRKMTPSYEIRAVGNKNRQKFMCEVQVEGYNYTGMGNSTNKNEIKSEEVPAFGVASPPPLTDTPDTTANAEGDLPTTMGGPLPPHLALKAENNSEVGASGYGVPGPTWDRGANLKDYYSRKEEQEVQATLESEEVDLNAGLHGNWTLENAKARLNQYFQKEKIQGEYKYTQVGPDHNRSFIAEMTIYIKQLGRRIFAREHGSNKKLAAQSCALSLVRQLYHLGVVEAYSGLTKKKEGETVEPYKVNLSQDLEHQLQNIIQELNLEILPPPEDPSVPVALNIGKLAQFEPSQRQNQVGVVPWSPPQSNWNPWTSSNIDEGPLAFATPEQISMDLKNELMYQLEQDHDLQAILQERELLPVKKFESEILEAISQNSVVIIRGATGCGKTTQVPQFILDDFIQNDRAAECNIVVTQPRRISAVSVAERVAFERGEEPGKSCGYSVRFESILPRPHASIMFCTVGVLLRKLEAGIRGISHVIVDEIHERDINTDFLLVVLRDVVQAYPEVRIVLMSATIDTSMFCEYFFNCPIIEVYGRTYPVQEYFLEDCIQMTHFVPPPKDKKKKDKDDDGGEDDDANCNLICGDEYGPETRLSMSQLNEKETPFELIEALLKYIETLNVPGAVLVFLPGWNLIYTMQKHLEMNPHFGSHRYQILPLHSQIPREEQRKVFDPVPVGVTKVILSTNIAETSITINDVVYVIDSCKQKVKLFTAHNNMTNYATVWASKTNLEQRKGRAGRVRPGFCFHLCSRARFERLETHMTPEMFRTPLHEIALSIKLLRLGGIGQFLAKAIEPPPLDAVIEAEHTLRELDALDANDELTPLGRILAKLPIEPRFGKMMIMGCIFYVGDAICTIAAATCFPEPFINEGKRLGYIHRNFAGNRFSDHVALLSVFQAWDDARMGGEEAEIRFCEHKRLNMATLRMTWEAKVQLKEILINSGFPEDCLLTQVFTNTGPDNNLDVVISLLAFGVYPNVCYHKEKRKILTTEGRNALIHKSSVNCPFSSQDMKYPSPFFVFGEKIRTRAISAKGMTLVTPLQLLLFASKKVQSDGQIVLVDDWIKLQISHEAAACITGLRAAMEALVVEVTKQPAIISQLDPVNERMLNMIRQISRPSAAGINLMIGSTRYGDGPRPPKMARYDNGSGYRRGGSSYSGGGYGGGYSSGGYGSGGYGGSANSFRAGYGAGVGGGYRGVSRGGFRGNSGGDYRGPSGGYRGSGGFQRGGGRGAYGTGYLDIEEEVAAIKLGYVSSVCRQ

SEQ ID NO: 887395 - protein, 713 aa, Homo sapiens
MGDVKNFLYAWCGKRKMTPSYEIRAVGNKNRQKFMCEVQVEGYNYTGMGNSTNKKDAQSNAARDFVNYLVRINEIKSEEVPAFGVASPPPLTDTPDTTANAEGDLPTTMGGPLPPHLALKAENNSEVGASGYGVPGPTWDRGANLKDYYSRKEEQEVQATLESEEVDLNAGLHGNWTLENAKARLNQYFQKEKIQGEYKYTQVGPDHNRSFIAEMTIYIKQLGRRIFAREHGSNKKLAAQSCALSLVRQLYHLGVVEAYSGLTKKKEGETVEPYKVNLSQDLEHQLQNIIQELNLEILPPPEDPSVPVALNIGKLAQFEPSQRQNQVGVVPWSPPQSNWNPWTSSNIDEGPLAFATPEQISMDLKNELMYQLEQDHDLQAILQERELLPVKKFESEILEAISQNSVVIIRGATGCGKTTQVPQFILDDFIQNDRAAECNIVVTQPRRISAVSVAERVAFERGEEPGKSCGYSVRFESILPRPHASIMFCTVGVLLRKLEAGIRGISHVIVDEIHERDINTDFLLVVLRDVVQAYPEVRIVLMSATIDTSMFCEYFFNCPIIEVYGRTYPVQEYFLEDCIQMTHFVPPPKDKKKKDKDDDGGEDDDANCNLICGDEYGPETRLSMSQLNEKETPFELIEALLKYIETLNVPGAVLVFLPGWNLIYTMQKHLEMNPHFGSHRYQILPLHSQIPREEQRKVFDPVPVGVTKVNIKH

SEQ ID NO: 887396 - protein, 680 aa, Homo sapiens
MGDVKNFLYAWCGKRKMTPSYEIRAVGNKNRQKFMCEVQVEGYNYTGMGNSTNKKDAQSNAARDFVNYLVRINEIKSEEVPAFGVASPPPLTDTPDTTANAEGDLPTTMGGPLPPHLALKAENNSEVGASGYGVPGPTWDRGANLKDYYSRKEEQEVQATLESEEVDLNAGLHGNWTLENAKARLNQYFQKEKIQGEYKYTQVGPDHNRSFIAEMTIYIKQLGRRIFAREHGSNKKLAAQSCALSLVRQLYHLGVVEAYSGLTKKKEGETVEPYKVNLSQDLEHQLQNIIQELNLEILPPPEDPSVPVALNIGKLAQFEPSQRQNQVGVVPWSPPQSNWNPWTSSNIDEGPLAFATPEQISMDLKNELMYQLEQDHDLQAILQERELLPVKKFESEILEAISQNSVVIIRGATGCGKTTQVPQFILDDFIQNDRAAECNIVVTQPRRISAVSVAERVAFERGEEPGKSCGYSVRFESILPRPHASIMFCTVGVLLRKLEAGIRGISHVIVDEIHERDINTDFLLVVLRDVVQAYPEVRIVLMSATIDTSMFCEYFFNCPIIEVYGRTYPVQEYFLEDCIQMTHFVPPPKDKKKKDKDDDGGEDDDANCNLICGDEYGPETRLSMSQLNEKETPFELIEALLKYIETLNVPGAVLVFLPGWNLIYTMQKHLEMNPHFGMSL

SEQ ID NO: 887397 - protein, 908 aa, Homo sapiens
MDLKNELMYQLEQDHDLQAILQERELLPVKKFESEILEAISQNSVVIIRGATGCGKTTQVPQFILDDFIQNDRAAECNIVVTQPRRISAVSVAERVAFERGEEPGKSCGYSVRFESILPRPHASIMFCTVGVLLRKLEAGIRGISHVIVDEIHERDINTDFLLVVLRDVVQAYPEVRIVLMSATIDTSMFCEYFFNCPIIEVYGRTYPVQEYFLEDCIQMTHFVPPPKDKKKKDKDDDGGEDDDANCNLICGDEYGPETRLSMSQLNEKETPFELIEALLKYIETLNVPGAVLVFLPGWNLIYTMQKHLEMNPHFGSHRYQILPLHSQIPREEQRKVFDPVPVGVTKVILSTNIAETSITINDVVYVIDSCKQKVKLFTAHNNMTNYATVWASKTNLEQRKGRAGRVRPGFCFHLCSRARFERLETHMTPEMFRTPLHEIALSIKLLRLGGIGQFLAKAIEPPPLDAVIEAEHTLRELDALDANDELTPLGRILAKLPIEPRFGKMMIMGCIFYVGDAICTIAAATCFPEPFINEGKRLGYIHRNFAGNRFSDHVALLSVFQAWDDARMGGEEAEIRFCEHKRLNMATLRMTWEAKVQLKEILINSGFPEDCLLTQVFTNTGPDNNLDVVISLLAFGVYPNVCYHKEKRKILTTEGRNALIHKSSVNCPFSSQDMKYPSPFFVFGEKIRTRAISAKGMTLVTPLQLLLFASKKVQSDGQIVLVDDWIKLQISHEAAACITGLRAAMEALVVEVTKQPAIISQLDPVNERMLNMIRQISRPSAAGINLMIGSTRYGDGPRPPKMARYDNGSGYRRGGSSYSGGGYGGGYSSGGYGSGGYGGSANSFGQDMVQVLVEAIEEFPEVALEATLEETTEGLVEATEDLGDSSEEVVGGPMELATWTLKRRWRL

SEQ ID NO: 887398 - protein, 466 aa, Homo sapiens
MGDVKNFLYAWCGKRKMTPSYEIRAVGNKNRQKFMCEVQVEGYNYTGMGNSTNKKDAQSNAARDFVNYLVRINEIKSEEVPAFGVASPPPLTDTPDTTANAEGDLPTTMGGPLPPHLALKAENNSEVGASGYGVPGPTWDRGANLKDYYSRKEEQEVQATLESEEVDLNAGLHGNWTLENAKARLNQYFQKEKIQGEYKYTQVGPDHNRSFIAEMTIYIKQLGRRIFAREHGSNKKLAAQSCALSLVRQLYHLGVVEAYSGLTKKKEGETVEPYKVNLSQDLEHQLQNIIQELNLEILPPPEDPSVPVALNIGKLAQFEPSQRQNQVGVVPWSPPQSNWNPWTSSNIDEGPLAFATPEQISMDLKNELMYQLEQDHDLQAILQERELLPVKKFESEILEAISQNSVVIIRGATGCGKTTQVPQFILDDFIQNDRAAECNIVVTQVSGKPTMKYLESRLFLILSLIN

SEQ ID NO: 887399 - protein, 598 aa, Homo sapiens
SENAGVESDTDGFQNVDSFPNGVTKVILSTNIAETSITINDVVYVIDSCKQKVKLFTAHNNMTNYATVWASKTNLEQRKGRAGRVRPGFCFHLCSRARFERLETHMTPEMFRTPLHEIALSIKLLRLGGIGQFLAKAIEPPPLDAVIEAEHTLRELDALDANDELTPLGRILAKLPIEPRFGKMMIMGCIFYVGDAICTIAAATCFPEPFINEGKRLGYIHRNFAGNRFSDHVALLSVFQAWDDARMGGEEAEIRFCEHKRLNMATLRMTWEAKVQLKEILINSGFPEDCLLTQVFTNTGPDNNLDVVISLLAFGVYPNVCYHKEKRKILTTEGRNALIHKSSVNCPFSSQDMKYPSPFFVFGEKIRTRAISAKGMTLVTPLQLLLFASKKVQSDGQIVLVDDWIKLQISHEAAACITGLRAAMEALVVEVTKQPAIISQLDPVNERMLNMIRQISRPSAAGINLMIGSTRYGDGPRPPKMARYDNGSGYRRGGSSYSGGGYGGGYSSGGYGSGGYGGSANSFRAGYGAGVGGGYRGVSRGGFRGNSGGDYRGPSGGYRGSGGFQRGGGRGAYGTGYLDIEEEVAAIKLGYVSSVCRQ

SEQ ID NO: 887400 - protein, 218 aa, Homo sapiens [sequence omitted]

SEQ ID NO: 887401 - protein, 466 aa, Homo sapiens
CVGDLEDPAPTGCCDEAEHTLRELDALDANDELTPLGRILAKLPIEPRFGKMMIMGCIFYVGDAICTIAAATCFPEPFINEGKRLGYIHRNFAGNRFSDHVALLSVFQAWDDARMGGEEAEIRFCEHKRLNMATLRMTWEAKVQLKEILINSGFPEDCLLTQVFTNTGPDNNLDVVISLLAFGVYPNVCYHKEKRKILTTEGRNALIHKSSVNCPFSSQDMKYPSPFFVFGEKIRTRAISAKGMTLVTPLQLLLFASKKVQSDGQIVLVDDWIKLQISHEAAACITGLRAAMEALVVEVTKQPAIISQLDPVNERMLNMIRQISRPSAAGINLMIGSTRYGDGPRPPKMARYDNGSGYRRGGSSYSGGGYGGGYSSGGYGSGGYGGSANSFRAGYGAGVGGGYRGVSRGGFRGNSGGDYRGPSGGYRGSGGFQRGGGRGAYGTGYLDIEEEVAAIKLGYVSSVCRQ

SEQ ID NO: 887402 - protein, 428 aa, Homo sapiens
MVGLDSGGDRRELNRIGVNAGGVGDAICTIAAATCFPEPFINEGKRLGYIHRNFAGNRFSDHVALLSVFQAWDDARMGGEEAEIRFCEHKRLNMATLRMTWEAKVQLKEILINSGFPEDCLLTQVFTNTGPDNNLDVVISLLAFGVYPNVCYHKEKRKILTTEGRNALIHKSSVNCPFSSQDMKYPSPFFVFGEKIRTRAISAKGMTLVTPLQLLLFASKKVQSDGQIVLVDDWIKLQISHEAAACITGLRAAMEALVVEVTKQPAIISQLDPVNERMLNMIRQISRPSAAGINLMIGSTRYGDGPRPPKMARYDNGSGYRRGGSSYSGGGYGGGYSSGGYGSGGYGGSANSFRAGYGAGVGGGYRGVSRGGFRGNSGGDYRGPSGGYRGSGGFQRGGGRGAYGTGYLDIEEEVAAIKLGYVSSVCRQ

SEQ ID NO: 887403 - protein, 410 aa, Homo sapiens
LRSGSIVCSTQLGTPSLFPEPFINEGKRLGYIHRNFAGNRFSDHVALLSVFQAWDDARMGGEEAEIRFCEHKRLNMATLRMTWEAKVQLKEILINSGFPEDCLLTQVFTNTGPDNNLDVVISLLAFGVYPNVCYHKEKRKILTTEGRNALIHKSSVNCPFSSQDMKYPSPFFVFGEKIRTRAISAKGMTLVTPLQLLLFASKKVQSDGQIVLVDDWIKLQISHEAAACITGLRAAMEALVVEVTKQPAIISQLDPVNERMLNMIRQISRPSAAGINLMIGSTRYGDGPRPPKMARYDNGSGYRRGGSSYSGGGYGGGYSSGGYGSGGYGGSANSFRAGYGAGVGGGYRGVSRGGFRGNSGGDYRGPSGGYRGSGGFQRGGGRGAYGTGYLDIEEEVAAIKLGYVSSVCRQ

SEQ ID NO: 887404 - protein, 447 aa, Homo sapiens
MGEDTDTRKINHSFLRDHSYVTEADIISTVEFNHTGELLATGDKGGRVVIFQREPESKNAPHSQGEYDVYSTFQSHEPEFDYLKSLEIEEKINKIKWLPQQNAAHSLLSTNDKTIKLWKITERDKRPEGYNLKDEEGKLKDLSTVTSLQVPVLKPMDLMVEVSPRRIFANGHTYHINSISVNSDCETYMSADDLRINLWHLAITDRSFNIVDIKPANMEDLTEVITASEFHPHHCNLFVYSSSKGSLRLCDMRAAALCDKHSKLFEEPEDPSNRSFFSEIISSVSDVKFSHSGRYMLTRDYLTVKVWDLNMEARPIETYQVHDYLRSKLCSLYENDCIFDKFECAWNGSDSVIMTGAYNNFFRMFDRNTKRDVTLEASRESSKPRAVLKPRRVCVGGKRRRDDISVDSLDFTKKILHTAWHPAENIIAIAATNNLYIFQDKVNSDMH

SEQ ID NO: 887405 - protein, 447 aa, Homo sapiens; identical to SEQ ID NO: 887404

SEQ ID NO: 887406 - protein, 455 aa, Homo sapiens
TCKKWGLEMGLSFFSKHLPIQEGQPWALKTPADIISTVEFNHTGELLATGDKGGRVVIFQREPESKNAPHSQGEYDVYSTFQSHEPEFDYLKSLEIEEKINKIKWLPQQNAAHSLLSTNDKTIKLWKITERDKRPEGYNLKDEEGKLKDLSTVTSLQVPVLKPMDLMVEVSPRRIFANGHTYHINSISVNSDCETYMSADDLRINLWHLAITDRSFNIVDIKPANMEDLTEVITASEFHPHHCNLFVYSSSKGSLRLCDMRAAALCDKHSKLFEEPEDPSNRSFFSEIISSVSDVKFSHSGRYMLTRDYLTVKVWDLNMEARPIETYQVHDYLRSKLCSLYENDCIFDKFECAWNGSDSVIMTGAYNNFFRMFDRNTKRDVTLEASRESSKPRAVLKPRRVCVGGKRRRDDISVDSLDFTKKILHTAWHPAENIIAIAATNNLYIFQDKVNSDMH

SEQ ID NO: 887407 - protein, 433 aa, Homo sapiens
MPSHRMPSEADIISTVEFNHTGELLATGDKGGRVVIFQREPESKNAPHSQGEYDVYSTFQSHEPEFDYLKSLEIEEKINKIKWLPQQNAAHSLLSTNDKTIKLWKITERDKRPEGYNLKDEEGKLKDLSTVTSLQVPVLKPMDLMVEVSPRRIFANGHTYHINSISVNSDCETYMSADDLRINLWHLAITDRSFNIVDIKPANMEDLTEVITASEFHPHHCNLFVYSSSKGSLRLCDMRAAALCDKHSKLFEEPEDPSNRSFFSEIISSVSDVKFSHSGRYMLTRDYLTVKVWDLNMEARPIETYQVHDYLRSKLCSLYENDCIFDKFECAWNGSDSVIMTGAYNNFFRMFDRNTKRDVTLEASRESSKPRAVLKPRRVCVGGKRRRDDISVDSLDFTKKILHTAWHPAENIIAIAATNNLYIFQDKVNSDMH

SEQ ID NO: 887408 - protein, 440 aa, Homo sapiens
  misc_feature (5)..(5): Xaa can be any naturally occurring amino acid
MREAXTLRPPQLMEVSADIISTVEFNHTGELLATGDKGGRVVIFQREPESKNAPHSQGEYDVYSTFQSHEPEFDYLKSLEIEEKINKIKWLPQQNAAHSLLSTNDKTIKLWKITERDKRPEGYNLKDEEGKLKDLSTVTSLQVPVLKPMDLMVEVSPRRIFANGHTYHINSISVNSDCETYMSADDLRINLWHLAITDRSFNIVDIKPANMEDLTEVITASEFHPHHCNLFVYSSSKGSLRLCDMRAAALCDKHSKLFEEPEDPSNRSFFSEIISSVSDVKFSHSGRYMLTRDYLTVKVWDLNMEARPIETYQVHDYLRSKLCSLYENDCIFDKFECAWNGSDSVIMTGAYNNFFRMFDRNTKRDVTLEASRESSKPRAVLKPRRVCVGGKRRRDDISVDSLDFTKKILHTAWHPAENIIAIAATNNLYIFQDKVNSDMH

SEQ ID NO: 887409 - protein, 319 aa, Homo sapiens
PIEAKELGKRLKDLSTVQSLQVPVLKPMDLMVEVSPRRIFANGHTYHINSISVNSDCETYMSADDLRINLWHLAITDRSFNIVDIKPANMEDLTEVITASEFHPHHCNLFVYSSSKGSLRLCDMRAAALCDKHSKLFEEPEDPSNRSFFSEIISSVSDVKFSHSGRYMLTRDYLTVKVWDLNMEARPIETYQVHDYLRSKLCSLYENDCIFDKFECAWNGSDSVIMTGAYNNFFRMFDRNTKRDVTLEASRESSKPRAVLKPRRVCVGGKRRRDDISVDSLDFTKKILHTAWHPAENIIAIAATNNLYIFQDKVNSDMH

SEQ ID NO: 887410 - protein, 387 aa, Homo sapiens
TCKKWGLEMGLSFFSKHLPIQEGQPWALKTPADIISTVEFNHTGELLATGDKGGRVVIFQREPESKNAPHSQGEYDVYSTFQSHEPEFDYLKSLEIEEKINKIKWLPQQNAAHSLLSTNDKTIKLWKITERDKRPEGYNLKDEEGKLKDLSTVTSLQVPVLKPMDLMVEVSPRRIFANGHTYHINSISVNSDCETYMSADDLRINLWHLAITDRSFNIVDIKPANMEDLTEVITASEFHPHHCNLFVYSSSKGSLRLCDMRAAALCDKHSKLFEEPEDPSNRSFFSEIISSVSDVKFSHSGRYMLTRDYLTVKVWDLNMEARPIETYQVHDYLRSKLCSLYENDCIFDKFECAWNGSDSVIMTGAYNNFFRMFARRPCCINTPARRA

SEQ ID NO: 887411 - protein, 496 aa, Homo sapiens
TCKKWGLEMGLSFFSKHLPIQEGQPWALKTPADIISTVEFNHTGELLATGDKGGRVVIFQREPESKNAPHSQGEYDVYSTFQSHEPEFDYLKSLEIEEKINKIKWLPQQNAAHSLLSTNDKTIKLWKITERDKRPEGYNLKDEEGKLKDLSTVTSLQVPVLKPMDLMVEVSPRRIFANGHTYHINSISVNSDCETYMSADDLRINLWHLAITDRSFNIVDIKPANMEDLTEVITASEFHPHHCNLFVYSSSKGSLRLCDMRAAALCDKHSKLFEEPEDPSNRSFFSEIISSVSDVKFSHSGRYMLTRDYLTVKVWDLNMEARPIETYQVHDYLRSKLCSLYENDCIFDKFECAWNGSDSVIMTGAYNNFFRMFASSVHAVSMGTVDIWAPGGREGPQISRAPKGRGGMLRVLNKEGVGTWTSGYQGMKTEVEEALGHPDSWVFLERGWGSRHLGLRGEGLGSGLLGSQERSSQDPGHTESTLQEMTGSQMFTWGSL

SEQ ID NO: 887412 - protein, 397 aa, Homo sapiens
TCKKWGLEMGLSFFSKHLPIQEGQPWALKTPADIISTVEFNHTGELLATGDKGGRVVIFQREPESKNAPHSQGEYDVYSTFQSHEPEFDYLKSLEIEEKINKIKWLPQQNAAHSLLSTNDKTIKLWKITERDKRPEGYNLKDEEGKLKDLSTVTSLQVPVLKPMDLMVEVSPRRIFANGHTYHINSISVNSDCETYMSADDLRINLWHLAITDRSFNIVDIKPANMEDLTEVITASEFHPHHCNLFVYSSSKGSLRLCDMRAAALCDKHSKLFEEPEDPSNRSFFSEIISSVSDVKFSHSGRYMLTRDYLTVKVWDLNMEARPIETYQVHDYLRSKLCSLYENDCIFDKFECAWNGSDSVIINAVRSLALLRGLRIWSCLELWYRWRMQIGSGVAGN

SEQ ID NO: 887413 - protein, 364 aa, Homo sapiens
TCKKWGLEMGLSFFSKHLPIQEGQPWALKTPADIISTVEFNHTGELLATGDKGGRVVIFQREPESKNAPHSQGEYDVYSTFQSHEPEFDYLKSLEIEEKINKIKWLPQQNAAHSLLSTNDKTIKLWKITERDKRPEGYNLKDEEGKLKDLSTVTSLQVPVLKPMDLMVEVSPRRIFANGHTYHINSISVNSDCETYMSADDLRINLWHLAITDRSFNIVDIKPANMEDLTEVITASEFHPHHCNLFVYSSSKGSLRLCDMRAAALCDKHSKLFEEPEDPSNRSFFSEIISSVSDVKFSHSGRYMLTRDYLTVKVWDLNMEARPIETYQVGTTAGDPQSRVFFPYAEIPMEGAFLARRGFHMPSM

SEQ ID NO: 887414 - protein, 567 aa, Homo sapiens
MAQPPRLSRSGASSLWDPASPAPTSGPRPRLWEGQDVLARWTDGLLYLGTIKKVDSAREVCLVQFEDDSQFLVLWKDISPAALPGEELLCCVCRSETVVPGNRLVSCEKCRHAYHQDCHVPRAPAPGEGEGTSWVCRQCVFAIATKRGGALKKGPYARAMLGMKLSLPYGLKGLDWDAGHLSNRQQSYCYCGGPGEWNLKMLQCRSCLQWFHEACTQCLSKPLLYGDRFYEFECCVCRGGPEKVRRLQLRWVDVAHLVLYHLSVCCKKKYFDFDREILPFTSENWDSLLLGELSDTPKGERSSKLLSALNSHKDRFISGREIKKRKCLFGLHARMPPPVEPPTGDGALTSFPSGQGPGGGVSRPLGKRRRPEPEPLRRRQKGKVEELGPPSAVRNQPEPQEQRERAHLQRALQASVSPPSPSPNQSYQGSSGYNFRPTDARCLPSSPIRMFASFHPSASTAGTSGDSGPPDRSPLELHIGFPTDIPKSAPHSMTASSSSVSSPSPGLPRRSAPPSPLCRSLSPGTGGGVRGGVGYLSRGDPVRVLARRVRPDGSVQYLVEWGGGGIF

SEQ ID NO: 887415 - protein, 454 aa, Homo sapiens
MAQPPRLSRSGASSLWDPASPAPTSGPRPRLWEGQDVLARWTDGLLYLGTIKKVDSAREVCLVQFEDDSQFLVLWKDISPAALPGEELLCCVCRSETVVPGNRLVSCEKCRHAYHQDCHVPRAPAPGEGEGTSWVCRQCVFAIATKRGGALKKGPYARAMLGMKLSLPYGLKGLDWDAGHLSNRQQSYCYCGGPGEWNLKMLQCRSCLQWFHEACTQCLSKPLLYGDRFYEFECCVCRGGPEKVRRLQLRWVDVAHLVLYHLSVCCKKKYFDFDREILPFTSENWDSLLLGELSDTPKGERSSKLLSALNSHKDRFISGREIKKRKCLFGLHARMPPPVEPPTGDGALTSFPSGQGPGGGVSRPLGKRRRPEPEPLRRRQKGKVEELGPPSAVRNQPEPQEQRERAHLQRALQQPHPDVCFLPPFCQHRRDLWGQWTPRQVTPGTSHWFPHRHP

SEQ ID NO: 887416 - protein, 573 aa, Homo sapiens
MVDVAAEGTPQGSLKPGASSLWDPASPAPTSGPRPRLWEGQDVLARWTDGLLYLGTIKKVDSAREVCLVQFEDDSQFLVLWKDISPAALPGEELLCCVCRSETVVPGNRLVSCEKCRHAYHQDCHVPRAPAPGEGEGTSWVCRQCVFAIATKRGGALKKGPYARAMLGMKLSLPYGLKGLDWDAGHLSNRQQSYCYCGGPGEWNLKMLQCRSCLQWFHEACTQCLSKPLLYGDRFYEFECCVCRGGPEKVRRLQLRWVDVAHLVLYHLSVCCKKKYFDFDREILPFTSENWDSLLLGELSDTPKGERSSKLLSALNSHKDRFISGREIKKRKCLFGLHARMPPPVEPPTGDGALTSFPSGQGPGGGVSRPLGKRRRPEPEPLRRRQKGKVEELGPPSAVRNQPEPQEQRERAHLQRALQASVSPPSPSPNQSYQGSSGYNFRPTDARCLPSSPIRMFASFHPSASTAGTSGDSGPPDRSPLELHIGFPTDIPKSAPHSMTASSSSVSSPSPGLPRRSAPPSPLCRSLSPGTGGGVRGGVGYLSRGDPVRVLARRVRPDGSVQYLVEWGGGGIF

SEQ ID NO: 887417 - protein, 398 aa, Homo sapiens [sequence omitted]

SEQ ID NO: 887418 - protein, 415 aa, Homo sapiens
MAQPPRLSRSGASSLWDPASPAPTSGPRPRLWEGQDVLARWTDGLLYLGTIKKVDSAREVCLVQFEDDSQFLVLWKDISPAALPGEELLCCVCRSETVVPGNRLVSCEKCRHAYHQDCHVPRAPAPGEGEGTSWVCRQCVFAIATKRGGALKKGPYARAMLGMKLSLPYGLKGLDWDAGHLSNRQQSYCYCGGPGELSNERGADCGMNDVVVDAQEMKEKEQDERRRQKGKVEELGPPSAVRNQPEPQEQRERAHLQRALQASVSPPSPSPNQSYQGSSGYNFRPTDARCLPSSPIRMFASFHPSASTAGTSGDSGPPDRSPLELHIGFPTDIPKSAPHSMTASSSSVSSPSPGLPRRSAPPSPLCRSLSPGTGGGVRGGVGYLSRGDPVRVLARRVRPDGSVQYLVEWGGGGIF

SEQ ID NO: 887419 - protein, 190 aa, Homo sapiens
LLPTHPGTAQSHQAVLSEQGPGQGPLGTGNQTPPRTASVSPPSPSPNQSYQGSSGYNFRPTDARCLPSSPIRMFASFHPSASTAGTSGDSGPPDRSPLELHIGFPTDIPKSAPHSMTASSSSVSSPSPGLPRRSAPPSPLCRSLSPGTGGGVRGGVGYLSRGDPVRVLARRVRPDGSVQYLVEWGGGGIF

SEQ ID NO: 887420 - protein, 595 aa, Homo sapiens
MAQPPRLSRSGASSLWDPASPAPTSGPRPRLWEGQDVLARWTDGLLYLGTIKKVDSAREVCLVQFEDDSQFLVLWKDISPAALPGEELLCCVCRSETVVPGNRLVSCEKCRHAYHQDCHVPRAPAPGEGEGTSWVCRQCVFAIATKRGGALKKGPYARAMLGMKLSLPYGLKGLDWDAGHLSNRQQSYCYCGGPGEWNLKMLQCRSCLQWFHEACTQCLSKPLLYGDRFYEFECCVCRGGPEKVRRLQLRWVDVAHLVLYHLSVCCKKKYFDFDREILPFTSENWDSLLLGELSDTPKGERSSKLLSALNSHKDRFISGREIKKRKCLFGLHARMPPPVEPPTGDGALTSFPSGQGPGGGVSRPLGKRRRPEPEPLRRRQKGKVEELGPPSAVRNQPEPQEQRERAHLQRALQASVSPPSPSPNQSYQGSSGYNFRPTDARCLPSSPIRMFASFHPSASTAGTSGDSGPPDRSPLELHIGFPTDIPKSAPHSMTASSSSVSSPSPGLPRRSAPPSPLMALCSTWLSGEEGASSEQPASAQLPIHTHRHFHTLTSDLTYSWDVPGEIGGSSPYCPGWNPRVGSGEEALFSTLLHDS

SEQ ID NO: 887421 - protein, 104 aa, Homo sapiens
KDYSCPNTKHTQVCNKWSTIITAAYHQDCHVPRAPAPGEGEGTSWVCRQCVFAIATKVKALPCYPSCGSLPSTASPKPFPLPTPLKPPTCPVSAEGRCPEEGPL

SEQ ID NO: 887422 - protein, 110 aa, Homo sapiens
SSCRCRCFGCCVIRPRAAGTEGLGLGTPRPPPARPPTPGRALSARGTRLGLLRLPLPGSRRPQLSPAPPGCNGAAPPAEPLWCLLTLGPSFSCSHKSGEWGRGPLLYPPS

SEQ ID NO: 887423 - protein, 609 aa, Homo sapiens
MAQPPRLSRSGASSLWDPASPAPTSGPRPRLWEGQDVLARWTDGLLYLGTIKKVDSAREVCLVQFEDDSQFLVLWKDISPAALPGEELLCCVCRSETVVPGNRLVSCEKCRHAYHQDCHVPRAPAPGEGEGTSWVCRQCVFAIATKRGGALKKGPYARAMLGMKLSLPYGLKGLDWDAGHLSNRQQSYCYCGGPGEWNLKMLQCRSCLQWFHEACTQCLSKPLLYGDRFYEFECCVCRGGPEKVRRLQLRWVDVAHLVLYHLSVCCKKKYFDFDREILPFTSENWDSLLLGELSDTPKGERSSKLLSALNSHKDRFISGREIKKRKCLFGLHARMPPPVEPPTGDGALTRSLVQGEMGEILRVLVLGGICIEMGRSWGCPGGGWGDKEASYSFPSGQGPGGGVSRPLGKRRRPEPEPLRRRQKGKVEELGPPSAVRNQPEPQEQRERAHLQRALQASVSPPSPSPNQSYQGSSGYNFRPTDARCLPSSPIRMFASFHPSASTAGTSGDSGPPDRSPLELHIGFPTDIPKSAPHSMTASSSSVSSPSPGLPRRSAPPSPLCRSLSPGTGGGVRGGVGYLSRGDPVRVLARRVRPDGSVQYLVEWGGGGIF

SEQ ID NO: 887424 - protein, 196 aa, Homo sapiens
MAQPPRLSRSGASSLWDPASPAPTSGPRPRLWEGQDVLARWTDGLLYLGTIKKVDSAREVCLVQFEDDSQFLVLWKDISPAALPGEELLCCVCRSETVVPGNRLVSCEKCRHAYHQDCHVPRAPAPGEGEGTSWVCRQCVFAIATKRGGALKKGPYARAMLGMKLSLPYGLKGLDWDAGHLSNRQQSYCYCGGPGE

SEQ ID NO: 887425 - protein, 567 aa, Homo sapiens; identical to SEQ ID NO: 887414

SEQ ID NO: 887426 - protein, 103 aa, Homo sapiens
MTASSSSVSSPSPGLPRRSAPPSPLMALCSTWLSGEEGASSEQPASAQLPIHTHRHFHTLTSDLTYSWDVPGEIGGSSPYCPGWNPRVGSGEEALFSTLLHDS

SEQ ID NO: 887427 - protein, 808 aa, Homo sapiens
MLRFPTCFPSFRVVGEKQLPQEIIFLVWSPKRDLIALANTAGEVLLHRLASFHRVWSFPPNENTGKEVTCLAWRPDGKLLAFALADTKKIVLCDVEKPESLHSFSVEAPVSCMHWMEVTVESSVLTSFYNAEDESNLLLPKLPTLPKNYSNTSKIFSEENSDEIIKLLGDVRLNILVLGGSSGFIELYAYGMFKIARVTGIAGTCLALCLSSDLKSLSVVTEVSTNGASEVSYFQLETNLLYSFLPEVTRMARKFTHISALLQYINLSLTCMCEAWEEILMQMDSRLTKFVQEKNTTTSVQDEFMHLLLWGKASAELQTLLMNQLTVKGLKKLGQSIESSYSSIQKLVISHLQSGSESLLYHLSELKGMASWKQKYEPLGLDAAGIEEAITAVGSFILKANELLQVIDSSMKNFKAFFRWLYVAMLRMTEDHVLPELNKMTQKDITFVAEFLTEHFNEAPDLYNRKGKYFNVERVGQYLKDEDDDLVSPPNTEGNQWYDFLQNSSHLKESPLLFPYYPRKSLHFVKRRMENIIDQCLQKPADVIGKSMNQAICIPLYRDTRSEDSTRRLFKFPFLWNNKTSNLHYLLFTILEDSLYKMCILRRHTDISQSVSNGLIAIKFGSFTYATTEKVRRSIYSCLDAQFYDDETVTVVLKDTVGREGRDRLLVQLPLSLVYNSEDSAEYQFTGTYSTRLDEQCSAIPTRTMHFEKHWRLLESMKAQYVAGNGFRKVSCVLSSNLRHVRVFEMDIDDEWELDESSDEEEEASNKPVKIKEEVLSESEAENQQAGAAALAPEIVIKVEKLDPELDS

SEQ ID NO: 887428 - protein, 551 aa, Homo sapiens
MLRFPTCFPSFRVVGEKQLPQEIIFLVWSPKRDLIALANTAGEVLLHRLASFHRVWSFPPNENTGKEVTCLAWRPDGKLLAFALADTKKIVLCDVEKPESLHSFSVEAPVSCMHWMEVTVESSVLTSFYNAEDESNLLLPKLPTLPKNYSNTSKIFSEENSDEIIKLLGDVRLNILVLGGSSGFIELYAYGMFKIARVTGIAGTCLALCLSSDLKSLSVVTEVSTNGASEVSYFQLETNLLYSFLPEVTRMARKFTHISALLQYINLSLTCMCEAWEEILMQMDSRLTKFVQEKNTTTSVQDEFMHLLLWGKASAELQTLLMNQLTVKGLKKLGQSIESSYSSIQKLVISHLQSGSESLLYHLSELKGMASWKQKYEPLGLDAAGIEEAITAVGSFILKANELLQVIDSSMKNFKAFFRWLYVAMLRMTEDHVLPELNKMTQKDITFVAEFLTEHFNEAPDLYNRKGKYFNVERVGQYLKDEDDDLVSPPNTEGNQWYDFLQNSSHLKESPLLFPYYPRKSLHFVKRRMENIIDQCLQKPAVSLKEMHVFV

SEQ ID NO: 887429 - protein, 414 aa, Homo sapiens
MEGPISSYSCLLIHICWKVDSEARMEPPIHTEYLRSGGAMILRRWMQSTASNAALHQRREHFNEAPDLYNRKGKYFNVERVGQYLKDEDDDLVSPPNTEGNQWYDFLQNSSHLKESPLLFPYYPRKSLHFVKRRMENIIDQCLQKPADVIGKSMNQAICIPLYRDTRSEDSTRRLFKFPFLWNNKTSNLHYLLFTILEDSLYKMCILRRHTDISQSVSNGLIAIKFGSFTYATTEKVRRSIYSCLDAQFYDDETVTVVLKDTVGREGRDRLLVQLPLSLVYNSEDSAEYQFTGTYSTRLDEQCSAIPTRTMHFEKHWRLLESMKAQYVAGNGFRKVSCVLSSNLRHVRVFEMDIDDEWELDESSDEEEEASNKPVKIKEEVLSESEAENQQAGAAALAPEIVIKVEKLDPELDS

SEQ ID NO: 887430 - protein, 405 aa, Homo sapiens
MLRFPTCFPSFRVVGEKQLPQEIIFLVWSPKRDLIALANTAGEVLLHRLASFHRVWSFPPNENTGKEVTCLAWRPDGKLLAFALADTKKIVLCDVEKPESLHSFSVEAPVSCMHWMEVTVESSVLTSFYNAEDESNLLLPKLPTLPKNYSNTSKIFSEENSDEIIKLLGDVRLNILVLGGSSGFIELYAYGMFKIARVTGIAGTCLALCLSSDLKSLSVVTEVSTNGASEVSYFQLETNLLYSFLPEVTRMARKFTHISALLQYINLSLTCMCEAWEEILMQMDSRLTKFVQEKNTTTSVQDEFMHLLLWGKASAELQTLLMNQLTVKGLKKLGQSIESSYSSIQKLVISHLQSGSESLLYHLSELKGMASWKQKYEPLGLDAAGIEEAITAVGSFILKANELLQ

SEQ ID NO: 887431 - protein, 149 aa, Homo sapiens
  misc_feature (12)..(12): Xaa can be any naturally occurring amino acid
YRILRGYWNRTXDPSGCRNSARACRAVPMLRFPTCFPSFRVVGEKQLPQEIIFLVWSPKRDLIALANTAGEVLLHRLASFHRVWSFPPNENTGKEVTCLAWRPDGKRNDNITKKICFYFHKEYSVKPIFRKDLLFLVYIRIINISLGTF

SEQ ID NO: 887432 - protein, 551 aa, Homo sapiens; identical to SEQ ID NO: 887428

SEQ ID NO: 887433 - protein, 211 aa, Homo sapiens [sequence omitted]

SEQ ID NO: 887434 - protein, 70 aa, Homo sapiens
LHFALVRARWLSGLWNISPDSPGDRGQQHSATQWDSCVPAEGVVLIPGKGMHGLTLYKRPRCWWPTYFFF

SEQ ID NO: 887435 - protein, 875 aa, Homo sapiens
CASRPTLNKKKKSKVKPKKIQQGEEEEKEFSGEIEAVPVTGTGRVNLHEGNTWCPFFLGVQSLPLDGSGAAEKDGVSSSFSSSSWKRVSSSESDFSDAEGGMQSKMRSYQAKVRQGALVCFLSTIKSIEKKVLYGYWSAFIPDTPELGSPQSVSLMTLTLKDPSPKTRACALQVLSAILEGSKQFLSVAEDTSDHRRAFTPFSVMIACSIRELHRCLLLALVAESSSQTVTQIIKCLANLVSNAPYDRLKLSLLTKVWNQIKPYIRHKDVNVRVSSLTLLGAIVSTHAPLPEVQLLLQQPCSSGLGNSNSATPHLSPPDWWKKAPAGPSLEETSVSSPKGSSEPCWLIRLCISIVVLPKEDSCSGSDAGSAAGSTYEPSPMRLEALQVLTLLARGYFSMTQAYLMELGEVICKCMGEADPSIQLHGAKLLEELGTGLIQQYKPDSTAAPDQRAPVFLVVMFWTMMLNGPLPRALQNSEHPTLQASACDALSSILPEAFSNLPNDRQMLCITVLLGLNDSKNRLVKAATSRALGVYVLFPCLRQDVIFVADAANAILMSLEDKSLNVRAKAAWSLGNLTDTLIVNMETPDPSFQEEFSGLLLLKMLRSAIEASKDKDKVKSNAVRALGNLLHFLQPSHIEKPTFAEIIEESIQALISTVLTEAAMKVRWNACYAMGNVFKNPALPLGTAPWTSQAYNALTSVVTSCKNFKVRIRSAAALSVPGKREQYGSVDQYARIWNALVTALQKSEDTIDFLEFKYCVSLRTQICQALIHLLSLASASDLPCMKETLELSGNMVQSYILQFLKSGAEGDDTGAPHSPQERDQMVRMALKHMGSIQAPTGDTARRAIMGFLEEILAVCFDSSGSQGALPGLTNQ

SEQ ID NO: 887436 - protein, 875 aa, Homo sapiens; identical to SEQ ID NO: 887435

SEQ ID NO: 887437 - protein, 579 aa, Homo sapiens
LVWPATRVPCGQTLPGVRANYQRSGAGASVRVCACVCASAVEGGDQLLHTFNTALKRESERETGDAQIPPRSPKPTVPQIIVQSPKNRNRGNEQQLNMDEGIPHLQERQLLEHRDFIGLDYSSLYMCKPKRSMKRDDTKDTYKLPHRLIEKKRRDRINECIAQLKDLLPEHLKLTTLGHLEKAVVLELTLKHLKALTALTEQQHQKIIALQNGERSLKSPIQSDLDAFHSGFQTCAKEVLQYLSRFESWTPREPRCVQLINHLHAVATQFLPTPQLLTQQVPLSKGTGAPSAAGSAAAPCLERAGQKLEPLAYCVPVIQRTQPSAELAAENDTDTDSGYGGEAEARPDREKGKGAGASRVTIKQEPPGEDSPAPKRMKLDSRGGGSGGGPGGGAAAAAAALLGPDPAAAAALLRPDAALLSSLVAFGGGGGAPFPQPAAAAAPFCLPFCFLSPSAAAAYVQPFLDKSGLEKYLYPAAAAAPFPLLYPGIPAPAAAAAAAAAAAAAAAAFPCLSSVLSPPPEKAGAAAATLLPHEVAPLGAPHPQHPHGRTHLPFAGPREPGNPESSAQEDPSQPGKEAP

SEQ ID NO: 887438 - protein, 203 aa, Homo sapiens
MKLDSRGGGSGGGPGGGAAAAAAALLGPDPAAAAALLRPDAALLSSLVAFGGGGGAPFPQPAAAAAPFCLPFCFLSPSAAAAYVQPFLDKSGLEKYLYPAAAAAPFPLLYPGIPAPAAAAAAAAAAAAAAAAFPCLSSVLSPPPEKAGAAAATLLPHEVAPLGAPHPQHPHGRTHLPFAGPREPGNPESSAQEDPSQPGKEAP

SEQ ID NO: 887439 - protein, 203 aa, Homo sapiens; identical to SEQ ID NO: 887438

SEQ ID NO: 887440 - protein, 203 aa, Homo sapiens; identical to SEQ ID NO: 887438

SEQ ID NO: 887441 - protein, 209 aa, Homo sapiens
MKLDSRGGGSGGGPGGGAAAAAAALLGPDPAAAAALLRPDAALLSSLVAFGGGGGAPFPQPAAAAAPFCLPFCFLSPSAAAAYVQPFLDKSGLEKYLYPAAAAAPFPLLYPGIPPPPPRSPACPRCCRPLPRRRAPPPRPSCRTRWRPLGRRTPSTRTAAPTCPSPGPASRGTRRALLRKIPRSQERKLPESLRPEGRRFKQSEKLKYP

SEQ ID NO: 887442 - protein, 208 aa, Homo sapiens
LVWPATRVPCGQTLPGVRANYQRSGAGASVRVCACVCASAVEGGDQLLHTFNTALKRESERETGDAQIPPRSPKPTVPQIIVQSPKNRNRGNEQQLNMDEGIPHLQERQLLEHRDFIGLDYSSLYMCKPKRSMKRDDTKDTYKLPHRLIEKKRRDRINECIAQLKDLLPEHLKLTVRCTFSFFAALQGRVNSLVRLPENIRINVNISS

SEQ ID NO: 887443 - protein, 203 aa, Homo sapiens; identical to SEQ ID NO: 887438

SEQ ID NO: 887444 - protein, 203 aa, Homo sapiens; identical to SEQ ID NO: 887438

SEQ ID NO: 887445 - protein, 208 aa, Homo sapiens; identical to SEQ ID NO: 887442

SEQ ID NO: 887446 - protein, 793 aa, Homo sapiens
MFWKFDLHSSSHIDTLLEREDVTLKELMDEEDVLQECKAQNRKLIEFLLKAECLEDLVSFIIEEPPQDMDEKIRYKYPNISCELLTSDVSQMNDRLGEDESLLMKLYSFLLNDSPLNPLLASFFSKVLSILISRKPEQIVDFLKKKHDFVDLIIKHIGTSAIMDLLLRLLTCIEPPQPRQDVLNWLNEEKIIQRLVEIVHPSQEEDRHSNASQSLCEIVRLSRDQMLQIQNSTEPDPLLATLEKQEIIEQLLSNIFHKEKNESAIVSAIQILLTLLETRRPTFEGHIEICPPGMSHSACSVNKSVLEAIRGRLGSFHELLLEPPKNMFFKYTWNNFLHTQVEICIALILASPFENTENATITDQDSTGDNLLLKHLFQKCQLIERILEAWEMNEKKQAEGGRRHGYMGHLTRIANCIVHSTDKGPNSALVQQLIKDLPDEVRERWETFCTSSLGETNKRNTVDLAFSDYQMQQMTSNFIDQFGFNDEKFADQDDIGNVSFDRVSDINFTLNTNESGNIALFEACCKERIQQFDDGGSDEEDIWEEKHIAFTPESQRRSSSGSTDSEESTDSEEEDGAKQDLFEPSSANTEDKMEVDLSEPPNWSANFDVPMETTHGAPLDSVGSDVWSTEEPMPTKETGWASFSEFTSSLSTKDSLRSNSPVEMETSTEPMDPLTPSAAALAVQPEAAGSVAMEASSDGEEDAESTDKVTETVMNGGMKETLSLTVDAKTETAVFKSEEGKLSTSQDAACKDAEECPETAEAKCAAPRPPSSSPEQRTGQPSAPGDTSVNGPV

SEQ ID NO: 887447 - protein, 844 aa, Homo sapiens
MFWKFDLHSSSHIDTLLEREDVTLKELMDEEDVLQECKAQNRKLIEFLLKAECLEDLVSFIIEEPPQDMDEKIRYKYPNISCELLTSDVSQMNDRLGEDESLLMKLYSFLLNDSPLNPLLASFFSKVLSILISRKPEQIVDFLKKKHDFVDLIIKHIGTSAIMDLLLRLLTCIEPPQPRQDVLNWLNEEKIIQRLVEIVHPSQEEDRHSNASQSLCEIVRLSRDQMLQIQNSTEPDPLLATLEKQEIIEQLLSNIFHKEKNESAIVSAIQILLTLLETRRPTFEGHIEICPPGMSHSACSVNKSVLEAIRGRLGSFHELLLEPPKKSVMKTTWGVLDPPVGNTRLNVIRLISSLLQTNTSSINGDLMELNSIGVILNMFFKYTWNNFLHTQVEICIALILASPFENTENATITDQDSTGDNLLLKHLFQKCQLIERILEAWEMNEKKQAEGGRRHGYMGHLTRIANCIVHSTDKGPNSALVQQLIKDLPDEVRERWETFCTSSLGETNKRNTVDLAFSDYQMQQMTSNFIDQFGFNDEKFADQDDIGNVSFDRVSDINFTLNTNESGNIALFEACCKERIQQFDDGGSDEEDIWEEKHIAFTPESQRRSSSGSTDSEESTDSEEEDGAKQDLFEPSSANTEDKMEVDLSEPPNWSANFDVPMETTHGAPLDSVGSDVWSTEEPMPTKETGWASFSEFTSSLSTKDSLRSNSPVEMETSTEPMDPLTPSAAALAVQPEAAGSVAMEASSDGEEDAESTDKVTETVMNGGMKETLSLTVDAKTETAVFKSEEGKLSTSQDAACKDAEECPETAEAKCAAPRPPSSSPEQRTGQPSAPGDTSVNGPV

SEQ ID NO: 887448 - protein, 827 aa, Homo sapiens
MFWKFDLHSSSHIDTLLEREDVTLKELMDEEDVLQECKAQNRKLIEFLLKAECLEDLVSFIIEEPPQDMDEKIRYKYPNISCELLTSDVSQMNDRLGEDESLLMKLYSFLLNDSPLNPLLASFFSKVLSILISRKPEQIVDFLKKKHDFVDLIIKHIGTSAIMDLLLRLLTCIEPPQPRQDVLNWLNEEKIIQRLVEIVHPSQEEDRHSNASQSLCEIVRLSRDQMLQIQNSTEPDPLLATLEKQEIIEQLLSNIFHKEKNESAIVSAIQILLTLLETRRPTFEGHIEICPPGMSHSACSVNKSVLEAIRGRLGSFHELLLEPPKKSVMKTTWGVLDPPVGNTRLNVIRLISSLLQTNTSSINGDLMELNSIGVILNMFFKYTWNNFLHTQVEICIALILASPFENTENATITDQDSTGDNLLLKHLFQKCQLIERILEAWEMNEKKQAEGGRRHGYMGHLTRIANCIVHSTDKGPNSALVQQLIKDLPDEVRERWETFCTSSLGETNKRNTVDLFGFNDEKFADQDDIGNVSFDRVSDINFTLNTNESGNIALFEACCKERIQQFDDGGSDEEDIWEEKHIAFTPESQRRSSSGSTDSEESTDSEEEDGAKQDLFEPSSANTEDKMEVDLSEPPNWSANFDVPMETTHGAPLDSVGSDVWSTEEPMPTKETGWASFSEFTSSLSTKDSLRSNSPVEMETSTEPMDPLTPSAAALAVQPEAAGSVAMEASSDGEEDAESTDKVTETVMNGGMKETLSLTVDAKTETAVFKSEEGKLSTSQDAACKDAEECPETAEAKCAAPRPPSSSPEQRTGQPSAPGDTSVNGPV

SEQ ID NO: 887449 - protein, 844 aa, Homo sapiens; identical to SEQ ID NO: 887447

SEQ ID NO: 887450 - protein, 619 aa, Homo sapiens
MLQIQNSTEPDPLLATLEKQEIIEQLLSNIFHKEKNESAIVSAIQILLTLLETRRPTFEGHIEICPPGMSHSACSVNKSVLEAIRGRLGSFHELLLEPPKKSVMKTTWGVLDPPVGNTRLNVIRLISSLLQTNTSSINGDLMELNSIGVILNMFFKYTWNNFLHTQVEICIALILASPFENTENATITDQDSTGDNLLLKHLFQKCQLIERILEAWEMNEKKQAEGGRRHGYMGHLTRIANCIVHSTDKGPNSALVQQLIKDLPDEVRERWETFCTSSLGETNKRNTVDLAFSDYQMQQMTSNFIDQFGFNDEKFADQDDIGNVSFDRVSDINFTLNTNESGNIALFEACCKERIQQFDDGGSDEEDIWEEKHIAFTPESQRRSSSGSTDSEESTDSEEEDGAKQDLFEPSSANTEDKMEVDLSEPPNWSANFDVPMETTHGAPLDSVGSDVWSTEEPMPTKETGWASFSEFTSSLSTKDSLRSNSPVEMETSTEPMDPLTPSAAALAVQPEAAGSVAMEASSDGEEDAESTDKVTETVMNGGMKETLSLTVDAKTETAVFKSEEGKLSTSQDAACKDAEECPETAEAKCAAPRPPSSSPEQRTGQPSAPGDTSVNGPV

SEQ ID NO: 887451 - protein, 631 aa, Homo sapiens
MDLLLRLLTCIEPPQPRQDVLNWLNEEKIIQRLVEIVHPSQEEDRHSNASQSLCEIVRLSRDQMLQIQNSTEPDPLLATLEKQEIIEQLLSNIFHKEKNESAIVSAIQILLTLLETRRPTFEGHIEICPPGMSHSACSVNKSVLEAIRGRLGSFHELLLEPPKNMFFKYTWNNFLHTQVEICIALILASPFENTENATITDQDSTGDNLLLKHLFQKCQLIERILEAWEMNEKKQAEGGRRHGYMGHLTRIANCIVHSTDKGPNSALVQQLIKDLPDEVRERWETFCTSSLGETNKRNTVDLAFSDYQMQQMTSNFIDQFGFNDEKFADQDDIGNVSFDRVSDINFTLNTNESGNIALFEACCKERIQQFDDGGSDEEDIWEEKHIAFTPESQRRSSSGSTDSEESTDSEEEDGAKQDLFEPSSANTEDKMEVDLSEPPNWSANFDVPMETTHGAPLDSVGSDVWSTEEPMPTKETGWASFSEFTSSLSTKDSLRSNSPVEMETSTEPMDPLTPSAAALAVQPEAAGSVAMEASSDGEEDAESTDKVTETVMNGGMKETLSLTVDAKTETAVFKSEEGKLSTSQDAACKDAEECPETAEAKCAAPRPPSSSPEQRTGQPSAPGDTSVNGPV

SEQ ID NO: 887452 - protein, 518 aa, Homo sapiens
  misc_feature (6)..(6): Xaa can be any naturally occurring amino acid
  misc_feature (8)..(8): Xaa can be any naturally occurring amino acid
  misc_feature (21)..(23): Xaa can be any naturally occurring amino acid
WLNPSXFXPNPPVKKGPLGPXXXWSQFNMFFKYTWNNFLHTQVEICIALILASPFENTENATITDQDSTGDNLLLKHLFQKCQLIERILEAWEMNEKKQAEGGRRHGYMGHLTRIANCIVHSTDKGPNSALVQQLIKDLPDEVRERWETFCTSSLGETNKRNTVDLVTTCHIHSSSDDEIDFKETGFSQDSSLQQMQQMTSNFIDQFGFNDEKFADQDDIGNVSFDRVSDINFTLNTNESGNIALFEACCKERIQQFDDGGSDEEDIWEEKHIAFTPESQRRSSSGSTDSEESTDSEEEDGAKQDLFEPSSANTEDKMEVDLSEPPNWSANFDVPMETTHGAPLDSVGSDVWSTEEPMPTKETGWASFSEFTSSLSTKDSLRSNSPVEMETSTEPMDPLTPSAAALAVQPEAAGSVAMEASSDGEEDAESTDKVTETVMNGGMKETLSLTVDAKTETAVFKSEEGKLSTSQDAACKDAEECPETAEAKCAAPRPPSSSPEQRTGQPSAPGDTSVNGPV

SEQ ID NO: 887453 - protein, 844 aa, Homo sapiens; identical to SEQ ID NO: 887447

SEQ ID NO: 887454 - protein, 791 aa, Homo sapiens
MFWKFDLHSSSHIDTLLEREDVTLKELMDEEDVLQECKAQNRKLIEFLLKAECLEDLVSFIIEEPPQDMDEKIRYKYPNISCELLTSDVSQMNDRLGEDESLLMKLYSFLLNDSPLNPLLASFFSKVLSILISRKPEQIVDFLKKKHDFVDLIIKHIGTSAIMDLLLRLLTCIEPPQPRQDVLNWLNEEKIIQRLVEIVHPSQEEDRHSNASQSLCEIVRLSRDQMLQIQNSTEPDPLLATLEKQEIIEQLLSNIFHKEKNESAIVSAIQILLTLLETRRPTFEGHIEICPPGMSHSACSVNKSVLEAIRGRLGSFHELLLEPPKNMFFKYTWNNFLHTQVEICIALILASPFENTENATITDQDSTGDNLLLKHLFQKCQLIERILEAWEMNEKKQAEGGRRHGYMGHLTRIANCIVHSTDKGPNSALVQQLIKDLPDEVRERWETFCTSSLGETNKRNTVDLAFSDYQMQQMTSNFIDQFGFNDEKFADQDDIGNVSFDRVSDINFTLNTNESGNIALFEACCKERIQQFDDGGSDEEDIWEEKHIAFTPESQRRSSSGSTDSEESTDSEEEDGAKQDLFEPSSANTEDKMEVDLSEPPNWSANFDVPMETTHGAPLDSVGSDVWSTEEPMPTKETGWASFSEFTSSLSTKDSLRSNSPVEMETSTEPMDPLTPSAAALAVQPEAAGSVAMEASSDGEEDAESTDKVTETVMNGGMKETLSLTVDAKTETAVFKSEEGKLSTSQDAACKDAEECPETAEAKCAAPRPPSSSPEQSGVEIPALPGQWSQQ

SEQ ID NO: 887455 - protein, 800 aa, Homo sapiens
MFWKFDLHSSSHIDTLLEREDVTLKELMDEEDVLQECKAQNRKLIEFLLKAECLEDLVSFIIEEPPQDMDEKIRYKYPNISCELLTSDVSQMNDRLGEDESLLMKLYSFLLNDSPLNPLLASFFSKVLSILISRKPEQIVDFLKKKHDFVDLIIKHIGTSAIMDLLLRLLTCIEPPQPRQDVLNWLNEEKIIQRLVEIVHPSQEEDRHSNASQSLCEIVRLSRDQMLQIQNSTEPDPLLATLEKQEIIEQLLSNIFHKEKNESAIVSAIQILLTLLETRRPTFEGHIEICPPGMSHSACSVNKSVLEAIRGRLGSFHELLLEPPKKSVMKTTWGVLDPPVGNTRLNVIRLISSLLQTNTSSINGDLMELNSIGVILNMFFKYTWNNFLHTQVEICIALILASPFENTENATITDQDSTGDNLLLKHLFQKCQLIERILEAWEMNEKKQAEGGRRHGYMGHLTRIANCIVHSTDKGPNSALVQQLIKDLPDEVRERWETFCTSSLGETNKRNTVDLVTTCHIHSSSDDEIDFKETGFSQDSSLQQFGFNDEKFADQDDIGNVSFDRVSDINFTLNTNESGNIALFEACCKERIQQFDDGGSDEEDIWEEKHIAFTPESQRRSSSGSTDSEESTDSEEEDGAKQDLFEPSSANTEDKMEVDLSEPPNWSANFDVPMETTHGAPLDSVGSDVWSTEEPMPTKETGWASFSEFTSSLSTKDSLRSNSPVEMETSTEPMDPLTPSAAALAVQPEAAGSVAMEASSDGEEDAESTDKVTETVMNGGMKETLSLTVDAKTETAVFKR

SEQ ID NO: 887456 - protein, 844 aa, Homo sapiens; identical to SEQ ID NO: 887447

SEQ ID NO: 887457 - protein, 844 aa, Homo sapiens; identical to SEQ ID NO: 887447

SEQ ID NO: 887458 - protein, 788 aa, Homo sapiens
MFWKFDLHSSSHIDTLLEREDVTLKELMDEEDVLQECKAQNRKLIEFLLKAECLEDLVSFIIEEPPQDMDEKIRYKYPNISCELLTSDVSQMNDRLGEDESLLMKLYSFLLNDSPLNPLLASFFSKVLSILISRKPEQIVDFLKKKHDFVDLIIKHIGTSAIMDLLLRLLTCIEPPQPRQDVLNWLNEEKIIQRLVEIVHPSQEEDRHSNASQSLCEIVRLSRDQMLQIQNSTEPDPLLATLEKQEIIEQLLSNIFHKEKNESAIVSAIQILLTLLETRRPTFEGHIEICPPGMSHSACSVNKSVLEAIRGRLGSFHELLLEPPKKSVMKTTWGVLDPPVGNTRLNVIRLISSLLQTNTSSINGDLMELNSIGVILNMFFKYTWNNFLHTQVEICIALILASPFENTENATITDQDSTGDNLLLKHLFQKCQLIERILEAWEMNEKKQAEGGRRHGYMGHLTRIANCIVHSTDKGPNSALVQQLIKDLPDEVRERWETFCTSSLGETNKRNTVDLAFSDYQMQQMTSNFIDQFGFNDEKFADQDDIGNVSFDRVSDINFTLNTNESGNIALFEACCKERIQQFDDGGSDEEDIWEEKHIAFTPESQRRSSSGSTDSEESTDSEEEDGAKQDLFEPSSANTEDKMEVDLSEPPNWSANFDVPMETTHGAPLDSVGSDVWSTEEPMPTKETGWASFSEFTSSLSTKDSLRSNSPVEMETSTEPMDPLTPSAAALAVQPEAAGSVAMEASSDGEEDAESTDKVTETVMNGGMKETLSLTVDAKTETAVFKR

SEQ ID NO: 887459 - protein, 842 aa, Homo sapiens
MFWKFDLHSSSHIDTLLEREDVTLKELMDEEDVLQECKAQNRKLIEFLLKAECLEDLVSFIIEEPPQDMDEKIRYKYPNISCELLTSDVSQMNDRLGEDESLLMKLYSFLLNDSPLNPLLASFFSKVLSILISRKPEQIVDFLKKKHDFVDLIIKHIGTSAIMDLLLRLLTCIEPPQPRQDVLNWLNEEKIIQRLVEIVHPSQEEDRHSNASQSLCEIVRLSRDQMLQIQNSTEPDPLLATLEKQEIIEQLLSNIFHKEKNESAIVSAIQILLTLLETRRPTFEGHIEICPPGMSHSACSVNKSVLEAIRGRLGSFHELLLEPPKKSVMKTTWGVLDPPVGNTRLNVIRLISSLLQTNTSSINGDLMELNSIGVILNMFFKYTWNNFLHTQVEICIALILASPFENTENATITDQDSTGDNLLLKHLFQKCQLIERILEAWEMNEKKQAEGGRRHGYMGHLTRIANCIVHSTDKGPNSALVQQLIKDLPDEVRERWETFCTSSLGETNKRNTVDLAFSDYQMQQMTSNFIDQFGFNDEKFADQDDIGNVSFDRVSDINFTLNTNESGNIALFEACCKERIQQFDDGGSDEEDIWEEKHIAFTPESQRRSSSGSTDSEESTDSEEEDGAKQDLFEPSSANTEDKMEVDLSEPPNWSANFDVPMETTHGAPLDSVGSDVWSTEEPMPTKETGWASFSEFTSSLSTKDSLRSNSPVEMETSTEPMDPLTPSAAALAVQPEAAGSVAMEASSDGEEDAESTDKVTETVMNGGMKETLSLTVDAKTETAVFKSEEGKLSTSQDAACKDAEECPETAEAKCAAPRPPSSSPEQSGVEIPALPGQWSQQ

SEQ ID NO: 887460 - protein, 697 aa, Homo sapiens
MDKGCKQATVCGGKQGANQIQSKWDLSVTVVSKCYFVLTSLLIPIFKLLEKIEKVQNLPSSFYEGSEIEFQNQIKIITENDQFMPLTGYWMQKSCVRYLLTGSNSVLKIIYNDELGFILEGKDGSKSEKSVSLISIYGVRQKVSHLIFFIRFHSYDMIKTLRKPVTEVNLFFFFPPLPPPSFLLLSSSFFFLLQDECSDVDLGSLQSLSPGLKPSSHLNLPSNWDWTTGTRHHAQQIYVVFFFFFVVMGFHHVAQAGLKTPELKQSTCLHLPKCWDYRCEPPRLAMNFINLVEVKYQYQNATAKLTPNEESLDAFTLRRSLKGCPFSLPVLAVLEGKGNRVIGKDQEEVIKLLFFAGGNDYYNQVSSKLVTNKNSVKLLRRNQFKKSVVFFFISSKQPEHKKQGIIPKYIKIYNYSGMILTQVSIEKSGQVETMAELSAAETSAILKLVFNAVSIQISVGFLEVTEYSENLYGKMKVPKLLRGNQKGRLKKGLALPDESRCKVTVIGTVLILVSKQVQVQCDEIEGLIMGKGEEGLVHQKEKSGKILPNLHSKTTPAGLKDNKKNMCSAFCGPGPALYTLHVVVAHGLFLGTLEDRYWDYYPCFSGEETEALELSDEAGGQSLMMVNKRNTECLFNLCAERDFCIYLICLSSIYLSVCLPIKSIICQSISNLDFFFFNTRSRSVAQAGMQWHNHSSL

SEQ ID NO: 887461 - protein, 211 aa, Homo sapiens [sequence omitted]

SEQ ID NO: 887462 - protein, 548 aa, Homo sapiens [sequence omitted]

SEQ ID NO: 887463 - protein, 430 aa, Homo sapiens
MDERLLGPPPPGGGRGGLGLVSGEPGGPGEPPGGGDPGGGSGGVPGGRGKQDIGDILQQIMTITDQSLDEAQAKKHALNCHRMKPALFSVLCEIKEKTGLSIRSSQEEEPVDPQLMRLDNMLLAEGVAGPEKGGGSAAAAAAAAASGGGVSPDNSIEHSDYRSKLAQIRHIYHSELEKYEQACNEFTTHVMNLLREQSRTRPVAPKEMERMVSIIHRKFSAIQMQLKQSTCEAVMILRSRFLDARRKRRNFSKQATEVLNEYFYSHLSNPYPSEEAKEELAKKCGITVSQVSNWFGNKRIRYKKNIGKFQEEANIYAVKTAVSVTQGGHSRTSSPTPPSSAGSGGSFNLSGSGDMFLGMPGLNGDSYSASQVESLRHSMGPGGYGDNLGGGQMYSPREMRANGSWQEAVTPSSVTSPTEGPGSVHSDTSN

SEQ ID NO: 887464 - protein, 430 aa, Homo sapiens; identical to SEQ ID NO: 887463

SEQ ID NO: 887465 - protein, 502 aa, Homo sapiens
MDERLLGPPPPGGGRGGLGLVSGEPGGPGEPPGGGDPGGGSGGVPGGRGKQDIGDILQQIMTITDQSLDEAQAKKHALNCHRMKPALFSVLCEIKEKTGMWAPPGLLNSGNRTLFIIGLECDNWGPEESKESGGLGKEPKPGNLALQEAPGGLSLGIGVSGSLSPLACMLGLSIRSSQEEEPVDPQLMRLDNMLLAEGVAGPEKGGGSAAAAAAAAASGGGVSPDNSIEHSDYRSKLAQIRHIYHSELEKYEQACNEFTTHVMNLLREQSRTRPVAPKEMERMVSIIHRKFSAIQMQLKQSTCEAVMILRSRFLDARRKRRNFSKQATEVLNEYFYSHLSNPYPSEEAKEELAKKCGITVSQVSNWFGNKRIRYKKNIGKFQEEANIYAVKTAVSVTQGGHSRTSSPTPPSSAGSGGSFNLSGSGDMFLGMPGLNGDSYSASQVESLRHSMGPGGYGDNLGGGQMYSPREMRANGSWQEAVTPSSVTSPTEGPGSVHSDTSN

SEQ ID NO: 887466 - protein, 430 aa, Homo sapiens; identical to SEQ ID NO: 887463

SEQ ID NO: 887467 - protein, 299 aa, Homo sapiens
MDERSAAAAAAAAASGGGVSPDNSIEHSDYRSKLAQIRHIYHSELEKYEQACNEFTTHVMNLLREQSRTRPVAPKEMERMVSIIHRKFSAIQMQLKQSTCEAVMILRSRFLDARRKRRNFSKQATEVLNEYFYSHLSNPYPSEEAKEELAKKCGITVSQVSNWFGNKRIRYKKNIGKFQEEANIYAVKTAVSVTQGGHSRTSSPTPPSSAGSGGSFNLSGSGDMFLGMPGLNGDSYSASQVESLRHSMGPGGYGDNLGGGQMYSPREMRANGSWQEAVTPSSVTSPTEGPGSVHSDTSN

SEQ ID NO: 887468 - protein, 430 aa, Homo sapiens; identical to SEQ ID NO: 887463

SEQ ID NO: 887469 - protein, 349 aa, Homo sapiens
MDERLLGPPPPGGGRGGLGLVSGEPGGPGEPPGGGDPGGGSGGVPGGRGKQDIGDILQQIMTITDQSLDEAQAKKHALNCHRMKPALFSVLCEIKEKTGLSIRSSQEEEPVDPQLMRLDNMLLAEGVAGPEKGGGSAAAAAAAAASGGGVSPDNSIEHSDYRSKLAQIRHIYHSELEKYEQACNEFTTHVMNLLREQSRTRPVAPKEMERMVSIIHRKFSAIQMQLKQSTCEAVMILRSRFLDARRKRRNFSKQATEVLNEYFYSHLSNPYPSEEAKEELAKKCGITVSQVSNWFGNKRIRYKKNIGKFQEEANIYAVKTAVSVTQGGHSRTSSPTPPSSAGGSHCHPS

SEQ ID NO: 887470 - protein, 123 aa, Homo sapiens
MDERLLGPPPPGGGRGGLGLVSGEPGGPGEPPGGGDPGGGSGGVPGGRGKQDIGDILQQIMTITDQSLDEAQAKWVPPLRDPTQTQQTPFTCSESSGSPPQLQGPLQDPTALFSPYSWEPIEK

SEQ ID NO: 887471 - protein, 430 aa, Homo sapiens; identical to SEQ ID NO: 887463

SEQ ID NO: 887472 - protein, 356 aa, Homo sapiens
MDERLLGPPPPGGGRGGLGLVSGEPGGPGEPPGGGDPGGGSGGVPGGRGKQDIGDILQQIMTITDQSLDEAQAKKHALNCHRMKPALFSVLCEIKEKTGLSIRSSQEEEPVDPQLMRLDNMLLAEGVAGPEKGGGSAAAAAAAAASGGGVSPDNSIEHSDYRSKLAQIRHIYHSELEKYEQACNEFTTHVMNLLREQSRTRPVAPKEMERMVSIIHRKFSAIQMQLKQSTCEAVMILRSRFLDARRKRRNFSKQATEVLNEYFYSHLSNPYPSEEAKEELAKKCGITVSQVSNWFGNKRIRYKKNIGKFQEEANIYAVKTAVSVTQGGHSRTSSPTPPSSAGGITPTLDGARGLWG

SEQ ID NO: 887473 - protein, 500 aa, Homo sapiens
SSLSLTHTPAWASSLSPAPFSPPPGAGVSCGGPSRYPRSPFSAGVNPRGSREPGADGRGLGRREQRPQGSPLTNPRPPQLWTNGRGGLGLVSGEPGGPGEPPGGGDPGGGSGGVPGGRGKQDIGDILQQIMTITDQSLDEAQAKKHALNCHRMKPALFSVLCEIKEKTGLSIRSSQEEEPVDPQLMRLDNMLLAEGVAGPEKGGGSAAAAAAAAASGGGVSPDNSIEHSDYRSKLAQIRHIYHSELEKYEQACNEFTTHVMNLLREQSRTRPVAPKEMERMVSIIHRKFSAIQMQLKQSTCEAVMILRSRFLDARRKRRNFSKQATEVLNEYFYSHLSNPYPSEEAKEELAKKCGITVSQVSNWFGNKRIRYKKNIGKFQEEANIYAVKTAVSVTQGGHSRTSSPTPPSSAGSGGSFNLSGSGDMFLGMPGLNGDSYSASQVESLRHSMGPGGYGDNLGGGQMYSPREMRANGSWQEAVTPSSVTSPTEGPGSVHSDTSN

SEQ ID NO: 887474 - protein, 430 aa, Homo sapiens; identical to SEQ ID NO: 887463

SEQ ID NO: 887475 - protein, 375 aa, Homo sapiens
MDERLLGPPPPGGGRGGLGLVSGEPGGPGEPPGGGDPGGGSGGVPGGRGKQDIGDILQQIMTITDQSLDEAQAKKHALNCHRMKPALFSVLCEIKEKTGLSIRSSQEEEPVDPQLMRLDNMLLAEGVAGPEKGGGSAAAAAAAAASGGGVSPDNSIEHSDYRSKLAQIRHIYHSELEKYEQACNEFTTHVMNLLREQSRTRPVAPKEMERMVSIIHRKFSAIQMQLKQSTCEAVMILRSRFLDARRKRRNFSKQATEVLNEYFYSHLSNPYPSEEAKEELAKKCGITVSQVSNWFGNKRIRYKKNIGKFQEEANIYAVKTAVSVTQGGHSRTSSPTPPSSAALAGLHLSGSGDCSGMLVRRSICPRDHSTSMGSG

SEQ ID NO: 887476 - protein, 70 aa, Homo sapiens
QSRTRPVAPKEMERMVSIIHRKFSAIQMQLKQSTCEAVMILRSRFLDARWAQGPQAGPQHWAPSHSSPRP

SEQ ID NO: 887477 - protein, 98 aa, Homo sapiens
HFRVTVDAMAPIPKTVGRIKLDCSLRPSCPLEVAAAPKLCKEFGPEDYGEEVKATLSFPQSCSFWSRLFEVSCAETRDGWAPDGALEALGSCSLRPCP

SEQ ID NO: 887478 - protein, 477 aa, Homo sapiens
SFPGHCRCDGADSKDCGADQARLLSTAQLPTGGRCCTQTLQGIRSRGLRRRDYLLGHLDDEGKSTGQSDRGKGAEGLGTYCGLRKSFLYPPQESEPCPQSPSASATFPSVSDSLLQVAMPQKLLVTEEEANRLAEELVAEEERMKQKAEKKRLKKKRQKERKRQERLEQYCGEPKASTTSDGDESPPSSPGNPVQGQCGEEEDSLDLSSTFVSLALRKVGDWPLSARREKGLNQEPQGRGLALQKMGQEEESPPREERPQQSPKVQASPGLLAAALQQSQELAKLGTSFAQNGFYHEAVVLFTQALKLNPQDHRLFGNRSFCHERLGQPAWALADAQVALTLRPGWPRGLFRLGKALMGLQRFREAAAVFQETLRGGSQPDAARELRSCLLHLTLTGKGARHTVMLRRVSGRIGWDCNTKPQVAKEGAGKDGWNERHGLSCLKEGSGALLSPFSAGSARRNLCTTSVTWGPPATSPC

SEQ ID NO: 887479 - protein, 542 aa, Homo sapiens
MAPIPKTVGRIKLDCSLRPSCPLEVAAAPKLCKEFGPEDYGEEDIVDFLRRLVESDPQGLHRIHVDGSSGRLQLWHHGGECRDRAQGSRLVPWEELTLRCTPLSCPFFPVSFSLLTDYLLGHLDDEGKSTGQSDRGKGAEGLGTYCGLRKSFLYPPQESEPCPQSPSASATFPSVSDSLLQVAMPQKLLVTEEEANRLAEELVAEEERMKQKAEKKRLKKKRQKERKRQERLEQYCGEPKASTTSDGDESPPSSPGNPVQGQCGEEEDSLDLSSTFVSLALRKVGDWPLSARREKGLNQEPQGRGLALQKMGQEEESPPREERPQQSPKVQASPGLLAAALQQSQELAKLGTSFAQNGFYHEAVVLFTQALKLNPQDHRLFGNRSFCHERLGQPAWALADAQVALTLRPGWPRGLFRLGKALMGLQRFREAAAVFQETLRGGSQPDAARELRSCLLHLTLTGKGARHTVMLRRVSGRIGWDCNTKPQVAKEGAGKDGWNERHGLSCLKEGSGALLSPFSAGSARRNLCTTSVTWGPPATSPC

SEQ ID NO: 887480 - protein, 518 aa, Homo sapiens
MAPIPKTVGRIKLDCSLRPSCPLEVAAAPKLCKEFGPEDYGEEDIVDFLRRLVESDPQGLHRIHVDGSSGRLQLWHHDYLLGHLDDEGKSTGQSDRGKGAEGLGTYCGLRKSFLYPPQESEPCPQSPSASATFPSVSDSLLQVAMPQKLLVTEEEANRLAEELVAEEERMKQKAEKKRLKKKRQKERKRQERLEQYCGEPKASTTSDGDESPPSSPGNPVQGQCGEEEDSLDLSSTFVSLALRKVGDWPLSARREKGLNQEPQGRGLALQKMGQEEESPPREERPQQSPKVQASPGLLAAALQQSQELAKLGTSFAQNGFYHEAVVLFTQALKLNPQDHRLFGNRSFCHERLGQPAWALADAQVALTLRPGWPRGLFRLGKALMGLQRFREAAAVFQETLRGGSQPDAARELRSCLLHLTLGQRGGICAPPLSPGALQPLPHAELAPSGLPSLRCPRSTALRSPGLSPLLHYPSCHRSHPNQPLSQTQSRRPHPLKPQDPSKGWDILGLGLQHLSQAR

SEQ ID NO: 887481 - protein, 508 aa, Homo sapiens
MAPIPKTVGRIKLDCSLRPSCPLEVAAAPKLCKEFGPEDYGEEDIVDFLRRLVESDPQGLHRIHVDGSSGRLQLWHHDYLLGHLDDEGKSTGQSDRGKGAEGLGTYCGLRKSFLYPPQESEPCPQSPSASATFPSVSDSLLQVAMPQKLLVTEEEANRLAEELVAEEERMKQKAEKKRLKKKRQKERKRQERLEQYCGEPKASTTSDGDESPPSSPGNPVQGQCGEEEDSLDLSSTFVSLALRKVGDWPLSARREKGLNQEPQGRGLALQKMGQEEESPPREERPQQSPKVQASPGLLAAALQQSQELAKLGTSFAQNGFYHEAVVLFTQALKLNPQDHRLFGNRSFCHERLGQPAWALADAQVALTLRPGWPRGLFRLGKALMGLQETLRGGSQPDAARELRSCLLHLTLGQRGGICAPPLSPGALQPLPHAELAPSGLPSLRCPRSTALRSPGLSPLLHYPSCHRSHPNQPLSQTQSRRPHPLKPQDPSKGWDILGLGLQHLSQAR

SEQ ID NO: 887482 - protein, 518 aa, Homo sapiens; identical to SEQ ID NO: 887480

SEQ ID NO: 887483 - protein, 464 aa, Homo sapiens
HFRVTVDAMAPIPKTVGRIKLDCSLRPSCPLEVAAAPKLCKEFGPEDYGEEDIVDFLRRLVESDPQGLHRIHVDGSSGRLQLWHHDYLLGHLDDEGKSTGQSDRGKGAEGLGTYCGLRKSFLYPPQESEPCPQSPSASATFPSVSDSLLQVAMPQKLLVTEEEANRLAEELVAEEERMKQKAEKKRLKKKRQKERKRQERLEQYCGEPKASTTSDGDESPPSSPGNPVQGQCGEEEDSLDLSSTFVSLALRKVGDWPLSARREKGLNQEPQGRGLALQKMGQEEESPPREERPQQSPKVQASPGLLAAALQQSQELAKLGTSFAQNGFYHEAVVLFTQALKLNPQDHRLFGNRSFCHERLGQPAWALADAQVALTLRPGWPRGLFRLGKALMGLQRFREAAAVFQETLRGGSQPDAARELRSCLLHLTLEDGSRGREPSKRGEAPAESKGTGEGFGEAETSRPA

SEQ ID NO: 887484 - protein, 87 aa, Homo sapiens
ELVAEEERMKQKAEKKRLKKKVARAWLEGAGEPKGFGRGKEETLWEQERAQDGLQWTLLPGGHKGPRDWGVSHRPSGAVVLESYCAA

SEQ ID NO: 887485 - protein, 311 aa, Homo sapiens
HFRVTVDAMAPIPKTVGRIKLDCSLRPSCPLEVAAAPKLCKEFGPEDYGEEDIVDFLRRLVESDPQGLHRIHVDGSSGRLQLWHHDYLLGHLDDEGKSTGQSDRGKGAEGLGTYCGLRKSFLYPPQESEPCPQSPSASATFPSVSDSLLQVAMPQKLLVTEEEANRLAEELVAEEERMKQKAEKKRLKKKRQKERKRQERLEQYCGEPKASTTSDGDESPPSSPGNPVQGQCGEEEDSLDLSSTFVSLALRKVGDWPLSARREKGLNQEPQGRGLALQKMGQEEESPSSHFPMLSWHPQAYLPSGALEALL

SEQ ID NO: 887486 - protein, 511 aa, Homo sapiens
HFRVTVDAMAPIPKTVGRIKLDCSLRPSCPLEVAAAPKLCKEFGPEDYGEEDIVDFLRRLVESDPQGLHRIHVDGSSGRLQLWHHDYLLGHLDDEGKSTGQSDRGKGAEGLGTYCGLRKSFLYPPQESEPCPQSPSASATFPSVSDSLLQVAMPQKLLVTEEEANRLAEELVAEEERMKQKAEKKRLKKKRQKERKRQERLEQYCGEPKASTTSDGDESPPSSPGNPVQGQCGEEEDSLDLSSTFVSLALRKVGDWPLSARREKGLNQEPQGRGLALQKMGQEEESPPREERPQQSPKVQASPGLLAAALQQSQELAKLGTSFAQNGFYHEAVVLFTQALKLNPQDHRLFGNRSFCHERLGQPAWALADAQVALTLRPGWPRGLFRLGKALMGLQRFREAAAVFQETLRGGSQPDAARELRSCLLHLTLTGKGARHTVMLRRVSGRIGWDCNTKPQVAKEGAGKDGWNERHGLSCLKEGSGALLSPFSAGSARRNLCTTSVTWGPPATSPC

SEQ ID NO: 887487 - protein, 432 aa, Homo sapiens
MPLRILDYLLGHLDDEGKSTGQSDRGKGAEGLGTYCGLRKSFLYPPQESEPCPQSPSASATFPSVSDSLLQVAMPQKLLVTEEEANRLAEELVAEEERMKQKAEKKRLKKKRQKERKRQERLEQYCGEPKASTTSDGDESPPSSPGNPVQGQCGEEEDSLDLSSTFVSLALRKVGDWPLSARREKGLNQEPQGRGLALQKMGQEEESPPREERPQQSPKVQASPGLLAAALQQSQELAKLGTSFAQNGFYHEAVVLFTQALKLNPQDHRLFGNRSFCHERLGQPAWALADAQVALTLRPGWPRGLFRLGKALMGLQRFREAAAVFQETLRGGSQPDAARELRSCLLHLTLTGKGARHTVMLRRVSGRIGWDCNTKPQVAKEGAGKDGWNERHGLSCLKEGSGALLSPFSAGSARRNLCTTSVTWGPPATSPC

SEQ ID NO: 887488 - protein, 564 aa, Homo sapiens
MAPIPKTVGRIKLDCSLRPSCPLEVAAAPKLCKEFGPEDYGEEDIVDFLRRLVESDPQGLHRIHVDGSSGRLQLWHHDYLLGHLDDEGKSTGQSDRGKGAEGLGTYCGLRKSFLYPPQESEPCPQSPSASATFPSVSDSLLQVAMPQKLLVTEEVRFSGEGFAVPQGSFNPCIPIPIFSPELVPFKILLYCLPPFMFALHFPVSLFFCHLPFVLQEANRLAEELVAEEERMKQKAEKKRLKKKRQKERKRQERLEQYCGEPKASTTSDGDESPPSSPGNPVQGQCGEEEDSLDLSSTFVSLALRKVGDWPLSARREKGLNQEPQGRGLALQKMGQEEESPPREERPQQSPKVQASPGLLAAALQQSQELAKLGTSFAQNGFYHEAVVLFTQALKLNPQDHRLFGNRSFCHERLGQPAWALADAQVALTLRPGWPRGLFRLGKALMGLQRFREAAAVFQETLRGGSQPDAARELRSCLLHLTLTGKGARHTVMLRRVSGRIGWDCNTKPQVAKEGAGKDGWNERHGLSCLKEGSGALLSPFSAGSARRNLCTTSVTWGPPATSPC

SEQ ID NO: 887489 - protein, 416 aa, Homo sapiens
HFRVTVDAMAPIPKTVGRIKLDCSLRPSCPLEVAAAPKLCKEFGPEDYGEEDIVDFLRRLVESDPQGLHRIHVDGSSGRLQLWHHDYLLGHLDDEGKSTGQSDRGKGAEGLGTYCGLRKSFLYPPQESEPCPQSPSASATFPSVSDSLLQVAMPQKLLVTEEEANRLAEELVAEEERMKQKAEKKRLKKKRQKERKRQERLEQYCGEPKASTTSDGDESPPSSPGNPVQGQCGEEEDSLDLSSTFVSLALRKVGDWPLSARREKGLNQEPQGRGLALQKMGQEEESPPREERPQQSPKVQASPGLLAAALQQSQELAKLGTSFAQNGFYHEAVVLFTQALKLNPQDHRLFGNRSFCHFLSRLLCMTLTSLVQWSGAHLLSLLEYSPRVCIWEVPYQLLLRAGRAIHVHTPNWWLSR

SEQ ID NO: 887490 - protein, 231 aa, Homo sapiens
HFRVTVDAMAPIPKTVGRIKLDCSLRPSCPLEVAAAPKLCKEFGPEDYGEEDIVDFLRRLVESDPQGLHRIHVDGSSGRLQLWHHDYLLGHLDDEGKSTGQSDRGKGAEGLGTYCGLRKSFLYPPQESEPCPQSPSASATFPSVSDSLLQVAMPQKLLVTEEEAKIAWLRELVAEDSGIVGVIQRGDFEIPQMAGMWKPQVPLVEGHLLFQTVGCEPAPSPRKVAAENIQR

SEQ ID NO: 887491 - protein, 135 aa, Homo sapiens
TGCFGPSRVPFLPGLPRAAASGSGSRLLPSGAFVPEAAGSATAPRGCRNPGAKGGLLAAMAGSQDIFDAIVMADERFHGEGYREGYEEGSSLGVMEGRQHGTLHGAKIGSEIGCYQGFAFAWKCLLHSCTTEKDR

SEQ ID NO: 887492 - protein, 112 aa, Homo sapiens
MVRWVPTRRVVVICDGTCSHTLLCTPPGSPKSPHAGSPHPSCSRKHVRKQSRRLLRGRHESTLVLKPFPNVLVDCVVLPKLPAAGAREVTPAGAAAGGSPRWLALFLFCFFF

SEQ ID NO: 887493 - protein, 196 aa, Homo sapiens
TGCFGPSRVPFLPGLPRAAASGSGSRLLPSGAFVPEAAGSATAPRGCRNPGAKGGLLAAMAGSQDIFDAIVMADERFHGEGYREGYEEGSSLGVMEGRQHGTLHGAKIGSEIGCYQGFAFAWKCLLHSCTTEKDSRKMKVLESLIGMIQKFPYDDPTYDKLHEDLDKIRGKFKQFCSLLNVQPDFKISAEGSGLSF

SEQ ID NO: 887494 - protein, 129 aa, Homo sapiens
TGCFGPSRVPFLPGLPRAAASGSGSRLLPSGAFVPEAAGSATAPRGCRNPGAKGGLLAAMAGSQDIFDAIVMADERFHGEGYREGYEEGSSLGVMEGRQHGTLHGAKIGSEQKDEGLRIIDWNDPEIPL

SEQ ID NO: 887495 - protein, 196 aa, Homo sapiens; identical to SEQ ID NO: 887493

SEQ ID NO: 887496 - protein, 157 aa, Homo sapiens
TGCFGPSRVPFLPGLPRAAASGSGSRLLPSGAFVPEAAGSATAPRGCRNPGAKGGLLAAMAGSQDIFDAIVMADERFHGEGYREGYEEGSSLGVMEGRQHGTLHGAKIGSEVSGNPHLEMKPLHLQFIIYFDIQCDGVRIVRPFKITVPDGRGDSHL

SEQ ID NO: 887497 - protein, 196 aa, Homo sapiens; identical to SEQ ID NO: 887493

SEQ ID NO: 887498 - protein, 102 aa, Homo sapiens [sequence omitted]

SEQ ID NO: 887499 - protein, 102 aa, Homo sapiens
TGCFGPSRVPFLPGLPRAAASGSGSRLLPSGAFVPEAAGSATAPRGCRNPGAKGGLLAAMAGSQDIFDAIVMADERSGATKVLLLHGNVYCTVAPLRRTAER

SEQ ID NO: 887500 - protein, 196 aa, Homo sapiens; identical to SEQ ID NO: 887493

SEQ ID NO: 887501 - protein, 103 aa, Homo sapiens [sequence omitted]

SEQ ID NO: 887502 - protein, 517 aa, Homo sapiens
MLRAAARFGPRLGRRLLSAAATQAVPAPNQQPEVFCNQIFINNEWHDAVSRKTFPTVNPSTGEVICQVAEGDKEDVDKAVKAARAAFQLGSPWRRMDASHRGRLLNRLADLIERDRTYLAALETLDNGKPYVISYLVDLDMVLKCLRYYAGWADKYHGKTIPIDGDFFSYTRHEPVGVCGQIIPWNFPLLMQAWKLGPALATGNVVVMKVAEQTPLTALYVANLIKEAGFPPGVVNIVPGFGPTAGAAIASHEDVDKVAFTGSTEIGRVIQVAAGSSNLKRVTLELGGKSPNIIMSDADMDWAVEQAHFALFFNQGQCCCAGSRTFVQEDIYDEFVERSVARAKSRVVGNPFDSKTEQGPQVDETQFKKILGYINTGKQEGAKLLCGGGIAADRGYFIQPTVFGDVQDGMTIAKEEIFGPVMQILKFKTIEEVVGRANNSTYGLAAAVFTKDLDKANYLSQALQAGTVWVNCYDVFGAQSPFGGYKMSGSGRELGEYGLQAYTEVKTVTVKVPQKNS

SEQ ID NO: 887503 - protein, 204 aa, Homo sapiens
MASWQDDDEFVERSVARAKSRVVGNPFDSKTEQGPQVDETQFKKILGYINTGKQEGAKLLCGGGIAADRGYFIQPTVFGDVQDGMTIAKEEIFGPVMQILKFKTIEEVVGRANNSTYGLAAAVFTKDLDKANYLSQALQAGTVWTTAMNTLSPVTPGGYKSPELTASWAVRAASTPEVITVHSKGPTITSSIMQAPSLTIDVTL

SEQ ID NO: 887504 - protein, 158 aa, Homo sapiens
RYRLNDPSLRRMSRLYDNHPCAGSRTFVQEDIYDEFVERSVARAKSRVVGNPFDSKTEQGPQVDETQFKKILGYINTGKQEGAKLLCGGGIAADPHSARLEGLGQVIGLVQILCEDSCGQPVRGIVGSPNNLLYGLELQDLHHWPEDLLLGDGHAILH

SEQ ID NO: 887505 - protein, 517 aa, Homo sapiens; identical to SEQ ID NO: 887502

SEQ ID NO: 887506 - protein, 569 aa, Homo sapiens
RGRLSGPETLALLSVRSLSASPLRCCALPPASGPAWAAASCQPPPPRPCLPPTSSPRSSATRIQIFDTIEIEMATSASHARKIIPHLSIPSTCERVILSGIQNRDAEDVDKALNGRPWPLFLRLELYLCDASCCDINFHELVAAQCVACNQSMCPIPESEVEALGIHIACGGALETLDNGKPYVISYLVDLDMVLKCLRYYAGWADKYHGKTIPIDGDFFSYTRHEPVGVCGQIIPWNFPLLMQAWKLGPALATGNVVVMKVAEQTPLTALYVANLIKEAGFPPGVVNIVPGFGPTAGAAIASHEDVDKVAFTGSTEIGRVIQVAAGSSNLKRVTLELGGKSPNIIMSDADMDWAVEQAHFALFFNQGQCCCAGSRTFVQEDIYDEFVERSVARAKSRVVGNPFDSKTEQGPQVDETQFKKILGYINTGKQEGAKLLCGGGIAADRGYFIQPTVFGDVQDGMTIAKEEIFGPVMQILKFKTIEEVVGRANNSTYGLAAAVFTKDLDKANYLSQALQAGTVWVNCYDVFGAQSPFGGYKMSGSGRELGEYGLQAYTEVKTVTVKVPQKNS

SEQ ID NO: 887507 - protein, 315 aa, Homo sapiens
MASPMSSPTWWIWTWSSNVSGIMPAGLISTTGKPSPLTETSSATHAIASHEDVDKVAFTGSTEIGRVIQVAAGSSNLKRVTLELGGKSPNIIMSDADMDWAVEQAHFALFFNQGQCCCAGSRTFVQEDIYDEFVERSVARAKSRVVGNPFDSKTEQGPQVDETQFKKILGYINTGKQEGAKLLCGGGIAADRGYFIQPTVFGDVQDGMTIAKEEIFGPVMQILKFKTIEEVVGRANNSTYGLAAAVFTKDLDKANYLSQALQAGTVWVNCYDVFGAQSPFGGYKMSGSGRELGEYGLQAYTEVKTVTVKVPQKNS

SEQ ID NO: 887508 - protein, 517 aa, Homo sapiens; identical to SEQ ID NO: 887502

SEQ ID NO: 887509 - protein, 221 aa, Homo sapiens
  misc_feature (3)..(3): Xaa can be any naturally occurring amino acid
VSXSASILSLMYVCTSTLRDTNTCAGSRTFVQEDIYDEFVERSVARAKSRVVGNPFDSKTEQGPQVDETQFKKILGYINTGKQEGAKLLCGGGIAADRGYFIQPTVFGDVQDGMTIAKEEIFGPVMQILKFKTIEEVVGRANNSTYGLAAAVFTKDLDKANYLSQALQAGTVWVNCYDVFGAQSPFGGYKMSGSGRELGEYGLQAYTEVKTVTVKVPQKNS

SEQ ID NO: 887510 - protein, 217 aa, Homo sapiens
MLRAAARFGPRLGRRLLSAAATQAVPAPNQQPEVFCNQIFINNEWHDAVSRKTFPTVNPSTGEVICQVAEGDKEDVDKAVKAARAAFQLGSPWRRMDASHRGRLLNRLADLIERDRTYLAALETLDNGKPYVISYLVDLMMSLWSGALPGPSLGWSGTPLIARPSRGRRWMKLSLRRSSATSTRGSKRGRSCCVVGALLLTVVTSSSPLCLEMCRMA

SEQ ID NO: 887511 - protein, 517 aa, Homo sapiens; identical to SEQ ID NO: 887502

SEQ ID NO: 887512 - protein, 534 aa, Homo sapiens
MLRAAARFGPRLGRRLLSAAATQAVPAPNQQPEVFCNQIFINNEWHDAVSRKTFPTVNPSTGEVICQVAEGDKEDVDKAVKAARAAFQLGSPWRRMDASHRGRLLNRLADLIERDRTYLAALETLDNGKPYVISYLVDLDMVLKCLRYYAGWADKYHGKTIPIDGDFFSYTRHEPVGVCGQIIPWNFPLLMQAWKLGPALATGNVVVMKVAEQTPLTALYVANLIKEAGFPPGVVNIVPGFGPTAGAAIASHEDVDKVAFTGSTEIGRVIQVAAGSSNLKRVTLELGGKSPNIIMSDADMDWAVEQAHFALFFNQGQCCCAGSRTFVQEDIYDEFVERSVARAKSRVVGNPFDSKTEQGPQVDETQFKKILGYINTGKQEGAKLLCGGGIAADRGYFIQPTVFGDVQDGMTIAKEEIFGPVMQILKFKTIEEVVGRANNSTYGLAAAVFTKDLDKANYLSQALQAGTVWVNCYDVFGAQSPFGGYKMSGSGRELGEYGLQAYTEVKTLPPSAIDGKFSKISNKTKKNDPCVLNI

SEQ ID NO: 887513 - protein, 517 aa, Homo sapiens; identical to SEQ ID NO: 887502

SEQ ID NO: 887514 - protein, 183 aa, Homo sapiens
  misc_feature (5)..(5): Xaa can be any naturally occurring amino acid
RTRGXPVLQEFGTSGNLFDSKTEQGPQVDETQFKKILGYINTGKQEGAKLLCGGGIAADRGYFIQPTVFGDVQDGMTIAKEEIFGPVMQILKFKTIEEVVGRANNSTYGLAAAVFTKDLDKANYLSQALQAGTVWVNCYDVFGAQSPFGGYKMSGSGRELGEYGLQAYTEVKTVTVKVPQKNS

SEQ ID NO: 887515 - protein, 183 aa, Homo sapiens
RGRLSGPETLALLSVRSLSASPLRCCALPPASGPAWAAASCQPPPPRPCLLCGGGIAADRGYFIQPTVFGDVQDGMTIAKEEIFGPVMQILKFKTIEEVVGRANNSTYGLAAAVFTKDLDKANYLSQALQAGTVWVNCYDVFGAQSPFGGYKMSGSGRELGEYGLQAYTEVKTVTVKVPQKNS

SEQ ID NO: 887516 - protein, 143 aa, Homo sapiens
QRIPPLLSTSLCGGGIAADRGYFIQPTVFGDVQDGMTIAKEEIFGPVMQILKFKTIEEVVGRANNSTYGLAAAVFTKDLDKANYLSQALQAGTVWVNCYDVFGAQSPFGGYKMSGSGRELGEYGLQAYTEVKTVTVKVPQKNS

SEQ ID NO: 887517 - protein, 445 aa, Homo sapiens
MLRAAARFGPRLGRRLLSAAATQAVPAPNQQPEVFCNQIFINNEWHDAVSRKTFPTVNPSTGEVICQVAEGDKEDVDKAVKAARAAFQLGSPWRRMDASHRGRLLNRLADLIERDRTYLAALETLDNGKPYVISYLVDLDMVLKCLRYYAGWADKYHGKTIPIDGDFFSYTRHEPVGVCGQIIPWNFPLLMQAWKLGPALATGNVVVMKVAEQTPLTALYVANLIKEAGFPPGVVNIVPGFGPTAGAAIASHEDVDKVAFTGSTEIGRVIQVAAGSSNLKRVTLELGGKSPNIIMSDADMDWAVEQAHFALFFNQGQCCCAGSRTFVQEDIYDEFVERSVARAKSRVVGNPFDSKTEQGPQVDETQFKKILGYINTGKQEGAKLLCGGGIAADRGYFIQPTVFGDVQDGMTIAKEEIFGPVMQILKFKTIEEVGEGGDVGEGEDV

SEQ ID NO: 887518 - protein, 328 aa, Homo sapiens
MLRAAARFGPRLGRRLLSAAATQAVPAPNQQPEVFCNQIFINNEWHDAVSRKTFPTVNPSTGEVICQVAEGDKEDVDKAVKAARAAFQLGSPWRRMDASHRGRLLNRLADLIERDRTYLAALETLDNGKPYVISYLVDLDMVLKCLRYYAGWADKYHGKTIPIDGDFFSYTRHEPVGVCGQIIPWNFPLLMQAWKLGPALATGNRGYFIQPTVFGDVQDGMTIAKEEIFGPVMQILKFKTIEEVVGRANNSTYGLAAAVFTKDLDKANYLSQALQAGTVWVNCYDVFGAQSPFGGYKMSGSGRELGEYGLQAYTEVKTVTVKVPQKNS

SEQ ID NO: 887519 - protein, 293 aa, Homo sapiens
MLRAAARFGPRLGRRLLSAAATQAVPAPNQQPEVFCNQIFINNEWHDAVSRKTFPTVNPSTGEVICQVAEGDKEDVDKAVKAARAAFQLGSPWRRMDASHRGRLLNRLADLIERDRTYLAALETLDNGKPYVISYLVDLDMVLKCLRYYAGWADKYHGKTIPIDGDFFSYTRHEPVGVCGQIIPWNFPLLMQAWKLGPALATGNVVVMKVAEQTPLTALYVANLIKELLPLCVHCADCPRLGALPALRFASGFPAPDCPLPGLWNRPNGLAGGKPHSLALLAVPPFRSPALSR

SEQ ID NO: 887520 - protein, 71 aa, Homo sapiens
QRIPPLLSTSLCGGGIAADRGYFIQPTVFGDVQDGMTIAKEEIFGPVMQILKFKTIEEVGEGGDVGEGEDV

SEQ ID NO: 887521 - protein, 512 aa, Homo sapiens
MDLAGNKAAALDIAMIKMVAPSMASRVIDRAIQIFINNEWHDAVSRKTFPTVNPSTGEVICQVAEGDKEDVDKAVKAARAAFQLGSPWRRMDASHRGRLLNRLADLIERDRTYLAALETLDNGKPYVISYLVDLDMVLKCLRYYAGWADKYHGKTIPIDGDFFSYTRHEPVGVCGQIIPWNFPLLMQAWKLGPALATGNVVVMKVAEQTPLTALYVANLIKEAGFPPGVVNIVPGFGPTAGAAIASHEDVDKVAFTGSTEIGRVIQVAAGSSNLKRVTLELGGKSPNIIMSDADMDWAVEQAHFALFFNQGQCCCAGSRTFVQEDIYDEFVERSVARAKSRVVGNPFDSKTEQGPQVDETQFKKILGYINTGKQEGAKLLCGGGIAADRGYFIQPTVFGDVQDGMTIAKEEIFGPVMQILKFKTIEEVVGRANNSTYGLAAAVFTKDLDKANYLSQALQAGTVWVNCYDVFGAQSPFGGYKMSGSGRELGEYGLQAYTEVKTVTVKVPQKNS

SEQ ID NO: 887522 - protein, 496 aa, Homo sapiens
MLRAAARFGPRLGRRLLSAAATQAVPAPNQQPEVFCNQIFINNEWHDAVSRKEDVDKAVKAARAAFQLGSPWRRMDASHRGRLLNRLADLIERDRTYLAALETLDNGKPYVISYLVDLDMVLKCLRYYAGWADKYHGKTIPIDGDFFSYTRHEPVGVCGQIIPWNFPLLMQAWKLGPALATGNVVVMKVAEQTPLTALYVANLIKEAGFPPGVVNIVPGFGPTAGAAIASHEDVDKVAFTGSTEIGRVIQVAAGSSNLKRVTLELGGKSPNIIMSDADMDWAVEQAHFALFFNQGQCCCAGSRTFVQEDIYDEFVERSVARAKSRVVGNPFDSKTEQGPQVDETQFKKILGYINTGKQEGAKLLCGGGIAADRGYFIQPTVFGDVQDGMTIAKEEIFGPVMQILKFKTIEEVVGRANNSTYGLAAAVFTKDLDKANYLSQALQAGTVWVNCYDVFGAQSPFGGYKMSGSGRELGEYGLQAYTEVKTVTVKVPQKNS

SEQ ID NO: 887523 - protein, 498 aa, Homo sapiens
MLRAAARFGPRLGRRLLSAAATQAVPAPNQQPEVFCNQIFINNEWHDAVSRKTFPTVNPSTGEVICQVAEGDKEDVDKAVKAARAAFQLGSPWRRMDASHRGRLLNRLADLIERDRTYLAALETLDNGKPYVISYLVDLDMVLKCLRYAGWADKYHGGVCGQIIPWNFPLLMQAWKLGPALATGNVVVMKVAEQTPLTALYVANLIKEAGFPPGVVNIVPGFGPTAGAAIASHEDVDKVAFTGSTEIGRVIQVAAGSSNLKRVTLELGGKSPNIIMSDADMDWAVEQAHFALFFNQGQCCCAGSRTFVQEDIYDEFVERSVARAKSRVVGNPFDSKTEQGPQVDETQFKKILGYINTGKQEGAKLLCGGGIAADRGYFIQPTVFGDVQDGMTIAKEEIFGPVMQILKFKTIEEVVGRANNSTYGLAAAVFTKDLDKANYLSQALQAGTVWVNCYDVFGAQSPFGGYKMSGSGRELGEYGLQAYTEVKTVTVKVPQKNS

SEQ ID NO: 887524 - protein, 517 aa, Homo sapiens; identical to SEQ ID NO: 887502

SEQ ID NO: 887525 - protein, 321 aa, Homo sapiens
MVITQPDEASGLLPELHNGQVLTVLRIDNTCAPISFDLGAAEEQLQTWGIQVPADQYRSLAESALLEPQVRRYIIYNSRPMRLAFAVVFYVVVWANIYSTSQMFALGNHWAGMLLVTLAAVSLTLTLVLVFERHQKKANTNTDLRLAAANGALLRHRVLLGVTDTVEGCQSVIQLWFVYFDLENCVQFLSDHVQEMKTSQESLLRSRLSQLCVVMETGVSPATAEGPENLEDAPLLPGNSCPNERPLMQTELHQLVPEAEPEEMARQLLAVFGGYYIRLLVTSQLPQAMGTRHTNSPRIPCPCQLIEAYILGTGCCPFLAR

SEQ ID NO: 887526 - protein, 206 aa, Homo sapiens
  misc_feature (6)..(6): Xaa can be any naturally occurring amino acid
YSIPEXCTRLGGATKSNCKLGASQVPADQYRSLAESALLEPQVRRYIIYNSRPMRLAFAVVFYVVVWANIYSTSQMFALGNHWAGMLLVTLAAVSLTLTLVLVFERHQKKANTNTDLRLAAANGALLRHRVLLGVTDTVEGCQSVIQEMARQLLAVFGGYYIRLLVTSQLPQAMGTRHTNSPRIPCPCQLIEAYILGTGCCPFLAR

SEQ ID NO: 887527 - protein, 342 aa, Homo sapiens
MACEPQVDPGATGPLPPSSPGWSALPGGSPPGWGQELHNGQVLTVLRIDNTCAPISFDLGAAEEQLQTWGIQVPADQYRSLAESALLEPQVRRYIIYNSRPMRLAFAVVFYVVVWANIYSTSQMFALGNHWAGMLLVTLAAVSLTLTLVLVFERHQKKANTNTDLRLAAANGALLRHRVLLGVTDTVEGCQSVIQLWFVYFDLENCVQFLSDHVQEMKTSQESLLRSRLSQLCVVMETGVSPATAEGPENLEDAPLLPGNSCPNERPLMQTELHQLVPEAEPEEMARQLLAVFGGYYIRLLVTSQLPQAMGTRHTNSPRIPCPCQLIEAYILGTGCCPFLAR

SEQ ID NO: 887528 - protein, 342 aa, Homo sapiens; identical to SEQ ID NO: 887527

SEQ ID NO: 887529 - protein, 342 aa, Homo sapiens; identical to SEQ ID NO: 887527

SEQ ID NO: 887530 - protein, 342 aa, Homo sapiens; identical to SEQ ID NO: 887527

SEQ ID NO: 887531 - protein, 828 aa, Homo sapiens
NNILGLGPTFWALLASPKMEHKEVVLLLLLFLKSGQGEPLDDYVNTQGASLFSVTKKQLGAGSIEECAAKCEEDEEFTCRAFQYHSKEQQCVIMAENRKSSIIIRMRDVVLFEKKVYLSECKTGNGKNYRGTMSKTKNGITCQKWSSTSPHRPRFSPATHPSEGLEENYCRNPDNDPQGPWCYTTDPEKRYDYCDILECEEECMHCSGENYDGKISKTMSGLECQAWDSQSPHAHGYIPSKFPNKNLKKNYCRNPDRELRPWCFTTDPNKRWELCDIPRCTTPPPSSGPTYQCLKGTGENYRGNVAVTVSGHTCQHWSAQTPHTHNRTPENFPCKNLDENYCRNPDGKRAPWCHTTNSQVRWEYCKIPSCDSSPVSTEQLAPTAPPELTPVVQDCYHGDGQSYRGTSSTTTTGKKCQSWSSMTPHRHQKTPENYPNAGLTMNYCRNPDADKGPWCFTTDPSVRWEYCNLKKCSGTEASVVAPPPVVLLPDVETPSEEDCMFGNGKGYRGKRATTVTGTPCQDWAAQEPHRHSIFTPETNPRAGLEKNYCRNPDGDVGGPWCYTTNPRKLYDYCDVPQCAAPSFDCGKPQVEPKKCPGRVVGGCVAHPHSWPWQVSLRTRFGMHFCGGTLISPEWVLTAAHCLEKSPRPSSYKVILGAHQEVNLEPHVQEIEVSRLFLEPTRKDIALLKLSSPAVITDKVIPACLPSPNYVVADRTECFITGWGETQGTFGAGLLKEAQLPVIENKVCNRYEFLNGRVQSTELCAGHLAGGTDSCQGDSGGPLVCFEKDKYILQGVTSWGLGCARPNKPGVYVRVSRFVTWIEGVMRNN

SEQ ID NO: 887532 - protein, 160 aa, Homo sapiens
ISRYSGPTKNNPPRMSGNRVSRLFLSPHKKICPAKVSSPAVITDKVIPACLPSPNYVVGTFGAGLLKEAQLPVIENKVCNRYEFLNGRVQSTELCAGHLAGGTDSCQGDSGGPLVCFEKDKYILQGVTSWGLGCARPNKPGVYVRVSRFVTWIEGVMRNN

SEQ ID NO: 887533 - protein, 828 aa, Homo sapiens; identical to SEQ ID NO: 887531

SEQ ID NO: 887534 - protein, 809 aa, Homo sapiens
NNILGLGPTFWALLASPKMEHKEVVLLLLLFLKSGQGEPLDDYVNTQGASLFSVTKKQLGAGSIEECAAKCEEDEEFTCRAFQYHSKEQQCVIMAENRKSSIIIRMRDVVLFEKKVYLSECKTGNGKNYRGTMSKTKNGITCQKWSSTSPHRPRFSPATHPSEGLEENYCRNPDNDPQGPWCYTTDPEKRYDYCDILECEEECMHCSGAMTAHTLMDDIPSKFPNKNLKKNYCRNPDRELRPWCFTTDPNKRWELCDIPRCTTPPPSSGPTYQCLKGTGENYRGNVAVTVSGHTCQHWSAQTPHTHNRTPENFPCKNLDENYCRNPDGKRAPWCHTTNSQVRWEYCKIPSCDSSPVSTEQLAPTAPPELTPVVQDCYHGDGQSYRGTSSTTTTGKKCQSWSSMTPHRHQKTPENYPNAGLTMNYCRNPDADKGPWCFTTDPSVRWEYCNLKKCSGTEASVVAPPPVVLLPDVETPSEEDCMFGNGKGYRGKRATTVTGTPCQDWAAQEPHRHSIFTPETNPRAGLEKNYCRNPDGDVGGPWCYTTNPRKLYDYCDVPQCAAPSFDCGKPQVEPKKCPGRVVGGCVAHPHSWPWQVSLRTRFGMHFCGGTLISPEWVLTAAHCLEKSPRPSSYKVILGAHQEVNLEPHVQEIEVSRLFLEPTRKDIALLKLSSPAVITDKVIPACLPSPNYVVADRTECFITGWGETQGTFGAGLLKEAQLPVIENKVCNRYEFLNGRVQSTELCAGHLAGGTDSCQGDSGGPLVCFEKDKYILQGVTSWGLGCARPNKPGVYVRVSRFVTWIEGVMRNN

SEQ ID NO: 887535 - protein, 828 aa, Homo sapiens; identical to SEQ ID NO: 887531

SEQ ID NO: 887536 - protein, 810 aa, Homo sapiens
NNILGLGPTFWALLASPKMEHKEVVLLLLLFLKSGQGEPLDDYVNTQGASLFSVTKKQLGAGSIEECAAKCEEDEEFTCRAFQYHSKEQQCVIMAENRKSSIIIRMRDVVLFEKKVYLSECKTGNGKNYRGTMSKTKNGITCQKWSSTSPHRPRFSPATHPSEGLEENYCRNPDNDPQGPWCYTTDPEKRYDYCDILECEEECMHCSGENYDGKISKTMSGLECQAWDSQSPHAHGYIPSKFPNKNLKKNYCRNPDRELRPWCFTTDPNKRWELCDIPRCTTPPPSSGPTYQCLKGTGENYRGNVAVTVSGHTCQHWSAQTPHTHNRTPENFPCKNLDENYCRNPDGKIPSCDSSPVSTEQLAPTAPPELTPVVQDCYHGDGQSYRGTSSTTTTGKKCQSWSSMTPHRHQKTPENYPNAGLTMNYCRNPDADKGPWCFTTDPSVRWEYCNLKKCSGTEASVVAPPPVVLLPDVETPSEEDCMFGNGKGYRGKRATTVTGTPCQDWAAQEPHRHSIFTPETNPRAGLEKNYCRNPDGDVGGPWCYTTNPRKLYDYCDVPQCAAPSFDCGKPQVEPKKCPGRVVGGCVAHPHSWPWQVSLRTRFGMHFCGGTLISPEWVLTAAHCLEKSPRPSSYKVILGAHQEVNLEPHVQEIEVSRLFLEPTRKDIALLKLSSPAVITDKVIPACLPSPNYVVADRTECFITGWGETQGTFGAGLLKEAQLPVIENKVCNRYEFLNGRVQSTELCAGHLAGGTDSCQGDSGGPLVCFEKDKYILQGVTSWGLGCARPNKPGVYVRVSRFVTWIEGVMRNN

SEQ ID NO: 887537 - protein, 514 aa, Homo sapiens
NNILGLGPTFWALLASPKMEHKEVVLLLLLFLKSGQGEPLDDYVNTQGASLFSVTKKQLGAGSIEECAAKCEEDEEFTCRAFQYHSKEQQCVIMAENRKSSIIIRMRDVVLFEKKVYLSECKTGNGKNYRGTMSKTKNGITCQKWSSTSPHRPRFSPATHPSEGLEENYCRNPDNDPQGPWCYTTDPEKRYDYCDILECEEECMHCSGENYDGKISKTMSGLECQAWDSQSPHAHGYIPSKFPNKNLKKNYCRNPDRELRPWCFTTDPNKRWELCDIPRCTTPPPSSGPTYQCLKGTGENYRGNVAVTVSGHTCQHWSAQTPHTHNRTPENFPCKNLDENYCRNPDGKRAPWCHTTNSQVRWEYCKIPSCDSSPVSTEQLAPTAPPELTPVVQDCYHGDGQSYRGTSSTTTTGKKCQSWSSMTPHRHQKTPENYPNAPLVFYHRPQRQVGVLQPEKMLRNRSECCSTSACCPASRCRDSFRRRLYVWEWERIPRQEGDHCYWDAMPGLGCPGAP

SEQ ID NO: 887538 - protein, 694 aa, Homo sapiens
NNILGLGPTFWALLASPKMEHKEVVLLLLLFLKSGQGEPLDDYVNTQGASLFSVTKKQLGAGSIEECAAKCEEDEEFTCRAFQYHSKEQQCVIMAENRKSSIIIRMRDVVLFEKKVYLSECKTGNGKNYRGTMSKTKNGITCQKWSSTSPHRPRFSPATHPSEGLEENYCRNPDNDPQGPWCYTTDPEKRYDYCDILECEEECMHCSGENYDGKISKTMSGLECQAWDSQSPHAHGYIPSKFPNKNLKKNYCRNPDRELRPWCFTTDPNKRWELCDIPRCTTPPPSSGPTYQCLKGTGENYRGNVAVTVSGHTCQHWSAQTPHTHNRTPENFPCKNLDENYCRNPDGKRAPWCHTTNSQVRWEYCKIPSCDSSPVSTEQLAPTAPPELTPVVQDCYHGDGQSYRGTSSTTTTGKKCQSWSSMTPHRHQKTPENYPNAGLTMNYCRNPDADKGPWCFTTDPSVRWEYCNLKKCSGTEASVVAPPPVVLLPDVETPSEEDCMFGNGKGYRGKRATTVTGTPCQDWAAQEPHRHSIFTPETNPRAGLEKNYCRNPDGDVGGPWCYTTNPRKLYDYCDVPQCAAPSFDCGKPQVEPKKCPGRVVGGCVAHPHSWPWQVSLRTRFGMHFCGGTLISPEWVLTAAHCLEKSPRPSSYKVILGAHQEVNLEPHVQEIEVSRLFLEPTRNPSLSAIPKLCGR

SEQ ID NO: 887539 - protein, 329 aa, Homo sapiens
MFGNGKGYRGKRATTVTGTPCQDWAAQEPHRHSIFTPETNPRAGLEKNYCRNPDGDVGGPWCYTTNPRKLYDYCDVPQCAAPSFDCGKPQVEPKKCPGRVVGGCVAHPHSWPWQVSLRTRFGMHFCGGTLISPEWVLTAAHCLEKSPRPSSYKVILGAHQEVNLEPHVQEIEVSRLFLEPTRKDIALLKLSSPAVITDKVIPACLPSPNYVVADRTECFITGWGETQGTFGAGLLKEAQLPVIENKVCNRYEFLNGRVQSTELCAGHLAGGTDSCQGDSGGPLVCFEKDKYILQGVTSWGLGCARPNKPGVYVRVSRFVTWIEGVMRNN

SEQ ID NO: 887540 - protein, 694 aa, Homo sapiens
  misc_feature (693)..(694): Xaa can be any naturally occurring amino acid
NNILGLGPTFWALLASPKMEHKEVVLLLLLFLKSGQGEPLDDYVNTQGASLFSVTKKQLGAGSIEECAAKCEEDEEFTCRAFQYHSKEQQCVIMAENRKSSIIIRMRDVVLFEKKVYLSECKTGNGKNYRGTMSKTKNGITCQKWSSTSPHRPRFSPATHPSEGLEENYCRNPDNDPQGPWCYTTDPEKRYDYCDILECEEECMHCSGENYDGKISKTMSGLECQAWDSQSPHAHGYIPSKFPNKNLKKNYCRNPDRELRPWCFTTDPNKRWELCDIPRCTTPPPSSGPTYQCLKGTGENYRGNVAVTVSGHTCQHWSAQTPHTHNRTPENFPCKNLDENYCRNPDGKRAPWCHTTNSQVRWEYCKIPSCDSSPVSTEQLAPTAPPELTPVVQDCYHGDGQSYRGTSSTTTTGKKCQSWSSMTPHRHQKTPENYPNAGLTMNYCRNPDADKGPWCFTTDPSVRWEYCNLKKCSGTEASVVAPPPVVLLPDVETPSEEDCMFGNGKGYRGKRATTVTGTPCQDWAAQEPHRHSIFTPETNPRAGLEKNYCRNPDGDVGGPWCYTTNPRKLYDYCDVPQCAAPSFDCGKPQVEPKKCPGRVVGGCVAHPHSWPWQVSLRTRFGMHFCGGTLISPEWVLTAAHCLEKSPGLIYKVIWVPHVEEQRATKTMCTIATQYGGTAGLTPVYICPVGEDRXX

SEQ ID NO: 887541 - protein, 585 aa, Homo sapiens
NNILGLGPTFWALLASPKMEHKEVVLLLLLFLKSGQGEPLDDYVNTQGASLFSVTKKQLGAGSIEECAAKCEEDEEFTCRAFQYHSKEQQCVIMAENRKSSIIIRMRDVVLFEKKVYLSECKTGNGKNYRGTMSKTKNGITCQKWSSTSPHRPRFSPATHPSEGLEENYCRNPDNDPQGPWCYTTDPEKRYDYCDILECEEECMHCSGENYDGKISKTMSGLECQAWDSQSPHAHGYIPSKFPNKNLKKNYCRNPDRELRPWCFTTDPNKRWELCDIPRCTTPPPSSGPTYQCLKGTGENYRGNVAVTVSGHTCQHWSAQTPHTHNRTPENFPCKNLDENYCRNPDGKRAPWCHTTNSQVRWEYCKIPSCDSSPVSTEQLAPTAPPELTPVVQDCYHGDGQSYRGTSSTTTTGKKCQSWSSMTPHRHQKTPENYPNAGLTMNYCRNPDADKGPWCFTTDPSVRWEYCNLKKCSGTEASVVAPPPVVLLPDVETPSEEDCMFGNGKGYRGKRATTVTGTPCQDWAAQEPHRHSIFTPETNPRAGLEKNYCRNPDGDVGGPWCYTTNPRKLYDYCDVPQCGRLPSFW

SEQ ID NO: 887542 - protein, 700 aa, Homo sapiens
NNILGLGPTFWALLASPKMEHKEVVLLLLLFLKSGQGEPLDDYVNTQGASLFSVTKKQLGAGSIEECAAKCEEDEEFTCRAFQYHSKEQQCVIMAENRKSSIIIRMRDVVLFEKKVYLSECKTGNGKNYRGTMSKTKNGITCQKWSSTSPHRPRFSPATHPSEGLEENYCRNPDNDPQGPWCYTTDPEKRYDYCDILECEEECMHCSGENYDGKISKTMSGLECQAWDSQSPHAHGYIPSKFPNKNLKKNYCRNPDRELRPWCFTTDPNKRWELCDIPRCTTPPPSSGPTYQCLKGTGENYRGNVAVTVSGHTCQHWSAQTPHTHNRTPENFPCKNLDENYCRNPDGKRAPWCHTTNSQVRWEYCKIPSCDSSPVSTEQLAPTAPPELTPVVQDCYHGDGQSYRGTSSTTTTGKKCQSWSSMTPHRHQKTPENYPNAGLTMNYCRNPDADKGPWCFTTDPSVRWEYCNLKKCSGTEASVVAPPPVVLLPDVETPSEEDCMFGNGKGYRGKRATTVTGTPCQDWAAQEPHRHSIFTPETNPRAGLEKNYCRNPDGDVGGPWCYTTNPRKLYDYCDVPQCAAPSFDCGKPQVEPKKCPGRVVGGCVAHPHSWPWQVSLRTRFGMHFCGGTLISPEWVLTAAHCLEKSPRPSSYKVILGAHQEVNLEPHVQEIEVSRLFLEPTRKDIALLKLSRTAGFCSKVT

SEQ ID NO: 887543 - protein, 579 aa, Homo sapiens
NNILGLGPTFWALLASPKMEHKEVVLLLLLFLKSGQGEPLDDYVNTQGASLFSVTKKQLGAGSIEECAAKCEEDEEFTCRAFQYHSKEQQCVIMAENRKSSIIIRMRDVVLFEKKVYLSECKTGNGKNYRGTMSKTKNGITCQKWSSTSPHRPRFSPATHPSEGLEENYCRNPDNDPQGPWCYTTDPEKRYDYCDILECEEECMHCSGENYDGKISKTMSGLECQAWDSQSPHAHGYIPSKFPNKNLKKNYCRNPDRELRPWCFTTDPNKRWELCDIPRCTTPPPSSGPTYQCLKGTGENYRGNVAVTVSGHTCQHWSAQTPHTHNRTPENFPCKNLDENYCRNPDGKRAPWCHTTNSQVRWEYCKIPSCDSSPVSTEQLAPTAPPELTPVVQDCYHGDGQSYRGTSSTTTTGKKCQSWSSMTPHRHQKTPENYPNAGLTMNYCRNPDADKGPWCFTTDPSVRWEYCNLKKCSGTEASVVAPPPVVLLPDVETPSEEDCMFGNGKGYRGKRATTVTGTPCQDWAAQEPHRHSIFTPETNPRAGLEKNYCRNPDGDVGGPWCYTTVGSLKWSRRNVLEGL

SEQ ID NO: 887544 - protein, 637 aa, Homo sapiens
  misc_feature (603)..(603): Xaa can be any naturally occurring amino acid
  misc_feature (619)..(619): Xaa can be any naturally occurring amino acid
NNILGLGPTFWALLASPKMEHKEVVLLLLLFLKSGQGEPLDDYVNTQGASLFSVTKKQLGAGSIEECAAKCEEDEEFTCRAFQYHSKEQQCVIMAENRKSSIIIRMRDVVLFEKKVYLSECKTGNGKNYRGTMSKTKNGITCQKWSSTSPHRPRFSPATHPSEGLEENYCRNPDNDPQGPWCYTTDPEKRYDYCDILECEEECMHCSGENYDGKISKTMSGLECQAWDSQSPHAHGYIPSKFPNKNLKKNYCRNPDRELRPWCFTTDPNKRWELCDIPRCTTPPPSSGPTYQCLKGTGENYRGNVAVTVSGHTCQHWSAQTPHTHNRTPENFPCKNLDENYCRNPDGKRAPWCHTTNSQVRWEYCKIPSCDSSPVSTEQLAPTAPPELTPVVQDCYHGDGQSYRGTSSTTTTGKKCQSWSSMTPHRHQKTPENYPNAGLTMNYCRNPDADKGPWCFTTDPSVRWEYCNLKKCSGTEASVVAPPPVVLLPDVETPSEEDCMFGNGKGYRGKRATTVTGTPCQDWAAQEPHRHSIFTPETNPRAGLEKNNPRKLYDYCDVPQCAAPSFDCGKPQVEPKKCPGRVVGGCVAHPHSWPWQVSLRTRXDDSVSTYIRVVCCALXRVQSYLKHLVHRVIDRVE

SEQ ID NO: 887545 - protein, 389 aa, Homo sapiens
MIQSQISFEDVAVDFTLEEWQLLNPTQKNLYRDVMLENYSNLVFLEVWLDNPKMWLRDNQDNLKSMERGHKYDVFGKIFNSSINIVHVGLRSHKCGTGEKSLKCPFDLLIPKNNCERKKIDELNKKLLFCIKPGRTHGGIKYCDCSTCRKSSNEEPWLTANHITHTGVYLCMECGRFFNKKSQLVIHQRTHTGEKPYQCSECGKAFSQKSLLTVHQRTHSGEKPHGCSECQKAFSRKSLLILHQRIHTGEKPYGCSECGKAFSRKSQLKRHQITHTIEKPYSCSECGKAFSQKLKLITHQRAHTGEKPYPCSHCGKAFFWKSQLITHQRTHTGKKPYGCGECQKAFSRNSLLIRHQRIHTGEKPYECNECGEAFIRKPQLIKHQITHTG

SEQ ID NO: 887546 - protein, 108 aa, Homo sapiens
MSLLVPPYQVWTVSGGVLHRAQEPRQSSASPRQHREEAEVWAQQTVQVHSRHSPWKGSKRTSCVWFFRRRRKLLGAGLKNKDHYYFFPFPEPPRCQFCFVFLLPVCPM

SEQ ID NO: 887547 - protein, 115 aa, Homo sapiens
MIQSQVGYRFILCFMKMIQSQVGYRFILCFMKMIQSQVGYRFILCFMKMIQSQVGYRFILCFMKMIQSQVGYRFILCFVGVMRLTEISATHRRVYIHLNKRKYKLGKEDVQRSTK

SEQ ID NO: 887548 - protein, 100 aa, Homo sapiens
VLRVHVPDRAVSAAALRGPRGNSPLEQDNSCEIRKKSPQDQGCILSLQTTDQRPLQGVRTKRSHKTADFPRAAENDPVTGPKCETGYLIMDPNRSDFDGP

SEQ ID NO: 887549 - protein, 498 aa, Homo sapiens
GLRKLEDPDDSSPGKIFSTLKRPQVETKDRIAYEYVLLDFTLQASSNPEVIKINSILDIVTKVENYYLKGYIVGAIHPVIQPVGQRKHLPASYLYRVVLLRLKLSPKNSAAPSGQRRPRLVIEECPLTSEAQTNDAAKELIEKINVAAKRGMKFVGFISQHYSPSKFCNGTNHDGDIESMLHVRHGSDENCRSWNEGTLSGQSSESGIEEELHHESGQYQMEQNGSPTSSKSRKGEASDNKLYTVFNAFDDDSTSWAYQEGILSMKVTRKGSVISTLDADWLELTTFYYKQGLSLIDSFVFWETSKGEHLPKSLEGFFIYEEEGSGVPGSSRKGNDAIVVEQWTVIEGCEIKTDYGPLLHTLAEFGWLLTSVLPTPVLRHDSEGNLATKQIVFLQRPVMWNSAAQTPDKKASRHIKGEDKNKATSRSIGLDTTSSQPAESRHLPEECRLSPSRECWTKEGRLAQHNSFSGFSSSDNVLRELDDGQFDQEDGVTQVTCM

SEQ ID NO: 887550 - protein, 225 aa, Homo sapiens
FSFSFLYELFKDLDGFMSHLVFTTLLNCTLFLTGEHLPKSLEGFFIYEEEGSGVPGSSRKGNDAIVVEQWTVIEGCEIKTDYGPLLHTLAEFGWLLTSVLPTPVLRHDSEGNLATKQIVFLQRPVMWNSAAQTPDKKASRHIKGEDKNKATSRSIGLDTTSSQPAESRHLPEECRLSPSRECWTKEGRLAQHNSFSGFSSSDNVLRELDDGQFDQEDGVTQVTCM

SEQ ID NO: 887551 - protein, 348 aa, Homo sapiens
GLRKLEDPDDSSPGKIFSTLKRPQVETKDRIAYEYVLLDFTLQASSNPEVIKINSILDIVTKVENYYLKGYIVGAIHPVIQPVGQRKHLPASYLYRVVLLRLKLSPKNSAAPSGQRRPRLVIEECPLTSEAQTNDAAKELIEKINVAAKRGMKFVGFISQHYSPSKFCNGTNHDGDIESMLHVRHGSDENCRSWNEGTLSGQSSESGIEEELHHESGQYQMEQNGSPTSSKSRKGEASDNKLYTVFNAFDDDSTSWAYQEGILSMKVTRKGSVISTLDADWLELTTFYYKQGLSLIDSFVFWETSKGEHLPKSLEGFFIYEEEGSGVPGSSRKGNDAIVVEQWTVIEF

SEQ ID NO: 887552 - protein, 176 aa, Homo sapiens
CAWRAGGRRRVGQGNSGLQSPCWGFGERLDPGFWDASGEGSTGFAFIRPKMPFFGNTFSPKKTPPRKSASLSNLHSLDRSTREVELGLEYGSPTMNLAGQSLKFENGQWIAETGVSGGVDRREVQRLRRRNQQLEEENNLLRLKVDILLDMLSESTAESHLMEKELDELRISRKRK

SEQ ID NO: 887553 - protein, 169 aa, Homo sapiens
MDKCQKHDVECEKPDANEDSLCNSVHVQWPGEGSTGFAFIRPKMPFFGNTFSPKKTPPRKSASLSNLHSLDRSTREVELGLEYGSPTMNLAGQSLKFENGQWIAETGVSGGVDRREVQRLRRRNQQLEEENNLLRLKVDILLDMLSESTAESHLMEKELDELRISRKRK

SEQ ID NO: 887554 - protein, 137 aa, Homo sapiens
AGGGQAAGGGWVKVTLGYRVLAGGSGSAWTPASGTRQLDRSTREVELGLEYGSPTMNLAGQSLKFENGQWIAETGVSGGVDRREVQRLRRRNQQLEEENNLLRLKVDILLDMLSESTAESHLMEKELDELRISRKRK

SEQ ID NO: 887555 - protein, 81 aa, Homo sapiens
NHSTRIVSSHMIKCMSSRFEDNGIRSVIQLLVPLTFSDPRRREHWLCFHQAKDAFLWEYVQSEEDTSSEVGISLQPAFCAK

SEQ ID NO: 887556 - protein, 81 aa, Homo sapiens; identical to SEQ ID NO: 887555

SEQ ID NO: 887557 - protein, 81 aa, Homo sapiens; identical to SEQ ID NO: 887555

SEQ ID NO: 887558 - protein, 203 aa, Homo sapiens
FENPMKTRDSALVFLELKILSSNANEQTITTHSCMDKCQKHDVECEKPDANEDSLCNSVHVQWPGEGSTGFAFIRPKMPFFGNTFSPKKTPPRKSASLSNLHSLDRSTREVELGLEYGSPTMNLAGQSLKFENGQWIAETGVSGGVDRREVQRLRRRNQQLEEENNLLRLKVDILLDMLSESTAESHLMEKELDELRISRKRK

SEQ ID NO: 887559 - protein, 81 aa, Homo sapiens
CAWRAGGRRRVGQGNSGLQSPCWGFGERLDPGFWDASGEGSTGFAFIRPKMPFFGNTFSPKKTPPRKSASLSNLHSVPSND

SEQ ID NO: 887560 - protein, 176 aa, Homo sapiens; identical to SEQ ID NO: 887552

SEQ ID NO: 887561 - protein, 227 aa, Homo sapiens
SGSLRPLRPLKRRRRLAQEEEVEPKLFPVPVSVRGAAAAAAAAGAAMPKGGRKGGHKGRARQYTSPEEIDAQLQAEKQKAREEEEQKEGGDGAAGDPKKEKKSLDSDESEDEEDDYQQKRKGVEGLIDIENPNRVAQTTKKVTQLDLDGPKELSRREREEIEKQKAKERYMKMHLAGKTEQAKADLARLAIIRKQREEAARKKEEERKAKDDATLSGKRMQSLSLNK

SEQ ID NO: 887562 - protein, 193 aa, Homo sapiens
RTRARNSRVTAAMPKGGRKGGHKGRARQYTSPEEIDAQLQAEKQKAREEEEQKEGGDGAAGDPKKEKKSLDSDESEDEEDDYQQKRKGVEGLIDIENPNRVAQTTKKVTQLDLDGPKELSRREREEIEKQKAKERYMKMHLAGKTEQAKADLARLAIIRKQREEAARKKEEERKAKDDATLSGKRMQSLSLNK

SEQ ID NO: 887563 - protein, 227 aa, Homo sapiens; identical to SEQ ID NO: 887561

SEQ ID NO: 887564 - protein, 227 aa, Homo sapiens; identical to SEQ ID NO: 887561

SEQ ID NO: 887565 - protein, 183 aa, Homo sapiens
KLRVSAGRKGGHKGRARQYTSPEEIDAQLQAEKQKAREEEEQKEGGDGAAGDPKKEKKSLDSDESEDEEDDYQQKRKGVEGLIDIENPNRVAQTTKKVTQLDLDGPKELSRREREEIEKQKAKERYMKMHLAGKTEQAKADLARLAIIRKQREEAARKKEEERKAKDDATLSGKRMQSLSLNK

SEQ ID NO: 887566 - protein, 227 aa, Homo sapiens; identical to SEQ ID NO: 887561

SEQ ID NO: 887567 - protein, 227 aa, Homo sapiens; identical to SEQ ID NO: 887561

SEQ ID NO: 887568 - protein, 227 aa, Homo sapiens; identical to SEQ ID NO: 887561

SEQ ID NO: 887569 - protein, 101 aa, Homo sapiens
CSQRDIEANAKSANSIKQLDLDGPKELSRREREEIEKQKAKERYMKMHLAGKTEQAKADLARLAIIRKQREEAARKKEEERKAKDDATLSGKRMQSLSLNK

SEQ ID NO: 887570 - protein, 155 aa, Homo sapiens
ILPVLTLKTCDQKNTNKCSLGWGPFLASPPRKAEPEGDNVQRELSRGEIAEGLEGHKVDGKENEEKKEKREKQKGKKRKREEGREREEIEKQKAKERYMKMHLAGKTEQAKADLARLAIIRKQREEAARKKEEERKAKDDATLSGKRMQSLSLNK

SEQ ID NO: 887571 - protein, 88 aa, Homo sapiens
LAGSLHIWDGPKELSRREREEIEKQKAKERYMKMHLAGKTEQAKADLARLAIIRKQREEAARKKEEERKAKDDATLSGKRMQSLSLNK

SEQ ID NO: 887572 - protein, 227 aa, Homo sapiens; identical to SEQ ID NO: 887561

SEQ ID NO: 887573 - protein, 94 aa, Homo sapiens
SGSLRPLRPLKRRRRLAQEEEVEPKLFPVPVSVRGAAAAAAAAGAAMPKGGRKGGHKGRARQYTSPEEIDAQLQAEKQKAREEEEQKEGGDGMG

SEQ ID NO: 887574 - protein, 162 aa, Homo sapiens
SGSLRPLRPLKRRRRLAQEEEVEPKLFPVPVSVRGAAAAAAAAGAAMPKGGRKGGHKGRARQYTSPEEIDAQLQAEKQKAREEEEQKEGGDGAAGDPKKEKKSLDSDERKERRKERRKKREKEGKEGRKERKKERKRERERKKERERERERKKERKKERKKE

SEQ ID NO: 887575 - protein, 1176 aa, Homo sapiens
MAERKGTAKVDFLKKIEKEIQQKWDTERVFEVNASNLEKQTSKGKYFVTFPYPYMNGRLHLGHTFSLSKCEFAVGYQRLKGKCCLFPFGLHCTGMPIKACADKLKREIELYGCPPDFPDEEEEEEETSVKTEDIIIKDKAKGKKSKAAAKAGSSKYQWGIMKSLGLSDEEIVKFSEAEHWLDYFPPLAIQDLKRMGLKVDWRRSFITTDVNPYYDSFVRWQFLTLRERNKIKFGKRYTIYSPKDGQPCMDHDRQTGEGVGPQEYTLLKLKVLEPYPSKLSGLKGKNIFLVAATLRPETMFGQTNCWVRPDMKYIGFETVNGDIFICTQKAARNMSYQGFTKDNGVVPVVKELMGEEILGASLSAPLTSYKVIYVLPMLTIKEDKGTGVVTSVPSDSPDDIAALRDLKKKQALRAKYGIRDDMVLPFEPVPVIEIPGFGNLSAVTICDELKIQSQNDREKLAEAKEKIYLKGFYEGIMLVDGFKGQKVQDVKKTIQKKMIDAGDALIYMEPEKQVMSRSSDECVVALCDQWYLDYGEENWKKQTSQCLKNLETFCEETRRNFEATLGWLQEHACSRTYGLGTHLPWDEQWLIESLSDSTIYMAFYTVAHLLQGGNLHGQAESPLGIRPQQMTKEVWDYVFFKEAPFPKTQIAKEKLDQLKQEFEFWYPVDLRVSGKDLVPNHLSYYLYNHVAMWPEQSDKWPTAVRANGHLLLNSEKMSKSTGNFLTLTQAIDKFSADGMRLALADAGDTVEDANFVEAMADAGILRLYTWVEWVKEMVANWDSLRSGPASTFNDRVFASELNAGIIKTDQNYEKMMFKEALKTGFFEFQAAKDKYRELAVEGMHRELVFRFIEVQTLLLAPFCPHLCEHIWTLLGKPDSIMNASWPVAGPVNEVLIHSSQYLMEVTHDLRLRLKNYMMPAKGKKTDKQPLQKPSHCTIYVAKNYPPWQHTTLSVLRKHFEANNGKLPDNKVIASELGSMPELKKYMKKVMPFVAMIKENLEKMGPRILDLQLEFDEKAVLMENIVYLTNSLELEHIEVKFASEAEDKIREDCCPGKPLNVFRIEPGVSVSLVNPQPSNGHFSTKIEIRQGDNCDSIIRRLMKMNRGIKDLSKVKLMRFDDPLLGPRRVPVLGKEYTEKTPISEHAVFNVDLMSKKIHLTENGIRVDIGDTIIYLVH

SEQ ID NO: 887576 - protein, 148 aa, Homo sapiens
MPIKACADKLKREIELYGCPPDFPDEEEEEEETSVKTEDIIIKDKAKGKKSKAAAKAGSSKYQWGIMKSLGLSDEEIVKFSEAEHWLDYFPPLAIQDLKRMGLKVDWRRSFITTDVNPYYDSFVRWQFLTLRERNKIKFGKRYSLLYL

SEQ ID NO: 887577 - protein, 1176 aa, Homo sapiens; identical to SEQ ID NO: 887575

SEQ ID NO: 887578 - protein, 1122 aa, Homo sapiens
MNGRLHLGHTFSLSKCEFAVGYQRLKGKCCLFPFGLHCTGMPIKACADKLKREIELYGCPPDFPDEEEEEEETSVKTEDIIIKDKAKGKKSKAAAKAGSSKYQWGIMKSLGLSDEEIVKFSEAEHWLDYFPPLAIQDLKRMGLKVDWRRSFITTDVNPYYDSFVRWQFLTLRERNKIKFGKRYTIYSPKDGQPCMDHDRQTGEGVGPQEYTLLKLKVLEPYPSKLSGLKGKNIFLVAATLRPETMFGQTNCWVRPDMKYIGFETVNGDIFICTQKAARNMSYQGFTKDNGVVPVVKELMGEEILGASLSAPLTSYKVIYVLPMLTIKEDKGTGVVTSVPSDSPDDIAALRDLKKKQALRAKYGIRDDMVLPFEPVPVIEIPGFGNLSAVTICDELKIQSQNDREKLAEAKEKIYLKGFYEGIMLVDGFKGQKVQDVKKTIQKKMIDAGDALIYMEPEKQVMSRSSDECVVALCDQWYLDYGEENWKKQTSQCLKNLETFCEETRRNFEATLGWLQEHACSRTYGLGTHLPWDEQWLIESLSDSTIYMAFYTVAHLLQGGNLHGQAESPLGIRPQQMTKEVWDYVFFKEAPFPKTQIAKEKLDQLKQEFEFWYPVDLRVSGKDLVPNHLSYYLYNHVAMWPEQSDKWPTAVRANGHLLLNSEKMSKSTGNFLTLTQAIDKFSADGMRLALADAGDTVEDANFVEAMADAGILRLYTWVEWVKEMVANWDSLRSGPASTFNDRVFASELNAGIIKTDQNYEKMMFKEALKTGFFEFQAAKDKYRELAVEGMHRELVFRFIEVQTLLLAPFCPHLCEHIWTLLGKPDSIMNASWPVAGPVNEVLIHSSQYLMEVTHDLRLRLKNYMMPAKGKKTDKQPLQKPSHCTIYVAKNYPPWQHTTLSVLRKHFEANNGKLPDNKVIASELGSMPELKKYMKKVMPFVAMIKENLEKMGPRILDLQLEFDEKAVLMENIVYLTNSLELEHIEVKFASEAEDKIREDCCPGKPLNVFRIEPGVSVSLVNPQPSNGHFSTKIEIRQGDNCDSIIRRLMKMNRGIKDLSKVKLMRFDDPLLGPRRVPVLGKEYTEKTPISEHAVFNVDLMSKKIHLTENGIRVDIGDTIIYLVH

SEQ ID NO: 887579 - protein, 1204 aa, Homo sapiens
EVLERPMIMLRLLLLPGGVNVIAQSVLVHGERKGTAKVDFLKKIEKEIQQKWDTERVFEVNASNLEKQTSKGKYFVTFPYPYMNGRLHLGHTFSLSKCEFAVGYQRLKGKCCLFPFGLHCTGMPIKACADKLKREIELYGCPPDFPDEEEEEEETSVKTEDIIIKDKAKGKKSKAAAKAGSSKYQWGIMKSLGLSDEEIVKFSEAEHWLDYFPPLAIQDLKRMGLKVDWRRSFITTDVNPYYDSFVRWQFLTLRERNKIKFGKRYTIYSPKDGQPCMDHDRQTGEGVGPQEYTLLKLKVLEPYPSKLSGLKGKNIFLVAATLRPETMFGQTNCWVRPDMKYIGFETVNGDIFICTQKAARNMSYQGFTKDNGVVPVVKELMGEEILGASLSAPLTSYKVIYVLPMLTIKEDKGTGVVTSVPSDSPDDIAALRDLKKKQALRAKYGIRDDMVLPFEPVPVIEIPGFGNLSAVTICDELKIQSQNDREKLAEAKEKIYLKGFYEGIMLVDGFKGQKVQDVKKTIQKKMIDAGDALIYMEPEKQVMSRSSDECVVALCDQWYLDYGEENWKKQTSQCLKNLETFCEETRRNFEATLGWLQEHACSRTYGLGTHLPWDEQWLIESLSDSTIYMAFYTVAHLLQGGNLHGQAESPLGIRPQQMTKEVWDYVFFKEAPFPKTQIAKEKLDQLKQEFEFWYPVDLRVSGKDLVPNHLSYYLYNHVAMWPEQSDKWPTAVRANGHLLLNSEKMSKSTGNFLTLTQAIDKFSADGMRLALADAGDTVEDANFVEAMADAGILRLYTWVEWVKEMVANWDSLRSGPASTFNDRVFASELNAGIIKTDQNYEKMMFKEALKTGFFEFQAAKDKYRELAVEGMHRELVFRFIEVQTLLLAPFCPHLCEHIWTLLGKPDSIMNASWPVAGPVNEVLIHSSQYLMEVTHDLRLRLKNYMMPAKGKKTDKQPLQKPSHCTIYVAKNYPPWQHTTLSVLRKHFEANNGKLPDNKVIASELGSMPELKKYMKKVMPFVAMIKENLEKMGPRILDLQLEFDEKAVLMENIVYLTNSLELEHIEVKFASEAEDKIREDCCPGKPLNVFRIEPGVSVSLVNPQPSNGHFSTKIEIRQGDNCDSIIRRLMKMNRGIKDLSKVKLMRFDDPLLGPRRVPVLGKEYTEKTPISEHAVFNVDLMSKKIHLTENGIRVDIGDTIIYLVH

SEQ ID NO: 887580 - protein, 1130 aa, Homo sapiens
MAERKGTAKVDFLKKIEKEIQQKWDTERVFEVNASNLEKQTSKGKYFVTFPYPYMNGRLHLGHTFSLSKCEFAVGYQRLKGKCCLFPFGLHCTGMPIKSKAAAKAGSSKYQWGIMKSLGLSDEEIVKFSEAEHWLDYFPPLAIQDLKRMGLKVDWRRSFITTDVNPYYDSFVRWQFLTLRERNKIKFGKRYTIYSPKDGQPCMDHDRQTGEGVGPQEYTLLKLKVLEPYPSKLSGLKGKNIFLVAATLRPETMFGQTNCWVRPDMKYIGFETVNGDIFICTQKAARNMSYQGFTKDNGVVPVVKELMGEEILGASLSAPLTSYKVIYVLPMLTIKEDKGTGVVTSVPSDSPDDIAALRDLKKKQALRAKYGIRDDMVLPFEPVPVIEIPGFGNLSAVTICDELKIQSQNDREKLAEAKEKIYLKGFYEGIMLVDGFKGQKVQDVKKTIQKKMIDAGDALIYMEPEKQVMSRSSDECVVALCDQWYLDYGEENWKKQTSQCLKNLETFCEETRRNFEATLGWLQEHACSRTYGLGTHLPWDEQWLIESLSDSTIYMAFYTVAHLLQGGNLHGQAESPLGIRPQQMTKEVWDYVFFKEAPFPKTQIAKEKLDQLKQEFEFWYPVDLRVSGKDLVPNHLSYYLYNHVAMWPEQSDKWPTAVRANGHLLLNSEKMSKSTGNFLTLTQAIDKFSADGMRLALADAGDTVEDANFVEAMADAGILRLYTWVEWVKEMVANWDSLRSGPASTFNDRVFASELNAGIIKTDQNYEKMMFKEALKTGFFEFQAAKDKYRELAVEGMHRELVFRFIEVQTLLLAPFCPHLCEHIWTLLGKPDSIMNASWPVAGPVNEVLIHSSQYLMEVTHDLRLRLKNYMMPAKGKKTDKQPLQKPSHCTIYVAKNYPPWQHTTLSVLRKHFEANNGKLPDNKVIASELGSMPELKKYMKKVMPFVAMIKENLEKMGPRILDLQLEFDEKAVLMENIVYLTNSLELEHIEVKFASEAEDKIREDCCPGKPLNVFRIEPGVSVSLVNPQPSNGHFSTKIEIRQGDNCDSIIRRLMKMNRGIKDLSKVKLMRFDDPLLGPRRVPVLGKEYTEKTPISEHAVFNVDLMSKKIHLTENGIRVDIGDTIIYLVH

SEQ ID NO: 887581 - protein, 1176 aa, Homo sapiens; identical to SEQ ID NO: 887575

SEQ ID NO: 887582 - protein, 1163 aa, Homo sapiens
MAERKGTAKVDFLKKIEKEIQQKWDTERVFEVNASNLEKQTSKGKYFVTFPYPYMNGRLHLGHTFSLSKCEFAVGYQRLKGKCCLFPFGLHCTGMPIKACADKLKREIELYGCPPDFPDEEEEEEETSVKTEDIIIKDKAKGKKSKAAAKAGSSKYQWGIMKSLGLSDEEIVKFSEAEHWLDYFPPLAIQDLKRMGLKVDWRRSFITTDVNPYYDSFVRWQFLTLRERNKIKFGKRYTIYSPKDGQPCMDHDRQTGEGVGPQEYTLLKLKVLEPYPSKLSGLKGKNIFLVAATLRPETMFGQTNCWVRPDMKYIGFETVNGDIFICTQKAARNMSYQGFTKDNGVVPVVKELMGEEILGASLSAPLTSYKVIYVLPMLTIKEDKGTGVVTSVPSDSPDDIAALRDLKKKQALRAKYGIRDDMVLPFEPVPVIEIPGFGNLSAVTICDELKIQSQNDREKLAEAKEKIYLKGFYEGIMLVDGFKGQKVQDVKKTIQKKMIDAGDALIYMEPEKQVMSRYLDYGEENWKKQTSQCLKNLETFCEETRRNFEATLGWLQEHACSRTYGLGTHLPWDEQWLIESLSDSTIYMAFYTVAHLLQGGNLHGQAESPLGIRPQQMTKEVWDYVFFKEAPFPKTQIAKEKLDQLKQEFEFWYPVDLRVSGKDLVPNHLSYYLYNHVAMWPEQSDKWPTAVRANGHLLLNSEKMSKSTGNFLTLTQAIDKFSADGMRLALADAGDTVEDANFVEAMADAGILRLYTWVEWVKEMVANWDSLRSGPASTFNDRVFASELNAGIIKTDQNYEKMMFKEALKTGFFEFQAAKDKYRELAVEGMHRELVFRFIEVQTLLLAPFCPHLCEHIWTLLGKPDSIMNASWPVAGPVNEVLIHSSQYLMEVTHDLRLRLKNYMMPAKGKKTDKQPLQKPSHCTIYVAKNYPPWQHTTLSVLRKHFEANNGKLPDNKVIASELGSMPELKKYMKKVMPFVAMIKENLEKMGPRILDLQLEFDEKAVLMENIVYLTNSLELEHIEVKFASEAEDKIREDCCPGKPLNVFRIEPGVSVSLVNPQPSNGHFSTKIEIRQGDNCDSIIRRLMKMNRGIKDLSKVKLMRFDDPLLGPRRVPVLGKEYTEKTPISEHAVFNVDLMSKKIHLTENGIRVDIGDTIIYLVH

SEQ ID NO: 887583 - protein, 987 aa, Homo sapiens
VYTPRQPLEIRTSKRTELAQGQWVEFGCAPLGPEAYVTVVLKLLGRDSVITSTGPIDLAQKFGYKLVDGVGPQEYTLLKLKVLEPYPSKLSGLKGKNIFLVAATLRPETMFGQTNCWVRPDMKYIGFETVNGDIFICTQKAARNMSYQGFTKDNGVVPVVKELMGEEILGASLSAPLTSYKVIYVLPMLTIKEDKGTGVVTSVPSDSPDDIAALRDLKKKQALRAKYGIRDDMVLPFEPVPVIEIPGFGNLSAVTICDELKIQSQNDREKLAEAKEKIYLKGFYEGIMLVDGFKGQKVQDVKKTIQKKMIDAGDALIYMEPEKQVMSRSSDECVVALCDQWYLDYGEENWKKQTSQCLKNLETFCEETRRNFEATLGWLQEHACSRTYGLGTHLPWDEQWLIESLSDSTIYMAFYTVAHLLQGGNLHGQAESPLGIRPQQMTKEVWDYVFFKEAPFPKTQIAKEKLDQLKQEFEFWYPVDLRVSGKDLVPNHLSYYLYNHVAMWPEQSDKWPTAVRANGHLLLNSEKMSKSTGNFLTLTQAIDKFSADGMRLALADAGDTVEDANFVEAMADAGILRLYTWVEWVKEMVANWDSLRSGPASTFNDRVFASELNAGIIKTDQNYEKMMFKEALKTGFFEFQAAKDKYRELAVEGMHRELVFRFIEVQTLLLAPFCPHLCEHIWTLLGKPDSIMNASWPVAGPVNEVLIHSSQYLMEVTHDLRLRLKNYMMPAKGKKTDKQPLQKPSHCTIYVAKNYPPWQHTTLSVLRKHFEANNGKLPDNKVIASELGSMPELKKYMKKVMPFVAMIKENLEKMGPRILDLQLEFDEKAVLMENIVYLTNSLELEHIEVKFASEAEDKIREDCCPGKPLNVFRIEPGVSVSLVNPQPSNGHFSTKIEIRQGDNCDSIIRRLMKMNRGIKDLSKVKLMRFDDPLLGPRRVPVLGKEYTEKTPISEHAVFNVDLMSKKIHLTENGIRVDIGDTIIYLVH

SEQ ID NO: 887584 - protein, 869 aa, Homo sapiens
QSCQLTPTVFLHLFLATLHSYHAECGSIFDQPSVDFVLAGLPAVAQGIAALKPGQHELVHLSLNYHPLLHYRWKKSKGTGVVTSVPSDSPDDIAALRDLKKKQALRAKYGIRDDMVLPFEPVPVIEIPGFGNLSAVTICDELKIQSQNDREKLAEAKEKIYLKGFYEGIMLVDGFKGQKVQDVKKTIQKKMIDAGDALIYMEPEKQVMSRSSDECVVALCDQWYLDYGEENWKKQTSQCLKNLETFCEETRRNFEATLGWLQEHACSRTYGLGTHLPWDEQWLIESLSDSTIYMAFYTVAHLLQGGNLHGQAESPLGIRPQQMTKEVWDYVFFKEAPFPKTQIAKEKLDQLKQEFEFWYPVDLRVSGKDLVPNHLSYYLYNHVAMWPEQSDKWPTAVRANGHLLLNSEKMSKSTGNFLTLTQAIDKFSADGMRLALADAGDTVEDANFVEAMADAGILRLYTWVEWVKEMVANWDSLRSGPASTFNDRVFASELNAGIIKTDQNYEKMMFKEALKTGFFEFQAAKDKYRELAVEGMHRELVFRFIEVQTLLLAPFCPHLCEHIWTLLGKPDSIMNASWPVAGPVNEVLIHSSQYLMEVTHDLRLRLKNYMMPAKGKKTDKQPLQKPSHCTIYVAKNYPPWQHTTLSVLRKHFEANNGKLPDNKVIASELGSMPELKKYMKKVMPFVAMIKENLEKMGPRILDLQLEFDEKAVLMENIVYLTNSLELEHIEVKFASEAEDKIREDCCPGKPLNVFRIEPGVSVSLVNPQPSNGHFSTKIEIRQGDNCDSIIRRLMKMNRGIKDLSKVKLMRFDDPLLGPRRVPVLGKEYTEKTPISEHAVFNVDLMSKKIHLTENGIRVDIGDTIIYLVH

SEQ ID NO: 887585 - protein, 869 aa, Homo sapiens
MAERKGTAKVDFLKKIEKEIQQKWDTERVFEVNASNLEKQTSKGKYFVTFPYPYMNGRLHLGHTFSLSKCEFAVGYQRLKGKCCLFPFGLHCTGMPIKACADKLKREIELYGCPPDFPDEEEEEEETSVKTEDIIIKDKAKGKKSKAAAKAGSSKYQWGIMKSLGLSDEEIVKFSEAEHWLDYFPPLAIQDLKRMGLKVDWRRSFITTDVNPYYDSFVRWQFLTLRERNKIKFGKRYTIYSPKDGQPCMDHDRQTGEGVGPQEYTLLKLKVLEPYPSKLSGLKGKNIFLVAATLRPETMFGQTNCWVRPDMKYIGFETVNGDIFICTQKAARNMSYQGFTKDNGVVPVVKELMGEEILGASLSAPLTSYKVIYVLPMLTIKEDKGTGVVTSVPSDSPDDIAALRDLKKKQALRAKYGIRDDMVLPFEPVPVIEIPGFGNLSAVTICDELKIQSQNDREKLAEAKEKIYLKGFYEGIMLVDGFKGQKVQDVKKTIQKKMIDAGDALIYMEPEKQVMSRSSDECVVALCDQWYLDYGEENWKKQTSQCLKNLETFCEETRRNFEATLGWLQEHACSRTYGLGTHLPWDEQWLIESLSDSTIYMAFYTVAHLLQGGNLHGQAESPLGIRPQQMTKEVWDYVFFKEAPFPKTQIAKEKLDQLKQEFEFWYPVDLRVSGKDLVPNHLSYYLYNHVAMWPEQSDKWPTAVRANGHLLLNSEKMSKSTGNFLTLTQAIDKFSADGMRLALADAGDTVEDANFVEAMADAGILRLYTWVEWVKEMVANWDSLRSGPASTFNDRVFASELNAGIIKTDQNYEKMMFKEALKTGFFEFQAAKDKYRELAVEGMQEALTLHHLCGKELSTLATYHPVCST

SEQ ID NO: 887586 - protein, 1176 aa, Homo sapiens; identical to SEQ ID NO: 887575

SEQ ID NO: 887587 - protein, 1065 aa, Homo sapiens
MAERKGTAKVDFLKKIEKEIQQKWDTERVFEVNASNLEKQTSKGKYFVTFPYPYMNGRLHLGHTFSLSKCEFAVGYQRLKGKCCLFPFGLHCTGMPIKACADKLKREIELYGCPPDFPDEEEEEEETSVKTEDIIIKDKAKGKKSKAAAKAGSSKYQWGIMKSLGLSDEEIVKFSEAEHWLDYFPPLAIQDLKRMGLKVDWRRSFITTDVNPYYDSFVRWQFLTLRERNKIKFGKRYTIYSPKDGQPCMDHDRQTGEGVGPQEYTLLKLKVLEPYPSKLSGLKGKNIFLVAATLRPETMFGQTNCWVRPDMKYIGFETVNGDIFICTQKAARNMSYQGFTKDNGVVPVVKELMGEEILGASLSAPLTSYKVIYVLPMLTIKEDKGTGVVTSVPSDSPDDIAALRDLKKKQALRAKYGIRDDMVLPFEPVPVIEIPGFGNLSAVTICDELKIQSQNDREKLAEAKEKIYLKGFYEGIMLVDGFKGQKVQDVKKTIQKKMIDAGDALIYMEPEKQVMSRSSDECVVALCDQWYLDYGEENWKKQTSQCLKNLETFCEETRRNFEATLGWLQEHACSRTYGLGTHLPWDEQWLIESLSDSTIYMAFYTVAHLLQGGNLHGQAESPLGIRPQQMTKEVWDYVFFKEAPFPKTQIAKEKLDQLKQEFEFWYPVDLRVSGKDLVPNHLSYYLYNHVAMWPEQSDKWPTAVRANGHLLLNSEKMSKSTGNFLTLTQAIDKFSADGMRLALADAGDTVEDANFVEAMADAGILRLYTWVEWVKEMVANWDSLRSGPASTFNDRVFASELNAGIIKTDQNYEKMMFKEALKTGFFEFQAAKDKYRELAVEGMHRELVFRFIEVQTLLLAPFCPHLCEHIWTLLGKPDSIMNASWPVAGPVNEVLIHSSQYLMEVTHDLRLRLKNYMMPAKGKKTDKQPLQKPSHCTIYVAKNYPPWQHTTLSVLRKHFEANNGKLPDNKVIASELGSMPELKKYMKKVMPFVAMIKENLEKMGPRILDLQLEFDEKAVLMENIVYLTNSLELEHIEVKFASEAEDKIREDCCPGKGVHREDPHF

SEQ ID NO: 887588 - protein, 182 aa, Homo sapiens
MIKENLEKMGPRILDLQLEFDEKAVLMENIVYLTNSLELEHIEVKFASEAEDKIREDCCPGKPLNVFRIEPGVSVSLVNPQPSNGHFSTKIEIRQGDNCDSIIRRLMKMNRGIKDLSKVKLMRFDDPLLGPRRVPVLGKEYTEKTPISEHAVFNVDLMSKKIHLTENGIRVDIGDTIIYLVH

SEQ ID NO: 887589 - protein, 697 aa, Homo sapiens
MAERKGTAKVDFLKKIEKEIQQKWDTERVFEVNASNLEKQTSKGKYFVTFPYPYMNGRLHLGHTFSLSKCEFAVGYQRLKGKCCLFPFGLHCTGMPIKACADKLKREIELYGCPPDFPDEEEEEEETSVKTEDIIIKDKAKGKKSKAAAKAGSSKYQWGIMKSLGLSDEEIVKFSEAEHWLDYFPPLAIQDLKRMGLKVDWRRSFITTDVNPYYDSFVRWQFLTLRERNKIKFGKRYTIYSPKDGQPCMDHDRQTGEGVGPQEYTLLKLKVLEPYPSKLSGLKGKNIFLVAATLRPETMFGQTNCWVRPDMKYIGFETVNGDIFICTQKAARNMSYQGFTKDNGVVPVVKELMGEEILGASLSAPLTSYKVIYVLPMLTIKEDKGTGVVTSVPSDSPDDIAALRDLKKKQALRAKYGIRDDMVLPFEPVPVIEIPGFGNLSAVTICDELKIQSQNDREKLAEAKEKIYLKGFYEGIMLVDGFKGQKVQDVKKTIQKKMIDAGDALIYMEPEKQVMSRSSDECVVALCDQWYLDYGEENWKKQTSQCLKNLETFCEETRRNFEATLGWLQEHACSRTYGLGTHLPWDEQWLIESLSDSTIYMAFYTVAHLLQGGNLHGQAESPLGIRPQQMTKEVWDYVFFKEAPFPKTQIAKEKLDQLKQEFEFWYPVDLRVSGKDLVPNHLSYYLYNHVAMWPEQR

SEQ ID NO: 887590 - protein, 545 aa, Homo sapiens
MAERKGTAKVDFLKKIEKEIQQKWDTERVFEVNASNLEKQTSKGKYFVTFPYPYMNGRLHLGHTFSLSKCEFAVGYQRLKGKCCLFPFGLHCTGMPIKACADKLKREIELYGCPPDFPDEEEEEEETSVKTEDIIIKDKAKGKKSKAAAKAGSSKYQWGIMKSLGLSDEEIVKFSEAEHWLDYFPPLAIQDLKRMGLKVDWRRSFITTDVNPYYDSFVRWQFLTLRERNKIKFGKRYTIYSPKDGQPCMDHDRQTGEGVGPQEYTLLKLKVLEPYPSKLSGLKGKNIFLVAATLRPETMFGQTNCWVRPDMKYIGFETVNGDIFICTQKAARNMSYQGFTKDNGVVPVVKELMGEEILGASLSAPLTSYKVIYVLPMLTIKEDKGTGVVTSVPSDSPDDIAALRDLKKKQALRAKYGIRDDMVLPFEPVPVIEIPGFGNLSAVTICDELKIQSQNDREKLAEAKEKIYLKGFYEGIMLVDGFKGQKVQDVKKTIQKKMIDAVCDRLCSEGCFRRAVNRLDSVISSEFYSRTWSYNKNIIQFCGRK

SEQ ID NO: 887591 - protein, 96 aa, Homo sapiens
CSVRITQAFSQDSKRSVIHTGVMNDEDKDLSKVKLMRFDDPLLGPRRVPVLGKEYTEKTPISEHAVFNVDLMSKKIHLTENGIRVDIGDTIIYLVH

SEQ ID NO: 887592 - protein, 145 aa, Homo sapiens
MAERKGTAKVDFLKKIEKEIQQKWDTERVFEVNASNLEKQTSKGKYFVTFPYPYMNGRLHLGHTFSLSKCEFAVGYQRLKGKCCLFPFGLHCTGMPIKACADKLKREIELYGCPPDFPDEEEEEEETSVKTEDIIIKDKAKGKKV

SEQ ID NO: 887593 - protein, 236 aa, Homo sapiens [sequence omitted]

SEQ ID NO: 887594 - protein, 460 aa, Homo sapiens
MSKSTGNFLTLTQAIDKFSADGMRLALADAGDTVEDANFVEAMADAGILRLYTWVEWVKEMVANWDSLRSGPASTFNDRVFASELNAGIIKTDQNYEKMMFKEALKTGFFEFQAAKDKYRELAVEGMHRELVFRFIEVQTLLLAPFCPHLCEHIWTLLGKPDSIMNASWPVAGPVNEVLIHSSQYLMEVTHDLRLRLKNYMMPAKGKKTDKQPLQKPSHCTIYVAKNYPPWQHTTLSVLRKHFEANNGKLPDNKVIASELGSMPELKKYMKKVMPFVAMIKENLEKMGPRILDLQLEFDEKAVLMENIVYLTNSLELEHIEVKFASEAEDKIREDCCPGKPLNVFRIEPGVSVSLVNPQPSNGHFSTKIEIRQGDNCDSIIRRLMKMNRGIKDLSKVKLMRFDDPLLGPRRVPVLGKEYTEKTPISEHAVFNVDLMSKKIHLTENGIRVDIGDTIIYLVH

SEQ ID NO: 887595 - protein, 1083 aa, Homo sapiens
MAERKGTAKVDFLKKIEKEIQQKWDTERVFEVNASNLEKQTSKGKYFVTFPYPYMNGRLHLGHTFSLSKCEFAVGYQRLKGKCCLFPFGLHCTGMPIKACADKLKREIELYGCPPDFPDEEEEEEETSVKTEDIIIKDKAKGKKSKAAAKAGSSKYQWGIMKSLGLSDEEIVKFSEAEHWLDYFPPLAIQDLKRMGLKVDWRRSFITTDVNPYYDSFVRWQFLTLRERNKIKFGKRYTIYSPKDGQPCMDHDRQTGEGVGPQEYTLLKLKVLEPYPSKLSGLKGKNIFLVAATLRPETMFGQTNCWVRPDMKYIGFETVNGDIFICTQKAARNMSYQGFTKDNGVVPVVKELMGEEILGASLSAPLTSYKVIYVLPMLTIKEDKGTGVVTSVPSDSPDDIAALRDLKKKQALRAKYGIRDDMVLPFEPVPVIEIPGFGNLSAVTICDELKIQSQNDREKLAEAKEKIYLKGFYEGIMLVDGFKGQKVQDVKKTIQKKMIDAGDALIYMEPEKQVMSRSSDECVVALCDQWYLDYGEENWKKQTSQCLKNLETFCEETRRNFEATLGWLQEHACSRTYGLGTHLPWDEQWLIESLSDSTIYMAFYTVAHLLQGGNLHGQAESPLGIRPQQMTKEVWDYVFFKEAPFPKTQIAKEKLDQLKQEFEFWYPVDLRVSGKDLVPNHLSYYLYNHVAMWPEQSDKWPTAVRANGHLLLNSEKMSKSTGNFLTLTQAIDKFSADGMRLALADAGDTVEDANFVEAMADAGILRLYTWVEWVKEMVANWDSLRSGPASTFNDRVFASELNAGIIKTDQNYEKMMFKEALKTGFFEFQAAKDKYRELAVEGMHRELVFRFIEVQTLLLAPFCPHLCEHIWTLLGKPDSIMNASWPVAGPVNEVLIHSSQYLMEVTHDLRLRLKNYMMPAKGKKTDKQPLQKPSHCTIYVAKNYPPWQHTTLSVLRKHFEANNGKLPDNKVIASELGSMPELKKYMKKVMPFVAMIKENLEKMGPRILDLQLEFDEKAVLMENIVYLTNSLELEHIEVKFASEAEDKIREDCCPGKPLNVFRIEPGVSVSLNHHVLFSLIYTL

SEQ ID NO: 887596 - protein, 759 aa, Homo sapiens
MAERKGTAKVDFLKKIEKEIQQKWDTERVFEVNASNLEKQTSKGKYFVTFPYPYMNGRLHLGHTFSLSKCEFAVGYQRLKGKCCLFPFGLHCTGMPIKACADKLKREIELYGCPPDFPDEEEEEEETSVKTEDIIIKDKAKGKKSKAAAKAGSSKYQWGIMKSLGLSDEEIVKFSEAEHWLDYFPPLAIQDLKRMGLKVDWRRSFITTDVNPYYDSFVRWQFLTLRERNKIKFGKRYTIYSPKDGQPCMDHDRQTGEGVGPQEYTLLKLKVLEPYPSKLSGLKGKNIFLVAATLRPETMFGQTNCWVRPDMKYIGFETVNGDIFICTQKAARNMSYQGFTKDNGVVPVVKELMGEEILGASLSAPLTSYKVIYVLPMLTIKEDKGTGVVTSVPSDSPDDIAALRDLKKKQALRAKYGIRDDMVLPFEPVPVIEIPGFGNLSAVTICDELKIQSQNDREKLAEAKEKIYLKGFYEGIMLVDGFKGQKVQDVKKTIQKKMIDAGDALIYMEPEKQVMSRSSDECVVALCDQWYLDYGEENWKKQTSQCLKNLETFCEETRRNFEATLGWLQEHACSRTYGLGTHLPWDEQWLIESLSDSTIYMAFYTVAHLLQGGNLHGQAESPLGIRPQQMTKEVWDYVFFKEAPFPKTQIAKEKLDQLKQEFEFWYPVDLRVSGKDLVPNHLSYYLYNHVAMWPEQSDKWQSGKRNGIASEVEKCQSRHSQHCRYDKVDKEAWNASENVTSYDGEGIMKERTSRKTYIQ

SEQ ID NO: 887597 - protein, 630 aa, Homo sapiens
MAERKGTAKVDFLKKIEKEIQQKWDTERVFEVNASNLEKQTSKGKYFVTFPYPYMNGRLHLGHTFSLSKCEFAVGYQRLKGKCCLFPFGLHCTGMPIKACADKLKREIELYGCPPDFPDEEEEEEETSVKTEDIIIKDKAKGKKSKAAAKAGSSKYQWGIMKSLGLSDEEIVKFSEAEHWLDYFPPLAIQDLKRMGLKVDWRRSFITTDVNPYYDSFVRWQFLTLRERNKIKFGKRYTIYSPKDGQPCMDHDRQTGEGVGPQEYTLLKLKVLEPYPSKLSGLKGKNIFLVAATLRPETMFGQTNCWVRPDMKYIGFETVNGDIFICTQKAARNMSYQGFTKDNGVVPVVKELMGEEILGASLSAPLTSYKVIYVLPMLTIKEDKGTGVVTSVPSDSPDDIAALRDLKKKQALRAKYGIRDDMVLPFEPVPVIEIPGFGNLSAVTICDELKIQSQNDREKLAEAKEKIYLKGFYEGIMLVDGFKGQKVQDVKKTIQKKMIDAGDALIYMEPEKQVMSRSSDECVVALCDQWYLDYGEENWKKQTSQCLKNLETFCEETRRNFEATLGWLQEHACSRTYGLGTHLPWDEQWLIESLSDSTIYMAFYTVAHLLQGGNLHGQAESPLGIRLVNR

SEQ ID NO: 887598 - protein, 472 aa, Homo sapiens
MAERKGTAKVDFLKKIEKEIQQKWDTERVFEVNASNLEKQTSKGKYFVTFPYPYMNGRLHLGHTFSLSKCEFAVGYQRLKGKCCLFPFGLHCTGMPIKACADKLKREIELYGCPPDFPDEEEEEEETSVKTEDIIIKDKAKGKKSKAAAKAGSSKYQWGIMKSLGLSDEEIVKFSEAEHWLDYFPPLAIQDLKRMGLKVDWRRSFITTDVNPYYDSFVRWQFLTLRERNKIKFGKRYTIYSPKDGQPCMDHDRQTGEGVGPQEYTLLKLKVLEPYPSKLSGLKGKNIFLVAATLRPETMFGQTNCWVRPDMKYIGFETVNGDIFICTQKAARNMSYQGFTKDNGVVPVVKELMGEEILGASLSAPLTSYKVIYVLPMLTIKEDKGTGVVTSVPSDSPDDIAALRDLKKKQALRAKYGIRDDMVLPFEPVPVIEIPGLGIAVYSYQNHLDHMRFQRSSSQCHLEDDDLMKTSR

SEQ ID NO: 887599 - protein, 188 aa, Homo sapiens
MATDVFNSKNLAVQAQKKILGKMVSKSIATTLIDDTSSEVLDELYRVTREYTQNKKEAEKIIKNLIKTVIKLAILYRNNQFNQDELALMEKFKKKVHQLAMTVVSFHQVDYTFDRNVLSRLLNECREMLHQIIQRHLTAKSHGRVNNVFDHFSDCEFLAALYNPFGNFKPHLQKLCDGINKMLDEENI

SEQ ID NO: 887600 - protein, 198 aa, Homo sapiens
MHSEAEESKEVATDVFNSKNLAVQAQKKILGKMVSKSIATTLIDDTSSEVLDELYRVTREYTQNKKEAEKIIKNLIKTVIKLAILYRNNQFNQDELALMEKFKKKVHQLAMTVVSFHQVDYTFDRNVLSRLLNECREMLHQIIQRHLTAKSHGRVNNVFDHFSDCEFLAALYNPFGNFKPHLQKLCDGINKMLDEENI

SEQ ID NO: 887601 - protein, 210 aa, Homo sapiens
MTLPRYCEVVLLIAHGEKMLKLVATDVFNSKNLAVQAQKKILGKMVSKSIATTLIDDTSSEVLDELYRVTREYTQNKKEAEKIIKNLIKTVIKLAILYRNNQFNQDELALMEKFKKKVHQLAMTVVSFHQVDYTFDRNVLSRLLNECREMLHQIIQRHLTAKSHGRVNNVFDHFSDCEFLAALYNPFGNFKPHLQKLCDGINKMLDEENI

SEQ ID NO: 887602 - protein, 238 aa, Homo sapiens
VTACVGLAVRGESWWRHQRRAAERRALLTIQPMVDSFSAPRTPSAATSVAMATDVFNSKNLAVQAQKKILGKMVSKSIATTLIDDTSSEVLDELYRVTREYTQNKKEAEKIIKNLIKTVIKLAILYRNNQFNQDELALMEKFKKKVHQLAMTVVSFHQVDYTFDRNVLSRLLNECREMLHQIIQRHLTAKSHGRVNNVFDHFSDCEFLAALYNPFGNFKPHLQKLCDGINKMLDEENI

SEQ ID NO: 887603 - protein, 198 aa, Homo sapiens; identical to SEQ ID NO: 887600

SEQ ID NO: 887604 - protein, 190 aa, Homo sapiens
MAVATDVFNSKNLAVQAQKKILGKMVSKSIATTLIDDTSSEVLDELYRVTREYTQNKKEAEKIIKNLIKTVIKLAILYRNNQFNQDELALMEKFKKKVHQLAMTVVSFHQVDYTFDRNVLSRLLNECREMLHQIIQRHLTAKSHGRVNNVFDHFSDCEFLAALYNPFGNFKPHLQKLCDGINKMLDEENI

SEQ ID NO: 887605 - protein, 198 aa, Homo sapiens; identical to SEQ ID NO: 887600

SEQ ID NO: 887606 - protein, 162 aa, Homo sapiens
GDLSGVGRLSPRERLEADGLPPVGQTPAYLAYSACRASWPGRFLSGFDFPDFLPFVCDDCSGIFCLEHRSRESHGCPEVTVINERLKTDQHTSYPCSFKDCAERELVAVICPYCEKNFCLSVTLLLLIDTVISQIMSVKNWKSQSLEWLPLRNLLKTLLVSI

SEQ ID NO: 887607 - protein, 161 aa, Homo sapiens
MAATQKLVKDIIDSKTGETASKRWKGAKNSETAAKVALMKLKMHADGDKSLPQTERIYFQVFLPKGSKEKSKPMFFCHRWSIGKAIDFAASLARLKNDNNKFTAKKLRLCHITSGEALPLDHTLETWIAKEDCPLYNGGNIILEYLNDEEQFCKNVESYLE

SEQ ID NO: 887608 - protein, 161 aa, Homo sapiens; identical to SEQ ID NO: 887607

SEQ ID NO: 887609 - protein, 161 aa, Homo sapiens; identical to SEQ ID NO: 887607

SEQ ID NO: 887610 - protein, 286 aa, Homo sapiens
DRGTVRSALRPGKRGAGEMAELDIGQHCQVEHCRQRDFLPFVCDDCSGIFCLEHRSRESHGCPEVTVINERLKTDQHTSYPCSFKDCAERELVAVICPYCEKNFCLRHRHQSDHECEKLEIPKPRMAATQKLVKDIIDSKTGETASKRWKGAKNSETAAKVALMKLKMHADGDKSLPQTERIYFQVFLPKGSKEKSKPMFFCHRWSIGKAIDFAASLARLKNDNNKFTAKKLRLCHITSGEALPLDHTLETWIAKEDCPLYNGGNIILEYLNDEEQFCKNVESYLE

SEQ ID NO: 887611 - protein, 198 aa, Homo sapiens
DRGTVRSALRPGKRGAGEMAELDIGQHCQVEHCRQRDFLPFVCDDCSGIFCLEHRSRESHGCPEVTVINERLKTDQHTSYPCSFKDCAERELVAVICPYCEKNFCLRHRHQSDHECEKLEIPKPRMAATQKLVKDIIDSKTGETASKRWKGAKNSETAAKVALMKLKMHADGDKSLPQGAKRRANQCSFATDGALERP

SEQ ID NO: 887612 - protein, 159 aa, Homo sapiens
MLKKKKNTKHKRPETRSIRHNNKAQTLHHRQQNNAGSTHTLIHHTRAAAKKPQRDDPHTRQKQRHSKDASKYTNDQDERDKTRAEEERRKAIETNTGRNTSNATNPHERPNIRWRGTTPTRADTKHSPDRQGRSASHTTQPTPAARNRTPARDERESGA

SEQ ID NO: 887613 - protein, 286 aa, Homo sapiens; identical to SEQ ID NO: 887610

SEQ ID NO: 887614 - protein, 161 aa, Homo sapiens; identical to SEQ ID NO: 887607

SEQ ID NO: 887615 - protein, 279 aa, Homo sapiens
GPGYGAECPSSWETGRRRDGGVGHRAALPDFLPFVCDDCSGIFCLEHRSRESHGCPEVTVINERLKTDQHTSYPCSFKDCAERELVAVICPYCEKNFCLRHRHQSDHECEKLEIPKPRMAATQKLVKDIIDSKTGETASKRWKGAKNSETAAKVALMKLKMHADGDKSLPQTERIYFQVFLPKGSKEKSKPMFFCHRWSIGKAIDFAASLARLKNDNNKFTAKKLRLCHITSGEALPLDHTLETWIAKEDCPLYNGGNIILEYLNDEEQFCKNVESYLE

SEQ ID NO: 887616 - protein, 161 aa, Homo sapiens; identical to SEQ ID NO: 887607

SEQ ID NO: 887617 - protein, 286 aa, Homo sapiens; identical to SEQ ID NO: 887610

SEQ ID NO: 887618 - protein, 192 aa, Homo sapiens
DRGTVRSALRPGKRGAGEMAELDIGQHCQVEHCRQRDFLPFVCDDCSGIFCLEHRSRESHGCPEVTVINERLKTDQHTSYPCSFKDCAERELVAVICPYCEKNFCLRHRHQSDHECEKLEIPKPRMAATQKLVKDIIGKYLESVFCCFPSSRAPASYIYFPIMGGIINNPSGIRINLYFDDILVTVFLMRST

SEQ ID NO: 887619 - protein, 266 aa, Homo sapiens
FSPQLAEPFAPLATAWTVSKELSPSAFCPPGCQLWLLKRLPPAAVYTASGRGKEPQTFQIASSRNKLFVAGIKMAAEPVEDNCINFVAMKFIDNTLYFIAEDDENLESDYFGKLESKLSVIRNLNDQVLFIDQGNRPLFEDMTDSDCRDNAPRTIFIISMYKDSQPRGMAVTISVKCEKISTLSCENKIISFKEMNPPDNIKDTKSDIIFFQRSVPGHDNKMQFESSSYEGYFLACEKERDLFKLILKKEDELGDRSIMFTVQNED

SEQ ID NO: 887620 - protein, 104 aa, Homo sapiens
FSPQLAEPFAPLATAWTVSKELSPSAFCPPGCQLWLLKRLPPAAVYTASGRGKEPQTFQIASSRNKLFVAGIKMAAEPVEDNCINFVAMKFIDNTLYFIAEDDG

SEQ ID NO: 887621 - protein, 104 aa, Homo sapiens; identical to SEQ ID NO: 887620

SEQ ID NO: 887622 - protein, 119 aa, Homo sapiens
FSPQLAEPFAPLATAWTVSKELSPSAFCPPGCQLWLLKRLPPAAVYTASGRGKEPQTFQIASSRNKLFVAGIKMAAEPVEDNCINFVAMKFIDNTLYFIAEDDAEDDGKVEMNLFFFAN

SEQ ID NO: 887623 - protein, 273 aa, Homo sapiens
FSPQLAEPFAPLATAWTVSKELSPSAFCPPGCQLWLLKRLPPAAVYTASGRGKEPQTFQIASSRNKLFVADGSLLSLGIKMAAEPVEDNCINFVAMKFIDNTLYFIAEDDENLESDYFGKLESKLSVIRNLNDQVLFIDQGNRPLFEDMTDSDCRDNAPRTIFIISMYKDSQPRGMAVTISVKCEKISTLSCENKIISFKEMNPPDNIKDTKSDIIFFQRSVPGHDNKMQFESSSYEGYFLACEKERDLFKLILKKEDELGDRSIMFTVQNED

SEQ ID NO: 887624 - protein, 119 aa, Homo sapiens; identical to SEQ ID NO: 887622

SEQ ID NO: 887625 - protein, 357 aa, Homo sapiens
MAAAEVADTQLMLGVGLIEKDTNGEVLWVWCYPSTTATLRNLLLRKCCLTDENKLLHPFVFGQYRRTWFYITTIEVPDSSILKKVTHFSIVLTAKDFNPEKYAAFTRILCRMYLKHGSPVKMMESYIAVLTKGICQSEENGSFLSKDFDARKAYLAGSIKDIVSQFGMETVILHTALMLKKRIVVYHPKIEAVQEFTRTLPALVWHRQDWTILHSYVHLNADELEALQMCTGYVAGFVDLEVSNRPDLYDVFVNLAESEITIAPLAKEAMAMGKLHKEMGQLIVQSAEDPEKSESHVIQDIALKTREIFTNLAPFSEVSADGEKRVLNLEALKQKRFPPATENFLYHLAAAEQMLKI

SEQ ID NO: 887626 - protein, 246 aa, Homo sapiens
MYLKHGSPVKMMESYIAVLTKGICQSEENGSFLSKDFDARKAYLAGSIKDIVSQFGMETVILHTALMLKKRIVVYHPKIEAVQEFTRTLPALVWHRQDWTILHSYVHLNADELEALQMCTGYVAGFVDLEVSNRPDLYDVFVNLAESEITIAPLAKEAMAMGKLHKEMGQLIVQSAEDPEKSESHVIQDIALKTREIFTNLAPFSEVSADGEKRVLNLEALKQKRFPPATENFLYHLAAAEQMLKI

SEQ ID NO: 887627 - protein, 396 aa, Homo sapiens
MLIVPKLRDPGVETCDGKERKLPLELRAAAAEDGCGRGGGHSADAWSRADRDHLSTVEKDTNGEVLWVWCYPSTTATLRNLLLRKCCLTDENKLLHPFVFGQYRRTWFYITTIEVPDSSILKKVTHFSIVLTAKDFNPEKYAAFTRILCRMYLKHGSPVKMMESYIAVLTKGICQSEENGSFLSKDFDARKAYLAGSIKDIVSQFGMETVILHTALMLKKRIVVYHPKIEAVQEFTRTLPALVWHRQDWTILHSYVHLNADELEALQMCTGYVAGFVDLEVSNRPDLYDVFVNLAESEITIAPLAKEAMAMGKLHKEMGQLIVQSAEDPEKSESHVIQDIALKTREIFTNLAPFSEVSADGEKRVLNLEALKQKRFPPATENFLYHLAAAEQMLKI

SEQ ID NO: 887628 - protein, 418 aa, Homo sapiens
MAAAEVADTQLMLGVGLIDGVSLLSRLECSSAITALCSLHSQAQTILPPGLRVAGTSGVHHHPINFCILCGDGIPTCCPEKDTNGEVLWVWCYPSTTATLRNLLLRKCCLTDENKLLHPFVFGQYRRTWFYITTIEVPDSSILKKVTHFSIVLTAKDFNPEKYAAFTRILCRMYLKHGSPVKMMESYIAVLTKGICQSEENGSFLSKDFDARKAYLAGSIKDIVSQFGMETVILHTALMLKKRIVVYHPKIEAVQEFTRTLPALVWHRQDWTILHSYVHLNADELEALQMCTGYVAGFVDLEVSNRPDLYDVFVNLAESEITIAPLAKEAMAMGKLHKEMGQLIVQSAEDPEKSESHVIQDIALKTREIFTNLAPFSEVSADGEKRVLNLEALKQKRFPPATENFLYHLAAAEQMLKI

SEQ ID NO: 887629 - protein, 357 aa, Homo sapiens; identical to SEQ ID NO: 887625

SEQ ID NO: 887630 - protein, 239 aa, Homo sapiens
MLIVPKLRDPGVETCDGKERKLPLELRAAAAEDGCGRGGGHSADAWSRADRDHLSTVEKDTNGEVLWVWCYPSTTATLRNLLLRKCCLTDENKLLHPFVFGQYRRTWFYITTIEVPDSSILKKVTHFSIVLTAKDFNPEKYAAFTRILCRMYLKHGSPVKMMESYIAVLTKGICQSEENGSFLSKDFDARKAYLAGSIKGLCLPWCGTDRTGPSFTLTCTSTPMSWKPCRCAQVTSLDL

SEQ ID NO: 887631 - protein, 121 aa, Homo sapiens
SSYSSKVAHVCDAGYVAGFVDLEVSNRPDLYDVFVNLAESEITIAPLAKEAMAMGKLHKEMGQLIVQSAEDPEKSESHVIQVTPSPSDLLKVLTRCRWVVCGRAVHISRVGGCGRGQRAGA

SEQ ID NO: 887632 - protein, 357 aa, Homo sapiens; identical to SEQ ID NO: 887625

SEQ ID NO: 887633 - protein, 357 aa, Homo sapiens; identical to SEQ ID NO: 887625

SEQ ID NO: 887634 - protein, 239 aa, Homo sapiens; identical to SEQ ID NO: 887630

SEQ ID NO: 887635 - protein, 159 aa, Homo sapiens
MLIVPKLRDPGVETCDGKERKLPLELRAAAAEDGCGRGGGHSADAWSRADRDHLSTVEKDTNGEVLWVWCYPSTTATLRNLLLRKCCLTDENKLLHPFVFGQYRRTWFYITTIEVPDSSILKKVTHFSIVLTAKDFNPEKYAAFTRILCRGLYKNCIKC

SEQ ID NO: 887636 - protein, 419 aa, Homo sapiens
PSIFLRLQLALNMGNTSFNEVMEAQLPSHGGPKPSAESDMGTRRDYIMAKYVEHRFARRCTPEPQRLWTAICNRDLLSVLEAFANGQDFGQPLPGPDAQAPEELVLHLAVKVANQASLPLVDFIIQNGGHLDAKAADGNTALHYAALYNQPDCLKLLLKGRALVGTVNEAGETALDIARKKHHKECEELLEQAQAGTFAFPLHVDYSWVISTEPGSDSEEDEEEKRCLLKLPAQAHWASGRLDISNKTYETVASLGAATPQGESEDCPPPLPVKNSSRTLVQGCARHASGDRSEVSSLSSEAPETPESLGSPASSSSLMSPLEPGDPSQAPPNSEEGLREPPGTSRPSLTSGTTPSEMYLPVRFSSESTRSYRRGARSPEDGPSARQPLPRRNVPVGITEGDGSRTGSLPASSVQLLQD

SEQ ID NO: 887637 - protein, 468 aa, Homo sapiens
KRKCGVKYGCLTISHSTINRPPVKLTLLTCQVRPNPEEKKCFDLVTHNRTYHFQAEDEHECEAWVSVLQNSKDEALSSAFLGEPSAGPGSWGSAGHDGEPHDLTKLLIAEVKSRPGNSQCCDCGAADPTWLSTNLGVLTCIQCSGVHRELGVRFSRMQSLTLDLLGPSELLLALNMGNTSFNEVMEAQLPSHGGPKPSAESDMGTRRDYIMAKYVEHRFARRCTPEPQRLWTAICNRDLLSVLEAFANGQDFGQPLPGPDAQAPEELVLHLAVKVANQASLPLVDFIIQNGGHLDAKAADGNTALHYAALYNQPDCLKLLLKGRALVGTVNEAGETALDIARKKHHKECEELLEQAQAGTFAFPLHVDYSWVISTEPGSDSEEDEEEKRCLLKLPAQAHWASGRLDISNKTYETVASLGAATPQGESEDCPPPLPVKNSSRTLVQGCARHASGGKERRESNRIGRAET

SEQ ID NO: 887638 - protein, 582 aa, Homo sapiens
KRKCGVKYGCLTISHSTINRPPVKLTLLTCQVRPNPEEKKCFDLVTHNRTYHFQAEDEHECEAWVSVLQNSKDEALSSAFLGEPSAGPGSWGSAGHDGEPHDLTKLLIAEVKSRPGNSQCCDCGAADPTWLSTNLGVLTCIQCSGVHRELGVRFSRMQSLTLDLLGPSELLLALNMGNTSFNEVMEAQLPSHGGPKPSAESDMGTRRDYIMAKYVEHRFARRCTPEPQRLWTAICNRDLLSVLEAFANGQDFGQPLPGPDAQAPEELVLHLAVKVANQASLPLVDFIIQNGGHLDAKAADGNTALHYAALYNQPDCLKLLLKGRALVGTVNEAGETALDIARKKHHKECEELLEQAQAGTFAFPLHVDYSWVISTEPGSDSEEDEEEKRCLLKLPAQAHWASGRLDISNKTYETVASLGAATPQGESEDCPPPLPVKNSSRTLVQGCARHASGDRSEVSSLSSEAPETPESLGSPASSSSLMSPLEPGDPSQAPPNSEEGLREPPGTSRPSLTSGTTPSEMYLPVRFSSESTRSYRRGARSPEDGPSARQPLPRRNVPVGITEGDGSRTGSLPASSVQLLQD

SEQ ID NO: 887639 - protein, 344 aa, Homo sapiens
MPHFVSTRRPRCRRTRRLFVNAQDFETKPMPCPDATRHSGMRLDLGLMAVISPETGFPGLWVDCHQSRTGGHLDAKAADGNTALHYAALYNQPDCLKLLLKGRALVGTVNEAGETALDIARKKHHKECEELLEQAQAGTFAFPLHVDYSWRCLLKLPAQAHWASGRLDISNKTYETVASLGAATPQGESEDCPPPLPVKNSSRTLVQGCARHASGDRSEVSSLSSEAPETPESLGSPASSSSLMSPLEPGDPSQAPPNSEEGLREPPGTSRPSLTSGTTPSEMYLPVRFSSESTRSYRRGARSPEDGPSARQPLPRRNVPVGITEGDGSRTGSLPASSVQLLQD

SEQ ID NO: 887640 - protein, 582 aa, Homo sapiens; identical to SEQ ID NO: 887638

SEQ ID NO: 887641 - protein, 582 aa, Homo sapiens; identical to SEQ ID NO: 887638

SEQ ID NO: 887642 - protein, 132 aa, Homo sapiens
RKKHHKECEELVRTRGGKGPLTLSLSLLSPQPSEPPSLCFWQLEQAQAGTFAFPLHVDYSWVISTEPGSDSEEDEEEKVGPSPVPQASGWQKERARLGLVCVGGGGEAGGQGYTGGTRLSSSSIFCSGSAAC

SEQ ID NO: 887643 - protein, 582 aa, Homo sapiens; identical to SEQ ID NO: 887638

SEQ ID NO: 887644 - protein, 555 aa, Homo sapiens
KRKCGVKYGCLTISHSTINRPPVKLTLLTCQVRPNPEEKKCFDLVTHNRTYHFQAEDEHECEAWVSVLQNSKDEALSSAFLGEPSAGPGSWGSAGHDGEPHDLTKLLIAEVKSRPGNSQCCDCGAADPTWLSTNLGVLTCIQCSGVHRELGVRFSRMQSLTLDLLGPSELLLALNMGNTSFNEVMEAQLPSHGGPKPSAESDMGTRRDYIMAKYVEHRFARRCTPEPQRLWTAICNRDLLSVLEAFANGQDFGQPLPGPDAQAPEELVLHLAVKVANQASLPLVDFIIQNGGHLDAKAADGNTALHYAALYNQPDCLKLLLKGRALVGTVNEAGETALDIARKKHHKECEELLEQAQAGTFAFPLHVDYSWVISTEPGSDSEEDEEEKRCLLKLPAQAHWASGRLDISNKTYETVASLGAATPQGENRSEVSSLSSEAPETPESLGSPASSSSLMSPLEPGDPSQAPPNSEEGLREPPGTSRPSLTSGTTPSEMYLPVRFSSESTRSYRRGARSPEDGPSARQPLPRRNVPVGITEGDGSRTGSLPASSVQLLQD

SEQ ID NO: 887645 - protein, 209 aa, Homo sapiens
PQASGWQKERARLGLRCLLKLPAQAHWASGRLDISNKTYETVASLGAATPQGESEDCPPPLPVKNSSRTLVQGCARHASGDRSEVSSLSSEAPETPESLGSPASSSSLMSPLEPGDPSQAPPNSEEGLREPPGTSRPSLTSGTTPSEMYLPVRFSSESTRSYRRGARSPEDGPSARQPLPRRNVPVGITEGDGSRTGSLPASSVQLLQD

SEQ ID NO: 887646 - protein, 271 aa, Homo sapiens
KRKCGVKYGCLTISHSTINRPPVKLTLLTCQVRPNPEEKKCFDLVTHNRTYHFQAEDEHECEAWVSVLQNSKDEALSSAFLGEPSAGPGSWGSAGHDGEPHDLTKLLIAEVKSRPGNSQCCDCGAADPTWLSTNLGVLTCIQCSGVHRELGVRFSRMQSLTLDLLGPSELLLALNMGNTSFNEVMEAQLPSHGGPKPSAESDMGTRRDYIMAKYVEHRFARRCTPEPQRLWTAICNRDLLSVLEAFANGQDFGQPLPGPDAQVRTPPRATY

SEQ ID NO: 887647 - protein, 1091 aa, Homo sapiens
MGNAGSMDSQQTDFRAHNVPLKLPMPEPGELEERFAIVLNAMNLPPDKARLLRQYDNEKKWELICDQERFQVKNPPHTYIQKLKGYLDPAVTRKKFRRRVQESTQVLRELEISLRTNHIGWVREFLNEENKGLDVLVEYLSFAQYAVTFDFESVESTVESSVDKSKPWSRSIEDLHRGSNLPSPVGNSVSRSGRHSALRYNTLPSRRTLKNSRLVSKKDDVHVCIMCLRAIMNYQYGFNMVMSHPHAVNEIALSLNNKNPRTKALVLELLAAVCLVRGGHEIILSAFDNFKEVCGEKQRFEKLMEHFRNEDNNIDFMVASMQFINIVVHSVEDMNFRVHLQYEFTKLGLDEYLDKLKHTESDKLQVQIQAYLDNVFDVGALLEDAETKNAALERVEELEENISHLSEKLQDTENEAMSKIVELEKQLMQRNKELDVVREIYKDANTQVHTLRKMVKEKEEAIQRQSTLEKKIHELEKQGTIKIQKKGDGDIAILPVVASGTLSMGSEVVAGNSVGPTMGAASSGPLPPPPPPLPPSSDTPETVQNGPVTPPMPPPPPPPPPPPPPPPPPPPPPLPGPAAETVPAPPLAPPLPSAPPLPGTSSPTVVFNSGLADGPIKLFSVKIKKPIKTKFRMPVFNWVALKPNQINGTVFNEIDDERILEDLNVDEFEEIFKTKAQGPAIDLSSSKQKIPQKGSNKVTLLEANRAKNLAITLRKAGKTADEICKAIHVFDLKTLPVDFVECLMRFLPTENEVKVLRLYERERKPLENLSDEDRFMMQFSKIERLMQKMTIMAFIGNFAESIQMLTPQLHAIIAASVSIKSSQKLKKILEIILALGNYMNSSKRGAVYGFKLQSLDLLLDTKSTDRKQTLLHYISNVVKEKYHQVSLFYNELHYVEKAAAVSLENVLLDVKELQRGMDLTKREYTMHDHNTLLKEFILNNEGKLKKLQDDAKIAQDAFDDVVKYFGENPKTTPPSVFFPVFVRFVKAYKQAEEENELRKKQEQALMEKLLEQEALMEQQDPKSPSHKSKRQQQELIAELRRRQVKDNRHVYEGKDGAIEDIITALKKNNITKFPNVHSRILETNHTDEPMR

SEQ ID NO: 887648 - protein, 1101 aa, Homo sapiens
MGNAGSMDSQQTDFRAHNVPLKLPMPEPGELEERFAIVLNAMNLPPDKARLLRQYDNEKKWELICDQERFQVKNPPHTYIQKLKGYLDPAVTRKKFRRRVQESTQVLRELEISLRTNHIGWVREFLNEENKGLDVLVEYLSFAQYAVTFDFESVESTVESSVDKSKPWSRSIEDLHRGSNLPSPVGNSVSRSGRHSALRYNTLPSRRTLKNSRLVSKKDDVHVCIMCLRAIMNYQYGFNMVMSHPHAVNEIALSLNNKNPRTKALVLELLAAVCLVRGGHEIILSAFDNFKEVCGEKQRFEKLMEHFRNEDNNIDFMVASMQFINIVVHSVEDMNFRVHLQYEFTKLGLDEYLDKLKHTESDKLQVQIQAYLDNVFDVGALLEDAETKNAALERVEELEENISHLSEKLQDTENEAMSKIVELEKQLMQRNKELDVVREIYKDANTQVHTLRKMVKEKEEAIQRQSTLEKKIHELEKQGTIKIQKKGDGDIAILPVVASGTLSMGSEVVAGNSVGPTMGAASSGPLPPPPPPLPPSSDTPETVQNGPVTPPMPPPPPPPPPPPPPPPPPPPPPLPGPAAETVPAPPLAPPLPSAPPLPGTSSPTVVFNSGLADGPIKLFSVKIKKPIKTKFRMPVFNWVALKPNQINGTVFNEIDDERILEDLNVDEFEEIFKTKAQGPAIDLSSSKQKIPQKGSNKVTLLEANRAKNLAITLRKAGKTADEICKAIHVFDLKTLPVDFVECLMRFLPTENEVKVLRLYERERKPLENLSDEDRFMMQFSKIERLMQKMTIMAFIGNFAESIQMLTPQLHAIIAASVSIKSSQKLKKILEIILALGNYMNSSKRGAVYGFKLQSLDLLLDTKSTDRKQTLLHYISNVVKEKYHQVSLFYNELHYVEKAAAVSLENVLLDVKELQRGMDLTKREYTMHDHNTLLKEFILNNEGKLKKLQDDAKIAQDAFDDVVKYFGENPKTTPPSVFFPVFVRFVKAYKQAEEENELRKKQEQALMEKLLEQEALMEQQDPKSPSHKSKRQQQELIAELRRRQVKDNRHVYEGKDGAIEDIITALKKNNITKFPNVHSRVRISSSTPVVEDTQSWQASLFT

SEQ ID NO: 887649 - protein, 1091 aa, Homo sapiens; identical to SEQ ID NO: 887647

SEQ ID NO: 887650 - protein, 1091 aa, Homo sapiens; identical to SEQ ID NO: 887647

SEQ ID NO: 887651 - protein, 1093 aa, Homo sapiens
MGNAGSMDSQQTDFRAHNVPLKLPMPEPGELEERFAIVLNAMNLPPDKARLLRQYDNEKKWELICDQERFQVKNPPHTYIQKLKGYLDPAVTRKKFRRRVQESTQVLRELEISLRTNHIGWVREFLNEENKGLDVLVEYLSFAQYAVTFDFESVESTVESSVDKSKPWSRSIEDLHRGSNLPSPVGNSVSRSGRHSALRYNTLPSRRTLKNSRLVSKKDDVHVCIMCLRAIMNYQYGFNMVMSHPHAVNEIALSLNNKNPRTKALVLELLAAVCLVRGGHEIILSAFDNFKEVCGEKQRFEKLMEHFRNEDNNIDFMVASMQFINIVVHSVEDMNFRVHLQYEFTKLGLDEYLDKLKHTESDKLQVQIQAYLDNVFDVGALLEDAETKNAALERVEELEENISHLSEKLQDTENEAMSKIVELEKQLMQRNKELDVVREIYKDANTQVHTLRKMVKEKEEAIQRQSTLEKKIHELEKQGTIKIQKKGDGDIAILPVVASGTLSMGSEVVAGNSVGPTMGAASSGPLPPPPPPLPPSSDTPETVQNGPVTPPMPPPPPPPPPPPPPPPPPPPPPLPGPAAETVPAPPLAPPLPSAPPLPGTSSPTVVFNSGLADGPIKLFSVKIKKPIKTKFRMPVFNWVALKPNQINGTVFNEIDDERILEDLNVDEFEEIFKTKAQGPAIDLSSSKQKIPQKGSNKVTLLEANRAKNLAITLRKAGKTADEICKAIHVFDLKTLPVDFVECLMRFLPTENEVKVLRLYERERKPLENLSDEDRFMMQFSKIERLMQKMTIMAFIGNFAESIQMLTPQLHAIIAASVSIKSSQKLKKILEIILALGNYMNSSKRGAVYGFKLQSLDLLLDTKSTDRKQTLLHYISNVVKEKYHQVSLFYNELHYVEKAAAVSLENVLLDVKELQRGMDLTKREYTMHDHNTLLKEFILNNEGKLKKLQDDAKIAQDAFDDVVKYFGENPKTTPPSVFFPVFVRFVKAYKQAEEENELRKKQEQALMEKLLEQEALMEQQDPKSPSHKSKRQQQELIAELRRRQVKDNRHVYEGKDGAIEDIITVLKTVPFTARTAKRGSRFFCEPVLTEEYHY

SEQ ID NO: 887652 - protein, 1093 aa, Homo sapiens; identical to SEQ ID NO: 887651

SEQ ID NO: 887653 - protein, 243 aa, Homo sapiens
MGNAGSMDSQQTDFRAHNVPLKLPMPEPGELEERFAIVLNAMNLPPDKARLLRQYDNEKKWELICDQERFQVKNPPHTYIQKLKGYLDPAVTRKKFRRRVQESTQVLRELEISLRTNHIGWVREFLNEENKGLDVLVEYLSFAQYAVTFDFESVESTVESSVDKSKPWSRSIEDLHRGSNLPSPVGNSVSRSGRHSALRYNTLPSRRTLKNSRLVSKKDDVHVCIMCLRAIMNYQVCWSFWFF

SEQ ID NO: 887654 - protein, 1092 aa, Homo sapiens
MGNAGSMDSQQTDFRAHNVPLKLPMPEPGELEERFAIVLNAMNLPPDKARLLRQYDNEKKWELICDQERFQVKNPPHTYIQKLKGYLDPAVTRKKFRRRVQESTQVLRELEISLRTNHIGWVREFLNEENKGLDVLVEYLSFAQYAVTFDFESVESTVESSVDKSKPWSRSIEDLHRGSNLPSPVGNSVSRSGRHSALRYNTLPSRRTLKNSRLVSKKDDVHVCIMCLRAIMNYQYGFNMVMSHPHAVNEIALSLNNKNPRTKALVLELLAAVCLVRGGHEIILSAFDNFKEVCGEKQRFEKLMEHFRNEDNNIDFMVASMQFINIVVHSVEDMNFRVHLQYEFTKLGLDEYLDKLKHTESDKLQVQIQAYLDNVFDVGALLEDAETKNAALERVEELEENISHLSEKLQDTENEAMSKIVELEKQLMQRNKELDVVREIYKDANTQVHTLRKMVKEKEEAIQRQSTLEKKIHELEKQGTIKIQKKGDGDIAILPVVASGTLSMGSEVVAGNSVGPTMGAASSGPLPPPPPPLPPSSDTPETVQNGPVTPPMPPPPPPPPPPPPPPPPPPPPPLPGPAAETVPAPPLAPPLPSAPPLPGTSSPTVVFNSGLAAVKIKKPIKTKFRMPVFNWVALKPNQINGTVFNEIDDERILEDLNVDEFEEIFKTKAQGPAIDLSSSKQKIPQKGSNKVTLLEANRAKNLAITLRKAGKTADEICKAIHVFDLKTLPVDFVECLMRFLPTENEVKVLRLYERERKPLENLSDEDRFMMQFSKIERLMQKMTIMAFIGNFAESIQMLTPQLHAIIAASVSIKSSQKLKKILEIILALGNYMNSSKRGAVYGFKLQSLDLLLDTKSTDRKQTLLHYISNVVKEKYHQVSLFYNELHYVEKAAAVSLENVLLDVKELQRGMDLTKREYTMHDHNTLLKEFILNNEGKLKKLQDDAKIAQDAFDDVVKYFGENPKTTPPSVFFPVFVRFVKAYKQAEEENELRKKQEQALMEKLLEQEALMEQQDPKSPSHKSKRQQQELIAELRRRQVKDNRHVYEGKDGAIEDIITDLRNQPYRRADAVRRSVRRRFDDQNLRSVNGAEITM

SEQ ID NO: 887655 - protein, 1094 aa, Homo sapiens
MGNAGSMDSQQTDFRAHNVPLKLPMPEPGELEERFAIVLNAMNLPPDKARLLRQYDNEKKWELICDQERFQVKNPPHTYIQKLKGYLDPAVTRKKFRRRVQESTQVLRELEISLRTNHIGWVREFLNEENKGLDVLVEYLSFAQYAVTFDFESVESTVESSVDKSKPWSRSIEDLHRGSNLPSPVGNSVSRSGRHSALRYNTLPSRRTLKNSRLVSKKDDVHVCIMCLRAIMNYQYGFNMVMSHPHAVNEIALSLNNKNPRTKALVLELLAAVCLVRGGHEIILSAFDNFKEVCGEKQRFEKLMEHFRNEDNNIDFMVASMQFINIVVHSVEDMNFRVHLQYEFTKLGLDEYLDKLKHTESDKLQVQIQAYLDNVFDVGALLEDAETKNAALERVEELEENISHLSEKLQDTENEAMSKIVELEKQLMQRNKELDVVREIYKDANTQVHTLRKMVKEKEEAIQRQSTLEKKIHELEKQGTIKIQKKGDGDIAILPVVASGTLSMGSEVVAGNSVGPTMGAASSGPLPPPPPPLPPSSDTPETVQNGPVTPPMPPPPPPPPPPPPPPPPPPPPPLPGPAAETVPAPPLAPPLPSAPPLPGTSSPTVVFNSGLADGPIKLFSVKIKKPIKTKFRMPVFNWVALKPNQINGTVFNEIDDERILEDLNVDEFEEIFKTKAQGPAIDLSSSKQKIPQKGSNKVTLLEANRAKNLAITLRKAGKTADEICKAIHVFDLKTLPVDFVECLMRFLPTENEVKVLRLYERERKPLENLSDEDRFMMQFSKIERLMQKMTIMAFIGNFAESIQMLTPQLHAIIAASVSIKSSQKLKKILEIILALGNYMNSSKRGAVYGFKLQSLDLLLDTKSTDRKQTLLHYISNVVKEKYHQVSLFYNELHYVEKAAAVSLENVLLDVKELQRGMDLTKREYTMHDHNTLLKEFILNNEGKLKKLQDDAKIAQDAFDDVVKYFGENPKTTPPSVFFPVFVRFVKAYKQAEEENELRKKQEQALMEKLLEQEALMEQQDPKSPSHKSKRQQQELIAELRRRQVKDNRHVYEGKDGAIEDIITALKKNNITKFPNVHSRVRISSSTPVVEDTQS

SEQ ID NO: 887656 - protein, 1091 aa, Homo sapiens; identical to SEQ ID NO: 887647

SEQ ID NO: 887657 - protein, 1091 aa, Homo sapiens; identical to SEQ ID NO: 887647

SEQ ID NO: 887658 - protein, 1080 aa, Homo sapiens
MGNAGSMDSQQTDFRAHNVPLKLPMPEPGELEERFAIVLNAMNLPPDKARLLRQYDNEKKWELICDQERFQVKNPPHTYIQKLKGYLDPAVTRKKFRRRVQESTQVLRELEISLRTNHIGWVREFLNEENKGLDVLVEYLSFAQYAVTFDFESVESTVESSVDKSKPWSRSIEDLHRGSNLPSPVGNSVSRSGRHSALRYNTLPSRRTLKNSRLVSKKDDVHVCIMCLRAIMNYQYGFNMVMSHPHAVNEIALSLNNKNPRTKALVLELLAAVCLVRGGHEIILSAFDNFKEVCGEKQRFEKLMEHFRNEDNNIDFMVASMQFINIVVHSVEDMNFRVHLQYEFTKLGLDEYLDKLKHTESDKLQVQIQAYLDNVFDVGALLEDAETKNAALERVEELEENISHLSEKLQDTENEAMSKIVELEKQLMQRNKELDVVREIYKDANTQVHTLRKMVKEKEEAIQRQSTLEKKIHELEKQGTIKIQKKGDGDIAILPVVASGTLSMGSEVVAGNSVGPTMGAASSGPLPPPPPPLPPSSDTPETVQNGPVTPPMPPPPPPPPPPPPPPPPPPPPPLPGPAAETVPAPPLAPPLPSAPPLPGTSSPTVVFNSGLADGPIKLFSVKIKKPIKTKFRMPVFNWVALKPNQINGTVFNEIDDERILEDLNVDEFEEIFKTKAQGPAIDLSSSKQKIPQKGSNKVTLLEANRAKNLAITLRKAGKTADEICKAIHVFDLKTLPVDFVECLMRFLPTENEVKVLRLYERERKPLENLSDEDRFMMQFSKIERLMQKMTIMAFIGNFAESIQMLTPQLHAIIAASVSIKSSQKLKKILEIILALGNYMNSSKRGAVYGFKLQSLDLLLDTKSTDRKQTLLHYISNVVKEKYHQVSLFYNELHYVEKAAAVSLENVLLDVKELQRGMDLTKREYTMHDHNTLLKEFILNNEGKLKKLQDDAKIAQDAFDDVVKYFGENPKTTPPSVFFPVFVRFVKAYKQAEEENELRKKQEQALMEKLLEQEALMEQQDPKSPSHKSKRQQQELIAELRRRQVKDNRHVYEGKDGAIEDIITGKRYFFTVAHGDPTGLT

SEQ ID NO: 887659 - protein, 324 aa, Homo sapiens
MGNAGSMDSQQTDFRAHNVPLKLPMPEPGELEERFAIVLNAMNLPPDKARLLRQYDNEKKWELICDQERFQVKNPPHTYIQKLKGYLDPAVTRKKFRRRVQESTQVLRELEISLRTNHIGWVREFLNEENKGLDVLVEYLSFAQYAVTFDFESVESTVESSVDKSKPWSRSIEDLHRGSNLPSPVGNSVSRSGRHSALRYNTLPSRRTLKNSRLVSKKDDVHVCIMCLRAIMNYQYGFNMVMSHPHAVNEIALSLNNKNPRTKALVLELLAAVCLVRGGHEIILSAFDNFKEVCGEKQRFEKLMEHFRNEDNNIDFMVSYFSIQ

SEQ ID NO: 887660 - protein, 357 aa, Homo sapiens
GGCLEHGAGAARSAHSLALSRGRLPRAGRVPPAPRHQKFLCASDGDMGVPTALEAGSWRWGSLLFALFLAASLGPVAAFKVATPYSLYVCPEGQNVTLTCRLLGPVDKGHDVTFYKTWYRSSRGEVQTCSERRPIRNLTFQDLHLHHGGHQAANTSHDLAQRHGLESASDHHGNFSITMRNLTLLDSGLYCCLVVEIRHHHSEHRVHGAMELQVQTGKDAPSNCVVYPSSSQESENITAAALATGACIVGILCLPLILLLVYKQRQAASNRRAQELVRMDSNIQGIENPGFEASPPAQGIPEAKVRHPLSYVAQRQPSESGRHLLSEPSTPLSPPGPGDVFFPSLDPVPDSPNFEVI

SEQ ID NO: 887661 - protein, 357 aa, Homo sapiens; identical to SEQ ID NO: 887660

SEQ ID NO: 887662 - protein, 139 aa, Homo sapiens
LPLPAPDHLPRISLALDDITAAALATGACIVGILCLPLILLLVYKQRQAASNRRAQELVRMDSNIQGIENPGFEASPPAQGIPEAKVRHPLSYVAQRQPSESGRHLLSEPSTPLSPPGPGDVFFPSLDPVPDSPNFEVI

SEQ ID NO: 887663 - protein, 293 aa, Homo sapiens
GGCLEHGAGAARSAHSLALSRGRLPRAGRVPPAPRHQKFLCASDGDMGVPTALEAGSWRWGSLLFALFLAASLGPVAAFKVATPYSLYVCPEGQNVTLTCRLLGPVDKGHDVTFYKTWYRSSRGEVQTCSERRPIRNLTFQDLHLHHGGHQAANTSHDLAQRHGLESASDHHGNFSITMRNLTLLDSGLYCCLVVEIRHHHSEHRVHGAMELQVQTGKDAPSNCVVYPSSSQESESKGPTSCPFWVLCFLLSSSCTQTLFGTLASSPQALRTPRSSSFSAAAHPFCFLLGAIP

SEQ ID NO: 887664 - protein, 357 aa, Homo sapiens; identical to SEQ ID NO: 887660

SEQ ID NO: 887665 - protein, 329 aa, Homo sapiens
MSSAFWEEDPGFNYLVKGNNCISSNLGGSWRWGSLLFALFLAASLGPVAAFKVATPYSLYVCPEGQNVTLTCRLLGPVDKGHDVTFYKTWYRSSRGEVQTCSERRPIRNLTFQDLHLHHGGHQAANTSHDLAQRHGLESASDHHGNFSITMRNLTLLDSGLYCCLVVEIRHHHSEHRVHGAMELQVQTGKDAPSNCVVYPSSSQESENITAAALATGACIVGILCLPLILLLVYKQRQAASNRRAQELVRMDSNIQGIENPGFEASPPAQGIPEAKVRHPLSYVAQRQPSESGRHLLSEPSTPLSPPGPGDVFFPSLDPVPDSPNFEVI

SEQ ID NO: 887666 - protein, 330 aa, Homo sapiens
GGCLEHGAGAARSAHSLALSRGRLPRAGRVPPAPRHQKFLCASDGDMGVPTALEAGSWRWGSLLFALFLAASLGPVAAFKVATPYSLYVCPEGQNVTLTCRLLGPVDKGHDVTFYKTWYRSSRGEVQTCSERRPIRNLTFQDLHLHHGGHQAANTSHDLAQRHGLESASDHHGNFSITMRNLTLLDSGLYCCLVVEIRHHHSEHRVHGAMELQVQTGKDAPSNCVVYPSSSQESENITAAALATGACIVGILCLPLILLLVYKQRQAASNRPPFWFCGSNIQGIENPGFEASPPAQGIPEAKVRHPLSYVAQRQPSECQDRCCPTHWRWC

SEQ ID NO: 887667 - protein, 207 aa, Homo sapiens
GGCLEHGAGAARSAHSLALSRGRLPRAGRVPPAPRHQKFLCASDGDMGVPTALEAGSWRWGSLLFALFLAASLGPVAAFKVATPYSLYVCPEGQNVTLTCRLLGPVDKGHDVTFYKTWYRSSRGEVQTCSERRPIRNLTFQDLHLHHGGHQAANTSHDLAQRHGLESASDHHGNFSITMRNLTLLDSGRRNPGGRRNPGGRRNPGGR

SEQ ID NO: 887668 - protein, 3052 aa, Homo sapiens
MAFSIDRALNVALGNPSSTAQHVFKVSLVSGMPFYGYHEKERHFMKIYLYNPTMVKRICELLQSGAIMNKFYQPHEAHIPYLLQLFIDYNLYGMNLINLAAVKFRKARRKSNTLHATGSCKNHLSGNSLADTLFRWEQDEIPSSLILEGVEPQSTCELEVDAVAADILNRLDIEAQIGGNPGLQAIWEDEKQRRRNRNETSQMSQPESQDHRFVPATESEKKFQKRLQEILKQNDFSVTLSGSVDYSDGSQEFSAELTLHSEVLSPEMLQCTPANMVEVHKDKESSKGHTRHKVEEALINEEAILNLMENSQTFQPLTQRLSESPVFMDSSPDEALVHLLAGLESDGYRGERNRMPSPCRSFGNNKYPQNSDDEENEPQIEKEEMELSLVMSQRWDSNIEEHCAKKRSLCRNTHRSSTEDDDSSSGEEMEWSDNSLLLASLSIPQLDGTADENSDNPLNNENSRTHSSVIATSKLSVKPSIFHKDAATLEPSSSAKITFQCKHTSALSSHVLNKEDLIEDLSQTNKNTEKGLDNSVTSFTNESTYSMKYPGSLSSTVHSENSHKENSKKEILPVSSCESSIFDYEEDIPSVTRQVPSRKYTNIRKIEKDSPFIHMHRHPNENTLGKNSFNFSDLNHSKNKVSSEGNEKGNSTALSSLFPSSFTENCELLSCSGENRTMVHSLNSTADESGLNKLKIRYEEFQEHKTEKPSLSQQAAHYMFFPSVVLSNCLTRPQKLSPVTYKLQPGNKPSRLKLNKRKLAGHQETSTKSSETGSTKDNFIQNNPCNSNPEKDNALASDLTKTTRGAFENKTPTDGFIDCHFGDGTLETEQSFGLYGNKYTLRAKRKVNYETEDSESSFVTHNSKISLPHPMEIGESLDGTLKSRKRRKMSKKLPPVIIKYIIINRFRGRKNMLVKLGKIDSKEKQVILTEEKMELYKKLAPLKDFWPKVPDSPATKYPIYPLTPKKSHRRKSKHKSAKKKTGKQQRTNNENIKRTLSFRKKRSHAILSPPSPSYNAETEDCDLNYSDVMSKLGFLSERSTSPINSSPPRCWSPTDPRAEEIMAAAEKEAMLFKGPNVYKKTVNSRIGKTSRARAQIKKSKAKLANPSIVTKKRNKRNQTNKLVDDGKKKPRAKQKTNEKGTSRKHITLKDEKIKSQSGAEVKFVLKHQNVSEFASSSGGSQLLFKQKDMPLMGSAVDHPLSASLPTGINAQQKLSGCFSSFLESKKSVDLQTFPSSRDDLHPSVVCNSIGPGVSKINVQRPHNQSAMFTLKESTLIQKNIFDLSNHLSQVAQNTQISSGMSSKIEDNANNIQRNYLSSIGKLSEYRNSLESKLDQAYTPNFLHCKDSQQQIVCIAEQSKHSETCSPGNTASEESQMPNNCFVTSLRSPIKQIAWEQKQRGFILDMSNFKPERVKPRSLSEAISQTKALSQCKNRNVSTPSAFGEGQSGLAVLKELLQKRQQKAQNANTTQDPLSNKHQPNKNISGSLEHNKANKRTRSVTSPRKPRTPRSTKQKEKIPKLLKVDSLNLQNSSQLDNSVSDDSPIFFSDPGFESCYSLEDSLSPEHNYNFDINTIGQTGFCSFYSGSQFVPADQNLPQKFLSDAVQDLFPGQAIEKNEFLSHDNQKCDEDKHHTTDSASWIRSGTLSPEIFEKSTIDSNENRRHNQWKNSFHPLTTRSNSIMDSFCVQQAEDCLSEKSRLNRSSVSKEVFLSLPQPNNSDWIQGHTRKEMGQSLDSANTSFTAILSSPDGELVDVACEDLELYVSRNNDMLTPTPDSSPRSTSSPSQSKNGSFTPRTANILKPLMSPPSREEIMATLLDHDLSETIYQEPFCSNPSDVPEKPREIGGRLLMVETRLANDLAEFEGDFSLEGLRLWKTAFSAMTQNPRPGSPLRSGQGVVNKGSSNSPKMVEDKKIVIMPCKCAPSRQLVQVWLQAKEEYERSKKLPKTKPTGVVKSAENFSSSVNPDDKPVVPPKMDVSPCILPTTAHTKEDVDNSQIALQAPTTGCSQTASESQMLPPVASASDPEKDEDDDDNYYISYSSPDSPVIPPWQQPISPDSKALNGDDRPSSPVEELPSLAFENFLKPIKDGIQKSPCSEPQEPLVISPINTRARTGKCESLCFHSTPIIQRKLLERLPEAPGLSPLSTEPKTQKLSNKKGSNTDTLRRVLLTQAKNQFAAVNTPQKETSQIDGPSLNNTYGFKVSIQNLQEAKALHEIQNLTLISVELHARTRRDLEPDPEFDPICALFYCISSDTPLPDTEKTELTGVIVIDKDKTVFSQDIRYQTPLLIRSGITGLEVTYAADEKALFHEIANIIKRYDPDILLGYEIQMHSWGYLLQRAAALSIDLCRMISRVPDDKIENRFAAERDEYGSYTMSEINIVGRITLNLWRIMRNEVALTNYTFENVSFHVLHQRFPLFTFRVLSDWFDNKTDLYRWKMVDHYVSRVRGNLQMLEQLDLIGKTSEMARLFGIQFLHVLTRGSQYRVESMMLRIAKPMNYIPVTPSVQQRSQMRAPQCVPLIMEPESRFYSNSVLVLDFQSLYPSIVIAYNYCFSTCLGHVENLGKYDEFKFGCTSLRVPPDLLYQVRHDITVSPNGVAFVKPSVRKGVLPRMLEEILKTRFMVKQSMKAYKQDRALSRMLDARQLGLKLIANVTFGYTSANFSGRMPCIEVGDSIVHKARETLERAIKLVNDTKKWGARVVYGDTDSMFVLLKGATKEQSFKIGQEIAEAVTATNPKPVKLKFEKVYLPCVLQTKKRYVGYMYETLDQKDPVFDAKGIETVRRDSCPAVSKILERSLKLLFETRDISLIKQYVQRQCMKLLEGKASIQDFIFAKEYRGSFSYKPGACVPALELTRKMLTYDRRSEPQVGERVPYVIIYGTPGVPLIQLVRRPVEVLQDPTLRLNATYYITKQILPPLARIFSLIGIDVFSWYHELPRIHKATSSSRSEPEGRKGTISQYFTTLHCPVCDDLTQHGICSKCRSQPQHVAVILNQEIRELERQQEQLVKICKNCTGCFDRHIPCVSLNCPVLFKLSRVNRELSKAPYLRQLLDQF

SEQ ID NO: 887669 - protein, 3130 aa, Homo sapiens
MFSVRIVTADYYMASPLQGLDTCQSPLTQAPVKKVPVVRVFGATPAGQKTCLHLHGIFPYLYVPYDGYGQQPESYLSQMAFSIDRALNVALGNPSSTAQHVFKVSLVSGMPFYGYHEKERHFMKIYLYNPTMVKRICELLQSGAIMNKFYQPHEAHIPYLLQLFIDYNLYGMNLINLAAVKFRKARRKSNTLHATGSCKNHLSGNSLADTLFRWEQDEIPSSLILEGVEPQSTCELEVDAVAADILNRLDIEAQIGGNPGLQAIWEDEKQRRRNRNETSQMSQPESQDHRFVPATESEKKFQKRLQEILKQNDFSVTLSGSVDYSDGSQEFSAELTLHSEVLSPEMLQCTPANMVEVHKDKESSKGHTRHKVEEALINEEAILNLMENSQTFQPLTQRLSESPVFMDSSPDEALVHLLAGLESDGYRGERNRMPSPCRSFGNNKYPQNSDDEENEPQIEKEEMELSLVMSQRWDSNIEEHCAKKRSLCRNTHRSSTEDDDSSSGEEMEWSDNSLLLASLSIPQLDGTADENSDNPLNNENSRTHSSVIATSKLSVKPSIFHKDAATLEPSSSAKITFQCKHTSALSSHVLNKEDLIEDLSQTNKNTEKGLDNSVTSFTNESTYSMKYPGSLSSTVHSENSHKENSKKEILPVSSCESSIFDYEEDIPSVTRQVPSRKYTNIRKIEKDSPFIHMHRHPNENTLGKNSFNFSDLNHSKNKVSSEGNEKGNSTALSSLFPSSFTENCELLSCSGENRTMVHSLNSTADESGLNKLKIRYEEFQEHKTEKPSLSQQAAHYMFFPSVVLSNCLTRPQKLSPVTYKLQPGNKPSRLKLNKRKLAGHQETSTKSSETGSTKDNFIQNNPCNSNPEKDNALASDLTKTTRGAFENKTPTDGFIDCHFGDGTLETEQSFGLYGNKYTLRAKRKVNYETEDSESSFVTHNSKISLPHPMEIGESLDGTLKSRKRRKMSKKLPPVIIKYIIINRFRGRKNMLVKLGKIDSKEKQVILTEEKMELYKKLAPLKDFWPKVPDSPATKYPIYPLTPKKSHRRKSKHKSAKKKTGKQQRTNNENIKRTLSFRKKRSHAILSPPSPSYNAETEDCDLNYSDVMSKLGFLSERSTSPINSSPPRCWSPTDPRAEEIMAAAEKEAMLFKGPNVYKKTVNSRIGKTSRARAQIKKSKAKLANPSIVTKKRNKRNQTNKLVDDGKKKPRAKQKTNEKGTSRKHITLKDEKIKSQSGAEVKFVLKHQNVSEFASSSGGSQLLFKQKDMPLMGSAVDHPLSASLPTGINAQQKLSGCFSSFLESKKSVDLQTFPSSRDDLHPSVVCNSIGPGVSKINVQRPHNQSAMFTLKESTLIQKNIFDLSNHLSQVAQNTQISSGMSSKIEDNANNIQRNYLSSIGKLSEYRNSLESKLDQAYTPNFLHCKDSQQQIVCIAEQSKHSETCSPGNTASEESQMPNNCFVTSLRSPIKQIAWEQKQRGFILDMSNFKPERVKPRSLSEAISQTKALSQCKNRNVSTPSAFGEGQSGLAVLKELLQKRQQKAQNANTTQDPLSNKHQPNKNISGSLEHNKANKRTRSVTSPRKPRTPRSTKQKEKIPKLLKVDSLNLQNSSQLDNSVSDDSPIFFSDPGFESCYSLEDSLSPEHNYNFDINTIGQTGFCSFYSGSQFVPADQNLPQKFLSDAVQDLFPGQAIEKNEFLSHDNQKCDEDKHHTTDSASWIRSGTLSPEIFEKSTIDSNENRRHNQWKNSFHPLTTRSNSIMDSFCVQQAEDCLSEKSRLNRSSVSKEVFLSLPQPNNSDWIQGHTRKEMGQSLDSANTSFTAILSSPDGELVDVACEDLELYVSRNNDMLTPTPDSSPRSTSSPSQSKNGSFTPRTANILKPLMSPPSREEIMATLLDHDLSETIYQEPFCSNPSDVPEKPREIGGRLLMVETRLANDLAEFEGDFSLEGLRLWKTAFSAMTQNPRPGSPLRSGQGVVNKGSSNSPKMVEDKKIVIMPCKCAPSRQLVQVWLQAKEEYERSKKLPKTKPTGVVKSAENFSSSVNPDDKPVVPPKMDVSPCILPTTAHTKEDVDNSQIALQAPTTGCSQTASESQMLPPVASASDPEKDEDDDDNYYISYSSPDSPVIPPWQQPISPDSKALNGDDRPSSPVEELPSLAFENFLKPIKDGIQKSPCSEPQEPLVISPINTRARTGKCESLCFHSTPIIQRKLLERLPEAPGLSPLSTEPKTQKLSNKKGSNTDTLRRVLLTQAKNQFAAVNTPQKETSQIDGPSLNNTYGFKVSIQNLQEAKALHEIQNLTLISVELHARTRRDLEPDPEFDPICALFYCISSDTPLPDTEKTELTGVIVIDKDKTVFSQDIRYQTPLLIRSGITGLEVTYAADEKALFHEIANIIKRYDPDILLGYEIQMHSWGYLLQRAAALSIDLCRMISRVPDDKIENRFAAERDEYGSYTMSEINIVGRITLNLWRIMRNEVALTNYTFENVSFHVLHQRFPLFTFRVLSDWFDNKTDLYRWKMVDHYVSRVRGNLQMLEQLDLIGKTSEMARLFGIQFLHVLTRGSQYRVESMMLRIAKPMNYIPVTPSVQQRSQMRAPQCVPLIMEPESRFYSNSVLVLDFQSLYPSIVIAYNYCFSTCLGHVENLGKYDEFKFGCTSLRVPPDLLYQVRHDITVSPNGVAFVKPSVRKGVLPRMLEEILKTRFMVKQSMKAYKQDRALSRMLDARQLGLKLIANVTFGYTSANFSGRMPCIEVGDSIVHKARETLERAIKLVNDTKKWGARVVYGDTDSMFVLLKGATKEQSFKIGQEIAEAVTATNPKPVKLKFEKVYLPCVLQTKKRYVGYMYETLDQKDPVFDAKGIETVRRDSCPAVSKILERSLKLLFETRDISLIKQYVQRQCMKLLEGKASIQDFIFAKEYRGSFSYKPGACVPALELTRKMLTYDRRSEPQVGERVPYVIIYGTPGVPLIQLVRRPVEVLQDPTLRLNATYYITKQILPPLARIFSLIGIDVFSWYHELPRIHKATSSSRSEPEGRKGTISQYFTTLHCPVCDDLTQHGICSKCRSQPQHVAVILNQEIRELERQQEQLVKICKNCTGCFDRHIPCVSLNCPVLFKLSRVNRELSKAPYLRQLLDQF

SEQ ID NO: 887670 - protein, 3130 aa, Homo sapiens; identical to SEQ ID NO: 887669

SEQ ID NO: 887671 - protein, 389 aa, Homo sapiens [sequence omitted]

SEQ ID NO: 887672 - protein, 2354 aa, Homo sapiens
MAFSIDRALNVALGNPSSTAQHVFKVSLVSGMPFYGYHEKERHFMKIYLYNPTMVKRICELLQSGAIMNKFYQPHEAHIPYLLQLFIDYNLYGMNLINLAAVKFRKARRKSNTLHATGSCKNHLSGNSLADTLFRWEQDEIPSSLILEGVEPQSTCELEVDAVAADILNRLDIEAQIGGNPGLQAIWEDEKQRRRNRNETSQMSQPESQDHRFVPATESEKKFQKRLQEILKQNDFSVTLSGSVDYSDGSQEFSAELTLHSEVLSPEMLQCTPANMVEVHKDKESSKGHTRHKVEEALINEEAILNLMENSQTFQPLTQRLSESPVFMDSSPDEALVHLLAGLESDGYRGERNRMPSPCRSFGNNKYPQNSDDEENEPQIEKEEMELSLVMSQRWDSNIEEHCAKKRSLCRNTHRSSTEDDDSSSGEEMEWSDNSLLLASLSIPQLDGTADENSDNPLNNENSRTHSSVIATSKLSVKPSIFHKDAATLEPSSSAKITFQCKHTSALSSHVLNKEDLIEDLSQTNKNTEKGLDNSVTSFTNESTYSMKYPGSLSSTVHSENSHKENSKKEILPVSSCESSIFDYEEDIPSVTRQVPSRKYTNIRKIEKDSPFIHMHRHPNENTLGKNSFNFSDLNHSKNKVSSEGNEKGNSTALSSLFPSSFTENCELLSCSGENRTMVHSLNSTADESGLNKLKIRYEEFQEHKTEKPSLSQQAAHYMFFPSVVLSNCLTRPQKLSPVTYKLQPGNKPSRLKLNKRKLAGHQETSTKSSETGSTKDNFIQNNPCNSNPEKDNALASDLTKTTRGAFENKTPTDGFIDCHFGDGTLETEQSFGLYGNKYTLRAKRKVNYETEDSESSFVTHNSKISLPHPMEIGESLDGTLKSRKRRKMSKKLPPVIIKYIIINRFRGRKNMLVKLGKIDSKEKQVILTEEKMELYKKLAPLKDFWPKVPDSPATKYPIYPLTPKKSHRRKSKHKSAKKKTGKQQRTNNENIKRTLSFRKKRSHAILSPPSPSYNAETEDCDLNYSDVMSKLGFLSERSTSPINSSPPRCWSPTDPRAEEIMAAAEKEAMLFKGPNVYKKTVNSRIGKTSRARAQIKKSKAKLANPSIVTKKRNKRNQTNKLVDDGKKKPRAKQKTNEKGTSRKHITLKDEKIKSQSGAEVKFVLKHQNVSEFASSSGGSQLLFKQKDMPLMGSAVDHPLSASLPTGINAQQKLSGCFSSFLESKKSVDLQTFPSSRDDLHPSVVCNSIGPGVSKINVQRPHNQSAMFTLKESTLIQKNIFDLSNHLSQVAQNTQISSGMSSKIEDNANNIQRNYLSSIGKLSEYRNSLESKLDQAYTPNFLHCKDSQQQIVCIAEQSKHSETCSPGNTASEESQMPNNCFVTSLRSPIKQIAWEQKQRGFILDMSNFKPERVKPRSLSEAISQTKALSQCKNRNVSTPSAFGEGQSGLAVLKELLQKRQQKAQNANTTQDPLSNKHQPNKNISGSLEHNKANKRTRSVTSPRKPRTPRSTKQKEKIPKLLKVDSLNLQNSSQLDNSVSDDSPIFFSDPGFESCYSLEDSLSPEHNYNFDINTIGQTGFCSFYSGSQFVPADQNLPQKFLSDAVQDLFPGQAIEKNEFLSHDNQKCDEDKHHTTDSASWIRSGTLSPEIFEKSTIDSNENRRHNQWKNSFHPLTTRSNSIMDSFCVQQAEDCLSEKSRLNRSSVSKEVFLSLPQPNNSDWIQGHTRKEMGQSLDSANTSFTAILSSPDGELVDVACEDLELYVSRNNDMLTPTPDSSPRSTSSPSQSKNGSFTPRTANILKPLMSPPSREEIMATLLDHDLSETIYQEPFCSNPSDVPEKPREIGGRLLMVETRLANDLAEFEGDFSLEGLRLWKTAFSAMTQNPRPGSPLRSGQGVVNKGSSNSPKMVEDKKIVIMPCKCAPSRQLVQVWLQAKEEYERSKKLPKTKPTGVVKSAENFSSSVNPDDKPVVPPKMDVSPCILPTTAHTKEDVDNSQIALQAPTTGCSQTASESQMLPPVASASDPEKDEDDDDNYYISYSSPDSPVIPPWQQPISPDSKALNGDDRPSSPVEELPSLAFENFLKPIKDGIQKSPCSEPQEPLVISPINTRARTGKCESLCFHSTPIIQRKLLERLPEAPGLSPLSTEPKTQKLSNKKGSNTDTLRRVLLTQAKNQFAAVNTPQKETSQIDGPSLNNTYGFKVSIQNLQEAKALHEIQNLTLISVELHARTRRDLEPDPEFDPICALFYCISSDTPLPDTEKTELTGVIVIDKDKTVFSQDIRYQTPLLIRSGITGLEVTYAADEKALFHEIANIIKRYCFVYLIFPVLFRESFHAIADNSEDKSKGRKKANPFL

SEQ ID NO: 887673 - protein, 2706 aa, Homo sapiens
MAFSIDRALNVALGNPSSTAQHVFKVSLVSGMPFYGYHEKERHFMKIYLYNPTMVKRICELLQSGAIMNKFYQPHEAHIPYLLQLFIDYNLYGMNLINLAAVKFRKARRKSNTLHATGSCKNHLSGNSLADTLFRWEQDEIPSSLILEGVEPQSTCELEVDAVAADILNRLDIEAQIGGNPGLQAIWEDEKQRRRNRNETSQMSQPESQDHRFVPATESEKKFQKRLQEILKQNDFSVTLSGSVDYSDGSQEFSAELTLHSEVLSPEMLQCTPANMVEVHKDKESSKGHTRHKVEEALINEEAILNLMENSQTFQPLTQRLSESPVFMDSSPDEALVHLLAGLESDGYRGERNRMPSPCRSFGNNKYPQNSDDEENEPQIEKEEMELSLVMSQRWDSNIEEHCAKKRSLCRNTHRSSTEDDDSSSGEEMEWSDNSLLLASLSIPQLDGTADENSDNPLNNENSRTHSSVIATSKLSVKPSIFHKDAATLEPSSSAKITFQCKHTSALSSHVLNKEDLIEDLSQTNKNTEKGLDNSVTSFTNESTYSMKYPGSLSSTVHSENSHKENSKKEILPVSSCESSIFDYEEDIPSVTRQVPSRKYTNIRKIEKDSPFIHMHRHPNENTLGKNSFNFSDLNHSKNKVSSEGNEKGNSTALSSLFPSSFTENCELLSCSGENRTMVHSLNSTADESGLNKLKIRYEEFQEHKTEKPSLSQQAAHYMFFPSVVLSNCLTRPQKLSPVTYKLQPGNKPSRLKLNKRKLAGHQETSTKSSETGSTKDNFIQNNPCNSNPEKDNALASDLTKTTRGAFENKTPTDGFIDCHFGDGTLETEQSFGLYGNKYTLRAKRKVNYETEDSESSFVTHNSKISLPHPMEIGESLDGTLKSRKRRKMSKKLPPVIIKYIIINRFRGRKNMLVKLGKIDSKEKQVILTEEKMELYKKLAPLKDFWPKVPDSPATKYPIYPLTPKKSHRRKSKHKSAKKKTGKQQRTNNENIKRTLSFRKKRSHAILSPPSPSYNAETEDCDLNYSDVMSKLGFLSERSTSPINSSPPRCWSPTDPRAEEIMAAAEKEAMLFKGPNVYKKTVNSRIGKTSRARAQIKKSKAKLANPSIVTKKRNKRNQTNKLVDDGKKKPRAKQKTNEKGTSRKHITLKDEKIKSQSGAEVKFVLKHQNVSEFASSSGGSQLLFKQKDMPLMGSAVDHPLSASLPTGINAQQKLSGCFSSFLESKKSVDLQTFPSSRDDLHPSVVCNSIGPGVSKINVQRPHNQSAMFTLKESTLIQKNIFDLSNHLSQVAQNTQISSGMSSKIEDNANNIQRNYLSSIGKLSEYRNSLESKLDQAYTPNFLHCKDSQQQIVCIAEQSKHSETCSPGNTASEESQMPNNCFVTSLRSPIKQIAWEQKQRGFILDMSNFKPERVKPRSLSEAISQTKALSQCKNRNVSTPSAFGEGQSGLAVLKELLQKRQQKAQNANTTQDPLSNKHQPNKNISGSLEHNKANKRTRSVTSPRKPRTPRSTKQKEKIPKLLKVDSLNLQNSSQLDNSVSDDSPIFFSDPGFESCYSLEDSLSPEHNYNFDINTIGQTGFCSFYSGSQFVPADQNLPQKFLSDAVQDLFPGQAIEKNEFLSHDNQKCDEDKHHTTDSASWIRSGTLSPEIFEKSTIDSNENRRHNQWKNSFHPLTTRSNSIMDSFCVQQAEDCLSEKSRLNRSSVSKEVFLSLPQPNNSDWIQGHTRKEMGQSLDSANTSFTAILSSPDGELVDVACEDLELYVSRNNDMLTPTPDSSPRSTSSPSQSKNGSFTPRTANILKPLMSPPSREEIMATLLDHDLSETIYQEPFCSNPSDVPEKPREIGGRLLMVETRLANDLAEFEGDFSLEGLRLWKTAFSAMTQNPRPGSPLRSGQGVVNKGSSNSPKMVEDKKIVIMPCKCAPSRQLVQVWLQAKEEYERSKKLPKTKPTGVVKSAENFSSSVNPDDKPVVPPKMDVSPCILPTTAHTKEDVDNSQIALQAPTTGCSQTASESQMLPPVASASDPEKDEDDDDNYYISYSSPDSPVIPPWQQPISPDSKALNGDDRPSSPVEELPSLAFENFLKPIKDGIQKSPCSEPQEPLVISPINTRARTGKCESLCFHSTPIIQRKLLERLPEAPGLSPLSTEPKTQKLSNKKGSNTDTLRRVLLTQAKNQFAAVNTPQKETSQIDGPSLNNTYGFKVSIQNLQEAKALHEIQNLTLISVELHARTRRDLEPDPEFDPICALFYCISSDTPLPDTEKTELTGVIVIDKDKTVFSQDIRYQTPLLIRSGITGLEVTYAADEKALFHEIANIIKRYDPDILLGYEIQMHSWGYLLQRAAALSIDLCRMISRVPDDKIENRFAAERDEYGSYTMSEINIVGRITLNLWRIMRNEVALTNYTFENVSFHVLHQRFPLFTFRVLSDWFDNKTDLYRWKMVDHYVSRVRGNLQMLEQLDLIGKTSEMARLFGIQFLHVLTRGSQYRVESMMLRIAKPMNYIPVTPSVQQRSQMRAPQCVPLIMEPESRFYSNSVLVLDFQSLYPSIVIAYNYCFSTCLGHVENLGKYDEFKFGCTSLRVPPDLLYQVRHDITVSPNGVAFVKPSVRKGVLPRMLEEILKTRFMVKQSMKAYKQDRALSRMLDARQLGLKLIANVTFGYTSANFSGRMPCIEVGDSIVHKARETLERAIKLVNDTKKWGARVVYGDTDR

SEQ ID NO: 887674 - protein, 1544 aa, Homo sapiens
MAFSIDRALNVALGNPSSTAQHVFKVSLVSGMPFYGYHEKERHFMKIYLYNPTMVKRICELLQSGAIMNKFYQPHEAHIPYLLQLFIDYNLYGMNLINLAAVKFRKARRKSNTLHATGSCKNHLSGNSLADTLFRWEQDEIPSSLILEGVEPQSTCELEVDAVAADILNRLDIEAQIGGNPGLQAIWEDEKQRRRNRNETSQMSQPESQDHRFVPATESEKKFQKRLQEILKQNDFSVTLSGSVDYSDGSQEFSAELTLHSEVLSPEMLQCTPANMVEVHKDKESSKGHTRHKVEEALINEEAILNLMENSQTFQPLTQRLSESPVFMDSSPDEALVHLLAGLESDGYRGERNRMPSPCRSFGNNKYPQNSDDEENEPQIEKEEMELSLVMSQRWDSNIEEHCAKKRSLCRNTHRSSTEDDDSSSGEEMEWSDNSLLLASLSIPQLDGTADENSDNPLNNENSRTHSSVIATSKLSVKPSIFHKDAATLEPSSSAKITFQCKHTSALSSHVLNKEDLIEDLSQTNKNTEKGLDNSVTSFTNESTYSMKYPGSLSSTVHSENSHKENSKKEILPVSSCESSIFDYEEDIPSVTRQVPSRKYTNIRKIEKDSPFIHMHRHPNENTLGKNSFNFSDLNHSKNKVSSEGNEKGNSTALSSLFPSSFTENCELLSCSGENRTMVHSLNSTADESGLNKLKIRYEEFQEHKTEKPSLSQQAAHYMFFPSVVLSNCLTRPQKLSPVTYKLQPGNKPSRLKLNKRKLAGHQETSTKSSETGSTKDNFIQNNPCNSNPEKDNALASDLTKTTRGAFENKTPTDGFIDCHFGDGTLETEQSFGLYGNKYTLRAKRKVNYETEDSESSFVTHNSKISLPHPMEIGESLDGTLKSRKRRKMSKKLPPVIIKYIIINRFRGRKNMLVKLGKIDSKEKQVILTEEKMELYKKLAPLKDFWPKVPDSPATKYPIYPLTPKKSHRRKSKHKSAKKKTGKQQRTNNENIKRTLSFRKKRSHAILSPPSPSYNAETEDCDLNYSDVMSKLGFLSERSTSPINSSPPRCWSPTDPRAEEIMAAAEKEAMLFKGPNVYKKTVNSRIGKTSRARAQIKKSKAKLANPSIVTKKRNKRNQTNKLVDDGKKKPRAKQKTNEKGTSRKHITLKDEKIKSQSGAEVKFVLKHQNVSEFASSSGGSQLLFKQKDMPLMGSAVDHPLSASLPTGINAQQKLSGCFSSFLESKKSVDLQTFPSSRDDLHPSVVCNSIGPGVSKINVQRPHNQSAMFTLKESTLIQKNIFDLSNHLSQVAQNTQISSGMSSKIEDNANNIQRNYLSSIGKLSEYRNSLESKLDQAYTPNFLHCKDSQQQIVCIAEQSKHSETCSPGNTASEESQMPNNCFVTSLRSPIKQIAWEQKQRGFILDMSNFKPERVKPRSLSEAISQTKALSQCKNRNVSTPSAFGEGQSGLAVLKELLQKRQQKAQNANTTQDPLSNKHQPNKNISGSLEHNKANKRTRSVTSPRKPEIFLDCEGELVDLGELSGVGVNISLFLETYSSKSSQATS

SEQ ID NO: 887675 - protein, 118 aa, Homo sapiens
MAFSIDRALNVALGNPSSTAQHVFKVSLVSGMPFYGYHEKERHFMKIYLYNPTMVKRICELLQSGAIMNKFYQPHEAHIPYLLQLFIDYNLYGMNLINLAAVKFRKARRKSKVNFQSN

SEQ ID NO: 887676 - protein, 323 aa, Homo sapiens
MTSSLPYFIFNPLSMFVLLKGATKEQSFKIGQEIAEAVTATNPKPVKLKFEKVYLPCVLQTKKRYVGYMYETLDQKDPVFDAKGIETVRRDSCPAVSKILERSLKLLFETRDISLIKQYVQRQCMKLLEGKASIQDFIFAKEYRGSFSYKPGACVPALELTRKMLTYDRRSEPQVGERVPYVIIYGTPGVPLIQLVRRPVEVLQDPTLRLNATYYITKQILPPLARIFSLIGIDVFSWYHELPRGFIAALFTIAKTWNQPKCPSMIDWIKKMWHIYTMEYYAAIKKDEFMSFAGTWMKLETIILSKLSQGQKTKHRLFSLIDP

SEQ ID NO: 887677 - protein, 3052 aa, Homo sapiens; identical to SEQ ID NO: 887668

SEQ ID NO: 887678 - protein, 3052 aa, Homo sapiens; identical to SEQ ID NO: 887668

SEQ ID NO: 887679 - protein, 2854 aa, Homo sapiens
MAFSIDRALNVALGNPSSTAQHVFKVSLVSGMPFYGYHEKERHFMKIYLYNPTMVKRICELLQSGAIMNKFYQPHEAHIPYLLQLFIDYNLYGMNLINLAAVKFRKARRKSNTLHATGSCKNHLSGNSLADTLFRWEQDEIPSSLILEGVEPQSTCELEVDAVAADILNRLDIEAQIGGNPGLQAIWEDEKQRRRNRNETSQMSQPESQDHRFVPATESEKKFQKRLQEILKQNDFSVTLSGSVDYSDGSQEFSAELTLHSEVLSPEMLQCTPANMVEVHKDKESSKGHTRHKVEEALINEEAILNLMENSQTFQPLTQRLSESPVFMDSSPDEALVHLLAGLESDGYRGERNRMPSPCRSFGNNKYPQNSDDEENEPQIEKEEMELSLVMSQRWDSNIEEHCAKKRSLCRNTHRSSTEDDDSSSGEEMEWSDNSLLLASLSIPQLDGTADENSDNPLNNENSRTHSSVIATSKLSVKPSIFHKDAATLEPSSSAKITFQCKHTSALSSHVLNKEDLIEDLSQTNKNTEKGLDNSVTSFTNESTYSMKYPGSLSSTVHSENSHKENSKKEILPVSSCESSIFDYEEDIPSVTRQVPSRKYTNIRKIEKDSPFIHMHRHPNENTLGKNSFNFSDLNHSKNKVSSEGNEKGNSTALSSLFPSSFTENCELLSCSGENRTMVHSLNSTADESGLNKLKIRYEEFQEHKTEKPSLSQQAAHYMFFPSVVLSNCLTRPQKLSPVTYKLQPGNKPSRLKLNKRKLAGHQETSTKSSETGSTKDNFIQNNPCNSNPEKDNALASDLTKTTRGAFENKTPTDGFIDCHFGDGTLETEQSFGLYGNKYTLRAKRKVNYETEDSESSFVTHNSKISLPHPMEIGESLDGTLKSRKRRKMSKKLPPVIIKYIIINRFRGRKNMLVKLGKIDSKEKQVILTEEKMELYKKLAPLKDFWPKVPDSPATKYPIYPLTPKKSHRRKSKHKSAKKKTGKQQRTNNENIKRTLSFRKKRSHAILSPPSPSYNAETEDCDLNYSDVMSKLGFLSERSTSPINSSPPRCWSPTDPRAEEIMAAAEKEAMLFKGPNVYKKTVNSRIGKTSRARAQIKKSKAKLANPSIVTKKRNKRNQTNKLVDDGKKKPRAKQKTNEKGTSRKHITLKDEKIKSQSGAEVKFVLKHQNVSEFASSSGGSQLLFKQKDMPLMGSAVDHPLSASLPTGINAQQKLSGCFSSFLESKKSVDLQTFPSSRDDLHPSVVCNSIGPGVSKINVQRPHNQSAMFTLKESTLIQKNIFDLSNHLSQVAQNTQISSGMSSKIEDNANNIQRNYLSSIGKLSEYRNSLESKLDQAYTPNFLHCKDSQQQIVCIAEQSKHSETCSPGNTASEESQMPNNCFVTSLRSPIKQIAWEQKQRGFILDMSNFKPERVKPRSLSEAISQTKALSQCKNRNVSTPSAFGEGQSGLAVLKELLQKRQQKAQNANTTQDPLSNKHQPNKNISGSLEHNKANKRTRSVTSPRKPRTPRSTKQKEKIPKLLKVDSLNLQNSSQLDNSVSDDSPIFFSDPGFESCYSLEDSLSPEHNYNFDINTIGQTGFCSFYSGSQFVPADQNLPQKFLSDAVQDLFPGQAIEKNEFLSHDNQKCDEDKHHTTDSASWIRSGTLSPEIFEKSTIDSNENRRHNQWKNSFHPLTTRSNSIMDSFCVQQAEDCLSEKSRLNRSSVSKEVFLSLPQPNNSDWIQGHTRKEMGQSLDSANTSFTAILSSPDGELVDVACEDLELYVSRNNDMLTPTPDSSPRSTSSPSQSKNGSFTPRTANILKPLMSPPSREEIMATLLDHDLSETIYQEPFCSNPSDVPEKPREIGGRLLMVETRLANDLAEFEGDFSLEGLRLWKTAFSAMTQNPRPGSPLRSGQGVVNKGSSNSPKMVEDKKIVIMPCKCAPSRQLVQVWLQAKEEYERSKKLPKTKPTGVVKSAENFSSSVNPDDKPVVPPKMDVSPCILPTTAHTKEDVDNSQIALQAPTTGCSQTASESQMLPPVASASDPEKDEDDDDNYYISYSSPDSPVIPPWQQPISPDSKALNGDDRPSSPVEELPSLAFENFLKPIKDGIQKSPCSEPQEPLVISPINTRARTGKCESLCFHSTPIIQRKLLERLPEAPGLSPLSTEPKTQKLSNKKGSNTDTLRRVLLTQAKNQFAAVNTPQKETSQIDGPSLNNTYGFKVSIQNLQEAKALHEIQNLTLISVELHARTRRDLEPDPEFDPICALFYCISSDTPLPDTEKTELTGVIVIDKDKTVFSQDIRYQTPLLIRSGITGLEVTYAADEKALFHEIANIIKRYDPDILLGYEIQMHSWGYLLQRAAALSIDLCRMISRVPDDKIENRFAAERDEYGSYTMSEINIVGRITLNLWRIMRNEVALTNYTFENVSFHVLHQRFPLFTFRVLSDWFDNKTDLYRWKMVDHYVSRVRGNLQMLEQLDLIGKTSEMARLFGIQFLHVLTRGSQYRVESMMLRIAKPMNYIPVTPSVQQRSQMRAPQCVPLIMEPESRFYSNSVLVLDFQSLYPSIVIAYNYCFSTCLGHVENLGKYDEFKFGCTSLRVPPDLLYQVRHDITVSPNGVAFVKPSVRKGVLPRMLEEILKTRFMVKQSMKAYKQDRALSRMLDARQLGLKLIANVTFGYTSANFSGRMPCIEVGDSIVHKARETLERAIKLVNDTKKWGARVVYGDTDSMFVLLKGATKEQSFKIGQEIAEAVTATNPKPVKLKFEKVYLPCVLQTKKRYVGYMYETLDQKDPVFDAKGIETVRRDSCPAVSKILERSLKLLFETRDISLIKQYVQRQCMKLLEGKASIQDFIFAKEYRGSFSYKPGACVPALELTR

SEQ ID NO: 887680 - protein, 2420 aa, Homo sapiens
MAFSIDRALNVALGNPSSTAQHVFKVSLVSGMPFYGYHEKERHFMKIYLYNPTMVKRICELLQSGAIMNKFYQPHEAHIPYLLQLFIDYNLYGMNLINLAAVKFRKARRKSNTLHATGSCKNHLSGNSLADTLFRWEQDEIPSSLILEGVEPQSTCELEVDAVAADILNRLDIEAQIGGNPGLQAIWEDEKQRRRNRNETSQMSQPESQDHRFVPATESEKKFQKRLQEILKQNDFSVTLSGSVDYSDGSQEFSAELTLHSEVLSPEMLQCTPANMVEVHKDKESSKGHTRHKVEEALINEEAILNLMENSQTFQPLTQRLSESPVFMDSSPDEALVHLLAGLESDGYRGERNRMPSPCRSFGNNKYPQNSDDEENEPQIEKEEMELSLVMSQRWDSNIEEHCAKKRSLCRNTHRSSTEDDDSSSGEEMEWSDNSLLLASLSIPQLDGTADENSDNPLNNENSRTHSSVIATSKLSVKPSIFHKDAATLEPSSSAKITFQCKHTSALSSHVLNKEDLIEDLSQTNKNTEKGLDNSVTSFTNESTYSMKYPGSLSSTVHSENSHKENSKKEILPVSSCESSIFDYEEDIPSVTRQVPSRKYTNIRKIEKDSPFIHMHRHPNENTLGKNSFNFSDLNHSKNKVSSEGNEKGNSTALSSLFPSSFTENCELLSCSGENRTMVHSLNSTADESGLNKLKIRYEEFQEHKTEKPSLSQQAAHYMFFPSVVLSNCLTRPQKLSPVTYKLQPGNKPSRLKLNKRKLAGHQETSTKSSETGSTKDNFIQNNPCNSNPEKDNALASDLTKTTRGAFENKTPTDGFIDCHFGDGTLETEQSFGLYGNKYTLRAKRKVNYETEDSESSFVTHNSKISLPHPMEIGESLDGTLKSRKRRKMSKKLPPVIIKYIIINRFRGRKNMLVKLGKIDSKEKQVILTEEKMELYKKLAPLKDFWPKVPDSPATKYPIYPLTPKKSHRRKSKHKSAKKKTGKQQRTNNENIKRTLSFRKKRSHAILSPPSPSYNAETEDCDLNYSDVMSKLGFLSERSTSPINSSPPRCWSPTDPRAEEIMAAAEKEAMLFKGPNVYKKTVNSRIGKTSRARAQIKKSKAKLANPSIVTKKRNKRNQTNKLVDDGKKKPRAKQKTNEKGTSRKHITLKDEKIKSQSGAEVKFVLKHQNVSEFASSSGGSQLLFKQKDMPLMGSAVDHPLSASLPTGINAQQKLSGCFSSFLESKKSVDLQTFPSSRDDLHPSVVCNSIGPGVSKINVQRPHNQSAMFTLKESTLIQKNIFDLSNHLSQVAQNTQISSGMSSKIEDNANNIQRNYLSSIGKLSEYRNSLESKLDQAYTPNFLHCKDSQQQIVCIAEQSKHSETCSPGNTASEESQMPNNCFVTSLRSPIKQIAWEQKQRGFILDMSNFKPERVKPRSLSEAISQTKALSQCKNRNVSTPSAFGEGQSGLAVLKELLQKRQQKAQNANTTQDPLSNKHQPNKNISGSLEHNKANKRTRSVTSPRKPRTPRSTKQKEKIPKLLKVDSLNLQNSSQLDNSVSDDSPIFFSDPGFESCYSLEDSLSPEHNYNFDINTIGQTGFCSFYSGSQFVPADQNLPQKFLSDAVQDLFPGQAIEKNEFLSHDNQKCDEDKHHTTDSASWIRSGTLSPEIFEKSTIDSNENRRHNQWKNSFHPLTTRSNSIMDSFCVQQAEDCLSEKSRLNRSSVSKEVFLSLPQPNNSDWIQGHTRKEMGQSLDSANTSFTAILSSPDGELVDVACEDLELYVSRNNDMLTPTPDSSPRSTSSPSQSKNGSFTPRTANILKPLMSPPSREEIMATLLDHDLSETIYQEPFCSNPSDVPEKPREIGGRLLMVETRLANDLAEFEGDFSLEGLRLWKTAFSAMTQNPRPGSPLRSGQGVVNKGSSNSPKMVEDKKIVIMPCKCAPSRQLVQVWLQAKEEYERSKKLPKTKPTGVVKSAENFSSSVNPDDKPVVPPKMDVSPCILPTTAHTKEDVDNSQIALQAPTTGCSQTASESQMLPPVASASDPEKDEDDDDNYYISYSSPDSPVIPPWQQPISPDSKALNGDDRPSSPVEELPSLAFENFLKPIKDGIQKSPCSEPQEPLVISPINTRARTGKCESLCFHSTPIIQRKLLERLPEAPGLSPLSTEPKTQKLSNKKGSNTDTLRRVLLTQAKNQFAAVNTPQKETSQIDGPSLNNTYGFKVSIQNLQEAKALHEIQNLTLISVELHARTRRDLEPDPEFDPICALFYCISSDTPLPDTEKTELTGVIVIDKDKTVFSQDIRYQTPLLIRSGITGLEVTYAADEKALFHEIANIIKRYDPDILLGYEIQMHSWGYLLQRAAALSIDLCRMISRVPDDKIENRFAAERDEYGSYTMSEINIVGRITLNLWRIMRNEVGDLSKMLFRNKIFGQYNDLIIIEY

SEQ ID NO: 887681 - protein, 157 aa, Homo sapiens
MAFSIDRALNVALGNPSSTAQHVFKVSLVSGMPFYGYHEKERHFMKIYLYNPTMVKRICELLQSGAIMNKFYQPHEAHIPYLLQLFIDYNLYGMNLINLAAVKFRKARRKSNTLHATGSCKNHLSGNSLADTLFRWEQDEIPRLVNVVKEMKILHIS

SEQ ID NO: 887682 - protein, 561 aa, Homo sapiens
MSTERTSWTSLSTIQKIALGLGIPASATVAYILYRRYRESREERLTFVGEDDIEIEMRVPQEAVKLIIGRQGANIKQLRKQTGARIDVDTEDVGDERVLLISGFPVQVCKAKAAIHQILTENTPVSEQLSVPQRSVGRIIGRGGETIRSICKASGAKITCDKESEGTLLLSRLIKISGTQKEVAAAKHLILEKVSEDEELRKRIAHSAETRVPRKQPISVRREDMTEPGGAGEPALWKNTSSSMEPTAPLVTPPPKGGGDMAVVVSKEGSWEKPSDDSFQKSEAQAIPEMPMFEIPSPDFSFHADEYLEVYVSASEHPNHFWIQIVGSRSLQLDKLVNEMTQHYENSVPEDLTVHVGDIVAAPLPTNGSWYRARVLGTLENGNLDLYFVDFGDNGDCPLKDLRALRSDFLSLPFQAIECSLARIAPSGDQWEEEALDEFDRLTHCADWKPLVAKISSYVQTGISTWPKIYLYDTSNGKKLDIGLELVHKGYAIELPEDIEENRAVPDMLKDMATETDASLSTLLTETKKSSGEITHTLSCLSLSEAASMSGDDNLEDDYLL

SEQ ID NO: 887683 - protein, 561 aa, Homo sapiens; identical to SEQ ID NO: 887682

SEQ ID NO: 887684 - protein, 561 aa, Homo sapiens; identical to SEQ ID NO: 887682

SEQ ID NO: 887685 - protein, 561 aa, Homo sapiens; identical to SEQ ID NO: 887682

SEQ ID NO: 887686 - protein, 296 aa, Homo sapiens
MSTERTSWTSLSTIQKIALGLGIPASATVAYILYRRYRESREERLTFVGEDDIEIEMRVPQEAVKLIIGRQGANIKQLRKQTGARIDVDTEDVGDERVLLISGFPVQVCKAKAAIHQILTENTPVSEQLSVPQRSVGRIIGRGGETIRSICKASGAKITCDKESEGTLLLSRLIKISGTQKEVAAAKHLILEKVSEDEELRKRIAHSAETRVPRKQPISVRREDMTEPGGAGEPALWKNTSSSMEPTAPLVTPPPKGGGDMAVVVSKEGSWEKPSDDSFQKSEAQAIPEMPMFESM

SEQ ID NO: 887687 - protein, 561 aa, Homo sapiens; identical to SEQ ID NO: 887682

SEQ ID NO: 887688 - protein, 516 aa, Homo sapiens
MSTERTSWTSLSTIQKIALGLGIPASATVAYILYRRYRESREERLTFVGEDDIEIEMRVPQEAVKLIIGRQGANIKQLRKQTGARIDVDTEDVGDERVLLISGFPVQASGAKITCDKESEGTLLLSRLIKISGTQKEVAAAKHLILEKVSEDEELRKRIAHSAETRVPRKQPISVRREDMTEPGGAGEPALWKNTSSSMEPTAPLVTPPPKGGGDMAVVVSKEGSWEKPSDDSFQKSEAQAIPEMPMFEIPSPDFSFHADEYLEVYVSASEHPNHFWIQIVGSRSLQLDKLVNEMTQHYENSVPEDLTVHVGDIVAAPLPTNGSWYRARVLGTLENGNLDLYFVDFGDNGDCPLKDLRALRSDFLSLPFQAIECSLARIAPSGDQWEEEALDEFDRLTHCADWKPLVAKISSYVQTGISTWPKIYLYDTSNGKKLDIGLELVHKGYAIELPEDIEENRAVPDMLKDMATETDASLSTLLTETKKSSGEITHTLSCLSLSEAASMSGDDNLEDDYLL

SEQ ID NO: 887689 - protein, 371 aa, Homo sapiens
EIRKFAMKEMGTPDVRIDTRLNKAVWAKGIRNVPYRIRVRLSRKRNEDEDSPNKLYTLVTYVPVTTFKNLQTVNVDENYSLIVRSNKVIKLQKKKAIPEMPMFEIPSPDFSFHADEYLEVYVSASEHPNHFWIQIVGSRSLQLDKLVNEMTQHYENSVPEDLTVHVGDIVAAPLPTNGSWYRARVLGTLENGNLDLYFVDFGDNGDCPLKDLRALRSDFLSLPFQAIECSLARIAPSGDQWEEEALDEFDRLTHCADWKPLVAKISSYVQTGISTWPKIYLYDTSNGKKLDIGLELVHKGYAIELPEDIEENRAVPDMLKDMATETDASLSTLLTETKKSSGEITHTLSCLSLSEAASMSGDDNLEDDYLL

SEQ ID NO: 887690 - protein, 407 aa, Homo sapiens
MSTERTSWTSLSTIQKIALGLGIPASATVAYILYRRYRESREERLTFVGEDDIEIEMRVPQEAVKLIIGRQGANIKQLRKQTGARIDVDTEDVGDERVLLISGFPVQVCKAKAAIHQILTENTPVSEQLSVPQRSVGRIIGRGGETIRSICKASGAKITCDKESEGTLLLSRLIKISGTQKEVAAAKHLILEKVSEDEELRKRIAHSAETRVPRKQPISVRREDMTEPGGAGEPALWKNTSSSMEPTAPLVTPPPKGGGDMAVVVSKEGSWEKPSDDSFQKSEAQAIPEMPMFEIPSPDFSFHADEYLEVYVSASEHPNHFWIQIVGSRSLQLDKLVNEMTQHYENSVPEDLTVHVGDIVAAPLPTNGSWYRARVLGTLENGNLDLYFVDFGDNGDCPLKDLRALRE

SEQ ID NO: 887691 - protein, 115 aa, Homo sapiens
MSPYAESYCLLGSRVALVAGADTPCGALSRYVGPCEGVRTSAPGKVVGSDNEITVELLNHLTMLDPFCFKKLNIKENLLNLDDRSPILTLLRTKATAVSFNGFDTFIPWLIETPL

SEQ ID NO: 887692 - protein, 288 aa, Homo sapiens [sequence omitted]

SEQ ID NO: 887693 - protein, 288 aa, Homo sapiens [sequence omitted]

SEQ ID NO: 887694 - protein, 309 aa, Homo sapiens [sequence omitted]

SEQ ID NO: 887695 - protein, 290 aa, Homo sapiens
WVDRGLWVDRGLWVDRGLVASLPFAILTLVNAPYKRGFYCGDDSIRYPYRPDTITHGLMAGVTITATVILVSAGEAYLVYTDRLYSRSDFNNYVAAVYKVLGTFLFGAAVSQSLTDLAKYMIGRLRPNFLAVCDPDWSRVNCSVYVQLEKVCRGNPADVTEARLSFYSGHSSFGMYCMVFLVLYVQARLCWKWARLLRPTVQFFLVAFALYVGYTRVSDYKHHWSDVLVGLLQGALVAALTVCYISDFFKARPPQHCLKEEELERKPSLSLTLTLGEADHNHYGYPHSSS

SEQ ID NO: 887696 - protein, 242 aa, Homo sapiens [sequence omitted]

SEQ ID NO: 887697 - protein, 109 aa, Homo sapiens
TWLRGRAGTRRDALGPASGVAGTMQRRWVFVLLDVLCLLVASLPFAILTLVNAPYKRGFYCGDDSIRYPYRPDTITHGLMAGVTITATVILGAAVSPAEAHPGGPSSPG

SEQ ID NO: 887698 - protein, 211 aa, Homo sapiens
MGVARGPGSRGQHPPPRQQEVCAEGPRARLHPAPPGLGASLPFAILTLVNAPYKRGFYCGDDSIRYPYRPDTITHGLMAGVTITATVILVSAGEAYLVYTDRLYSRSDFNNYVAAVYKVLGTFLFGAAVSQSLTDLAKYMIGRLRPNFLAVCDPDWSRVNCSVYVQLEKVCRGNPADVTEARWVWTSSLHSCGEWELKKALEPNHEEPAGS

SEQ ID NO: 887699 - protein, 309 aa, Homo sapiens [sequence omitted]

SEQ ID NO: 887700 - protein, 297 aa, Homo sapiens
RDSAAGPGRDGTRWDRRRGSRGPCSGASLPFAILTLVNAPYKRGFYCGDDSIRYPYRPDTITHGLMAGVTITATVILVSAGEAYLVYTDRLYSRSDFNNYVAAVYKVLGTFLFGAAVSQSLTDLAKYMIGRLRPNFLAVCDPDWSRVNCSVYVQLEKVCRGNPADVTEARLSFYSGHSSFGMYCMVFLVLYVQARLCWKWARLLRPTVQFFLVAFALYVGYTRVSDYKHHWSDVLVGLLQGALVAALTVCYISDFFKARPPQHCLKEEELERKPSLSLTLTLGEADHNHYGYPHSSS

SEQ ID NO: 887701 - protein, 113 aa, Homo sapiens
MVFLVLYVQARLCWKWARLLRPTVQFFLVAFALYVGYTRVSDYKHHWSDVLVGLLQGALVAALTVCYISDFFKARPPQHCLKEEELERKPSLSLTLTLGEADHNHYGYPHSSS

SEQ ID NO: 887702 - protein, 240 aa, Homo sapiens
MQRRWVFVLLDVLCLLVASLPFAILTLVNAPYKRGFYCGDDSIRYPYRPDTITHGLMAGVTITATVILVSAGEAYLVYTDRLYSRSDFNNYVAAVYKVLGTFLFGAAVSQSLTDLAKYMIGRLRPNFLAVCDPDWSRVNCSVYVQLEKVCRGNPADVTEARLSFYSGHSSFGMYCMVFLVLYVQARLCWKWARLLRPTVQFFLVAFALYVGYTRVSDYKHHWRCTIKHHKTRLQTGVMSV

SEQ ID NO: 887703 - protein, 190 aa, Homo sapiens
MQRRWVFVLLDVLCLLVASLPFAILTLVNAPYKRGFYCGDDSIRYPYRPDTITHGLMAGVTITATVILVSAGEAYLVYTDRLYSRSDFNNYVAAVYKVLGTFLFGAAVSQSLTDLAKYMIGRLRPNFLAVCDPDWSRVNCSVYVQLEKVCRGNPADVTEARWVWTSSLHSCGEWELKKALEPNHEEPAGS

SEQ ID NO: 887704 - protein, 215 aa, Homo sapiens
MASRGATRPNGPNTGNKICQFKLVLLGESAVGKSSLVLRFVKGQFHEFQESTIGAAFLTQTVCLDDTTVKFEIWDTAGQERYHSLAPMYYRGAQAAIVVYDITNEESFARAKNWVKELQRQASPNIVIALSGNKADLANKRAVDFQEAQSYADDNSLLFMETSAKTSMNVNEIFMAIAKKLPKNEPQNPGANSARGRGVDLTEPTQPTRNQCCSN

SEQ ID NO: 887705 - protein, 197 aa, Homo sapiens
MASRGATRPNGPNTGNNLVLRFVKGQFHEFQESTIGAAFLTQTVCLDDTTVKFEIWDTAGQERYHSLAPMYYRGAQAAIVVYDITNEESFARAKNWVKELQRQASPNIVIALSGNKADLANKRAVDFQEAQSYADDNSLLFMETSAKTSMNVNEIFMAIAKKLPKNEPQNPGANSARGRGVDLTEPTQPTRNQCCSN

SEQ ID NO: 887706 - protein, 201 aa, Homo sapiens
MASRGATRPNGPNTGNKICQFKLVLLGESAVGKSSLVLRFVKGQFHEFQESTIGVKFEIWDTAGQERYHSLAPMYYRGAQAAIVVYDITNEESFARAKNWVKELQRQASPNIVIALSGNKADLANKRAVDFQEAQSYADDNSLLFMETSAKTSMNVNEIFMAIAKKLPKNEPQNPGANSARGRGVDLTEPTQPTRNQCCSN

SEQ ID NO: 887707 - protein, 133 aa, Homo sapiens
AAYIIVYDLTTDESLAISHNWGLGTFMSDDLVVKIVSTLNRVTGPTERIEELQMAMQTLHPFGIMYQLGKSLCECVRLYRIYSTRSSVNEIFMAIAKKLPKNEPQNPGANSARGRGVDLTEPTQPTRNQCCSN

SEQ ID NO: 887708 - protein, 215 aa, Homo sapiens; identical to SEQ ID NO: 887704

SEQ ID NO: 887709 - protein, 184 aa, Homo sapiens [sequence omitted]

SEQ ID NO: 887710 - protein, 215 aa, Homo sapiens; identical to SEQ ID NO: 887704

SEQ ID NO: 887711 - protein, 215 aa, Homo sapiens; identical to SEQ ID NO: 887704

SEQ ID NO: 887712 - protein, 215 aa, Homo sapiens; identical to SEQ ID NO: 887704

SEQ ID NO: 887713 - protein, 213 aa, Homo sapiens
MASRGATRPNGPNTGNKICQFKLVLLGESAVGKSSLVLRFVKGQFHEFQESTIGAAFLTQTVCLDDTTVKFEIWDTAGQERYHSLAPMYYRGAQAAIVVYDITNEESFARAKNWVKELQRQASPNIVIALSGNKADLANKRAVDFQEAQSYADDNSLLFMETSAKTSMNVNEIFMAIAKKLPKNEPQNPGANSARGRGVDLTEPTQPTSEIPQ

SEQ ID NO: 887714 - protein, 193 aa, Homo sapiens
MASRGATRPNGPNTGNKICQFKLVLLGESAVGKSSLVLRFVKGQFHEFQESTIGAAFLTQTVCLDDTTVKFEIWDTAGQERYHSLAPMYYRGAQAAIVVYDITNEESFARAKNWVKELQRQASPNIVIALSGNKADLANKRAVDFQEAQSYADDNSLLFMETSAKTSMNVNEIFMAIAKKCPKNELLGSLDRP

SEQ ID NO: 887715 - protein, 416 aa, Homo sapiens
RIEGREPAPPEGAARFTALGPGLEGRASAMEQPGQDPTSDDVMDSFLEKFQSQPYRGGFHEDQWEKEFEKVPLFMTRAPSEIDPRENPDLACLQSIIFDEERSPEEQAKTYKDEGNDYFKEKDYKKAVISYTEGLKKKCADPDLNAVLYTNRAAAQYYLGNFRSALNDVTAARKLKPCHLKAIIRGALCHLELKHFAEAVNWCDEGLQIDAKEKKLLEMRAKADKLKRIEQRDVRKANLKEKKERNQNEALLQAIKARNIRLSEAACEDEDSASEGLGELFLDGLSTENPHGARLSLDGQGRLSWPVLFLYPEYAQSDFISAFHEDSRFIDHLMVMFGETPSWDLEQKYCPDNLEVYFEDEDRAELYRVPAKSTLLQVLQHQRYFVKALTPAFLVCVGSSPFCKNFLRGRKVYQIR

SEQ ID NO: 887716 - protein, 416 aa, Homo sapiens; identical to SEQ ID NO: 887715

SEQ ID NO: 887717 - protein, 416 aa, Homo sapiens; identical to SEQ ID NO: 887715

SEQ ID NO: 887718 - protein, 383 aa, Homo sapiens
RIEGREPAPPEGAARFTALGPGLEGRASAMEQPGQDPTSDDVMDSFLEKFQSQPYRGGFHEDQWEKEFEKVPLFMTRAPSEIDPRENPDLACLQSIIFDEERSPEEQAKTYKDEGNDYFKEKDYKKAVISYTEGLKKKCADPDLNAVLYTNRAAAQYYLGNFRSALNDVTAARKLKPCHLKAIIRGALCHLELKHFAEAVNWCDEGLQIDAKEKKLLEMRAKADKLKRIEQRDVRKANLKEKKERNQNEALLQAIKARNIRLSEAACEDEDSASEGLGELFLDGLSTENPHGARLSLDGQGRLSWPVLFLYPEYAQSDFISAFHEDSRFIDHLMVMFGETPSWDLEQKYCPDNLEVYFEDEDRAELYRVPAKSTLLQVLQHQR

SEQ ID NO: 887719 - protein, 317 aa, Homo sapiens
RIEGREPAPPEGAARFTALGPGLEGRASAMEQPGQDPTSDDVMDSFLEKFQSQPYRGGFHEDQWEKEFEKVPLFMTRAPSEIDPRENPDLACLQSIIFDEERSPEEQAKTYKDEGNDYFKEKDYKKAVISYTEGLKKKCADPDLNAVLYTNRAAAQYYLGNFRSALNDVTAARKLKPCHLKAIIRGALCHLELKHFAEAVNWCDEGLQIDAKEKKLLEMRAKADKLKRIEQRDVRKANLKEKKERNQNEALLQAIKVYFEDEDRAELYRVPAKSTLLQVLQHQRYFVKALTPAFLVCVGSSPFCKNFLRGRKVYQIR

SEQ ID NO: 887720 - protein, 253 aa, Homo sapiens
RISPDRVYINYYDMNAAMWAGTTPPSPKSRRDPRCLRWLHPGTRRTLCSRPAHPNLLVGRNKRRDALGAGCRILLICEMQLTHQLDLFPECRVTLLLFKDVKNAGDLRRKAMEGTIDGSLINPTVIVDPFQILVAANKAVHLYKLGKMKTRTLSTEIIFNLSPNNNISEALKKFGISANDTSILIVYIEEGEKQINQEYLISQVEGHQVSLKNLPEIMNITEVKKIYKLSSQEESIGTLLDAIICRMSTKDVL

SEQ ID NO: 887721 - protein, 253 aa, Homo sapiens; identical to SEQ ID NO: 887720

SEQ ID NO: 887722 - protein, 210 aa, Homo sapiens
DGDWPSLPEVVSFVSERELFRDALGAGCRILLICEMQLTHQLDLFPECRVTLLLFKDVKNAGDLRRKAMEGTIDGSLINPTVIVDPFQILVAANKAVHLYKLGKMKTRTLSTEIIFNLSPNNNISEALKKFGISANDTSILIVYIEEGEKQINQEYLISQVEGHQVSLKNLPEIMNITEVKKIYKLSSQEESIGTLLDAIICRMSTKDVL

SEQ ID NO: 887723 - protein, 130 aa, Homo sapiens
MQIVDPFQILVAANKAVHLYKLGKMKTRTLSTEIIFNLSPNNNISEALKKFGISANDTSILIVYIEEGEKQINQEYLISQVEGHQVSLKNLPEIMNITEVKKIYKLSSQEESIGTLLDAIICRMSTKDVL

SEQ ID NO: 887724 - protein, 135 aa, Homo sapiens
DGDWPSLPEVVSFVSERELFRDALGAGCRILLICEMQLTHQLDLFPECRVTLLLFKDVKNAGDLRRKAMEGTIDGSLINPTVIVDPFQILVAANKAVHLYKLGKMKTRTLSTEIIFNLSPNNNVMCTFLFLLTVS

SEQ ID NO: 887725 - protein, 199 aa, Homo sapiens
MQLTHQLDLFPECRVTLLLFKDVKNAGDLRRKAMEGTIDGSLINPTVFHSCCPGWSAMARSWLTATSASRVQAIVLPQPPELLGLQIVDPFQILVAANKAVHLYKLGKMKTRTLSTEIIFNLSPNNNISEALKKFGISANDTSILIVYIEEGEKQINQEYLISQVEGHQVSLKNLPEIMNITEVKKIYNSLHREESIGE

SEQ ID NO: 887726 - protein, 249 aa, Homo sapiens
DGDWPSLPEVVSFVSERELFRDALGAGCRILLICEMQLTHQLDLFPECRVTLLLFKDVKNAGDLRRKAMEGTIDGSLINPTVFHSCCPGWSAMARSWLTATSASRVQAIVLPQPPELLGLQIVDPFQILVAANKAVHLYKLGKMKTRTLSTEIIFNLSPNNNISEALKKFGISANDTSILIVYIEEGEKQINQEYLISQVEGHQVSLKNLPEIMNITEVKKIYKLSSQEESIGTLLDAIICRMSTKDVL

SEQ ID NO: 887727 - protein, 253 aa, Homo sapiens; identical to SEQ ID NO: 887720

SEQ ID NO: 887728 - protein, 249 aa, Homo sapiens; identical to SEQ ID NO: 887726

SEQ ID NO: 887729 - protein, 238 aa, Homo sapiens
RISPDRVYINYYDMNAAMWAGTTPPSPKSRRDPRCLRWLHPGTRRTLCSRPAHPNLLVGRNKRRDALGAGCRILLICEMQLTHQLDLFPECRVTLLLFKDVKNAGDLRRKAMEGTIDGSLINPTVIVDPFQILVAANKAVHLYKLGKMKTRTLSTEIIFNLSPNNNISEALKKFGISANDTSILIVYIEEGEKQINQEYLISQVEGHQVSLKNLPEIMNITEVKKIYNSLHREESIGE

SEQ ID NO: 887730 - protein, 210 aa, Homo sapiens; identical to SEQ ID NO: 887722

SEQ ID NO: 887731 - protein, 210 aa, Homo sapiens; identical to SEQ ID NO: 887722

SEQ ID NO: 887732 - protein, 192 aa, Homo sapiens
DGDWPSLPEVVSFVSERELFRDALGAGCRILLICEMQLTHQLDLFPECRVTLLLFKDVKNAGDLRRKAMEGTIDGSLINPTVIVDPFQILVAANKAVHLYKLGKMKTRTLSTEIIFNLSPNNNISEALKKFGISANDTSILIVYIEEGEKQINQEYLISQVEGHQVSLKNLPEIMNITEVKKVCQSIFLERV

SEQ ID NO: 887733 - protein, 189 aa, Homo sapiens
DGDWPSLPEVVSFVSERELFRDALGAGWVTLLLFKDVKNAGDLRRKAMEGTIDGSLINPTVIVDPFQILVAANKAVHLYKLGKMKTRTLSTEIIFNLSPNNNISEALKKFGISANDTSILIVYIEEGEKQINQEYLISQVEGHQVSLKNLPEIMNITEVKKIYKLSSQEESIGTLLDAIICRMSTKDVL

SEQ ID NO: 887734 - protein, 130 aa, Homo sapiens; identical to SEQ ID NO: 887723

SEQ ID NO: 887735 - protein, 253 aa, Homo sapiens; identical to SEQ ID NO: 887720

SEQ ID NO: 887736 - protein, 178 aa, Homo sapiens
RISPDRVYINYYDMNAAMWAGTTPPSPKSRRDPRCLRWLHPGTRRTLCSRPAHPNLLVGRNKRRDALGAGCRILLICEMQLTHQLDLFPECRVTLLLFKDVKNAGDLRRKAMEGTIDGSLINPTVIVDPFQILVAANKAVHLYKLGKMKTRTLSTEIIFNLSPNNNVMCTFLFLLTVS

SEQ ID NO: 887737 - protein, 335 aa, Homo sapiens
HPVWSSPAKHCQESCEAAPAMCEEEDSTALVCDNGSGLCKAGFAGDDAPRAVFPSIVGRPRHQGVMVGMGQKDSYVGDEAQSKRGILTLKYPIEHGIITNWDDMEKIWHHSFYNELRVAPEEHPTLLTEAPLNPKANREKMTQIMFETFNVPAMYVAIQAVLSLYASGRTTGIVLDSGDGVTHNVPIYEGYALPHAIMRLDLAGRDLTDYLMKILTERGYSFVTTAEREIVRDIKEKLCYVALDFENEMGPWADSVNRTRGEADYEVDLNGHRRINKPGTAHTVRRARSSRYERMALTGNARTEERQSESTQNEQQTRKAAKIDTTERTDMRHKD

SEQ ID NO: 887738 - protein, 119 aa, Homo sapiens
HPVWSSPAKHCQESCEAAPAMCEEEDSTALVCDNGSGLCKAGFAGDDAPRAVFPSIVGRPRHQGVMVGMGQKDSYVGDEAQSKRGILTLKYPIEHGIITNWDDMEKVWEVCCSLGPQDA

SEQ ID NO: 887739 - protein, 71 aa, Homo sapiens
HPVWSSPAKHCQESCEAAPAMCEEEDSTALVCDNGSGLCKAGFAGDDAPRAVFPSIVGRPRHQVRKIMIGT

SEQ ID NO: 887740 - protein, 389 aa, Homo sapiens
RPIRHEVWSSPAKHCQESCEAAPAMCEEEDSTALVCDNGSGLCKAGFAGDDAPRAVFPSIVGRPRHQGVMVGMGQKDSYVGDEAQSKRGILTLKYPIEHGIITNWDDMEKIWHHSFYNELRVAPEEHPTLLTEAPLNPKANREKMTQIMFETFNVPAMYVAIQAVLSLYASGRTTGIVLDSGDGVTHNVPIYEGYALPHAIMRLDLAGRDLTDYLMKILTERGYSFVTTAEREIVRDIKEKLCYVALDFENEMATAASSSSLEKSYELPDGQVITIGNERFRCPETLFQPSFIGMESAGIHETTYNSIMKCDIDIRKDLYANNVLSGGTTMYPGIADRMQKEITALAPSTMKIKIICPSGAQILCLDRWLHPGLSVHLPADVDQQTGIR

SEQ ID NO: 887741 - protein, 385 aa, Homo sapiens
HPVWSSPAKHCQESCEAAPAMCEEEDSTALVCDNGSGLCKAGFAGDDAPRAVFPSIVGRPRHQGVMVGMGQKDSYVGDEAQSKRGILTLKYPIEHGIITNWDDMEKIWHHSFYNELRVAPEEHPTLLTEAPLNPKANREKMTQIMFETFNVPAMYVAIQAVLSLYASGRTTGIVLDSGDGVTHNVPIYEGYALPHAIMRLDLAGRDLTDYLMKILTERGYSFVTTAEREIVRDIKEKLCYVALDFENEMATAASSSSLEKSYELPDGQVITIGNERFRCPETLFQPSFIGMESAGIHETTYNSIMKCDIDIRKDLYANNVLSGGTTMYPGIADRMQKEITALAPSTMKIKIICPSGAQILCLDRWLHPGLSVHLPADVDQQTGIR

SEQ ID NO: 887742 - protein, 365 aa, Homo sapiens
MCEEEDSTALVCDNGSGLCKAGFAGDDAPRAVFPSIVGRPRHQGVMVGMGQKDSYVGDEAQSKRGILTLKYPIEHGIITNWDDMEKIWHHSFYNELRVAPEEHPTLLTEAPLNPKANREKMTQIMFETFNVPAMYVAIQAVLSLYASGRTTGIVLDSGDGVTHNVPIYEGYALPHAIMRLDLAGRDLTDYLMKILTERGYSFVTTAEREIVRDIKEKLCYVALDFENEMATAASSSSLEKSYELPDGQVITIGNERFRCPETLFQPSFIGMESAGIHETTYNSIMKCDIDIRKDLYANNVLSGGTTMYPGIADRMQKEITALAPSTMKIKIICPSGAQILCLDRWLHPGLSVHLPADVDQQTGIR

SEQ ID NO: 887743 - protein, 516 aa, Homo sapiens
MSNICSEGCRLSPRPRGAARTHPPAPERTFGLACQGLSRSSAPLSNRGPPPATLKLPRLPLQFLSAPHAHLNVERSGLRGAPELPRLPSGVSTSHQGPRPPGASLQRLPQQPAAPRCPRAPLPPQSRTRPAPAPLCLSPGLRRESCEAAPAMCEEEDSTALVCDNGSGLCKAGFAGDDAPRAVFPSIVGRPRHQGVMVGMGQKDSYVGDEAQSKRGILTLKYPIEHGIITNWDDMEKIWHHSFYNELRVAPEEHPTLLTEAPLNPKANREKMTQIMFETFNVPAMYVAIQAVLSLYASGRTTGIVLDSGDGVTHNVPIYEGYALPHAIMRLDLAGRDLTDYLMKILTERGYSFVTTAEREIVRDIKEKLCYVALDFENEMATAASSSSLEKSYELPDGQVITIGNERFRCPETLFQPSFIGMESAGIHETTYNSIMKCDIDIRKDLYANNVLSGGTTMYPGIADRMQKEITALAPSTMKIKIICPSGAQILCLDRWLHPGLSVHLPADVDQQTGIR

SEQ ID NO: 887744 - protein, 397 aa, Homo sapiens
MPGGKNCRCSSTIRRRTTATKHCQESCEAAPAMCEEEDSTALVCDNGSGLCKAGFAGDDAPRAVFPSIVGRPRHQGVMVGMGQKDSYVGDEAQSKRGILTLKYPIEHGIITNWDDMEKIWHHSFYNELRVAPEEHPTLLTEAPLNPKANREKMTQIMFETFNVPAMYVAIQAVLSLYASGRTTGIVLDSGDGVTHNVPIYEGYALPHAIMRLDLAGRDLTDYLMKILTERGYSFVTTAEREIVRDIKEKLCYVALDFENEMATAASSSSLEKSYELPDGQVITIGNERFRCPETLFQPSFIGMESAGIHETTYNSIMKCDIDIRKDLYANNVLSGGTTMYPGIADRMQKEITALAPSTMKIKIICPSGAQILCLDRWLHPGLSVHLPADVDQQTGIR

SEQ ID NO: 887745 - protein, 320 aa, Homo sapiens
MVGMGQKDSYVGDEAQSKRGILTLKYPIEHGIITNWDDMEKIWHHSFYNELRVAPEEHPTLLTEAPLNPKANREKMTQIMFETFNVPAMYVAIQAVLSLYASGRTTGIVLDSGDGVTHNVPIYEGYALPHAIMRLDLAGRDLTDYLMKILTERGYSFVTTAEREIVRDIKEKLCYVALDFENEMATAASSSSLEKSYELPDGQVITIGNERFRCPETLFQPSFIGMESAGIHETTYNSIMKCDIDIRKDLYANNVLSGGTTMYPGIADRMQKEITALAPSTMKIKIICPSGAQILCLDRWLHPGLSVHLPADVDQQTGIR

SEQ ID NO: 887746 - protein, 320 aa, Homo sapiens; identical to SEQ ID NO: 887745

SEQ ID NO: 887747 - protein, 346 aa, Homo sapiens
MAGVAVDLRSPCRLPIARGTCERSGSSRVNVTNDSYVGDEAQSKRGILTLKYPIEHGIITNWDDMEKIWHHSFYNELRVAPEEHPTLLTEAPLNPKANREKMTQIMFETFNVPAMYVAIQAVLSLYASGRTTGIVLDSGDGVTHNVPIYEGYALPHAIMRLDLAGRDLTDYLMKILTERGYSFVTTAEREIVRDIKEKLCYVALDFENEMATAASSSSLEKSYELPDGQVITIGNERFRCPETLFQPSFIGMESAGIHETTYNSIMKCDIDIRKDLYANNVLSGGTTMYPGIADRMQKEITALAPSTMKIKIICPSGAQILCLDRWLHPGLSVHLPADVDQQTGIR

SEQ ID NO: 887748 - protein, 245 aa, Homo sapiens
MTQIMFETFNVPAMYVAIQAVLSLYASGRTTGIVLDSGDGVTHNVPIYEGYALPHAIMRLDLAGRDLTDYLMKILTERGYSFVTTAEREIVRDIKEKLCYVALDFENEMATAASSSSLEKSYELPDGQVITIGNERFRCPETLFQPSFIGMESAGIHETTYNSIMKCDIDIRKDLYANNVLSGGTTMYPGIADRMQKEITALAPSTMKIKIICPSGAQILCLDRWLHPGLSVHLPADVDQQTGIR

SEQ ID NO: 887749 - protein, 369 aa, Homo sapiens
HPVWSSPAKHCQESCEAAPAMCEEEDSTALVCDNGSGLCKAGFAGDDAPRAVFPSIVGRPRHQGVMVGMGQKDSYVGDEAQSKRGILTLKYPIEHGIITNWDDMEKIWHHSFYNELRVAPEEHPTLLTEAPLNPKANREKMTQAVLSLYASGRTTGIVLDSGDGVTHNVPIYEGYALPHAIMRLDLAGRDLTDYLMKILTERGYSFVTTAEREIVRDIKEKLCYVALDFENEMATAASSSSLEKSYELPDGQVITIGNERFRCPETLFQPSFIGMESAGIHETTYNSIMKCDIDIRKDLYANNVLSGGTTMYPGIADRMQKEITALAPSTMKIKIICPSGAQILCLDRWLHPGLSVHLPADVDQQTGIR

SEQ ID NO: 887750 - protein, 188 aa, Homo sapiens
MRLDLAGRDLTDYLMKILTERGYSFVTTAEREIVRDIKEKLCYVALDFENEMATAASSSSLEKSYELPDGQVITIGNERFRCPETLFQPSFIGMESAGIHETTYNSIMKCDIDIRKDLYANNVLSGGTTMYPGIADRMQKEITALAPSTMKIKIICPSGAQILCLDRWLHPGLSVHLPADVDQQTGIR

SEQ ID NO: 887751 - protein, 231 aa, Homo sapiens
FTGFLGILSLYASGRTTGIVLDSGDGVTHNVPIYEGYALPHAIMRLDLAGRDLTDYLMKILTERGYSFVTTAEREIVRDIKEKLCYVALDFENEMATAASSSSLEKSYELPDGQVITIGNERFRCPETLFQPSFIGMESAGIHETTYNSIMKCDIDIRKDLYANNVLSGGTTMYPGIADRMQKEITALAPSTMKIKIICPSGAQILCLDRWLHPGLSVHLPADVDQQTGIR

SEQ ID NO: 887752 - protein, 223 aa, Homo sapiens
LSDASGRTTGIVLDSGDGVTHNVPIYEGYALPHAIMRLDLAGRDLTDYLMKILTERGYSFVTTAEREIVRDIKEKLCYVALDFENEMATAASSSSLEKSYELPDGQVITIGNERFRCPETLFQPSFIGMESAGIHETTYNSIMKCDIDIRKDLYANNVLSGGTTMYPGIADRMQKEITALAPSTMKIKIICPSGAQILCLDRWLHPGLSVHLPADVDQQTGIR

SEQ ID NO: 887753 - protein, 188 aa, Homo sapiens; identical to SEQ ID NO: 887750

SEQ ID NO: 887754 - protein, 179 aa, Homo sapiens
GRYPDLLPSGLSVVFLRYYAEREIVRDIKEKLCYVALDFENEMATAASSSSLEKSYELPDGQVITIGNERFRCPETLFQPSFIGMESAGIHETTYNSIMKCDIDIRKDLYANNVLSGGTTMYPGIADRMQKEITALAPSTMKIKIICPSGAQILCLDRWLHPGLSVHLPADVDQQTGIR

SEQ ID NO: 887755 - protein, 415 aa, Homo sapiens
HPVWSSPAKHCQESCEAAPAMCEEEDSTALVCDNGSGLCKAGFAGDDAPRAVFPSIVGRPRHQGVMVGMGQKDSYVGDEAQSKRGILTLKYPIEHGIITNWDDMEKIWHHSFYNELRVAPEEHPTLLTEAPLNPKANREKMTQIMFETFNVPAMYVAIQAVLSLYASGRTTGIVLDSGDGVTHNVPIYEGYALPHAIMRLDLAGRDLTDYLMKILTERGYSFVTTAEREIVRDIKEKLCYVALDFENEMATAASSSSLEKSYELPDGQVITIGNERFRCPETLFQPSFIEMESAGIHETTYNSIMKDGCPETLFQPSFIGMESAGIHETTYNSIMKCDIDIRKDLYANNVLSGGTTMYPGIADRMQKEITALAPSTMKIKIICPSGAQILCLDRWLHPGLSVHLPADVDQQTGIR

SEQ ID NO: 887756 - protein, 179 aa, Homo sapiens
  misc_feature (5)..(5): Xaa can be any naturally occurring amino acid
  misc_feature (13)..(13): Xaa can be any naturally occurring amino acid
  misc_feature (17)..(17): Xaa can be any naturally occurring amino acid
  misc_feature (19)..(20): Xaa can be any naturally occurring amino acid
  misc_feature (32)..(32): Xaa can be any naturally occurring amino acid
MELWXNSLLLTYXLEAXKXXSRAQINREKNLXCYVALDFENEMATAASSSSLEKSYELPDGQVITIGNERFRCPETLFQPSFIGMESAGIHETTYNSIMKCDIDIRKDLYANNVLSGGTTMYPGIADRMQKEITALAPSTMKIKIICPSGAQILCLDRWLHPGLSVHLPADVDQQTGIR

SEQ ID NO: 887757 - protein, 385 aa, Homo sapiens
HPVWSSPAKHCQESCEAAPAMCEEEDSTALVCDNGSGLCKAGFAGDDAPRAVFPSIVGRPRHQGVMVGMGQKDSYVGDEAQSKRGILTLKYPIEHGIITNWDDMEKIWHHSFYNELRVAPEEHPTLLTEAPLNPKANREKMTQIMFETFNVPAMYVAIQAVLSLYASGRTTGIVLDSGDGVTHNVPIYEGYALPHAIMRLDLAGRDLTDYLMKILTERGYSFVTTAEREIVRDIKEKLCYVALDFENEMATAASSSSLEKSYELPDGQVITIGNERFRCPETLFQPSFIGMESAGIHETTYNSIMKCDIDIRKDLYANNVLSGGTTMYPGIADRMQKEITALAPSTMKIKIICPSGAQILCLDRWLHPTVKYPDKHARDIARDPL

SEQ ID NO: 887758 - protein, 372 aa, Homo sapiens
HPVWSSPAKHCQESCEAAPAMCEEEDSTALVCDNGSGLCKAGFAGDDAPRAVFPSIVGRPRHQGVMVGMGQKDSYVGDEAQSKRGILTLKYPIEHGIITNWDDMEKIWHHSFYNELRVAPEEHPTLLTEAPLNPKANREKMTQIMFETFNVPAMYVAIQAVLSLYASGRTTGIVLDSGDGVTHNVPIYEGYALPHAIMRLDLAGRDLTDYLMKILTERGYSFVTTAEREIVRDIKEKLCYVALDFENEMATAASSSSLEKSYELPDGQVITIGNERFRCPETLFQPSFIGMESAGIHETTYNSIMKCDIDIRKDLYANNVLSGGTTMYPGIADRMQKEITALAPSTMKIKPGHNDNKEAAKNLAACLRLRCH

SEQ ID NO: 887759 - protein, 319 aa, Homo sapiens
HPVWSSPAKHCQESCEAAPAMCEEEDSTALVCDNGSGLCKAGFAGDDAPRAVFPSIVGRPRHQGVMVGMGQKDSYVGDEAQSKRGILTLKYPIEHGIITNWDDMEKIWHHSFYNELRVAPEEHPTLLTEAPLNPKANREKMTQIMFETFNVPAMYVAIQAVLSLYASGRTTGIVLDSGDGVTHNVPIYEGYALPHAIMRLDLAGRDLTDYLMKILTERGYSFVTTAEREIVRDIKEKLCYVALDFENEMATAASSSSLEKSYELPDGQVITIGNERFRCPETLFQPSFIGPLCPPSSRCGSANRNTMKPGLPLSNRKCF

SEQ ID NO: 887760 - protein, 136 aa, Homo sapiens
MIWKRTEGIIPQDIHSCVLETEEEQESLLEAFAVDNGRPGWMESAGIHETTYNSIMKCDIDIRKDLYANNVLSGGTTMYPGIADRMQKEITALAPSTMKIKIICPSGAQILCLDRWLHPGLSVHLPADVDQQTGIR

SEQ ID NO: 887761 - protein, 181 aa, Homo sapiens
HPVWSSPAKHCQESCEAAPAMCEEEDSTALVCDNGSGLCKAGFAGDDAPRAVFPSIVGRPRHQGVMVGMGQKDSYVGDEAQSKRGILTLKYPIEHGIITNWDDMEKIRKDLYANNVLSGGTTMYPGIADRMQKEITALAPSTMKIKIICPSGAQILCLDRWLHPGLSVHLPADVDQQTGIR

SEQ ID NO: 887762 - protein, 115 aa, Homo sapiens
LQDAVLGGFLDPSRLHPYEDGWIQGIWAAETFISDGDHLPIRKDLYANNVLSGGTTMYPGIADRMQKEITALAPSTMKIKIICPSGAQILCLDRWLHPGLSVHLPADVDQQTGIR

SEQ ID NO: 887763 - protein, 228 aa, Homo sapiens
MCEEEDSTALVCDNGSGLCKAGFAGDDAPRAVFPSIVGRPRHQGVMVGMGQKDSYVGDEAQSKRGILTLKYPIEHGIITNWDDMEKIWHHSFYNELRVAPEEHPTLLTEAPLNPKANREKMTQIMFETFNVPAMYVAIQAVLSLYASGRTTGIVLDSGDGVTHNVPIYEGYALPHAIMRLDVWIGGSILASLSTFQQMWISKQEYDEAGPSIVQPQMLLKHFPAPLCL

SEQ ID NO: 887764 - protein, 228 aa, Homo sapiens; identical to SEQ ID NO: 887763

SEQ ID NO: 887765 - protein, 106 aa, Homo sapiens
MSNICSEGCRLSPRPRGAARTHPPAPERTFGLACQGLSRSSAPLSNRGPPPATLKLPRLPLQFLSAPHAHLNVERSGLRGAPELPRLPSGVSTSHQGPRKASPPAF

SEQ ID NO: 887766 - protein, 156 aa, Homo sapiens
MESAGIHETTYNSIMKCDIDIRKDLYANNAYQGAPLCTLAGRDLTDYLMKILTERGYSFVTTAEREIVRDIKEKLCYVALDFENEMATAASSSSLEKSYELPDGQVITIGNERFRCPETLFQPSFIGPLCPPSSRCGSANRNTMKPGLPLSNRKCF

SEQ ID NO: 887767 - protein, 341 aa, Homo sapiens
MTDGILGKAATMEIPIHGNGEARQLPEDDGLEQDLQQVMVSGPNLNETSIVSGGYGGSGDGLIPTGSGRHPSHSTTPSGPGDEVARGIAGEKFDIVKKWGINTYKCTKQLLSERFGRGSRTVDLELELQIELLRETKRKYESVLQLGRALTAHLYSLLQTQHALGDAFADLSQKSPELQEEFGYNAETQKLLCKNGETLLGAVNFFVSSINTLVTKTMEDTLMTVKQYEAARLEYDAYRTDLEELSLGPRDAGTRGRLESAQATFQAHRDKYEKLRGDVAIKLKFLEENKIKVMHKQLLLFHNAVSAYFAGNQKQLEQTLQQFNIKLRPPGAEKPSWLEEQ

SEQ ID NO: 887768 - protein, 407 aa, Homo sapiens
VPFVKFVHVAGWSGPGFPGFPDLLLGSRRELEPEVPARPGPGALRGRAARPEGAGVESFTPIPFLAMTDGILGKAATMEIPIHGNGEARQLPEDDGLEQDLQQVMVSGPNLNETSIVSGGYGGSGDGLIPTGSGRHPSHSTTPSGPGDEVARGIAGEKFDIVKKWGINTYKCTKQLLSERFGRGSRTVDLELELQIELLRETKRKYESVLQLGRALTAHLYSLLQTQHALGDAFADLSQKSPELQEEFGYNAETQKLLCKNGETLLGAVNFFVSSINTLVTKTMEDTLMTVKQYEAARLEYDAYRTDLEELSLGPRDAGTRGRLESAQATFQAHRDKYEKLRGDVAIKLKFLEENKIKVMHKQLLLFHNAVSAYFAGNQKQLEQTLQQFNIKLRPPGAEKPSWLEEQ

SEQ ID NO: 887769 - protein, 362 aa, Homo sapiens
VPFVKFVHVAGWSGPGFPGFPDLLLGSRRELEPEVPARPGPGALRGRAARPEGAGVESFTPIPFLAMTDGILGKAATMEIPIHGNGEARQLPEDDGLEQDLQQVMVSGPNLNETSIVSGGYGGSGDGLIPTGSGRHPSHSTTPSGPGDEVARGIAGEKFDIVKKWGINTYKCTKQLLSERFGRGSRTVDLELELQIELLRETKRKYESVLQLGRALTAHLYSLLQTQHALGDAFADLSQKSPELQEEFGYNAETQKLLCKNGETLLGAVNFFVSSINTLVTKTMEDTLMTVKQYEAARLEYDAYRTDLEELSLGPRDAGTRGRLESAQATFQAHRDKYEKLRGDVAIKLKFLEENKVPTPPP

SEQ ID NO: 887770 - protein, 341 aa, Homo sapiens; identical to SEQ ID NO: 887767

SEQ ID NO: 887771 - protein, 360 aa, Homo sapiens
VPFVKFVHVAGWSGPGFPGFPDLLLGSRRELEPEVPARPGPGALRGRAARPEDLQQVMVSGPNLNETSIVSGGYGGSGDGLIPTGSGRHPSHSTTPSGPGDEVARGIAGEKFDIVKKWGINTYKCTKQLLSERFGRGSRTVDLELELQIELLRETKRKYESVLQLGRALTAHLYSLLQTQHALGDAFADLSQKSPELQEEFGYNAETQKLLCKNGETLLGAVNFFVSSINTLVTKTMEDTLMTVKQYEAARLEYDAYRTDLEELSLGPRDAGTRGRLESAQATFQAHRDKYEKLRGDVAIKLKFLEENKIKVMHKQLLLFHNAVSAYFAGNQKQLEQTLQQFNIKLRPPGAEKPSWLEEQ

SEQ ID NO: 887772 - protein, 432 aa, Homo sapiens
VPFVKFVHVAGWSGPGFPGFPDLLLGSRRELEPEVPARPGPGALRGRAARPEGAGVESFTPIPFLAMTDGILGKAATMEIPIHGNGEARQLPEDDGLEQDLQQVMVSGPNLNETSIVSGGYGGSGDGLIPTGSGRHPSHSTTPSGPGDEVARGIAGEKFDIVKKWGINTYKCTKQLLSERFGRGSRTVDLELELQIELLRETKRKYESVLQLGRALTAHLYSLLQTQHALGDAFADLSQKSPELQPTEENPFRVGPALPPAALTCGGSLREEFGYNAETQKLLCKNGETLLGAVNFFVSSINTLVTKTMEDTLMTVKQYEAARLEYDAYRTDLEELSLGPRDAGTRGRLESAQATFQAHRDKYEKLRGDVAIKLKFLEENKIKVMHKQLLLFHNAVSAYFAGNQKQLEQTLQQFNIKLRPPGAEKPSWLEEQ

SEQ ID NO: 887773 - protein, 472 aa, Homo sapiens
VPFVKFVHVAGWSGPGFPGFPDLLLGSRRELEPEVPARPGPGALRGRAARPEGAGVESFTPIPFLAMTDGILGKAATMEIPIHGNGEARQLPEDDGLEQDLQQVMVSGPNLNETSIVSGGYGGSGDGLIPTGGHMYIRIWFSPRKVRVPPSKQEHPVVSSISFREVNFMCSKRSMGGATEVSGVSREAGVRELDPLGSGRHPSHSTTPSGPGDEVARGIAGEKFDIVKKWGINTYKCTKQLLSERFGRGSRTVDLELELQIELLRETKRKYESVLQLGRALTAHLYSLLQTQHALGDAFADLSQKSPELQEEFGYNAETQKLLCKNGETLLGAVNFFVSSINTLVTKTMEDTLMTVKQYEAARLEYDAYRTDLEELSLGPRDAGTRGRLESAQATFQAHRDKYEKLRGDVAIKLKFLEENKIKVMHKQLLLFHNAVSAYFAGNQKQLEQTLQQFNIKLRPPGAEKPSWLEEQ

SEQ ID NO: 887774 - protein, 645 aa, Homo sapiens
VPFVKFVHVAGWSGPGFPGFPDLLLGSRRELEPEVPARPGPGALRGRAARPEGAGVESFTPIPFLAMTDGILGKAATMEIPIHGNGEARQLPEDDGLEQDLQQVMVSGPNLNETSIVSGGYGGSGDGLIPTGMNVQKQESWVEEGTGMVWGSIGYVKESLNYVWRSWELLLVGTSWTLLSPKATPSVVHPFPFCHLAPEMAHLSFPCHHLSQVKTCFTGMPPLYSLRLSWNFVKLLRIFRFYKFRGTNSPESHTKIPHGNATRFLVIMTHHPGLLLPPNSVYFLLFPLPLYTNNSLQTPPLTPKEAICISGFGSHRAKSEFLLVSRSIQLSLASPSGKSISCARREVWVGPQRCLVYLREAGVRELDPLGSGRHPSHSTTPSGPGDEVARGIAGEKFDIVKKWGINTYKCTKQLLSERFGRGSRTVDLELELQIELLRETKRKYESVLQLGRALTAHLYSLLQTQHALGDAFADLSQKSPELQEEFGYNAETQKLLCKNGETLLGAVNFFVSSINTLVTKTMEDTLMTVKQYEAARLEYDAYRTDLEELSLGPRDAGTRGRLESAQATFQAHRDKYEKLRGDVAIKLKFLEENKIKVMHKQLLLFHNAVSAYFAGNQKQLEQTLQQFNIKLRPPGAEKPSWLEEQ

SEQ ID NO: 887775 - protein, 361 aa, Homo sapiens
MFPLPLYTNNSLQTPPLTPKEAICISGFGSHRAKSEFLLVSRSIQLSLASPSGKSISCARREVWVGPQRCLVYLREAGVRELDPLGSGRHPSHSTTPSGPGDEVARGIAGEKFDIVKKWGINTYKCTKQLLSERFGRGSRTVDLELELQIELLRETKRKYESVLQLGRALTAHLYSLLQTQHALGDAFADLSQKSPELQEEFGYNAETQKLLCKNGETLLGAVNFFVSSINTLVTKTMEDTLMTVKQYEAARLEYDAYRTDLEELSLGPRDAGTRGRLESAQATFQAHRDKYEKLRGDVAIKLKFLEENKIKVMHKQLLLFHNAVSAYFAGNQKQLEQTLQQFNIKLRPPGAEKPSWLEEQ

SEQ ID NO: 887776 - protein, 124 aa, Homo sapiens
MEDTLMTVKQYEAARLEYDAYRTDLEELSLGPRDAGTRGRLESAQATFQAHRDKYEKLRGDVAIKLKFLEENKIKVMHKQLLLFHNAVSAYFAGNQKQLEQTLQQFNIKLRPPGAEKPSWLEEQ

SEQ ID NO: 887777 - protein, 325 aa, Homo sapiens
MTDGILGKAATMEIPIHGNGEARQLPEDDGLEQDLQQVMVSGPNLNETSIVSGGYGGSGDGLIPTDEVARGIAGEKFDIVKKWGINTYKCTKQLLSERFGRGSRTVDLELELQIELLRETKRKYESVLQLGRALTAHLYSLLQTQHALGDAFADLSQKSPELQEEFGYNAETQKLLCKNGETLLGAVNFFVSSINTLVTKTMEDTLMTVKQYEAARLEYDAYRTDLEELSLGPRDAGTRGRLESAQATFQAHRDKYEKLRGDVAIKLKFLEENKIKVMHKQLLLFHNAVSAYFAGNQKQLEQTLQQFNIKLRPPGAEKPSWLEEQ

SEQ ID NO: 887778 - protein, 336 aa, Homo sapiens
VPFVKFVHVAGWSGPGFPGFPDLLLGSRRELEPEVPARPGPGALRGRAARPEGAGVESFTPIPFLAMTDGILGKAATMEIPIHGNGEARQLPEDDGLEQDLQQVMVSGPNLNETSIVSGGYGGSGDGLIPTGSGRHPSHSTTPSGPGDEVARGIAGEKFDIVKKWGINTYKCTKQLLSERFGRGSRTVDLELELQIELLRETKRKYESVLQLGRALTAHLYSLLQTQHALGDAFADLSQKSPELQEEFGYNAETQKLLCKNGETLLGAVNFFVSSINTLVTKTMHTAFTTLRPYERPPAIAMHARTTLKKMTPWFPLRTVHPRSKPSGERYRARST

SEQ ID NO: 887779 - protein, 156 aa, Homo sapiens
VPFVKFVHVAGWSGPGFPGFPDLLLGSRRELEPEVPARPGPGALRGRAARPEGAGVESFTPIPFLAMTDGILGKAATMEIPIHGNGEARQLPEDDGLEQDLQQVMVSGPNLNETSIVSGGYGGSGDGLIPTGMNVQKQESWVEEGTGMVWGSIGYV

SEQ ID NO: 887780 - protein, 270 aa, Homo sapiens
VPFVKFVHVAGWSGPGFPGFPDLLLGSRRELEPEVPARPGPGALRGRAARPEGAGVESFTPIPFLAMTDGILGKAATMEIPIHGNGEARQLPEDDGLEQDLQQVMVSGPNLNETSIVSGGYGGSGDGLIPTGGHMYIRIWFSPRKVRVPPSKQEHPVVSSISFREVNFMCSKRSMGGATEVSGVSREAGVRELDPLGSGRHPSHSTTPSGPGDEVARGIAGEKFDIVKKWGINTYKVGFKHLSLPQNSLWVPFSLFLVIVISHLWLRVGA

SEQ ID NO: 887781 - protein, 822 aa, Homo sapiens
PLAARRPRRGKSLAGFESLTCSFPVVSRGFLASRSARSLSSEGGTMPDNRQPRNRQPRIRSGNEPRSAPAMEPDGRGAWAHSRAALDRLEKLLRCSRCTNILREPVCLGGCEHIFCSNCVSDCIGTGCPVCYTPAWIQDLKINRQLDSMIQLCSKLRNLLHDNELSDLKEDKPRKSLFNDAGNKKNSIKMWFSPRSKKVRYVVSKASVQTQPAIKKDASAQQDSYEFVSPSPPADVSERAKKASARSGKKQKKKTLAEINQKWNLEAEKEDGEFDSKEESKQKLVSFCSQPSVISSPQINGEIDLLASGSLTESECFGSLTEVSLPLAEQIESPDTKSRNEVVTPEKVCKNYLTSKKSLPLENNGKRGHHNRLSSPISKRCRTSILSTSGDFVKQTVPSENIPLPECSSPPSCKRKVGGTSGRKNSNMSDEFISLSPGTPPSTLSSSSYRQVMSSPSAMKLLPNMAVKRNHRGETLLHIASIKGDIPSVEYLLQNGSDPNVKDHAGWTPLHEACNHGHLKVVELLLQHKALVNTTGYQNDSPLHDAAKNGHVDIVKLLLSYGASRNAVNIFGLRPVDYTDDESMKSLLLLPEKNESSSASHCSVMNTGQRRDGPLVLIGSGLSSEQQKMLSELAVILKAKKYTEFDSTVTHVVVPGDAVQSTLKCMLGILNGCWILKFEWVKACLRRKVCEQEEKYEIPEGPRRSRLNREQLLPKLFDGCYFYLWGTFKHHPKDNLIKLVTAGGGQILSRKPKPDSDVTQTINTVAYHARPDSDQRFCTQYIIYEDLCNYHPERVRQGKVWKAPSSWFIDCVMSFELLPLDS

SEQ ID NO: 887782 - protein, 680 aa, Homo sapiens [sequence omitted]

SEQ ID NO: 887783 - protein, 117 aa, Homo sapiens
MSSKIQKLPKLFDGCYFYLWGTFKHHPKDNLIKLVTAGGGQILSRKPKPDSDVTQTINTVAYHARPDSDQRFCTQYIIYEDLCNYHPERVRQGKVWKAPSSWFIDCVMSFELLPLDS

SEQ ID NO: 887784 - protein, 837 aa, Homo sapiens
PLAARRPRRGKSLAGFESLTCSFPVVSRGFLASRSARSLSSEGGTMPDNRQPRNRQPRIRSGNEPRSAPAMEPDGRGAWAHSRAALDRLEKLLRCSRCTNILREPVCLGGCEHIFCSNCVSDCIGTGCPVCYTPAWIQDLKINRQLDSMIQLCSKLRNLLHDNELSDLKEDKPRKSLFNDAGNKKNSIKMWFSPRSKKVRYVVSKASVQTQPAIKKDASAQQDSYEFVSPSPPADVSERAKKASARSGKKQKKKTLAEINQKWNLEAEKEDGEFDSKEESKQKLVSFCSQPSVISSPQINGEIDLLASGSLTESECFGSLTEVSLPLAEQIESPDTKSRNEVVTPEKVCKNYLTSKKSLPLENNGKRGHHNRLSSPISKRCRTSILSTSGDFVKQTVPSENIPLPECSSPPSCKRKVGGTSGRKNSNMSDEFISLSPGTPPSTLSSSSYRQVMSSPSAMKLLPNMAVKRNHRGETLLHIASIKGDIPSVEYLLQNGSDPNVKDHAGWTPLHEACNHGHLKVVELLLQHKALVNTTGYQNDSPLHDAAKNGHVDIVKLLLSYGASRNAVNIFGLRPVDYTDDESMKSLLLLPEKNESSSASHCSVMNTGQRRDGPLVLIGSGLSSEQQKMLSELAVILKAKKYTEFDSTVTHVVVPGDAVQSTLKCMLGILNGCWILKFEWVKACLRRKVCEQEEKYEIPEGPRRSRLNREQLHLILKDDQMSSKIQKLPKLFDGCYFYLWGTFKHHPKDNLIKLVTAGGGQILSRKPKPDSDVTQTINTVAYHARPDSDQRFCTQYIIYEDLCNYHPERVRQGKVWKAPSSWFIDCVMSFELLPLDS

SEQ ID NO: 887785 - protein, 187 aa, Homo sapiens
AAGAQSPGRGRRDGRGRGPGWHPAGGQAGAMELLSALSLGELALSFSRVPLFPVFDLSYFIVSILYLKYEPGAVELSRRHPIASWLCAMLHCFGSYILADLLLGEPLIDYFSNNSSILLASAVWYLIFFCPLDLFYKCVCFLPVKLIFVAMKEVVRVRKIAVGIHHAHHHYHHGWFVMIATGWVKGK

SEQ ID NO: 887786 - protein, 329 aa, Homo sapiens
AAGAQSPGRGRRDGRGRGPGWHPAGGQAGAMELLSALSLGELALSFSRVPLFPVFDLSYFIVSILYLKYEPGAVELSRRHPIASWLCAMLHCFGSYILADLLLGEPLIDYFSNNSSILLASAVWYLIFFCPLDLFYKCVCFLPVKLIFVAMKEVVRVRKIAVGIHHAHHHYHHGWFVMIATGWVKGSGVALMSNFEQLLRGVWKPETNEILHMSFPTKASLYGAILFTLQQTRWLPVSKASLIFIFTLFMVSCKVFLTATHSHSSPFDALEGYICPVLFGSACGGDHHHDNHGGSHSGGGPGAQHSAMPAKSKEELSEGSRKKKAKKAD

SEQ ID NO: 887787 - protein, 159 aa, Homo sapiens
AAGAQSPGRGRRDGRGRGPGWHPAGGQAGAMELLSALSLGELALSFSRVPLFPVFDLSYFIVSILYLKYEPGAVELSRRHPIASWLCAMLHCFGSYILADLLLGEPLIDYFSNNSSILLASAVWYLIFFCPLDLFYKCVCFLPVKLIFVAMKEVEVAVS

SEQ ID NO: 887788 - protein, 232 aa, Homo sapiens
AAGAQSPGRGRRDGRGRGPGWHPAGGQAGAMELLSALSLGELALSFSRVPLFPVFDLSYFIVSILYLKYEPGAVELSRRHPIASWLCAMLHCFGSYILADLLLGEPLIDYFSNNSSILLASAVWYLIFFCPLDLFYKCVCFLPVKLIFVAMKEVVRVRKIAVGIHHAHHHYHHGWFVMIATGWVKGSGVALMSNFEQLLRGVWKPETNEILHMSFPTKASLYGAILFTLHLR

SEQ ID NO: 887789 - protein, 112 aa, Homo sapiens
MLLSGVPKTVMMMTKASIARAGFLTCSTTDMWGWIILCGGGCLVHYRMLNSTPGLHPRDASSTLVPSCDKKLSPDIAKRLLEGKMAAGENPFFSRALAIGVLNFCGPWPFCQ

SEQ ID NO: 887790 - protein, 79 aa, Homo sapiens
KVSSYHAPQWLDIFTWPESPDSCWASLDKLPGPSELGGFLRSDLSFPGLDFPICKSGSLAHPPGLTWGLRYGDEDEELL

SEQ ID NO: 887791 - protein, 78 aa, Homo sapiens
TVCPSPGTHCSLPKRYLIFFCPLDLFYKCVCFLPVKLIFVAMKEVVRVRKIAVGIHHAHHHYHHGWFVMIATGWVKGK

SEQ ID NO: 887792 - protein, 82 aa, Homo sapiens
STPDCVFFPNARSRVRREVVALRRGLACIPSVGVWRFPSVGVWRFPTVGVWRFPTVGVWHAPPSLALVAPCRCTRQEDKKMI

SEQ ID NO: 887793 - protein, 121 aa, Homo sapiens
MQHREVRVKCVKALKGLYGNRDLTARLELFTGRFKDWMVSMIVDREYSVAVEAVRLLILILNRDVNFTMVAMTGPQLLTSGDLPASTSQSAEITGLSHRAQPWHLFYQKRSTHPLKHDTGH

SEQ ID NO: 887794 - protein, 33 aa, Homo sapiens
MSLFTHSFCFSVGRYRSRLPYSSFRAFTHFTQT

SEQ ID NO: 887795 - protein, 134 aa, Homo sapiens; identical to SEQ ID NO: 847237

SEQ ID NO: 887796 - protein, 82 aa, Homo sapiens; identical to SEQ ID NO: 887792

SEQ ID NO: 887797 - protein, 134 aa, Homo sapiens; identical to SEQ ID NO: 847237

SEQ ID NO: 887798 - protein, 72 aa, Homo sapiens
RTRDPFQVKDRKKQKPHGHGSHSPPNSRLGVKGKGGCRVKEDTNEYTLSAFLWANMEGVLMDVDCESVYPIV

SEQ ID NO: 887799 - protein, 134 aa, Homo sapiens; identical to SEQ ID NO: 847237

SEQ ID NO: 887800 - protein, 134 aa, Homo sapiens; identical to SEQ ID NO: 847237

SEQ ID NO: 887801 - protein, 134 aa, Homo sapiens; identical to SEQ ID NO: 847237

SEQ ID NO: 887802 - protein, 82 aa, Homo sapiens; identical to SEQ ID NO: 887792

SEQ ID NO: 887803 - protein, 134 aa, Homo sapiens; identical to SEQ ID NO: 847237

SEQ ID NO: 887804 - protein, 134 aa, Homo sapiens; identical to SEQ ID NO: 847237

SEQ ID NO: 887805 - protein, 82 aa, Homo sapiens; identical to SEQ ID NO: 887792

SEQ ID NO: 887806 - protein, 134 aa, Homo sapiens; identical to SEQ ID NO: 847237

SEQ ID NO: 887807 - protein, 134 aa, Homo sapiens; identical to SEQ ID NO: 847237

SEQ ID NO: 887808 - protein, 171 aa, Homo sapiens
MIFSMLRKLPKVTCRDVLPEIRAICIEEIGCWMQSYSTSFLTDSYLKYIGWTLHDKHREVRVKCVKALKGLYGNRDLTARLELFTGRFKDWMVSMIVDREYSVAVEAVRLLILILKLFYPECEIRTMGGREQRQSPGAQRTFFQLLLSFFVESKLECNGAILAHCNLHLPD

SEQ ID NO: 887809 - protein, 374 aa, Homo sapiens
MAANVSGAKSCPANFLAAADDKLSGFQGDFLWPILVVEFLVAVASNGLALYRFSIRKQRPWHPAVVFSVQLAVSDLLCALTLPPLAAYLYPPKHWRYGEAACRLERFLFTCNLLGSVIFITCISLNRYLGIVHPFFARSHLRPKHAWAVSAAGWVLAALLAMPTLSFSHLKRPQQGAGNCSVARPEACIKCLGTADHGLAAYRAYSLVLAGLGCGLPLLLTLAAYGALGRAVLRSPGMTVAEKLRVAALVASGVALYASSYVPYHIMRVLNVDARRRWSTRCPSFADIAQATAALELGPYVGYQVMRGLMPLAFCVHPLLYMAAVPSLGCCCRHCPGYRDSWNPEDAKSTGQALPLNATAAPKPSEPQSRELSQ

SEQ ID NO: 887810 - protein, 135 aa, Homo sapiens
MTSCQDGRPAEMNVPGYLSHQVEETPIDMHHTPHMKPFFFCTVTGVRDYYSLQLSLALSCLTNTSFNKCRFISKKTQNNTNKKQPQGSSISGGREKTGVLERAMWPTRSLTQFLGPGGNGRPQRGRIIEPGPKSP

SEQ ID NO: 887811 - protein, 100 aa, Homo sapiens
RGRRRREAHGRPQAQTPLPSCERTAGQTPKLARQASIELPSMTASSTKSWWETGEVQAQSAAKTPSCKDIVAGDMSKKSLWEQKGGSKTSSTIKMDSVTT

SEQ ID NO: 887812 - protein, 118 aa, Homo sapiens
RGRRRREAHGRPQAQTPLPSCERTAGQTPKLARQASIELPSMTASSTKSWWETGEVQAQSAAKTPSCKDIVAGDMSKKSLWEQKGGSKTSSTIKVEPKCGWCRQEILTHFIVTRNQKT

SEQ ID NO: 887813 - protein, 83 aa, Homo sapiens
RGRRRREAHGRPQAQTPLPSCERTAGQTPKLARQASIELPSMTASSTKSWWETGEVQAQSAAKTPSCKGSRRNVRRPGRIVSQ

SEQ ID NO: 887814 - protein, 126 aa, Homo sapiens
RGRRRREAHGRPQAQTPLPSCERTAGQTPKLARQASIELPSMTASSTKSWWETGEVQAQSAAKTPSCKLQTTQGEVILASWSQPDWGEPIDMYCINEHMTVVMKDLQLSVYSLCFPDSLAVALGTG

SEQ ID NO: 887815 - protein, 79 aa, Homo sapiens
RGRRRREAHGRPQAQTPLPSCERTAGQTPKLARQASIELPSMTASSTKSWWETGEVQAQSAAKTPSCKSQLNHFSRKTY

SEQ ID NO: 887816 - protein, 128 aa, Homo sapiens
YMTSADVLLHDNTAHYSPPNNAHQDLPPRLQGSSHHLYFCSTLHLPLAQLDMPTEVNDLFDQCRLAFLSQLQTTQGEVILASWSQPDWGEPIDMYCINEHMTVVMKDLQLSVYSLCFPDSLAVALGTG

SEQ ID NO: 887817 - protein, 118 aa, Homo sapiens
RGRRRREAHGRPQAQTPLPSCERTAGQTPKLARQASIELPSMTASSTKSWWETGEVQAQSAAKTPSCKVDSQKREVSKAAREEKMACGGEQLPSHHGGPTQVPGLMGADPDARGLSHP

SEQ ID NO: 887818 - protein, 111 aa, Homo sapiens
RGRRRREAHGRPQAQTPLPSCERTAGQTPKLARQASIELPSMTASSTKSWWETGEVQAQSAAKTPSCKDIVAGDMSKKSLWEQKGGSKTSSTIKTLWQLHWVLAEFWKTGM

SEQ ID NO: 887819 - protein, 113 aa, Homo sapiens
MSKKGDSVPNTMKSMHRRFSQSRKVHRHWPHTLTFVCRCSSPPDFHQSIHSFHKHFCWGGSRAIQGVYITDRVGLYNEYKKLLAEDDKVYQERALFEITPLHSSLGNRGRFHL

SEQ ID NO: 887820 - protein, 111 aa, Homo sapiens; identical to SEQ ID NO: 887818

SEQ ID NO: 887821 - protein, 85 aa, Homo sapiens
RGRRRREAHGRPQAQTPLPSCERTAGQTPKLARQASIELPSMTASSTKSWWETGEVQAQSAAKTPSCKTLWQLHWVLAEFWKTGM

SEQ ID NO: 887822 - protein, 74 aa, Homo sapiens
RGRRRREAHGRPQAQTPLPSCERTAGQTPKLARQASIELPSMTASSTKSWWETGEVQAQSAAKTPSCKMDSVTT

SEQ ID NO: 887823 - protein, 74 aa, Homo sapiens; identical to SEQ ID NO: 887822

SEQ ID NO: 887824 - protein, 113 aa, Homo sapiens; identical to SEQ ID NO: 887819

SEQ ID NO: 887825 - protein, 100 aa, Homo sapiens; identical to SEQ ID NO: 887811

SEQ ID NO: 887826 - protein, 102 aa, Homo sapiens
MGFSLHVGRRTVWEVGSGVCLPSLTVLFLPKSRLDKGLAALVRERGADLVVIEGMGRAVHTNYHAALRCESLKLAVIKNAWLAERLGGRLFSVIFKYEVPAE

SEQ ID NO: 887827 - protein, 626 aa, Homo sapiens
MTCLIKGCNFVLKNIPHEAFVYQKDSDPEFRFQTNHPHIFPYLLVNIGSGVSIVKVETEDRFEWVGGSSIGGGTFWGLGALLTKTKKFDELLHLASRGQHSNVDMLVRDVYGGAHQTLGLSGNLIASSFGKSATADQEFSKEDMAKSLLHMISNDIGQLACLHARLHSLDRVYFGGFFIRGHPVTMRTITYSINFFSKGEVQALFLRHEGYLGAIGAFLKGAEQDNPNQYSWGENYAGSSGLMSASPELGPAQRARSGTFDLLEMDRLERPLVDLPLLLDPPSYVPDTVDLTDDALARKYWLTCFEEALDGVVKRAVASQPDSVDAAERAEKFRQKYWNKLQTLRQQPFAYGTLTVRSLLDTREHCLNEFNFPDPYSKVKQRENGVALRCFPGVVRSLDALGWEERQLALVKGLLAGNVFDWGAKAVSAVLESDPYFGFEEAKRKLQERPWLVDSYSEWLQRLKGPPHKCALIFADNSGIDIILGVFPFVRELLLRGTEVILACNSGPALNDVTHSESLIVAERIAGMDPVVHSALQEERLLLVQTGSSSPCLDLSRLDKGLAALVRERGADLVVIEGMGRAVHTNYHAALRCESLKLAVIKNAWLAERLGGRLFSVIFKYEVPAE

SEQ ID NO: 887828 - protein, 362 aa, Homo sapiens
MDRLERPLVDLPLLLDPPSYVPDTVDLTDDALARKYWLTCFEEALDGVVKRAVASQPDSVDAAERAEKFRQKYWNKLQTLRQQPFAYGTLTVRSLLDTREHCLNEFNFPDPYSKVKQRENGVALRCFPGVVRSLDALGWEERQLALVKGLLAGNVFDWGAKAVSAVLESDPYFGFEEAKRKLQERPWLVDSYSEWLQRLKGPPHKCALIFADNSGIDIILGVFPFVRELLLRGTEVILACNSGPALNDVTHSESLIVAERIAGMDPVVHSALQEERLLLVQTGSSSPCLDLSRLDKGLAALVRERGADLVVIEGMGRAVHTNYHAALRCESLKLAVIKNAWLAERLGGRLFSVIFKYEVPAE

SEQ ID NO: 887829 - protein, 584 aa, Homo sapiens
MSWPGTFKMAECGASGSGSSGDSLDKSITLPPDEIFRNLENAKRFAIDIGGSLTKLAYYSTVQHKVAKVRSFDHSGKDTEREHEPPYEISVQEEITARLHFIKFENTYIEACLDFIKDHLVNTETKVIQATGGGAYKFKDLIEEKLRLKVDKEDVMTCLIKGCNFVLKNIPHEAFVYQKDSDPEFRFQTNHPHIFPYLLVNIGSGVSIVKVETEDRFEWVGGSSIGGGTFWGLGALLTKTKKFDELLHLASRGQHSNVDMLVRDVYGGAHQTLGLSGNLIASSFGKSATADQEFSKEDMAKSLLHMISNDIGQLACLHARLHSLDRVYFGGFFIRGHPVTMRTITYSINFFSKGEVQALFLRHEGYLGAIGAFLKGAEQDNPNQYSWGENYAGSSGLMSASPELGPAQRARSGTFDLLEMDRLERPLVDLPLLLDPPSYVPDTVDLTDDALARKYWLTCFEEALDGVVKRAVASQPDSVDAAERAEKFRQKYWNKLQTLRQQPFAYGTLTVRSLLDTREHCLNEFNFPDPYSKVKQRENGVALRCFPGVVRSLDALGWEERQLALVKGLLAGNVFDWGAKAVSA

SEQ ID NO: 887830 - protein, 781 aa, Homo sapiens
MSWPGTFKMAECGASGSGSSGDSLDKSITLPPDEIFRNLENAKRFAIDIGGSLTKLAYYSTVQHKVAKVRSFDHSGKDTEREHEPPYEISVQEEITARLHFIKFENTYIEACLDFIKDHLVNTETKVIQATGGGAYKFKDLIEEKLRLKVDKEDVMTCLIKGCNFVLKNIPHEAFVYQKDSDPEFRFQTNHPHIFPYLLVNIGSGVSIVKVETEDRFEWVGGSSIGGGTFWGLGALLTKTKKFDELLHLASRGQHSNVDMLVRDVYGGAHQTLGLSGNLIASSFGKSATADQEFSKEDMAKSLLHMISNDIGQLACLHARLHSLDRVYFGGFFIRGHPVTMRTITYSINFFSKGEVQALFLRHEGYLGAIGAFLKGAEQDNPNQYSWGENYAGSSGLMSASPELGPAQRARSGTFDLLEMDRLERPLVDLPLLLDPPSYVPDTVDLTDDALARKYWLTCFEEALDGVVKRAVASQPDSVDAAERAEKFRQKYWNKLQTLRQQPFAYGTLTVRSLLDTREHCLNEFNFPDPYSKVKQRENGVALRCFPGVVRSLDALGWEERQLALVKGLLAGNVFDWGAKAVSAVLESDPYFGFEEAKRKLQERPWLVDSYSEWLQRLKGPPHKCALIFADNSGIDIILGVFPFVRELLLRGTEVILACNSGPALNDVTHSESLIVAERIAGMDPVVHSALQEERLLLVQTGSSSPCLDLSRLDKGLAALVRERGADLVVIEGMGRAVHTNYHAALRCESLKLAVIKNAWLAERLGGRLFSVIFKYEVPAE

SEQ ID NO: 887831 - protein, 927 aa, Homo sapiens
PSWVAGGRGPALPAARWEGRRNFMSSATSASGRPGSAAWLVAGLRFGVLSSGRDEDELGGKPLAEWPRKGRAFPRRGQLWPAGRTVRAQAPLSGEWTPGVVQAAVDVGPGNSCLWFKSHPCLPWPLRRPALLPWPLQGPLQTLLPDGCALSNDGGPGSVLDLFPTLLTPGHLPATSRGGTQNYSLFADEDTKPQKGGSLTKLAYYSTVQHKVAKVRSFDHSGKDTEREHEPPYEISVQEEITARLHFIKFENTYIEACLDFIKDHLVNTETKVIQATGGGAYKFKDLIEEKLRLKVDKEDVMTCLIKGCNFVLKNIPHEAFVYQKDSDPEFRFQTNHPHIFPYLLVNIGSGVSIVKVETEDRFEWVGGSSIGGGTFWGLGALLTKTKKFDELLHLASRGQHSNVDMLVRDVYGGAHQTLGLSGNLIASSFGKSATADQEFSKEDMAKSLLHMISNDIGQLACLHARLHSLDRVYFGGFFIRGHPVTMRTITYSINFFSKGEVQALFLRHEGYLGAIGAFLKGAEQDNPNQYSWGENYAGSSGLMSASPELGPAQRARSGTFDLLEMDRLERPLVDLPLLLDPPSYVPDTVDLTDDALARKYWLTCFEEALDGVVKRAVASQPDSVDAAERAEKFRQKYWNKLQTLRQQPFAYGTLTVRSLLDTREHCLNEFNFPDPYSKVKQRENGVALRCFPGVVRSLDALGWEERQLALVKGLLAGNVFDWGAKAVSAVLESDPYFGFEEAKRKLQERPWLVDSYSEWLQRLKGPPHKCALIFADNSGIDIILGVFPFVRELLLRGTEVILACNSGPALNDVTHSESLIVAERIAGMDPVVHSALQEERLLLVQTGSSSPCLDLSRLDKGLAALVRERGADLVVIEGMGRAVHTNYHAALRCESLKLAVIKNAWLAERLGGRLFSVIFKYEVPAE

SEQ ID NO: 887832 - protein, 306 aa, Homo sapiens
LRLKVDKEDVMTCLNDVTHSESLIVAERIAGMDPVVRSLLDTREHCLNEFNFPDPYSKVKQRENGVALRCFPGVVRSLDALGWEERQLALVKGLLAGNVFDWGAKAVSAVLESDPYFGFEEAKRKLQERPWLVDSYSEWLQRLKGPPHKCALIFADNSGIDIILGVFPFVRELLLRGTEVILACNSGPALNDVTHSESLIVAERIAGMDPVVHSALQEERLLLVQTGSSSPCLDLSRLDKGLAALVRERGADLVVIEGMGRAVHTNYHAALRCESLKLAVIKNAWLAERLGGRLFSVIFKYEVPAE

SEQ ID NO: 887833 - protein, 87 aa, Homo sapiens
MATVQQLEGRWRLVDSKGFDEYMKELGVGIALRKMGAMAKPDCIITCDGKNLTIKTESTLKTTQFSCTLGRKYVVATYFRKYVVGYR

SEQ ID NO: 887834 - protein, 135 aa, Homo sapiens
MATVQQLEGRWRLVDSKGFDEYMKELGVGIALRKMGAMAKPDCIITCDGKNLTIKTESTLKTTQFSCTLGEKFEETTADGRKTQTVCNFTDGALVQHQEWDGKESTITRKLKDGKLVVECVMNNVTCTRIYEKVE

SEQ ID NO: 887835 - protein, 135 aa, Homo sapiens; identical to SEQ ID NO: 887834

SEQ ID NO: 887836 - protein, 135 aa, Homo sapiens; identical to SEQ ID NO: 887834

SEQ ID NO: 887837 - protein, 157 aa, Homo sapiens
ARIQIQIRRTHQNHDSTIPWNSSLTSTALAAVSHPQSRSSGILLSSDPGVGIALRKMGAMAKPDCIITCDGKNLTIKTESTLKTTQFSCTLGEKFEETTADGRKTQTVCNFTDGALVQHQEWDGKESTITRKLKDGKLVVECVMNNVTCTRIYEKVE

SEQ ID NO: 887838 - protein, 131 aa, Homo sapiens
MCCIHTHVQEGGREMAGNTAEAGVGIALRKMGAMAKPDCIITCDGKNLTIKTESTLKTTQFSCTLGEKFEETTADGRKTQTVCNFTDGALVQHQEWDGKESTITRKLKDGKLVVECVMNNVTCTRIYEKVE

SEQ ID NO: 887839 - protein, 159 aa, Homo sapiens [sequence omitted]

SEQ ID NO: 887840 - protein, 133 aa, Homo sapiens
MATVQQLEGRWRLVDSKGFDEYMKELGVGIALRKMGAMAKPDCIITCDGKNLTIKTESTLKTTQFSCTLGEKFEETTADGRKTQVIVTCYEITEASRMIGCINNILLFIGKNLMKKLFYELNFVKLAKVSTSS

SEQ ID NO: 887841 - protein, 103 aa, Homo sapiens
MATVQQLEGRWRLVDSKGFDEYMKELGVGIALRKMGAMAKPDCIITCDGKNLTIKTESTLKTTQFSCTLGGPGPGPSLQLPDVAGGTQINESRKVNILKKVIN

SEQ ID NO: 887842 - protein, 159 aa, Homo sapiens
MATVQQLEGRWRLVDSKGFDEYMKELGVGIALRKMGAMAKPDCIITCDGKNLTIKTESTLKTTQFSCTLGEKFEETTADGRKTQTVCNFTDGALVQHQEWDGKESTITRKLKDGKLVVECVMNNVTCTRKYVVDYILPGLCPGCFLCRGLLFLPPILSC

SEQ ID NO: 887843 - protein, 88 aa, Homo sapiens
MATVQQLEGRWRLVDSKGFDEYMKELGVGIALRKMGAMAKPEISFILGQEFDEVTADDRKVKSTITLDGGVLVHVQKWDGKSTTIKRK

SEQ ID NO: 887844 - protein, 135 aa, Homo sapiens; identical to SEQ ID NO: 887834

SEQ ID NO: 887845 - protein, 135 aa, Homo sapiens; identical to SEQ ID NO: 887834

SEQ ID NO: 887846 - protein, 135 aa, Homo sapiens; identical to SEQ ID NO: 887834

SEQ ID NO: 887847 - protein, 135 aa, Homo sapiens; identical to SEQ ID NO: 887834

SEQ ID NO: 887848 - protein, 135 aa, Homo sapiens; identical to SEQ ID NO: 887834

SEQ ID NO: 887849 - protein, 183 aa, Homo sapiens
MATVQQLEGRWRLVDSKGFDEYMKELGVGIALRKMGAMAKPDCIITCDGKNLTIKTESTLKTTQFSCTLGEKFEETTADGRKTQTVCNFTDGALVQHQEWDGKESTITRKLKDGKLVVECVMNNVTCTRKYVVDYILPPFGALSPFSQFSFKDYILPNFAHGIDDQQHKDDDENHEEGVAIGH

SEQ ID NO: 887850 - protein, 66 aa, Homo sapiens
TLSLLYPTPDGRKTQTVCNFTDGALVQHQEWDGKESTITRKLKDGKLVVECVMNNVTCTRIYEKVE

SEQ ID NO: 887851 - protein, 125 aa, Homo sapiens
MGAMAKPDCIITCDGKNLTIKTESTLKTTQFSCTLGEKFEETTADGRKTQTVCNFTDGALVQHQEWDGKESTITRKLKDGKLVVECVMNNVTCTRKYVVDYILPGLCPGCFLCRGLLFLPPILSC

SEQ ID NO: 887852 - protein, 449 aa, Homo sapiens
MRLLAKIICLMLWAICVAEDCNELPPRRNTEILTGSWSDQTYPEGTQAIYKCRPGYRSLGNVIMVCRKGEWVALNPLRKCQKRPCGHPGDTPFGTFTLTGGNVFEYGVKAVYTCNEGYQLLGEINYRECDTDGWTNDIPICEVVKCLPVTAPENGKIVSSAMEPDREYHFGQAVRFVCNSGYKIEGDEEMHCSDDGFWSKEKPKCVEISCKSPDVINGSPISQKIIYKENERFQYKCNMGYEYSERGDAVCTESGWRPLPSCEEKSCDNPYIPNGDYSPLRIKHRTGDEITYQCRNGFYPATRGNTAKCTSTGWIPAPRCTLKPCDYPDIKHGGLYHENMRRPYFPVAVGKYYSYYCDEHFETPSGSYWDHIHCTQDGWSPAVPCLRKCYFPYLENGYNQNYGRKFVQGKSIDVACHPGYALPKAQTTVTCMENGWSPTPRCIRVSFTL

SEQ ID NO: 887853 - protein, 197 aa, Homo sapiens
  misc_feature (7)..(7): Xaa can be any naturally occurring amino acid
  misc_feature (19)..(19): Xaa can be any naturally occurring amino acid
  misc_feature (22)..(22): Xaa can be any naturally occurring amino acid
  misc_feature (28)..(28): Xaa can be any naturally occurring amino acid
  misc_feature (32)..(32): Xaa can be any naturally occurring amino acid
HAKKTQXGSSRSARQGPRXSAXSSDISXALVXNSAEERVRYQCRSPYEMFGDEEVMCLNGNWTEPPQCKDSTGKCGPPPPIDNGDITSFPLSVYAPASSVEYQCQNLYQLEGNKRITCRNGQWSEPPKCLHPCVISREIMENYNIALRWTAKQKLYSRTGESVEFVCKRGYRLSSRSHTLRTTCWDGKLEYPTCAKR

SEQ ID NO: 887854 - protein, 1231 aa, Homo sapiens
MRLLAKIICLMLWAICVAEDCNELPPRRNTEILTGSWSDQTYPEGTQAIYKCRPGYRSLGNVIMVCRKGEWVALNPLRKCQKRPCGHPGDTPFGTFTLTGGNVFEYGVKAVYTCNEGYQLLGEINYRECDTDGWTNDIPICEVVKCLPVTAPENGKIVSSAMEPDREYHFGQAVRFVCNSGYKIEGDEEMHCSDDGFWSKEKPKCVEISCKSPDVINGSPISQKIIYKENERFQYKCNMGYEYSERGDAVCTESGWRPLPSCEEKSCDNPYIPNGDYSPLRIKHRTGDEITYQCRNGFYPATRGNTAKCTSTGWIPAPRCTLKPCDYPDIKHGGLYHENMRRPYFPVAVGKYYSYYCDEHFETPSGSYWDHIHCTQDGWSPAVPCLRKCYFPYLENGYNQNYGRKFVQGKSIDVACHPGYALPKAQTTVTCMENGWSPTPRCIRVKTCSKSSIDIENGFISESQYTYALKEKAKYQCKLGYVTADGETSGSITCGKDGWSAQPTCIKSCDIPVFMNARTKNDFTWFKLNDTLDYECHDGYESNTGSTTGSIVCGYNGWSDLPICYERECELPKIDVHLVPDRKKDQYKVGEVLKFSCKPGFTIVGPNSVQCYHFGLSPDLPICKEQVQSCGPPPELLNGNVKEKTKEEYGHSEVVEYYCNPRFLMKGPNKIQCVDGEWTTLPVCIVEESTCGDIPELEHGWAQLSSPPYYYGDSVEFNCSESFTMIGHRSITCIHGVWTQLPQCVAIDKLKKCKSSNLIILEEHLKNKKEFDHNSNIRYRCRGKEGWIHTVCINGRWDPEVNCSMAQIQLCPPPPQIPNSHNMTTTLNYRDGEKVSVLCQENYLIQEGEEITCKDGRWQSIPLCVEKIPCSQPPQIEHGTINSSRSSQESYAHGTKLSYTCEGGFRISEENETTCYMGKWSSPPQCEGLPCKSPPEISHGVVAHMSDSYQYGEEVTYKCFEGFGIDGPAIAKCLGEKWSHPPSCIKTDCLSLPSFENAIPMGEKKDVYKAGEQVTYTCATYYKMDGASNVTCINSRWTGRPTCRDTSCVNPPTVQNAYIVSRQMSKYPSGERVRYQCRSPYEMFGDEEVMCLNGNWTEPPQCKDSTGKCGPPPPIDNGDITSFPLSVYAPASSVEYQCQNLYQLEGNKRITCRNGQWSEPPKCLHPCVISREIMENYNIALRWTAKQKLYSRTGESVEFVCKRGYRLSSRSHTLRTTCWDGKLEYPTCAKR

SEQ ID NO: 887855 - protein, 1231 aa, Homo sapiens; identical to SEQ ID NO: 887854

SEQ ID NO: 887856 - protein, 1224 aa, Homo sapiens
MRLLAKIICLMLWAICVAEDCNELPPRRNTEILTGSWSDQTYPEGTQAIYKCRPGYRSLGNVIMVCRKGEWVALNPLRKCQKRPCGHPGDTPFGTFTLTGGNVFEYGVKAVYTCNEGYQLLGEINYRECDTDGWTNDIPICEVVKCLPVTAPENGKIVSSAMEPDREYHFGQAVRFVCNSGYKIEGDEEMHCSDDGFWSKEKPKCVEISCKSPDVINGSPISQKIIYKENERFQYKCNMGYEYSERGDAVCTESGWRPLPSCEEKSCDNPYIPNGDYSPLRIKHRTGDEITYQCRNGFYPATRGNTAKCTSTGWIPAPRCTYIKHGGLYHENMRRPYFPVAVGKYYSYYCDEHFETPSGSYWDHIHCTQDGWSPAVPCLRKCYFPYLENGYNQNYGRKFVQGKSIDVACHPGYALPKAQTTVTCMENGWSPTPRCIRVKTCSKSSIDIENGFISESQYTYALKEKAKYQCKLGYVTADGETSGSITCGKDGWSAQPTCIKSCDIPVFMNARTKNDFTWFKLNDTLDYECHDGYESNTGSTTGSIVCGYNGWSDLPICYERECELPKIDVHLVPDRKKDQYKVGEVLKFSCKPGFTIVGPNSVQCYHFGLSPDLPICKEQVQSCGPPPELLNGNVKEKTKEEYGHSEVVEYYCNPRFLMKGPNKIQCVDGEWTTLPVCIVEESTCGDIPELEHGWAQLSSPPYYYGDSVEFNCSESFTMIGHRSITCIHGVWTQLPQCVAIDKLKKCKSSNLIILEEHLKNKKEFDHNSNIRYRCRGKEGWIHTVCINGRWDPEVNCSMAQIQLCPPPPQIPNSHNMTTTLNYRDGEKVSVLCQENYLIQEGEEITCKDGRWQSIPLCVEKIPCSQPPQIEHGTINSSRSSQESYAHGTKLSYTCEGGFRISEENETTCYMGKWSSPPQCEGLPCKSPPEISHGVVAHMSDSYQYGEEVTYKCFEGFGIDGPAIAKCLGEKWSHPPSCIKTDCLSLPSFENAIPMGEKKDVYKAGEQVTYTCATYYKMDGASNVTCINSRWTGRPTCRDTSCVNPPTVQNAYIVSRQMSKYPSGERVRYQCRSPYEMFGDEEVMCLNGNWTEPPQCKDSTGKCGPPPPIDNGDITSFPLSVYAPASSVEYQCQNLYQLEGNKRITCRNGQWSEPPKCLHPCVISREIMENYNIALRWTAKQKLYSRTGESVEFVCKRGYRLSSRSHTLRTTCWDGKLEYPTCAKR

SEQ ID NO: 887857 - protein, 1209 aa, Homo sapiens
PRAAGASARECLHPCVISREIMENYNIALRWTAKQKLYSRTGESVEFVCKRGYRLSSRSHTLRTTCWDGKLEYPTCAKTIESIINVHTFIQNFSIKSVLKFHFFMECDTDGWTNDIPICEVVKCLPVTAPENGKIVSSAMEPDREYHFGQAVRFVCNSGYKIEGDEEMHCSDDGFWSKEKPKCVEISCKSPDVINGSPISQKIIYKENERFQYKCNMGYEYSERGDAVCTESGWRPLPSCEEKSCDNPYIPNGDYSPLRIKHRTGDEITYQCRNGFYPATRGNTAKCTSTGWIPAPRCTLKPCDYPDIKHGGLYHENMRRPYFPVAVGKYYSYYCDEHFETPSGSYWDHIHCTQDGWSPAVPCLRKCYFPYLENGYNQNYGRKFVQGKSIDVACHPGYALPKAQTTVTCMENGWSPTPRCIRVKTCSKSSIDIENGFISESQYTYALKEKAKYQCKLGYVTADGETSGSITCGKDGWSAQPTCIKSCDIPVFMNARTKNDFTWFKLNDTLDYECHDGYESNTGSTTGSIVCGYNGWSDLPICYERECELPKIDVHLVPDRKKDQYKVGEVLKFSCKPGFTIVGPNSVQCYHFGLSPDLPICKEQVQSCGPPPELLNGNVKEKTKEEYGHSEVVEYYCNPRFLMKGPNKIQCVDGEWTTLPVCIVEESTCGDIPELEHGWAQLSSPPYYYGDSVEFNCSESFTMIGHRSITCIHGVWTQLPQCVAIDKLKKCKSSNLIILEEHLKNKKEFDHNSNIRYRCRGKEGWIHTVCINGRWDPEVNCSMAQIQLCPPPPQIPNSHNMTTTLNYRDGEKVSVLCQENYLIQEGEEITCKDGRWQSIPLCVEKIPCSQPPQIEHGTINSSRSSQESYAHGTKLSYTCEGGFRISEENETTCYMGKWSSPPQCEGLPCKSPPEISHGVVAHMSDSYQYGEEVTYKCFEGFGIDGPAIAKCLGEKWSHPPSCIKTDCLSLPSFENAIPMGEKKDVYKAGEQVTYTCATYYKMDGASNVTCINSRWTGRPTCRDTSCVNPPTVQNAYIVSRQMSKYPSGERVRYQCRSPYEMFGDEEVMCLNGNWTEPPQCKDSTGKCGPPPPIDNGDITSFPLSVYAPASSVEYQCQNLYQLEGNKRITCRNGQWSEPPKCLHPCVISREIMENYNIALRWTAKQKLYSRTGESVEFVCKRGYRLSSRSHTLRTTCWDGKLEYPTCAKR

SEQ ID NO: 887858 - protein, 1167 aa, Homo sapiens
MRLLAKIICLMLWAICVAEDCNELPPRRNTEILTGSWSDQTYPEGTQAIYKCRPGYRSLGNVIMVCRKGEWVALNPLRKCQKRPCGHPGDTPFGTFTLTGGNVFEYGVKAVYTCNEGYQLLGEINYRECDTDGWTNDIPICEEISCKSPDVINGSPISQKIIYKENERFQYKCNMGYEYSERGDAVCTESGWRPLPSCEEKSCDNPYIPNGDYSPLRIKHRTGDEITYQCRNGFYPATRGNTAKCTSTGWIPAPRCTLKPCDYPDIKHGGLYHENMRRPYFPVAVGKYYSYYCDEHFETPSGSYWDHIHCTQDGWSPAVPCLRKCYFPYLENGYNQNYGRKFVQGKSIDVACHPGYALPKAQTTVTCMENGWSPTPRCIRVKTCSKSSIDIENGFISESQYTYALKEKAKYQCKLGYVTADGETSGSITCGKDGWSAQPTCIKSCDIPVFMNARTKNDFTWFKLNDTLDYECHDGYESNTGSTTGSIVCGYNGWSDLPICYERECELPKIDVHLVPDRKKDQYKVGEVLKFSCKPGFTIVGPNSVQCYHFGLSPDLPICKEQVQSCGPPPELLNGNVKEKTKEEYGHSEVVEYYCNPRFLMKGPNKIQCVDGEWTTLPVCIVEESTCGDIPELEHGWAQLSSPPYYYGDSVEFNCSESFTMIGHRSITCIHGVWTQLPQCVAIDKLKKCKSSNLIILEEHLKNKKEFDHNSNIRYRCRGKEGWIHTVCINGRWDPEVNCSMAQIQLCPPPPQIPNSHNMTTTLNYRDGEKVSVLCQENYLIQEGEEITCKDGRWQSIPLCVEKIPCSQPPQIEHGTINSSRSSQESYAHGTKLSYTCEGGFRISEENETTCYMGKWSSPPQCEGLPCKSPPEISHGVVAHMSDSYQYGEEVTYKCFEGFGIDGPAIAKCLGEKWSHPPSCIKTDCLSLPSFENAIPMGEKKDVYKAGEQVTYTCATYYKMDGASNVTCINSRWTGRPTCRDTSCVNPPTVQNAYIVSRQMSKYPSGERVRYQCRSPYEMFGDEEVMCLNGNWTEPPQCKDSTGKCGPPPPIDNGDITSFPLSVYAPASSVEYQCQNLYQLEGNKRITCRNGQWSEPPKCLHPCVISREIMENYNIALRWTAKQKLYSRTGESVEFVCKRGYRLSSRSHTLRTTCWDGKLEYPTCAKR

SEQ ID NO: 887859 - protein, 989 aa, Homo sapiens [sequence omitted]

SEQ ID NO: 887860 - protein, 989 aa, Homo sapiens [sequence omitted]

SEQ ID NO: 887861 - protein, 989 aa, Homo sapiens [sequence omitted]

SEQ ID NO: 887862 - protein, 989 aa, Homo sapiens [sequence omitted]

SEQ ID NO: 887863 - protein, 989 aa, Homo sapiens [sequence omitted]

SEQ ID NO: 887864 - protein, 989 aa, Homo sapiens [sequence omitted]

SEQ ID NO: 887865 - protein, 989 aa, Homo sapiens [sequence omitted]

SEQ ID NO: 887866 - protein, 989 aa, Homo sapiens [sequence omitted]

SEQ ID NO: 887867 - protein, 989 aa, Homo sapiens [sequence omitted]

SEQ ID NO: 887868 - protein, 1131 aa, Homo sapiens
MRLLAKIICLMLWAICVAEDCNELPPRRNTEILTGSWSDQTYPEGTQAIYKCRPGYRSLGNVIMVCRKGEWVALNPLRKCQKRPCGHPGDTPFGTFTLTGGNVFEYGVKAVYTCNEGYQLLGEINYRECDTDGWTNDIPICEVVKCLPVTAPENGKIVSSAMEPDREYHFGQAVRFVCNSGYKIEGDEEMHCSDDGFWSKEKPKCVEISCKSPDVINGSPISQKIIYKENERFQYKCNMGYEYSERGDAVCTESGWRPLPSCEEKSCDNPYIPNGDYSPLRIKHRTGDEITYQCRNGFYPATRGNTAKCTSTGWIPAPRCTLKPCDYPDIKHGGLYHENMRRPYFPVAVGKYYSYYCDEHFETPSGSYWDHIHCTQDGWSPAVPCLRKCYFPYLENGYNQNYGRKFVQGKSIDVACHPGYALPKAQTTVTCMENGWSPTPRCIRVKTCSKSSIDIENGFISESQYTYALKEKAKYQCKLGYVTADGETSGSITCGKDGWSAQPTCIKSCDIPVFMNARTKNDFTWFKLNDTLDYECHDGYESNTGSTTGSIVCGYNGWSDLPICYERECELPKIDVHLVPDRKKDQYKVGEVLKFSCKPGFTIVGPNSVQCYHFGLSPDLPICKEQVQSCGPPPELLNGNVKEKTKEEYGHSEVVEYYCNPRFLMKGPNKIQCVDGEWTTLPVCIVEESTCGDIPELEHGWAQLSSPPYYYGDSVEFNCSESFTMIGHRSITCIHGVWTQLPQCVAIDKLKKCKSSNLIILEEHLKNKKEFDHNSNIRYRCRGKEGWIHTVCINGRWDPEVNCSMAQIQLCPPPPQIPNSHNMTTTLNYRDGEKVSVLCQENYLIQEGEEITCKDGRWQSIPLCVEKIPCSQPPQIEHGTINSSRSSQESYAHGTKLSYTCEGGFRISEENETTCYMGKWSSPPQCEGLPCKSPPEISHGVVAHMSDSYQYGEEVTYKCFEGFGIDGPAIAKCLGEKWSHPPSCIKTDCLSLPSFENAIPMGEKKDVYKAGEQVTYTCATYYKMDGASNVTCINSRWTGRPTCRDTSCVNPPTVQNAYIVSRQMSKYPSGERVRYQCRSPYEMFGDEEVMCLNGNWTEPPQCKDSRCQYMLQLHQLSTNARTCINLRVTSE

SEQ ID NO: 887869 - protein, 989 aa, Homo sapiens [sequence omitted]

SEQ ID NO: 887870 - protein, 928 aa, Homo sapiens
MRLLAKIICLMLWAICVAEDCNELPPRRNTEILTGSWSDQTYPEGTQAIYKCRPGYRSLGNVIMVCRKGEWVALNPLRKCQKRPCGHPGDTPFGTFTLTGGNVFEYGVKAVYTCNEGYQLLGEINYRECDTDGWTNDIPICEVVKCLPVTAPENGKIVSSAMEPDREYHFGQAVRFVCNSGYKIEGDEEMHCSDDGFWSKEKPKCVEISCKSPDVINGSPISQKIIYKENERFQYKCNMGYEYSERGDAVCTESGWRPLPSCEEKSCDNPYIPNGDYSPLRIKHRTGDEITYQCRNGFYPATRGNTAKCTSTGWIPAPRCTLKPCDYPDIKHGGLYHENMRRPYFPVAVGKYYSYYCDEHFETPSGSYWDHIHCTQDGWSPAVPCLRKCYFPYLENGYNQNYGRKFVQGKSIDVACHPGYALPKAQTTVTCMENGWSPTPRCIRVKTCSKSSIDIENGFISESQYTYALKEKAKYQCKLGYVTADGETSGSITCGKDGWSAQPTCIKSCDIPVFMNARTKNDFTWFKLNDTLDYECHDGYESNTGSTTGSIVCGYNGWSDLPICYERECELPKIDVHLVPDRKKDQYKVGEVLKFSCKPGFTIVGPNSVQCYHFGLSPDLPICKEQVQSCGPPPELLNGNVKEKTKEEYGHSEVVEYYCNPRFLMKGPNKIQCVDGEWTTLPVCIVEESTCGDIPELEHGWAQLSSPPYYYGDSVEFNCSESFTMIGHRSITCIHGVWTQLPQCVAIDKLKKCKSSNLIILEEHLKNKKEFDHNSNIRYRCRGKEGWIHTVCINGRWDPEVNCSMAQIQLCPPPPQIPNSHNMTTTLNYRDGEKVSVLCQENYLIQEGEEITCKDGRWQSIPLCVEKIPCSQPPQIEHGTINSSRSSQESYAHGTKLSYTCEGGFRISEENETTCYMGKWSSPPQCEG

SEQ ID NO: 887871 - protein, 449 aa, Homo sapiens; identical to SEQ ID NO: 887852

SEQ ID NO: 887872 - protein, 326 aa, Homo sapiens
GSAQLVCVRVGDYRIPVLTQCEGLPCKSPPEISHGVVAHMSDSYQYGEEVTYKCFEGFGIDGPAIAKCLGEKWSHPPSCIKTDCLSLPSFENAIPMGEKKDVYKAGEQVTYTCATYYKMDGASNVTCINSRWTGRPTCRDTSCVNPPTVQNAYIVSRQMSKYPSGERVRYQCRSPYEMFGDEEVMCLNGNWTEPPQCKDSTGKCGPPPPIDNGDITSFPLSVYAPASSVEYQCQNLYQLEGNKRITCRNGQWSEPPKCLHPCVISREIMENYNIALRWTAKQKLYSRTGESVEFVCKRGYRLSSRSHTLRTTCWDGKLEYPTCAKR

SEQ ID NO: 887873 - protein, 453 aa, Homo sapiens [sequence omitted]

SEQ ID NO: 887874 - protein, 291 aa, Homo sapiens
MRLLAKIICLMLWAICVAEDCNELPPRRNTEILTGSWSDQTYPEGTQAIYKCRPGYRSLGNVIMVCRKGEWVALNPLRKCQKRPCGHPGDTPFGTFTLTGGNVFEYGVKAVYTCNEGYQLLGEINYRECDTDGWTNDIPICEVVKCLPVTAPENGKIVSSAMEPDREYHFGQAVRFVCNSGYKIEGDEEMHCSDDGFWSKEKPKCVEISCKSPDVINGSPISQKIIYKENERFQYKCNMGYEYSERGDAVCTESGWRPLPSCEGNVTFIFWIFINLSHILINSFNKSTYFN

SEQ ID NO: 887875 - protein, 385 aa, Homo sapiens [sequence omitted]

SEQ ID NO: 887876 - protein, 147 aa, Homo sapiens
MASHRLLLLCLAGLVFVSEAGPTGTGESKCPLMVKVLDAVRGSPAINVAVHVFRKAADDTWEPFASGKTSESGELHGLTTEEEFVEGIYKVEIDTKSYWKALGISPFHEHAEVVFTANDSGPRRYTIAALLSPYSYSTTAVVTNPKE

SEQ ID NO: 887877 - protein, 136 aa, Homo sapiens
  misc_feature (39)..(39): Xaa can be any naturally occurring amino acid
FVECYGIQFPPGTAYAMYGKFLKRPTIGKLDRLRGRVEXPGRTTVHSFLAGWLLIVCSSSALLDWYLCLRLALRAPVESKCPLMVKVLDAVRGSPAINVAVHVFRKAADDTWEPFASGENPVSLESCMGSQLRRNL

SEQ ID NO: 887878 - protein, 136 aa, Homo sapiens; identical to SEQ ID NO: 887877
  misc_feature (39)..(39): Xaa can be any naturally occurring amino acid

SEQ ID NO: 887879 - protein, 147 aa, Homo sapiens; identical to SEQ ID NO: 887876

SEQ ID NO: 887880 - protein, 147 aa, Homo sapiens; identical to SEQ ID NO: 887876

SEQ ID NO: 887881 - protein, 147 aa, Homo sapiens; identical to SEQ ID NO: 887876

SEQ ID NO: 887882 - protein, 147 aa, Homo sapiens; identical to SEQ ID NO: 887876

SEQ ID NO: 887883 - protein, 134 aa, Homo sapiens
  misc_feature (4)..(4): Xaa can be any naturally occurring amino acid
  misc_feature (6)..(6): Xaa can be any naturally occurring amino acid
  misc_feature (16)..(16): Xaa can be any naturally occurring amino acid
SGGXRXGGGGGSDVVXGAGWLLIVCSSSALLDWYLCLRLALRAPVESKCPLMVKVLDAVRGSPAINVAVHVFRKAADDTWEPFASGGIYKVGNRHQIFTGKALGHLPHFHGGMQRWYSQPTTSGPRRLHHLPPC

SEQ ID NO: 887884 - protein, 150 aa, Homo sapiens
  misc_feature (23)..(23): Xaa can be any naturally occurring amino acid
MYGKFLKRPTIGKLDRLRGRVEXPGRTTVHSFLAGWLLIVCSSSALLDWYLCLRLALRAPVESKCPLMVKVLDAVRGSPAINVAVHVFRKAADDTWEPFASGGIYKVGNRHQIFTGKALGHLPHFHGGMQRWYSQPTTSGPRRLHHLPPC

SEQ ID NO: 887885 - protein, 181 aa, Homo sapiens
  misc_feature (39)..(39): Xaa can be any naturally occurring amino acid
FVECYGIQFPPGTAYAMYGKFLKRPTIGKLDRLRGRVEXPGRTTVHSFLAGWLLIVCSSSALLDWYLCLRLALRAPVESKCPLMVKVLDAVRGSPAINVAVHVFRKAADDTWEPFASGGIYKVGNRHQIFTGKALGHLPHFHGGMQRWYFTANDSGLFWFWFLLLAFQEMHSFTQCTTEMS

SEQ ID NO: 887886 - protein, 139 aa, Homo sapiens
  misc_feature (39)..(39): Xaa can be any naturally occurring amino acid
FVECYGIQFPPGTAYAMYGKSLKRPTIGKLDRLRGRVNXRVEPRVHSFLAGWLLIVCSSSALLDWYLCLRLALRAPVESKCPLMVKVLDAVRGSPAINVAVHVFRKAADDTWEPFASGVSCQRTLPQDLVLSSRLPLTW

SEQ ID NO: 887887 - protein, 147 aa, Homo sapiens; identical to SEQ ID NO: 887876

SEQ ID NO: 887888 - protein, 147 aa, Homo sapiens; identical to SEQ ID NO: 887876

SEQ ID NO: 887889 - protein, 147 aa, Homo sapiens; identical to SEQ ID NO: 887876

SEQ ID NO: 887890 - protein, 235 aa, Homo sapiens
LCLTYILSTLSQATLTLLLDHLRLVSSFHAYNRMTPQNLAVCFGPVLLPARQAPTRPRARSSGPGLASAVDFKHHIEVLHYLLQSWPGEFMPRACTTNAEPDPRLPRQSPDVAPYLRPKRQPPLHLPLADPEVVTRPRGRGGPESPPSNRYAGDWSVCGRDFLPCGRDFLSGPDYDHVTGSDSEDEDEEVGEPRVTGDFEDDFDAPFNPHLNLKDFDALILDLERELSKQINVCL

SEQ ID NO: 887891 - protein, 580 aa, Homo sapiens
RTKSPGPARRLSIKMKKLPELRRRLSLRGPRAGRERERAAPAGSVISRYHLDSSVGGPGPAAGPGGTRSPRAGYLSDGDSPERPAGPPSPTSFRPYEVGPAARAPPAALWGRLSLHLYGLGGLRPAPGATPRDLCCLLQVDGEARARTGPLRGGPDFLRLDHTFHLELEAARLLRALVLAWDPGVRRHRPCAQGTVLLPTVFRGCQAQQLAVRLEPQGLLYAKLTLSEQQEAPATAEPRVFGLPLPLLVERERPPGQVPLIIQKCVGQIERRGLRVVGLYRLCGSAAVKKELRDAFERDSAAVCLSEDLYPDINVITGILKDYLRELPTPLITQPLYKVVLEAMARDPPNRVPPTTEGTRGLLSCLPDVERATLTLLLDHLRLVSSFHAYNRMTPQNLAVCFGPVLLPARQAPTRPRARSSGPGLASAVDFKHHIEVLHYLLQSWPDPRLPRQSPDVAPYLRPKRQPPLHLPLADPEVVTRPRGRGGPESPPSNRYAGDWSVCGRDFLPCGRDFLSGPDYDHVTGSDSEDEDEEVGEPRVTGDFEDDFDAPFNPHLNLKDFDALILDLERELSKQINVCL

SEQ ID NO: 887892 - protein, 580 aa, Homo sapiens; identical to SEQ ID NO: 887891

SEQ ID NO: 887893 - protein, 580 aa, Homo sapiens; identical to SEQ ID NO: 887891

SEQ ID NO: 887894 - protein, 595 aa, Homo sapiens
  misc_feature (581)..(581): Xaa can be any naturally occurring amino acid
  misc_feature (595)..(595): Xaa can be any naturally occurring amino acid
RTKSPGPARRLSIKMKKLPELRRRLSLRGPRAGRERERAAPAGSVISRYHLDSSVGGPGPAAGPGGTRSPRAGYLSDGDSPERPAGPPSPTSFRPYEVGPAARAPPAALWGRLSLHLYGLGGLRPAPGATPRDLCCLLQVDGEARARTGPLRGGPDFLRLDHTFHLELEAARLLRALVLAWDPGVRRHRPCAQGTVLLPTVFRGCQAQQLAVRLEPQGLLYAKLTLSEQQEAPATAEPRVFGLPLPLLVERERPPGQVPLIIQKCVGQIERRGLRVVGLYRLCGSAAVKKELRDAFERDSAAVCLSEDLYPDINVITGILKDYLRELPTPLITQPLYKVVLEAMARDPPNRVPPTTEGTRGLLSCLPDVERATLTLLLDHLRLVSSFHAYNRMTPQNLAVCFGPVLLPARQAPTRPRARSSGPGLASAVDFKHHIEVLHYLLQSWPDPRLPRQSPDVAPYLRPKRQPPLHLPLADPEVVTRPRGRGGPESPPSNRYAGDWSVCGRDFLPCGRDFLSGPDYDHVTGSDSEDEDEEVGEPRVTGDFEDDFDAPFNPHLNLKDFDALILDLERELSKQINVCLXKPRLNRGWGTPGVX

SEQ ID NO: 887895 - protein, 580 aa, Homo sapiens; identical to SEQ ID NO: 887891

SEQ ID NO: 887896 - protein, 580 aa, Homo sapiens; identical to SEQ ID NO: 887891

SEQ ID NO: 887897 - protein, 105 aa, Homo sapiens
  misc_feature (82)..(82): Xaa can be any naturally occurring amino acid
  misc_feature (85)..(85): Xaa can be any naturally occurring amino acid
  misc_feature (98)..(98): Xaa can be any naturally occurring amino acid
MFLCAQEWLTLGLNVPLLFYHFWRYFHCPADSSELAYDPPVVMNADTLSYCQKEAWCKLAFYLLSFFYYLYCMDLTLLVEAXLTXKDPWHHHSGGLEXGGRGALR

SEQ ID NO: 887898 - protein, 185 aa, Homo sapiens
  misc_feature (162)..(162): Xaa can be any naturally occurring amino acid
  misc_feature (165)..(165): Xaa can be any naturally occurring amino acid
  misc_feature (178)..(178): Xaa can be any naturally occurring amino acid
MAFTFAAFCYMLSLVLCAALIFFAIWHIIAFDELRTDFKSPIDQCNPVHARERLRNIERICFLLRKLVLPEYSIHSLFCIMFLCAQEWLTLGLNVPLLFYHFWRYFHCPADSSELAYDPPVVMNADTLSYCQKEAWCKLAFYLLSFFYYLYCMDLTLLVEAXLTXKDPWHHHSGGLEXGGRGALR

SEQ ID NO: 887899 - protein, 191 aa, Homo sapiens
RRPAGRSHGWGRARLGAHGCAGSRVWGAGPTGPTSSRLPKDSFSRERALPGSGIWEELGGRSGTSLDTIRLRPGGAGGSGAERSSLLSGLVEKSRELFLGRMGPPPSVLRGVVASLVVLVSRGSQLGTNLQVFAADLVSSSICGRFPPATLDTRFPVFAGGPGLGSPEPAGIQRLFADPRVASLAVRPPGH

SEQ ID NO: 887900 - protein, 160 aa, Homo sapiens
MAFTFAAFCYMLSLVLCAALIFFAIWHIIAFDELRTDFKSPIDQCNPVHARERLRNIERICFLLRKLVLPEYSIHSLFCIMFLCAQEWLTLGLNVPLLFYHFWRYFHCPADSSELAYDPPVVMNADTLSYCQKEAWCKLAFYLLSFFYYLYCMIYTLVSS

SEQ ID NO: 887901 - protein, 1006 aa, Homo sapiens
MGSAEDAVKEKLLWNVKKEVKQIMEEAVTRKFVHEDSSHIIALCGAVEACLLHQLRRRAAGFLRSDKMAALFTKVGKTCPVAGEICHKVQELQQQAEGRKPSGVSQEALRRQGSASGKAPALSPQALKHVWVRTALIEKVLDKVVQYLAENCSKYYEKEALLADPVFGPILASLLVGPCALEYTKLKTADHYWTDPSADELVQRHRIRGPPTRQDSPAKRPALGIRKRHSSGSASEDRLAACARECVESLHQNSRTRLLYGKNHVLVQPKEDMEAVPGYLSLHQSAESLTLKWTPNQLMNGTLGDSELEKSVYWDYALVVPFSQVVCIHCHQQKSGGTLVLVSQDGIQRPPLHFPQGGHLLSFLSCLENGLLPRGQLEPPLWTQQGKGKVFPKLRKRSSIRSVDMEEMGTGRATDYVFRIIYPGHRHEHNAGDMIEMQGFGPSLPAWHLEPLCSQGSSCLSCSSSSSPHATPSHCSCIPDRLPLRLLCESMKRQIVSRAFYGWLAHCRHLSTVRTHLSALVHHSVIPPDRPPGASAGLTKDVWSKYQKDKKNYKELELLRQVYYGGIEHEIRKDVWPFLLGHYKFGMSKKEMEQVDAVVAARYQQVLAEWKACEVVVRQREREAHPATRTKFSSGSSIDSHVQRLIHRDSTISNDVFISVDDLEPPEPQDPEDSRPKPEQEAGPGTPGTAVVEQQHSVEFDSPDSGLPSSRNYSVASGIQSSLDEGQSVGFEEEDGGGEEGSSGPGPAAHTLREPQDPSQEKPQAGELEAGEELAAVCAAAYTIELLDTVALNLHRIDKDVQRCDRNYWYFTPPNLERLRDVMCSYVWEHLDVGYVQGMCDLLAPLLVTLDNDQLAYSCFSHLMKRMSQNFPNGGAMDTHFANMRSLIQILDSELFELMHQNGDYTHFYFCYRWFLLDFKRELLYEDVFAVWEVIWAARHISSEHFVLFIALALVEAYREIIRDNNMDFTDIIKFFNERAEHHDAQEILRIARDLVHKVQMLIENK

SEQ ID NO: 887902 - protein, 394 aa, Homo sapiens
  misc_feature (394)..(394): Xaa can be any naturally occurring amino acid
EEEEDKLHAMLSMICSRNLTAPNPMKDAGDMIEMQGFGPSLPAWHLEPLCSQGSSCLSCSSSSSPHATPSHCSCIPDRLPLRLLCESMKRQIVSRAFYGWLAHCRHLSTVRTHLSALVHHSVIPPDRPPGASAGLTKDVWSKYQKDKKNYKELELLRQVYYGGIEHEIRKDVWPFLLGHYKFGMSKKEMEQVDADGGSHGTSRCRQRLDRPRTRTAEANRGAERTHQPPRHNGLAHKRHNDKPRAGPIERKYHNNKRQRTYTTTEPTPPGPRKTAQNNHHKTDTGTAEHGATDVKNTDKLLRRTEQPTNTGQRRQKQNNQRDEDSPTHQGGDGVNTTQPSMGKQKTREQANKDDRPQTQRKQQQQQRMQKKRTNSKRRVTKNDQPQTNDKRQTX

SEQ ID NO: 887903 - protein, 1089 aa, Homo sapiens
MGSAEDAVKEKLLWNVKKEVKQIMEEAVTRKFVHEDSSHIIALCGAVEACLLHQLRRRAAGFLRSDKMAALFTKVGKTCPVAGEICHKVQELQQQAEGRKPSGVSQEALRRQGSASGKAPALSPQALKHVWVRTALIEKVLDKVVQYLAENCSKYYEKEALLADPVFGPILASLLVGPCALEYTKLKTADHYWTDPSADELVQRHRIRGPPTRQDSPAKRPALGIRKRHSSGSASEDRLAACARECVESLHQNSRTRLLYGKNHVLVQPKEDMEAVPGYLSLHQSAESLTLKWTPNQLMNGTLGDSELEKSVYWDYALVVPFSQVVCIHCHQQKSGGTLVLVSQDGIQRPPLHFPQGGHLLSFLSCLENGLLPRGQLEPPLWTQQGKGKVFPKLRKRSSIRSVDMEEMGTGRATDYVFRIIYPGHRHEHNAGDMIEMQGFGPSLPAWHLEPLCSQGSSCLSCSSSSSPHATPSHCSCIPDRLPLRLLCESMKRQIVSRAFYGWLAHCRHLSTVRTHLSALVHHSVIPPDRPPGASAGLTKDVWSKYQKDKKNYKELELLRQVYYGGIEHEIRKDVWPFLLGHYKFGMSKKEMEQVRGACSHGAMRWGAGPGDAREGTLEASAPSQPERSMAGQLHRPYPEARLESETQDPRSSAGPAPEGEGLVHASPMVVVWSEYQVDAVVAARYQQVLAEWKACEVVVRQREREAHPATRTKFSSGSSIDSHVQRLIHRDSTISNDVFISVDDLEPPEPQDPEDSRPKPEQEAGPGTPGTAVVEQQHSVEFDSPDSGLPSSRNYSVASGIQSSLDEGQSVGFEEEDGGGEEGSSGPGPAAHTLREPQDPSQEKPQAGELEAGEELAAVCAAAYTIELLDTVALNLHRIDKDVQRCDRNYWYFTPPNLERLRDVMCSYVWEHLDVGYVQGMCDLLAPLLVTLDNDQLAYSCFSHLMKRMSQNFPNGGAMDTHFANMRSLIQILDSELFELMHQNGDYTHFYFCYRWFLLDFKRELLYEDVFAVWEVIWAARHISSEHFVLFIALALVEAYREIIRDNNMDFTDIIKFFNERAEHHDAQEILRIARDLVHKVQMLIENK

SEQ ID NO: 887904 - protein, 1034 aa, Homo sapiens
MGSAEDAVKEKLLWNVKKEVKQIMEEAVTRKFVHEDSSHIIALCGAVEACLLHQLRRRAAGFLRSDKMAALFTKVGKTCPVAGEICHKVQELQQQAEGRKPSGVSQEALRRQGSASGKAPALSPQALKHVWVRTALIEKVLDKVVQYLAENCSKYYEKEALLADPVFGPILASLLGEPESTGTVGTGQVLREHRLGWLSLSSTVGPCALEYTKLKTADHYWTDPSADELVQRHRIRGPPTRQDSPAKRPALGIRKRHSSGSASEDRLAACARECVESLHQNSRTRLLYGKNHVLVQPKEDMEAVPGYLSLHQSAESLTLKWTPNQLMNGTLGDSELEKSVYWDYALVVPFSQVVCIHCHQQKSGGTLVLVSQDGIQRPPLHFPQGGHLLSFLSCLENGLLPRGQLEPPLWTQQGKGKVFPKLRKRSSIRSVDMEEMGTGRATDYVFRIIYPGHRHEHNAGDMIEMQGFGPSLPAWHLEPLCSQGSSCLSCSSSSSPHATPSHCSCIPDRLPLRLLCESMKRQIVSRAFYGWLAHCRHLSTVRTHLSALVHHSVIPPDRPPGASAGLTKDVWSKYQKDKKNYKELELLRQVYYGGIEHEIRKDVWPFLLGHYKFGMSKKEMEQVDAVVAARYQQVLAEWKACEVVVRQREREAHPATRTKFSSGSSIDSHVQRLIHRDSTISNDVFISVDDLEPPEPQDPEDSRPKPEQEAGPGTPGTAVVEQQHSVEFDSPDSGLPSSRNYSVASGIQSSLDEGQSVGFEEEDGGGEEGSSGPGPAAHTLREPQDPSQEKPQAGELEAGEELAAVCAAAYTIELLDTVALNLHRIDKDVQRCDRNYWYFTPPNLERLRDVMCSYVWEHLDVGYVQGMCDLLAPLLVTLDNDQLAYSCFSHLMKRMSQNFPNGGAMDTHFANMRSLIQILDSELFELMHQNGDYTHFYFCYRWFLLDFKRELLYEDVFAVWEVIWAARHISSEHFVLFIALALVEAYREIIRDNNMDFTDIIKFFNERAEHHDAQEILRIARDLVHKVQMLIENK

SEQ ID NO: 887905 - protein, 983 aa, Homo sapiens
MGSAEDAVKEKLLWNVKKEVKQIMEEAVTRKFVHEDSSHIIALCGAVEACLLHQLRRRAAGFLRSDKMAALFTKVGKTCPVAGEICHKVQELQQQAEGRKPSGVSQEALRRQGSASGKAPALSPQALKHVWVRTALIEKVLDKVVQYLAKTAVGPCALEYTKLKTADHYWTDPSADELVQRHRIRGPPTRQDSPAKRPALGIRKRHSSGSASEDRLAACARECVESLHQNSRTRLLYGKNHVLVQPKEDMEAVPGYLSLHQSAESLTLKWTPNQLMNGTLGDSELEKSVYWDYALVVPFSQVVCIHCHQQKSGGTLVLVSQDGIQRPPLHFPQGGHLLSFLSCLENGLLPRGQLEPPLWTQQGKGKVFPKLRKRSSIRSVDMEEMGTGRATDYVFRIIYPGHRHEHNAGDMIEMQGFGPSLPAWHLEPLCSQGSSCLSCSSSSSPHATPSHCSCIPDRLPLRLLCESMKRQIVSRAFYGWLAHCRHLSTVRTHLSALVHHSVIPPDRPPGASAGLTKDVWSKYQKDKKNYKELELLRQVYYGGIEHEIRKDVWPFLLGHYKFGMSKKEMEQVDAVVAARYQQVLAEWKACEVVVRQREREAHPATRTKFSSGSSIDSHVQRLIHRDSTISNDVFISVDDLEPPEPQDPEDSRPKPEQEAGPGTPGTAVVEQQHSVEFDSPDSGLPSSRNYSVASGIQSSLDEGQSVGFEEEDGGGEEGSSGPGPAAHTLREPQDPSQEKPQAGELEAGEELAAVCAAAYTIELLDTVALNLHRIDKDVQRCDRNYWYFTPPNLERLRDVMCSYVWEHLDVGYVQGMCDLLAPLLVTLDNDQLAYSCFSHLMKRMSQNFPNGGAMDTHFANMRSLIQILDSELFELMHQNGDYTHFYFCYRWFLLDFKRELLYEDVFAVWEVIWAARHISSEHFVLFIALALVEAYREIIRDNNMDFTDIIKFFNERAEHHDAQEILRIARDLVHKVQMLIENK

SEQ ID NO: 887906 - protein, 1053 aa, Homo sapiens
MGSAEDAVKEKLLWNVKKEVKQIMEEAVTRKFVHEDSSHIIALCGAVEACLLHQLRRRAAGFLRSDKMAALFTKVGKTCPVAGEICHKVQELQQQAEGRKPSGVSQEALRRQGSASGKAPALSPQALKHVWVRTALIEKVLDKVVQYLAENCSKYYEKEALLADPVFGPILASLLGEPESTGTVGTGQVLREHRLGWLSLSPQWDPVPWNTLSSRQPITTGLTPLLMSWSSGTASGVHLLARTPLQSAQPWGSGNGTQAAARRRTGWLPVPASVWSPCTRTHGRGCSMARTTCWCSRPSLRASQPFIVGLPVSPAEKEDMEAVPGYLSLHQSAESLTLKWTPNQLMNGTLGDSELEKSVYWDYALVVPFSQVVCIHCHQQKSGGTLVLVSQDGIQRPPLHFPQGGHLLSFLSCLENGLLPRGQLEPPLWTQQGKGKVFPKLRKRSSIRSVDMEEMGTGRATDYVFRIIYPGHRHEHNAGDMIEMQGFGPSLPAWHLEPLCSQGSSCLSCSSSSSPHATPSHCSCIPDRLPLRLLCESMKRQIVSRAFYGWLAHCRHLSTVRTHLSALVHHSVIPPDRPPGASAGLTKDVWSKYQKDKKNYKELELLRQVYYGGIEHEIRKDVWPFLLGHYKFGMSKKEMEQVDAVVAARYQQVLAEWKACEVVVRQREREAHPATRTKFSSGSSIDSHVQRLIHRDSTISNDVFISVDDLEPPEPQDPEDSRPKPEQEAGPGTPGTAVVEQQHSVEFDSPDSGLPSSRNYSVASGIQSSLDEGQSVGFEEEDGGGEEGSSGPGPAAHTLREPQDPSQEKPQAGELEAGEELAAVCAAAYTIELLDTVALNLHRIDKDVQRCDRNYWYFTPPNLERLRDVMCSYVWEHLDVGYVQGMCDLLAPLLVTLDNDQLAYSCFSHLMKRMSQNFPNGGAMDTHFANMRSLIQILDSELFELMHQNGDYTHFYFCYRWFLLDFKRELLYEDVFAVWEVIWAARHISSEHFVLFIALALVEAYREIIRDNNMDFTDIIKFFNERAEHHDAQEILRIARDLVHKVQMLIENK

SEQ ID NO: 887907 - protein, 697 aa, Homo sapiens
RQNSCVLHRQNSVVLHMTLGNRQSPPSVDHSNGNGEMCSPSLRKRSSGGHLLSFLSCLENGLLPRGQLEPPLWTQQGKGKVFPKLRKRSSIRSVDMEEMGTGRATDYVFRIIYPGHRHEHNAGDMIEMQGFGPSLPAWHLEPLCSQGSSCLSCSSSSSPHATPSHCSCIPDRLPLRLLCESMKRQIVSRAFYGWLAHCRHLSTVRTHLSALVHHSVIPPDRPPGASAGLTKDVWSKYQKDKKNYKELELLRQVYYGGIEHEIRKDVWPFLLGHYKFGMSKKEMEQVDAVVAARYQQVLAEWKACEVVVRQREREAHPATRTKFSSGSSIDSHVQRLIHRDSTISNDVFISVDDLEPPEPQDPEDSRPKPEQEAGPGTPGTAVVEQQHSVEFDSPDSGLPSSRNYSVASGIQSSLDEGQSVGFEEEDGGGEEGSSGPGPAAHTLREPQDPSQEKPQAGELEAGEELAAVCAAAYTIELLDTVALNLHRIDKDVQRCDRNYWYFTPPNLERLRDVMCSYVWEHLDVGYVQGMCDLLAPLLVTLDNDQLAYSCFSHLMKRMSQNFPNGGAMDTHFANMRSLIQILDSELFELMHQNGDYTHFYFCYRWFLLDFKRELLYEDVFAVWEVIWAARHISSEHFVLFIALALVEAYREIIRDNNMDFTDIIKFFNERAEHHDAQEILRIARDLVHKVQMLIENK

SEQ ID NO: 887908 - protein, 499 aa, Homo sapiens
FYLKAAGVPGMEPVQDSGDTLVDMAYYTGHTHKDYSPWAWAFGNTQDILDRWDRVVPAPVEHEIRKDVWPFLLGHYKFGMSKKEMEQVDAVVAARYQQVLAEWKACEVVVRQREREAHPATRTKFSSGSSIDSHVQRLIHRDSTISNDVFISVDDLEPPEPQDPEDSRPKPEQEAGPGTPGTAVVEQQHSVEFDSPDSGLPSSRNYSVASGIQSSLDEGQSVGFEEEDGGGEEGSSGPGPAAHTLREPQDPSQEKPQAGELEAGEELAAVCAAAYTIELLDTVALNLHRIDKDVQRCDRNYWYFTPPNLERLRDVMCSYVWEHLDVGYVQGMCDLLAPLLVTLDNDQLAYSCFSHLMKRMSQNFPNGGAMDTHFANMRSLIQILDSELFELMHQNGDYTHFYFCYRWFLLDFKRELLYEDVFAVWEVIWAARHISSEHFVLFIALALVEAYREIIRDNNMDFTDIIKFFNERAEHHDAQEILRIARDLVHKVQMLIENK

SEQ ID NO: 887909 - protein, 419 aa, Homo sapiens
MFGQRLVSLCLAGWVRSWLGAPWPQCWRLWWERGCEEFCIPAPFWPEEAVGCGKVLECRWSRPVFTPQVFISVDDLEPPEPQDPEDSRPKPEQEAGPGTPGTAVVEQQHSVEFDSPDSGLPSSRNYSVASGIQSSLDEGQSVGFEEEDGGGEEGSSGPGPAAHTLREPQDPSQEKPQAGELEAGEELAAVCAAAYTIELLDTVALNLHRIDKDVQRCDRNYWYFTPPNLERLRDVMCSYVWEHLDVGYVQGMCDLLAPLLVTLDNDQLAYSCFSHLMKRMSQNFPNGGAMDTHFANMRSLIQILDSELFELMHQNGDYTHFYFCYRWFLLDFKRELLYEDVFAVWEVIWAARHISSEHFVLFIALALVEAYREIIRDNNMDFTDIIKFFNERAEHHDAQEILRIARDLVHKVQMLIENK

SEQ ID NO: 887910 - protein, 1006 aa, Homo sapiens; identical to SEQ ID NO: 887901

SEQ ID NO: 887911 - protein, 168 aa, Homo sapiens
MCDLLAPLLVTLDNDQLAYSCFSHLMKRMSQNFPNGGAMDTHFANMRSLIQILDSELFELMHQNGDYTHFYFCYRWFLLDFKRELLYEDVFAVWEVIWAARHISSEHFVLFIALALVEAYREIIRDNNMDFTDIIKFFNERAEHHDAQEILRIARDLVHKVQMLIENK

SEQ ID NO: 887912 - protein, 1006 aa, Homo sapiens; identical to SEQ ID NO: 887901

SEQ ID NO: 887913 - protein, 1006 aa, Homo sapiens
MGSAEDAVKEKLLWNVKKEVKQIMEEAVTRKFVHEDSSHIIALCGAVEACLLHQLRRRAAGFLRSDKMAALFTKVGKTCPVAGEICHKVQELQQQAEGRKPSGVSQEALRRQGSASGKAPALSPQALKHVWVRTALIEKVLDKVVQYLAENCSKYYEKEALLADPVFGPILASLLVGPCALEYTKLKTADHYWTDPSADELVQRHRIRGPPTRQDSPAKRPALGIRKRHSSGSASEDRLAACARECVESLHQNSRTRLLYGKNHVLVQPKEDMEAVPGYLSLHQSAESLTLKWTPNQLMNGTLGDSELEKSVYWDYALVVPFSQVVCIHCHQQKSGGTLVLVSQDGIQRPPLHFPQGGHLLSFLSCLENGLLPRGQLEPPLWTQQGKGKVFPKLRKRSSIRSVDMEEMGTGRATDYVFRIIYPGHRHEHNAGDMIEMQGFGPSLPAWHLEPLCSQGSSCLSCSSSSSPHATPSHCSCIPDRLPLRLLCESMKRQIVSRAFYGWLAHCRHLSTVRTHLSALVHHSVIPPDRPPGASAGLTKDVWSKYQKDKKNYKELELLRQVYYGGIEHEIRKDVWPFLLGHYKFGMSKKEMEQVDAVVAARYQQVLAEWKACEVVVRQREREAHPATRTKFSSGSSIDSHVQRLIHRDSTISNDVFISVDDLEPPEPQDPEDSRPKPEQEAGPGTPGTAVVEQQHSVEFDSPDSGLPSSRNYSVASGIQSSLDEGQSVGFEEEDGGGEEGSSGPGPAAHTLREPQDPSQEKPQAGELEAGEELAAVCAAAYTIELLDTVALNLHRIDKDVQRCDRNYWYFTPPNLERLRDVMCSYVWEHLDVGYVQGMCDLLAPLLVTLDNDQLAYSCFSHLMKRMSQNFPNGGAMDTHFANMRSLIQILDSELFELMHQNGDYTHFYFCYRWFLLDFKRELLYEDVFAVWEVIWAARHISSEHFVLFIALALVEAYREIIRDNNMDFTDIIKFFNERAEHHDAQEILRIARDLVHKSLKTTCKK

SEQ ID NO: 887914 - protein, 1006 aa, Homo sapiens; identical to SEQ ID NO: 887901

SEQ ID NO: 887915 - protein, 1006 aa, Homo sapiens; identical to SEQ ID NO: 887901

SEQ ID NO: 887916 - protein, 1006 aa, Homo sapiens; identical to SEQ ID NO: 887901

SEQ ID NO: 887917 - protein, 1020 aa, Homo sapiens
MGSAEDAVKEKLLWNVKKEVKQIMEEAVTRKFVHEDSSHIIALCGAVEACLLHQLRRRAAGFLRSDKMAALFTKVGKTCPVAGEICHKVQELQQQAEGRKPSGVSQEALRRQGSASGKAPALSPQALKHVWVRTALIEKVLDKVVQYLAENCSKYYEKEALLADPVFGPILASLLVGPCALEYTKLKTADHYWTDPSADELVQRHRIRGPPTRQDSPAKRPALGIRKRHSSGSASEDRLAACARECVESLHQNSRTRLLYGKNHVLVQPKEDMEAVPGYLSLHQSAESLTLKWTPNQLMNGTLGDSELEKSVYWDYALVVPFSQVVCIHCHQQKSGGTLVLVSQDGIQRPPLHFPQGGHLLSFLSCLENGLLPRGQLEPPLWTQQGKGKVFPKLRKRSSIRSVDMEEMGTGRATDYVFRIIYPGHRHEHNAGDMIEMQGFGPSLPAWHLEPLCSQGSSCLSCSSSSSPHATPSHCSCIPDRLPLRLLCESMKRQIVSRAFYGWLAHCRHLSTVRTHLSALVHHSVIPPDRPPGASAGLTKDVWSKYQKDKKNYKELELLRQVYYGGIEHEIRKDVWPFLLGHYKFGMSKKEMEQVDAVVAARYQQVLAEWKACEVVVRQREREAHPATRTKFSSGSSIDSHVQRLIHRDSTISNDVFISVDDLEPPEPQDPEDSRPKPEQEAGPGTPGTAVVEQQHSVEFDSPDSGLPSSRNYSVASGIQSSLDEGQSVGFEEEDGGGEEGSSGPGPAAHTLREPQDPSQEKPQAGELEAGEELAAVCAAAYTIELLDTVALNLHRIDKDVQRCDRNYWYFTPPNLERLRDVMCSYVWEHLDVGYVQGMCDLLAPLLVTLDNDQLAYSCFSHLMKRMSQNFPNGGAMDTHFANMRSLIQILDSELFELMHQNGDYTHFYFCYRWFLLDFKRELLYEDVFAVWEVIWAARHISSEHFVLFIALALVEAYREIIRDNNMDFTDIIKFFNASWSSHPGCPEQRCGGPHLCPAHSWRVLRNPGGPSPKAGMSRI

SEQ ID NO: 887918 - protein, 694 aa, Homo sapiens
MGSAEDAVKEKLLWNVKKEVKQIMEEAVTRKFVHEDSSHIIALCGAVEACLLHQLRRRAAGFLRSDKMAALFTKVGKTCPVAGEICHKVQELQQQAEGRKPSGVSQEALRRQGSASGKAPALSPQALKHVWVRTALIEKVLDKVVQYLAENCSKYYEKEALLADPVFGPILASLLVGPCALEYTKLKTADHYWTDPSADELVQRHRIRGPPTRQDSPAKRPALGIRKRHSSGSASEDRLAACARECVESLHQNSRTRLLYGKNHVLVQPKEDMEAVPGYLSLHQSAESLTLKWTPNQLMNGTLGDSELEKSVYWDYALVVPFSQVVCIHCHQQKSGGTLVLVSQDGIQRPPLHFPQGGHLLSFLSCLENGLLPRGQLEPPLWTQQGKGKVFPKLRKRSSIRSVDMEEMGTGRATDYVFRIIYPGHRHEHNAGDMIEMQGFGPSLPAWHLEPLCSQGSSCLSCSSSSSPHATPSHCSCIPDRLPLRLLCESMKRQIVSRAFYGWLAHCRHLSTVRTHLSALVHHSVIPPDRPPGASAGLTKDVWSKYQKDKKNYKELELLRQVYYGGIEHEIRKDVWPFLLGHYKFGMSKKEMEQVDAVVAARYQQVLAEWKACEVVVRQREREAHPATRTKFSSGSSIDSHVQRLIHRDSTISNDVSQTGPGGLGVSGATRVLCTVVLSTSLTSGNWWGPARKA

SEQ ID NO: 887919 - protein, 111 aa, Homo sapiens
MGLTQLGHGDCGGCTVLTPRVPQNYKELELLRQVYYGGIEHEIRKDVWPFLLGHYKFGMSKKEMEQVRGACSHGADEMGSWARGRQGGDLGSLSPFPAGKKHGRAAPPSLP

SEQ ID NO: 887920 - protein, 988 aa, Homo sapiens
MGSAEDAVKEKLLWNVKKEVKQIMEEAVTRKFVHEDSSHIIALCGAVEACLLHQLRRRAAGFLRSDKMAALFTKVGKTCPVAGEICHKVQELQQQAEGRKPSGVSQEALRRQGSASGKAPALSPQALKHVWVRTALIEKVLDKVVQYLAENCSKYYEKEALLADPVFGPILASLLVGPCALEYTKLKTADHYWTDPSADELVQRHRIRGPPTRQDSPAKRPALGIRKRHSSGSASEDRLAACARECVESLHQNSRTRLLYGKNHVLVQPKEDMEAVPGYLSLHQSAESLTLKWTPNQLMNGTLGDSELEKSVYWDYALVVPFSQVVCIHCHQQKSGGTLVLVSQDGIQRPPLHFPQGGHLLSFLSCLENGLLPRGQLEPPLWTQQGKGKVFPKLRKRSSIRSVDMEEMGTGRATDYVFRIIYPGHRHEHNAGDMIEMQGFGPSLPAWHLEPLCSQGSSCLSCSSSSSPHATPSHCSCIPDRLPLRLLCESMKRQIVSRAFYGWLAHCRHLSTVRTHLSALVHHSVIPPDRPPGASAGLTKDVWSKYQKDKKNYKELELLRQVYYGGIEHEIRKDVWPFLLGHYKFGMSKKEMEQVDAVVAARYQQVLAEWKACEVVVRQREREAHPATRTKFSSGSSIDSHVQRLIHRDSTISNDVFISVDDLEPPEPQDPEDSRPKPEQEAGPGTPGTAVVEQQHSVEFDSPDSGLPSSRNYSVASGIQSSLDEGQSVGFEEEDGGGEEGSSGPGPAAHTLREPQDPSQEKPQAGELEAGEELAAVCAAAYTIELLDTVALNLHRIDKDVQRCDRNYWYFTPPNLERLRDVMCSYVWEHLDVGYVQGMCDLLAPLLVTLDNDQLAYSCFSHLMKRMSQNFPNGGAMDTHFANMRSLIQILDSELFELMHQNGDYTHFYFCYRWFLLDFKRELLYEDVFAVWEVIWAARHISSEHFVLFIALALVEAYREIIRDNNMDFTDIIKFFNADHPIVHPCCP

SEQ ID NO: 887921 - protein, 935 aa, Homo sapiens
MGSAEDAVKEKLLWNVKKEVKQIMEEAVTRKFVHEDSSHIIALCGAVEACLLHQLRRRAAGFLRSDKMAALFTKVGKTCPVAGEICHKVQELQQQAEGRKPSGVSQEALRRQGSASGKAPALSPQALKHVWVRTALIEKVLDKVVQYLAENCSKYYEKEALLADPVFGPILASLLVGPCALEYTKLKTADHYWTDPSADELVQRHRIRGPPTRQDSPAKRPALGIRKRHSSGSASEDRLAACARECVESLHQNSRTRLLYGKNHVLVQPKEDMEAVPGYLSLHQSAESLTLKWTPNQLMNGTLGDSELEKSVYWDYALVVPFSQVVCIHCHQQKSGGTLVLVSQDGIQRPPLHFPQGGHLLSFLSCLENGLLPRGQLEPPLWTQQGKGKVFPKLRKRSSIRSVDMEEMGTGRATDYVFRIIYPGHRHEHNAGDMIEMQGFGPSLPAWHLEPLCSQGSSCLSCSSSSSPHATPSHCSCIPDRLPLRLLCESMKRQIVSRAFYGWLAHCRHLSTVRTHLSALVHHSVIPPDRPPGASAGLTKDVWSKYQKDKKNYKELELLRQVYYGGIEHEIRKDVWPFLLGHYKFGMSKKEMEQVDAVVAARYQQVLAEWKACEVVVRQREREAHPATRTKFSSGSSIDSHVQRLIHRDSTISNDVFISVDDLEPPEPQDPEDSRPKPEQEAGPGTPGTAVVEQQHSVEFDSPDSGLPSSRNYSVASGIQSSLDEGQSVGFEEEDGGGEEGSSGPGPAAHTLREPQDPSQEKPQAGELEAGEELAAVCAAAYTIELLDTVALNLHRIDKDVQRCDRNYWYFTPPNLERLRDVMCSYVWEHLDVGYVQGMCDLLAPLLVTLDNDQLAYSCFSHLMKRMSQNFPNGGAMDTHFANMRSLIQILDSELFELMHQNGDYTHFYFCYRWFLLDFKRGKLLDWIMGLRSGT

SEQ ID NO: 887922 - protein, 466 aa, Homo sapiens
MKVRSAGGDGDALCVTEEDLAGDDEDMPTFPCTQKGRPGPRCSRCQKNLSLHTSVRILYLFLALLLVAVAVLASLVFRKVDSLSEDISLTQSIYDKKLVLMQKNLQGLDPKALNNCSFCHEAGQLGPEIRKLQEELEGIQKLLLAQEVQLDQTLQAQEVLSTTSRQISQEMGSCSFSIHQVNQSLGLFLAQVRGWQATTAGLDLSLKDLTQECYDVKAAVHQINFTVGQTSEWIHGIQRKTDEETLTLQKIVTDWQNYTRLFSGLRTTSTKTGEAVKNIQATLGASSQRISQNSESMHDLVLQVMGLQLQLDNISSFLDDHEENMHDLQYHTHYAQNRTVERFESLEGRMASHEIEIGTIFTNINATDNHVHSMLKYLDDVRLSCTLGFHTHAEELYYLNKSVSIMLGTTDLLRERFSLLSARLDLNVRNLSMIVEEMKAVDTQHGEILRNVTILRGHTLFSHNRI

SEQ ID NO: 887923 - protein, 606 aa, Homo sapiens
MKVRSAGGDGDALCVTEEDLAGDDEDMPTFPCTQKGRPGPRCSRCQKNLSLHTSVRILYLFLALLLVAVAVLASLVFRKVDSLSEDISLTQSIYDKKLVLMQKNLQGLDPKALNNCSFCHEAGQLGPEIRKLQEELEGIQKLLLAQEVQLDQTLQAQEVLSTTSRQISQEMGSCSFSIHQVNQSLGLFLAQVRGWQATTAGLDLSLKDLTQECYDVKAAVHQINFTVGQTSEWIHGIQRKTDEETLTLQKIVTDWQNYTRLFSGLRTTSTKTGEAVKNIQATLGASSQRISQNSESMHDLVLQVMGLQLQLDNISSFLDDHEENMHDLQYHTHYAQNRTVERFESLEGRMASHEIEIGTIFTNINATDNHVHSMLKYLDDVRLSCTLGFHTHAEELYYLNKSVSIMLGTTDLLRERFSLLSARLDLNVRNLSMIVEEMKAVDTQHGEILRNVTILRGAPGPPGPRGFKGDMGVKGPVGGRGPKGDPGSLGPLGPQGPQGQPGEAGPVGERGPVGPRGFPGLKGSKGSFGTGGPRGQPGPKGDIGPPGPEGPPGSPGPSGPQGKPGIAGKTGSPGQRGAMGPKGEPGIQGPPGLPGPPGPPGSQSFY

SEQ ID NO: 887924 - protein, 71 aa, Homo sapiens
RERFSLLSARLDLNVRNLSMIVEEMKAVDTQHGEILRNVTILRGKSWVQVGLLQSFQLRLGDLAGHRSTWF

SEQ ID NO: 887925 - protein, 128 aa, Homo sapiens
AVVSTQSRHYGRGRCFSLKMAASAARGAAALRRSINQPVAFVRRIPWTAASSQLKEHFAQFGHVRRCILPFDKETGFHRGLGWVQFSSEEGLRNALQQENHIIDGVKVQVHTRRPKLPQTSDDEKKDF

SEQ ID NO: 887926 - protein, 128 aa, Homo sapiens; identical to SEQ ID NO: 887925

SEQ ID NO: 887927 - protein, 128 aa, Homo sapiens; identical to SEQ ID NO: 887925

SEQ ID NO: 887928 - protein, 302 aa, Homo sapiens
EKHISIEEEHLRRMEEARLQLKDQLLCLETEQESILGVIGKEIDAACKTFSKDSVEKLKVFSSGPDIHYDPHRWLAESKTKLQWLCEELKERENREKNLRHQLMLCRQQLRNLTENKESELQCLFQQIERQEQLLDEIHREKRDLLEETQRKDEEMGSLQDRVIALETSTQVALDHLESVPEKLSLLEDFKDFRDSCSSSERTDGRYSKYRVRRNSLQHHQDDTKYRTKSFKGDRTFLEGSHTRGLDHSSSWQDHSRFLSSPRFSYVNSFTKRTVAPDSASNKEDATMNGTSSQPKKEEYGS

SEQ ID NO: 887929 - protein, 117 aa, Homo sapiens
AVVSTQSRHYGRGRCFSLKMAASAARGAAALRRSINQPVAFVRRIPWTAASSQLKEHFAQFGHVRRCILPFDKETGFHRGLGWVQFSSEEGLRNALQQENHIIDGVKVNLFLCQIHT

SEQ ID NO: 887930 - protein, 128 aa, Homo sapiens; identical to SEQ ID NO: 887925

SEQ ID NO: 887931 - protein, 220 aa, Homo sapiens
EKHISIEEEHLRRMEEARLQLKDQLLCLETEQESILGVIGKEIDAACKTFSKDSVEKLKVFSSGPDIHYDPHRWLAESKTKLQWLCEELKERENREKNLRHQLMLCRQQLRNLTENKESELQCLFQQIERQEQLLDEIHREKRGQLKEHFAQFGHVRRCILPFDKETGFHRGLGWVQFSSEEGLRNALQQENHIIDGVKVQVHTRRPKLPQTSDDEKKDF

SEQ ID NO: 887932 - protein, 128 aa, Homo sapiens; identical to SEQ ID NO: 887925

SEQ ID NO: 887933 - protein, 132 aa, Homo sapiens
AVVSTQSRHYGRGRCFSLKMAASAARGAAALRRSINQPVAFVRRIPWTAASSQLKEHFAQFGHVRRCILPFDKETGFHRGLGWVQFSSEEGLRNALQQENHIIDGVKVQVHTRRPKLPQTSSESKSGSRARM

SEQ ID NO: 887934 - protein, 123 aa, Homo sapiens
AVVSTQSRHYGRGRCFSLKMAASAARGAAALRRSINQPVAFVRRIPWTAASSQLKEHFAQFGHVRRCILPFDKETGFHRGLGWVQFSSEEGLRNALQQENHIIDGVKVQGSHLGRPKTLPPNI

SEQ ID NO: 887935 - protein, 129 aa, Homo sapiens
MATANGAVENGQPDRKPPALPRPIRNLEVKFTKIFINNEWHESKSGKKFATCNPSTREQICEVEEGDKPDVDKAVEAAQVAFQRGSPWRRLDALSRGRLLHQLADLVERDRATLAFEEGSSHCSHPRAS

SEQ ID NO: 887936 - protein, 103 aa, Homo sapiens [sequence omitted]

SEQ ID NO: 887937 - protein, 469 aa, Homo sapiens
MATANGAVENGQPDRKPPALPRPIRNLEVKFTKIFINNEWHESKSGKKFATCNPSTREQICEVEEGDKPDVDKAVEAAQVAFQRGSPWRRLDALSRGRLLHQLADLVERDRATLAMDNVVCFTRHEPIGVCGAITPWNFPLLMLVWKLAPALCCGNTMVLKPAEQTPLTALYLGSLIKEAGFPPGVVNIVPGFGPTVGAAISSHPQINKIAFTGSTEVGKLVKEAASRSNLKRVTLELGGKNPCIVCADADLDLAVECAHQGVFFNQGQCCTAASRVFVEEQVYSEFVRRSVEYAKKRPVGDPFDVKTEQGPQIDQKQFDKILELIESGKKEGAKLECGGSAMEDKGLFIKPTVFSEVTDNMRIAKEEIFGPVQPILKFKSIEEVIKRANSTDYGLTAAVFTKNLDKALKLASALESGTVWINCYNALYAQAPFGGFKMSGNGRELGEYALAEYTEVKTVTIKLGDKNP

SEQ ID NO: 887938 - protein, 512 aa, Homo sapiens
MATANGAVENGQPDRKPPALPRPIRNLEVKFTKIFINNEWHESKSGKKFATCNPSTREQICEVEEGDKPDVDKAVEAAQVAFQRGSPWRRLDALSRGRLLHQLADLVERDRATLAALETMDTGKPFLHAFFIDLEGCIRTLRYFAGWADKIQGKTIPTDDNVVCFTRHEPIGVCGAITPWNFPLLMLVWKLAPALCCGNTMVLKPAEQTPLTALYLGSLIKEAGFPPGVVNIVPGFGPTVGAAISSHPQINKIAFTGSTEVGKLVKEAASRSNLKRVTLELGGKNPCIVCADADLDLAVECAHQGVFFNQGQCCTAASRVFVEEQVYSEFVRRSVEYAKKRPVGDPFDVKTEQGPQIDQKQFDKILELIESGKKEGAKLECGGSAMEDKGLFIKPTVFSEVTDNMRIAKEEIFGPVQPILKFKSIEEVIKRANSTDYGLTAAVFTKNLDKALKLASALESGTVWINCYNALYAQAPFGGFKMSGNGRELGEYALAEYTEVKTVTIKLGDKNP

SEQ ID NO: 887939 - protein, 103 aa, Homo sapiens [sequence omitted]

SEQ ID NO: 887940 - protein, 512 aa, Homo sapiens; identical to SEQ ID NO: 887938

SEQ ID NO: 887941 - protein, 512 aa, Homo sapiens; identical to SEQ ID NO: 887938

SEQ ID NO: 887942 - protein, 512 aa, Homo sapiens; identical to SEQ ID NO: 887938

SEQ ID NO: 887943 - protein, 131 aa, Homo sapiens [sequence omitted]

SEQ ID NO: 887944 - protein, 249 aa, Homo sapiens
KPVRENATGMTKKTYVESILEGIKQSKQENLDIDVRYLIAVDRRGGPLVAKETVKLAEEFFLSTEGTVLGLDLSGDPTVGQAKDFLEPLLEAKKAGLKLALHLSEIPNQKKETQILLDLLPDRIGHGTFLNSGEGGSLDLVDFVRQHRIPLELCLTSNVKSQTVPSYDQHHFGFWYSIAHPSVICTDDKGVFATHLSQEYQLAAETFNLTQSQVWDLSYESINYIFASDSTRSELRKKWNHLKPRVLHI

SEQ ID NO: 887945 - protein, 249 aa, Homo sapiens; identical to SEQ ID NO: 887944

SEQ ID NO: 887946 - protein, 161 aa, Homo sapiens
KPVRENATGMTKKTYVESILEGIKQSKQENLDIDVRYLIAVDRRGGPLVAKETVKLAEEFFLSTEGTVLGLDLSGDPTVGQAKDFLEPLLEAKKAGLKLALHLSEIPNQKKETQILLDLLPDRIGHGTFLNSGEGGSLDLVDFVRQHRIPLGKAWSFRSSR

SEQ ID NO: 887947 - protein, 175 aa, Homo sapiens
STPRRENATGMTKKTYVESILEGIKQSKQENLDIDVRYLIAVDRRGGPLVAKETVKLAEEFFLSTEGTVLGLDLSGDPTVGQAKDFLEPLLEAKKAGLKLALHLSEIPNQKKETQILLDLLPDRIGHGTFLNSGEGGSLDLVDFVRQHRIPLELCLTSNVKSQTVPSYDQHHFGF

SEQ ID NO: 887948 - protein, 482 aa, Homo sapiens
MSEIRKDTLKAILLELECHFTWNLLKEDIDLFEVEDTIGQQLEFLTTKSRLALYNLLAYVKHLKGQNKDALECLEQAEEIIQQEHSDKEEVRSLVTWGNYAWVYYHMDQLEEAQKYTGKIGNVCKKLSSPSNYKLECPETDCEKGWALLKFGGKYYQKAKAAFEKALEVEPDNPEFNIGYAITVYRLDDSDREGSVKSFSLGPLRKAVTLNPDNSYIKVFLALKLQDVHAEAEGEKYIEEILDQISSQPYVLRYAAKFYRRKNSWNKALELLKKALEVTPTSSFLHHQMGLCYRAQMIQIKKATHNRPKGKDKLKVDELISSAIFHFKAAMERDSMFAFAYTDLANMYAEGGQYSNAEDIFRKALRLENITDDHKHQIHYHYGRFQEFHRKSENTAIHHYLEALKVKDRSPLRTKLTSALKKLSTKRLCHNALDVQSLSALGFVYKLEGEKRQAAEYYEKAQKIDPENAEFLTALCELRLSI

SEQ ID NO: 887949 - protein, 482 aa, Homo sapiens; identical to SEQ ID NO: 887948

SEQ ID NO: 887950 - protein, 287 aa, Homo sapiens
HLIQSPVSCSCWGWGLSFNKDTPRGRVQGLQRPGARTRTRTPTARLPAVPGAEERAIRGTAPPGRPAERCHHEVRVFLCLSSQALRRPWFQTGLLLFISSAVLRPFQGPSPSRPATGHLRWGPSPGALSRRAASEVGPAGEGGRVDASRESGPSPAPKKAGQGGGTGDAPREPVPSLASAVGTVRVCAGRRSPGRPVHPSHPTALLGSGDGDRAGSAAAASGKLVSACRAPRRCSGGSCYVPRVSLGLSRASLSSCHSLGVAYAVSPQPCRRHVRLPLPVCVSDFWV

SEQ ID NO: 887951 - protein, 496 aa, Homo sapiens
MAANCTSSWSLGESCNRPGLELPRSMASSETQLGNHDVDPEISHVNFRMFSCPKESDPIQALRKLTELCHLWLRPDLHTKEQILDMLVMEQFMISMPQELQVLVMMNGVQSCKDLEDLLRNNRRPKKWSVVTFHGKEYIVQDSDIEMAEAPSSVRDDLKDVSSQRASSVNQMRPGEGQAHRELQILPRVPALSRRQGEDFLLHKSIDVTGDPKSLRPKQTLEKDLKENREENPGLTSPEPQLPKSPTDLVRAKEGKDPPKIASVENVDADTPSACVVEREASTHSGNRGDALNLSSPKRSKPDASSISQEEPQGEATPVGNRESPGQAGMNSIHSPGPASPVSHPDGQEAKALPPFACDVCEKRFTCNSKLVIHKRSHTGERLFQCNLCGKRFMQLISLQFHQRTHTGERPYTCDVCQKQFTQKSYLKCHKRSHTGEKPFECKDCKKVFTYRGSLKEHQRIHSGEKPYKCSKCPRAFSRLKLLRRHQKTHPEATSQ

SEQ ID NO: 887952 - protein, 496 aa, Homo sapiens; identical to SEQ ID NO: 887951

SEQ ID NO: 887953 - protein, 496 aa, Homo sapiens; identical to SEQ ID NO: 887951

SEQ ID NO: 887954 - protein, 518 aa, Homo sapiens
AGGWLESASQTEKVGGRSREGDMAANCTSSWSLGESCNRPGLELPRSMASSETQLGNHDVDPEISHVNFRMFSCPKESDPIQALRKLTELCHLWLRPDLHTKEQILDMLVMEQFMISMPQELQVLVMMNGVQSCKDLEDLLRNNRRPKKWSVVTFHGKEYIVQDSDIEMAEAPSSVRDDLKDVSSQRASSVNQMRPGEGQAHRELQILPRVPALSRRQGEDFLLHKSIDVTGDPKSLRPKQTLEKDLKENREENPGLTSPEPQLPKSPTDLVRAKEGKDPPKIASVENVDADTPSACVVEREASTHSGNRGDALNLSSPKRSKPDASSISQEEPQGEATPVGNRESPGQAGMNSIHSPGPASPVSHPDGQEAKALPPFACDVCEKRFTCNSKLVIHKRSHTGERLFQCNLCGKRFMQLISLQFHQRTHTGERPYTCDVCQKQFTQKSYLKCHKRSHTGEKPFECKDCKKVFTYRGSLKEHQRIHSGEKPYKCSKCPRAFSRLKLLRRHQKTHPEATSQ

SEQ ID NO: 887955 - protein, 496 aa, Homo sapiens; identical to SEQ ID NO: 887951

SEQ ID NO: 887956 - protein, 496 aa, Homo sapiens; identical to SEQ ID NO: 887951

SEQ ID NO: 887957 - protein, 496 aa, Homo sapiens; identical to SEQ ID NO: 887951

SEQ ID NO: 887958 - protein, 366 aa, Homo sapiens
MIVRPPQPRETDSDIEMAEAPSSVRDDLKDVSSQRASSVNQMRPGEGQAHRELQILPRVPALSRRQGEDFLLHKSIDVTGDPKSLRPKQTLEKDLKENREENPGLTSPEPQLPKSPTDLVRAKEGKDPPKIASVENVDADTPSACVVEREASTHSGNRGDALNLSSPKRSKPDASSISQEEPQGEATPVGNRESPGQAGMNSIHSPGPASPVSHPDGQEAKALPPFACDVCEKRFTCNSKLVIHKRSHTGERLFQCNLCGKRFMQLISLQFHQRTHTGERPYTCDVCQKQFTQKSYLKCHKRSHTGEKPFECKDCKKVFTYRGSLKEHQRIHSGEKPYKCSKCPRAFSRLKLLRRHQKTHPEATSQ

SEQ ID NO: 887959 - protein, 229 aa, Homo sapiens
MAANCTSSWSLGESCNRPGLELPRSMASSETQLGNHDVDPEISHVNFRMFSCPKESDPIQALRKLTELCHLWLRPDLHTKEQILDMLVMEQFMISMPQELQVLVMMNGVQSCKDLEDLLRNNRRPKKWSVVTFHGKEYIVQDSDIEMAEAPSSVRDDLKDVSSQRASSVNQMRPGEGQAHRELQILPRVPALSRRQRECPRYELPGCLSKYVSSPLSFVFCFIMSIVFL

SEQ ID NO: 887960 - protein, 69 aa, Homo sapiens
FQLPVPTVHAPVNKREDLIVAEVCLSHFITGQTAVLVPTDRHHASKGAGIEYLNKQKCALCKLLHLDLL

SEQ ID NO: 887961 - protein, 260 aa, Homo sapiens
MDRHSSYIFIWLQLELCAMAVLLTKGEIRCYCDAAHCVATGYMCKSELSACFSRLLDPQNSNSPLTHGCLDSLASTTDICQAKQARNHSGTTIPTLECCHEDMCNYRGLHDVLSPPRGEASGQGNRYQHDGSRNLITKVQELTSSKELWFRAAVIAVPIAGGLILVLLIMLALRMLRSENKRLQDQRQQMLSRLHYSFHGHHSKKGQVAKLDLECMVPVSGHENCCLTCDKMRQADLSNDKILSLVHWGMYSGHGKLEFV

SEQ ID NO: 887962 - protein, 242 aa, Homo sapiens
MDRHSSYIFIWLQLELCAMAVLLTKGEIRCYCDAAHCVATGYMCKSELSACFSRLLDPQNSNSPLTHGCLDSLASTTDICQAKQARNHSGTTIPTLECCHEDMCNYRGLHDVLSPPRGEASGQGNRYQHDGSRNLITKVQELTSSKELWFRAAVIAVPIAGGLILVLLIMLALRMLRSENKRLQDQRQQMLSRLHYSFHGHHSKKGQVAKLDLECMVPVSGHENCCLTCDGMYSGHGKLEFV

SEQ ID NO: 887963 - protein, 260 aa, Homo sapiens; identical to SEQ ID NO: 887961

SEQ ID NO: 887964 - protein, 150 aa, Homo sapiens
MEFDHFLCTPLGQGNRYQHDGSRNLITKVQELTSSKELWFRAAVIAVPIAGGLILVLLIMLALRMLRSENKRLQDQRQQMLSRLHYSFHGHHSKKGQVAKLDLECMVPVSGHENCCLTCDKMRQADLSNDKILSLVHWGMYSGHGKLEFV

SEQ ID NO: 887965 - protein, 130 aa, Homo sapiens
MAVNLITKVQELTSSKELWFRAAVIAVPIAGGLILVLLIMLALRMLRSENKRLQDQRQQMLSRLHYSFHGHHSKKGQVAKLDLECMVPVSGHENCCLTCDKMRQADLSNDKILSLVHWGMYSGHGKLEFV

SEQ ID NO: 887966 - protein, 260 aa, Homo sapiens; identical to SEQ ID NO: 887961

SEQ ID NO: 887967 - protein, 260 aa, Homo sapiens; identical to SEQ ID NO: 887961

SEQ ID NO: 887968 - protein, 260 aa, Homo sapiens; identical to SEQ ID NO: 887961

SEQ ID NO: 887969 - protein, 121 aa, Homo sapiens
MDRHSSYIFIWLQLELCAMAVLLTKGEIRCYCDAAHCVATGYMCKSELSACFSRLLDPQNSNSPLTHGCLDSLASTTDICQAKQARNHSGTTIPTLECCHEDKETGISMMVAETLSPRCRS

SEQ ID NO: 887970 - protein, 66 aa, Homo sapiens
LWTQRKYVAVLSLIATIMLVQVSHMVKLTLMLLVAGAVATINLYAWRPVFDEYDHKRFREHESDEA

SEQ ID NO: 887971 - protein, 1128 aa, Homo sapiens
MPRNQGFSEPEYSAEYSAEYSVSLPSDPDRGVGRTHEISVRNSGSCLCLPRFMRLTFVPESLENLYQTYFKRQRHETLLVLVVFSSDKLAPLAVAGIGLVLDIILFVLCKKGLLPDRVTRRVLPYVLWLLITAQIFSYLGLNFARAHAASDTVGWQVFFVFSFFITLPLSLSPIVIISVVSCVVHTLVLGVTVAQQQQEELKGMQLLREILANVFLYLCAIAVGIMSYYMADRKHRKAFLEARQSLEVKMNLEEQSQQQENLMLSILPKHVADEMLKDMKKDESQKDQQQFNTMYMYRHENVSILFADIVGFTQLSSACSAQELVKLLNELFARFDKLAAKYHQLRIKILGDCYYCICGLPDYREDHAVCSILMGLAMVEAISYVREKTKTGVDMRVGVHTGTVLGGVLGQKRWQYDVWSTDVTVANKMEAGGIPGRVHISQSTMDCLKGEFDVEPGDGGSRCDYLEEKGIETYLIIASKPEVKKTATQNGLNGSALPNGAPASSKSSSPALIETKEPNGSAHSSGSTSEKPEEQDAQADNPSFPNPRRRLRLQDLADRVVDASEDEHELNQLLNEALLERESAQVVKKRNTFLLSMRFMDPEMETRYSVEKEKQSGAAFSCSCVVLLCTALVEILIDPWLMTNYVTFMVGEILLLILTICSLAAIFPRAFPKKLVAFSTWIDRTRWARNTWAMLAIFILVMANVVDMLSCLQYYTGPSNATAGMETEGSCLENPKYYNYVAVLSLIATIMLVQVSHMVKLTLMLLVAGAVATINLYAWRPVFDEYDHKRFREHDLPMVALEQMQGFNPGLNGTDRLPLVPSKYSMTVMVFLMMLSFYYFSRHVEKLARTLFLWKIEVHDQKERVYEMRRWNEALVTNMLPEHVARHFLGSKKRDEELYSQTYDEIGVMFASLPNFADFYTEESINNGGIECLRFLNEIISDFDSLLDNPKFRVITKIKTIGSTYMAASGVTPDVNTNGFASSNKEDKSERERWQHLADLADFALAMKDTLTNINNQSFNNFMLRIGMNKGGVLAGVIGARKPHYDIWGNTVNVASRMESTGVMGNIQVVEETQVILREYGFRFVRRGPIFVKGKGELLTFFLKGRDKLATFPNGPSVTLPHQVVDNS

SEQ ID NO: 887972 - protein, 1120 aa, Homo sapiens
MPRNQGFSEPEYSAEYSAEYSVSLPSDPDRGVGRTHEISVRNSGSCLCLPRFMRLTFVPESLENLYQTYFKRQRHETLLVLVVFSSDKLAPLAVAGIGLVLDIILFVLCKKGLLPDRVTRRVLPYVLWLLITAQIFSYLGLNFARAHAASDTVGWQVFFVFSFFITLPLSLSPIVIISVVSCVVHTLVLGVTVAQQQQEELKGMQLLREILANVFLYLCAIAVGIMSYYMADRKHRKAFLEARQSLEVKMNLEEQSQQQENLMLSILPKHVADEMLKDMKKDESQKDQQQFNTMYMYRHENVSILFADIVGFTQLSSACSAQELVKLLNELFARFDKLAAKYHQLRIKILGDCYYCICGLPDYREDHAVCSILMGLAMVEAISYVREKTKTGVDMRVGVHTGTVLGGVLGQKRWQYDVWSTDVTVANKMEAGGIPGRVHISQSTMDCLKGEFDVEPGDGGSRCDYLEEKGIETYLIIASKPEVKKTATQNGLNGSALPNGAPASSKSSSPALIETKEPNGSAHSSGSTSEKPEEQDAQADNPSFPNPRRRLRLQDLADRVVDASEDEHELNQLLNEALLERESAQVVKKRNTFLLSMRFMDPEMETRYSVEKEKQSGAAFSCSCVVLLCTALVEILIDPWLMTNYVTFMVGEILLLILTICSLAAIFPRAFPKKLVAFSTWIDRTRWARNTWAMLAIFILVMANVVDMLSCLQYYTGPSNATAGMETEGSCLENPKYYNYVAVLSLIATIMLVQVSHMVKLTLMLLVAGAVATINLYAWRPVFDEYDHKRFREHDLPMVALEQMQGFNPGLNGTDRLPLVPSKYSMTVMVFLMMLSFYYFSRHVEKLARTLFLWKIEVHDQKERVYEMRRWNEALVTNMLPEHVARHFLGSKKRDEELYSQTYDEIGVMFASLPNFADFYTEESINNGGIECLRFLNEIISDFDSLLDNPKFRVITKIKTIGSTYMAASGVTPDVNTNGFASSNKEDKSERERWQHLADLADFALAMKDTLTNINNQSFNNFMLRIGMNKGGVLAGVIGARKPHYDIWGNTVNVASRMESTGVMGNIQVCPVAQLARAQTRHENKTGTVLSHVPLPPTLALNSKSRGRDVGQVEKNLCNS

SEQ ID NO: 887973 - protein, 435 aa, Homo sapiens [sequence omitted]

SEQ ID NO: 887974 - protein, 1144 aa, Homo sapiens
MPRNQGFSEPEYSAEYSAEYSVSLPSDPDRGVGRTHEISVRNSGSCLCLPRFMRLTFVPESLENLYQTYFKRQRHETLLVLVVFAALFDCYVVVMCAVVFSSDKLAPLAVAGIGLVLDIILFVLCKKGLLPDRVTRRVLPYVLWLLITAQIFSYLGLNFARAHAASDTVGWQVFFVFSFFITLPLSLSPIVIISVVSCVVHTLVLGVTVAQQQQEELKGMQLLREILANVFLYLCAIAVGIMSYYMADRKHRKAFLEARQSLEVKMNLEEQSQQQENLMLSILPKHVADEMLKDMKKDESQKDQQQFNTMYMYRHENVSILFADIVGFTQLSSACSAQELVKLLNELFARFDKLAAKYHQLRIKILGDCYYCICGLPDYREDHAVCSILMGLAMVEAISYVREKTKTGVDMRVGVHTGTVLGGVLGQKRWQYDVWSTDVTVANKMEAGGIPGRVHISQSTMDCLKGEFDVEPGDGGSRCDYLEEKGIETYLIIASKPEVKKTATQNGLNGSALPNGAPASSKSSSPALIETKEPNGSAHSSGSTSEKPEEQDAQADNPSFPNPRRRLRLQDLADRVVDASEDEHELNQLLNEALLERESAQVVKKRNTFLLSMRFMDPEMETRYSVEKEKQSGAAFSCSCVVLLCTALVEILIDPWLMTNYVTFMVGEILLLILTICSLAAIFPRAFPKKLVAFSTWIDRTRWARNTWAMLAIFILVMANVVDMLSCLQYYTGPSNATAGMETEGSCLENPKYYNYVAVLSLIATIMLVQVSHMVKLTLMLLVAGAVATINLYAWRPVFDEYDHKRFREHDLPMVALEQMQGFNPGLNGTDRLPLVPSKYSMTVMVFLMMLSFYYFSRHVEKLARTLFLWKIEVHDQKERVYEMRRWNEALVTNMLPEHVARHFLGSKKRDEELYSQTYDEIGVMFASLPNFADFYTEESINNGGIECLRFLNEIISDFDSLLDNPKFRVITKIKTIGSTYMAASGVTPDVNTNGFASSNKEDKSERERWQHLADLADFALAMKDTLTNINNQSFNNFMLRIGMNKGGVLAGVIGARKPHYDIWGNTVNVASRMESTGVMGNIQVVEETQVILREYGFRFVRRGPIFVKGKGELLTFFLKGRDKLATFPNGPSVTLPHQVVDNS

SEQ ID NO: 887975 - protein, 325 aa, Homo sapiens
MTALSVAHALPSRLPLVPSKYSMTVMVFLMMLSFYYFSRHVEKLARTLFLWKIEVHDQKERVYEMRRWNEALVTNMLPEHVARHFLGSKKRDEELYSQTYDEIGVMFASLPNFADFYTEESINNGGIECLRFLNEIISDFDSLLDNPKFRVITKIKTIGSTYMAASGVTPDVNTNGFASSNKEDKSERERWQHLADLADFALAMKDTLTNINNQSFNNFMLRIGMNKGGVLAGVIGARKPHYDIWGNTVNVASRMESTGVMGNIQVVEETQVILREYGFRFVRRGPIFVKGKGELLTFFLKGRDKLATFPNGPSVTLPHQVVDNS

SEQ ID NO: 887976 - protein, 176 aa, Homo sapiens
GARYLVCFRVITKIKTIGSTYMAASGVTPDVNTNGFASSNKEDKSERERWQHLADLADFALAMKDTLTNINNQSFNNFMLRIGMNKGGVLAGVIGARKPHYDIWGNTVNVASRMESTGVMGNIQVCPVAQLARAQTRHENKTGTVLSHVPLPPTLALNSKSRGRDVGQVEKNLCNS

SEQ ID NO: 887977 - protein, 1012 aa, Homo sapiens
MPRNQGFSEPEYSAEYSAEYSVSLPSDPDRGVGRTHEISVRNSGSCLCLPRFMRLTFVPESLENLYQTYFKRQRHETLLVLVVFSSDKLAPLAVAGIGLVLDIILFVLCKKGLLPDRVTRRVLPYVLWLLITAQIFSYLGLNFARAHAASDTVGWQVFFVFSFFITLPLSLSPIVIISVVSCVVHTLVLGVTVAQQQQEELKGMQLLREILANVFLYLCAIAVGIMSYYMADRKHRKAFLEARQSLEVKMNLEEQSQQQENLMLSILPKHVADEMLKDMKKDESQKDQQQFNTMYMYRHENVSILFADIVGFTQLSSACSAQELVKLLNELFARFDKLAAKYHQLRIKILGDCYYCICGLPDYREDHAVCSILMGLAMVEAISYVREKTKTGVDMRVGVHTGTVLGGVLGQKRWQYDVWSTDVTVANKMEAGGIPGRVHISQSTMDCLKGEFDVEPGDGGSRCDYLEEKGIETYLIIASKPEVKKTATQNGLNGSALPNGAPASSKSSSPALIETKEPNGSAHSSGSTSEKPEEQDAQADNPSFPNPRRRLRLQDLADRVVDASEDEHELNQLLNEALLERESAQVVKKRNTFLLSMRFMDPEMETRYSVEKEKQSGAAFSCSCVVLLCTALVEILIDPWLMTNYVTFMVGEILLLILTICSLAAIFPRAFPKKLVAFSTWIDRTRWARNTWAMLAIFILVMANVVDMLSCLQYYTGPSNATAGMETEGSCLENPKYYNYVAVLSLIATIMLVQVSHMVKLTLMLLVAGAVATINLYAWRPVFDEYDHKRFREHDLPMVALEQMQGFNPGLNGTDRLPLVPSKYSMTVMVFLMMLSFYYFSRHVEKLARTLFLWKIEVHDQKERVYEMRRWNEALVTNMLPEHVARHFLGSKKRDEELYSQTYDEIGVMFASLPNFADFYTEESINNGGIECLRFLNEIISDFDSLLDNPKFRVITKIKTIGSTYMAASGVTPDVNTNGFASSNKVANPSSQRDEALPPRQEIGSPDLAWGK

SEQ ID NO: 887978 - protein, 1074 aa, Homo sapiens
MPRNQGFSEPEYSAEYSAEYSVSLPSDPDRGVGRTHEISVRNSGSCLCLPRFMRLTFVPESLENLYQTYFKRQRHETLLVLVVFSSDKLAPLAVAGIGLVLDIILFVLCKKGLLPDRVTRRVLPYVLWLLITAQIFSYLGLNFARAHAASDTVGWQVFFVFSFFITLPLSLSPIVIISVVSCVVHTLVLGVTVAQQQQEELKGMQLLREILANVFLYLCAIAVGIMSYYMADRKHRKAFLEARQSLEVKMNLEEQSQQQENLMLSILPKHVADEMLKDMKKDESQKDQQQFNTMYMYRHENVSILFADIVGFTQLSSACSAQELVKLLNELFARFDKLAAKYHQLRIKILGDCYYCICGLPDYREDHAVCSILMGLAMVEAISYVREKTKTGVDMRVGVHTGTVLGGVLGQKRWQYDVWSTDVTVANKMEAGGIPGRVHISQSTMDCLKGEFDVEPGDGGSRCDYLEEKGIETYLIIASKPEVKKTATQNGLNGSALPNGAPASSKSSSPALIETKEPNGSAHSSGSTSEKPEEQDAQADNPSFPNPRRRLRLQDLADRVVDASEDEHELNQLLNEALLERESAQVVKKRNTFLLSMRFMDPEMETRYSVEKEKQSGAAFSCSCVVLLCTALVEILIDPWLMTNYVTFMVGEILLLILTICSLAAIFPRAFPKKLVAFSTWIDRTRWARNTWAMLAIFILVMANVVDMLSCLQYYTGPSNATAGMETEGSCLENPKYYNYVAVLSLIATIMLVQVSHMVKLTLMLLVAGAVATINLYAWRPVFDEYDHKRFREHDLPMVALEQMQGFNPGLNGTDRLPLVPSKYSMTVMVFLMMLSFYYFSRHVEKLARTLFLWKIEVHDQKERVYEMRRWNEALVTNMLPEHVARHFLGSKKRDEELYSQTYDEIGVMFASLPNFADFYTEESINNGGIECLRFLNEIISDFDSLLDNPKFRVITKIKTIGSTYMAASGVTPDVNTNGFASSNKEDKSERERWQHLADLADFALAMKDTLTNINNQSFNNFMLRIGEHTPAGLPRSRLPSHAGAWPTTRRDMRLRTTEAIRVGRFTHSQGKET

SEQ ID NO: 887979 - protein, 715 aa, Homo sapiens
MPRNQGFSEPEYSAEYSAEYSVSLPSDPDRGVGRTHEISVRNSGSCLCLPRFMRLTFVPESLENLYQTYFKRQRHETLLVLVVFSSDKLAPLAVAGIGLVLDIILFVLCKKGLLPDRVTRRVLPYVLWLLITAQIFSYLGLNFARAHAASDTVGWQVFFVFSFFITLPLSLSPIVIISVVSCVVHTLVLGVTVAQQQQEELKGMQLLREILANVFLYLCAIAVGIMSYYMADRKHRKAFLEARQSLEVKMNLEEQSQQQENLMLSILPKHVADEMLKDMKKDESQKDQQQFNTMYMYRHENVSILFADIVGFTQLSSACSAQELVKLLNELFARFDKLAAKYHQLRIKILGDCYYCICGLPDYREDHAVCSILMGLAMVEAISYVREKTKTGVDMRVGVHTGTVLGGVLGQKRWQYDVWSTDVTVANKMEAGGIPGRVHISQSTMDCLKGEFDVEPGDGGSRCDYLEEKGIETYLIIASKPEVKKTATQNGLNGSALPNGAPASSKSSSPALIETKEPNGSAHSSGSTSEKPEEQDAQADNPSFPNPRRRLRLQDLADRVVDASEDEHELNQLLNEALLERESAQVVKKRNTFLLSMRFMDPEMETRYSVEKEKQSGAAFSCSCVVLLCTALVEILIDPWLMTNYVTFMVGEILLLILTICSLAAIFPRAFPKKLVAFSTWIDRTRWARNTWAMLAIFILVMANVVDMVSSCCPC

SEQ ID NO: 887980 - protein, 1144 aa, Homo sapiens; identical to SEQ ID NO: 887974

SEQ ID NO: 887981 - protein, 745 aa, Homo sapiens
MPRNQGFSEPEYSAEYSAEYSVSLPSDPDRGVGRTHEISVRNSGSCLCLPRFMRLTFVPESLENLYQTYFKRQRHETLLVLVVFAALFDCYVVVMCAVVFSSDKLAPLAVAGIGLVLDIILFVLCKKGLLPDRVTRRVLPYVLWLLITAQIFSYLGLNFARAHAASDTVGWQVFFVFSFFITLPLSLSPIVIISVVSCVVHTLVLGVTVAQQQQEELKGMQLLREILANVFLYLCAIAVGIMSYYMADRKHRKAFLEARQSLEVKMNLEEQSQQQENLMLSILPKHVADEMLKDMKKDESQKDQQQFNTMYMYRHENVSILFADIVGFTQLSSACSAQELVKLLNELFARFDKLAAKYHQLRIKILGDCYYCICGLPDYREDHAVCSILMGLAMVEAISYVREKTKTGVDMRVGVHTGTVLGGVLGQKRWQYDVWSTDVTVANKMEAGGIPGRVHISQSTMDCLKGEFDVEPGDGGSRCDYLEEKGIETYLIIASKPEVKKTATQNGLNGSALPNGAPASSKSSSPALIETKEPNGSAHSSGSTSEKPEEQDAQADNPSFPNPRRRLRLQDLADRVVDASEDEHELNQLLNEALLERESAQVVKKRNTFLLSMRFMDPEMETRYSVEKEKQSGAAFSCSCVVLLCTALVEILIDPWLMTNYVTFMVGEILLLILTICSLAAIFPRAFPKKLVAFSTWIDRTRWARNTWAMLAIFILVMANVVDMAHAARRRRRGHHQPLCLASRL

SEQ ID NO: 887982 - protein, 1092 aa, Homo sapiens
MPRNQGFSEPEYSAEYSAEYSVSLPSDPDRGVGRTHEISVRNSGSCLCLPRFMRLTFVPESLENLYQTYFKRQRHETLLVLVVFSSDKLAPLAVAGIGLVLDIILFVLCKKGLLPDRVTRRVLPYVLWLLITAQIFSYLGLNFARAHAASDTVGWQVFFVFSFFITLPLSLSPIVIISVVSCVVHTLVLGVTVAQQQQEELKGMQLLREILANVFLYLCAIAVGIMSYYMADRKHRKAFLEARQSLEVKMNLEEQSQQQENLMLSILPKHVADEMLKDMKKDESQKDQQQFNTMYMYRHENVSILFADIVGFTQLSSACSAQELVKLLNELFARFDKLAAKYHQLRIKILGDCYYCICGLPDYREDHAVCSILMGLAMVEAISYVREKTKTGVDMRVGVHTGTVLGGVLGQKRWQYDVWSTDVTVANKMEAGGIPGRVHISQSTMDCLKGEFDVEPGDGGSRCDYLEEKGIETYLIIASKPEVKKTATQNGLNGSALPNGAPASSKSSSPALIETKEPNGSAHSSGSTSEKPEEQDAQADNPSFPNPRRRLRLQDLADRVVDASEDEHELNQLLNEALLERESAQVVKKRNTFLLSMRFMDPEMETRYSVEKEKQSGAAFSCSCVVLLCTALVEILIDPWLMTNYVTFMVGEILLLILTICSLAAIFPRAFPKKLVAFSTWIDRTRWARNTWAMLAIFILVMANVVDMLSCLQYYTGPSNATAGMETEGSCLENPKYYNYVAVLSLIATIMLVQVSHMVKLTLMLLVAGAVATINLYAWRPVFDEYDHKRFREHDLPMVALEQMQGFNPGLNGTDRLPLVPSKYSMTVMVFLMMLSFYYFSRHVEKLARTLFLWKIEVHDQKERVYEMRRWNEALVTNMLPEHVARHFLGSKKRDEELYSQTYDEIGVMFASLPNFADFYTEESINNGGIECLRFLNEIISDFDSLLDNPKFRVITKIKTIGSTYMAASGVTPDVNTNGFASSNKEDKSERERWQHLADLADFALAMKDTLTNINNQSFNNFMLRIGMNKGGVLAGVIGARKPHYDIWGNTVNVASRMESTGVMGNIQWRLAEKLHERGKGTEEQAVAVSRW

SEQ ID NO: 887983 - protein, 404 aa, Homo sapiens
METEGSCLENPKYYNYVAVLSLIATIMLVQVSHMVKLTLMLLVAGAVATINLYAWRPVFDEYDHKRFREHDLPMVALEQMQGFNPGLNGTDRLPLVPSKYSMTVMVFLMMLSFYYFSRHVEKLARTLFLWKIEVHDQKERVYEMRRWNEALVTNMLPEHVARHFLGSKKRDEELYSQTYDEIGVMFASLPNFADFYTEESINNGGIECLRFLNEIISDFDSLLDNPKFRVITKIKTIGSTYMAASGVTPDVNTNGFASSNKEDKSERERWQHLADLADFALAMKDTLTNINNQSFNNFMLRIGMNKGGVLAGVIGARKPHYDIWGNTVNVASRMESTGVMGNIQVVEETQVILREYGFRFVRRGPIFVKGKGELLTFFLKGRDKLATFPNGPSVTLPHQVVDNS

SEQ ID NO: 887984 - protein, 295 aa, Homo sapiens
MLSFYYFSRHVEKLARTLFLWKIEVHDQKERVYEMRRWNEALVTNMLPEHVARHFLGSKKRDEELYSQTYDEIGVMFASLPNFADFYTEESINNGGIECLRFLNEIISDFDSLLDNPKFRVITKIKTIGSTYMAASGVTPDVNTNGFASSNKEDKSERERWQHLADLADFALAMKDTLTNINNQSFNNFMLRIGMNKGGVLAGVIGARKPHYDIWGNTVNVASRMESTGVMGNIQVVEETQVILREYGFRFVRRGPIFVKGKGELLTFFLKGRDKLATFPNGPSVTLPHQVVDNS

SEQ ID NO: 887985 - protein, 98 aa, Homo sapiens
QRWAASRVVSTVMTETYDLAYSDVDITQASRAARYAFRFHLQSLPSLPLRGPDHCEQEGGRAGTKLPLPLGFPGLWREHRRGSSTSDRAWWGRTWLPF

SEQ ID NO: 887986 - protein, 936 aa, Homo sapiens
MPRNQGFSEPEYSAEYSAEYSVSLPSDPDRGVGRTHEISVRNSGSCLCLPRFMRLTFVPESLENLYQTYFKRQRHETLLVLVVFSSDKLAPLAVAGIGLVLDIILFVLCKKGLLPDRVTRRVLPYVLWLLITAQIFSYLGLNFARAHAASDTVGWQVFFVFSFFITLPLSLSPIVIISVVSCVVHTLVLGVTVAQQQQEELKGMQLLREILANVFLYLCAIAVGIMSYYMADRKHRKAFLEARQSLEVKMNLEEQSQQQENLMLSILPKHVADEMLKDMKKDESQKDQQQFNTMYMYRHENVSILFADIVGFTQLSSACSAQELVKLLNELFARFDKLAAKYHQLRIKILGDCYYCICGLPDYREDHAVCSILMGLAMVEAISYVREKTKTGVDMRVGVHTGTVLGGVLGQKRWQYDVWSTDVTVANKMEAGGIPGRVHISQSTMDCLKGEFDVEPGDGGSRCDYLEEKGIETYLIIASKPEVKKTATQNGLNGSALPNGAPASSKSSSPALIETKEPNGSAHSSGSTSEKPEEQDAQADNPSFPNPRRRLRLQDLADRVVDASEDEHELNQLLNEALLERESAQVVKKRNTFLLSMRFMDPEMETRYSVEKEKQSGAAFSCSCVVLLCTALVEILIDPWLMTNYVTFMVGEILLLILTICSLAAIFPRAFPKKLVAFSTWIDRTRWARNTWAMLAIFILVMANVVDMLSCLQYYTGPSNATAGMETEGSCLENPKYYNYVAVLSLIATIMLVQVSHMVKLTLMLLVAGAVATINLYAWRPVFDEYDHKRFREHDLPMVALEQMQGFNPGLNGTDRLPLVPSKYSMTVMVFLMMLSFYYFSRHVSAACTIPALCPQPTGPPEKQPWDLRAQAPKEWGFPSPSPTREPGQATAFSIQAPSSVTQEDSSSPLPSDPLQDGEGSMGVKVGGDRVKAQTS

SEQ ID NO: 887987 - protein, 106 aa, Homo sapiens
IKSFIQLESDCGNSVNITYLRSAGTLLTHATGPHHRPGRQELEGLIIAHCTPERLLPGPVSFILKLSSKGYSKLALIPCTVPGALPHGGYFVAIAGLSLNVALGQS

SEQ ID NO: 887988 - protein, 150 aa, Homo sapiens
MSKISQQNSTPGVNGISVIHTQAHASGLQQVPQLVPAGPGGGGKAVAPSKQSKKSSPMDRNSDEYRQRRERNNMAVKKSRLKSKQKAQDTLQRVNQLKEENERLEAKIKLLTKELSVLKDLFLEHAHNLADNVQSISTENTTADGDNAGQ

SEQ ID NO: 887989 - protein, 150 aa, Homo sapiens; identical to SEQ ID NO: 887988

SEQ ID NO: 887990 - protein, 103 aa, Homo sapiens
MSKISQQNSTPGVNGISVIHTQAHASGLQQVPQLVPAGPGGGGKAVAPSKQSKKSSPMDRNSDEYRQRRERNNMAVKKSRLKSKQKAQDTLQRVNQLKEENGI

SEQ ID NO: 887991 - protein, 150 aa, Homo sapiens; identical to SEQ ID NO: 887988

SEQ ID NO: 887992 - protein, 105 aa, Homo sapiens
  misc_feature (1)..(1): Xaa can be any naturally occurring amino acid
  misc_feature (6)..(6): Xaa can be any naturally occurring amino acid
XAWNLXEKWKHCSMHGSPQASVCFEDVAMAFTQEEWEQLDLAQRTLYREVTLETWEHIVSLGLFLSKSDVISQLEQEEDLCRAEQEAPREIWRQTTCHAYRENDI

SEQ ID NO: 887993 - protein, 573 aa, Homo sapiens [sequence omitted]

SEQ ID NO: 887994 - protein, 573 aa, Homo sapiens [sequence omitted]

SEQ ID NO: 887995 - protein, 573 aa, Homo sapiens [sequence omitted]

SEQ ID NO: 887996 - protein, 756 aa, Homo sapiens
MILLALSVSAFCWASFLGGPPDWSSEDLCPLHSGLFRCREEMEARSMLVPPQASVCFEDVAMAFTQEEWEQLDLAQRTLYREVTLETWEHIVSLGLFLSKSDVISQLEQEEDLCRAEQEAPRDWKATLEENRLNSEKDRAREELSHHVEVYRSGPEEPPSLVLGKVQDQSNQLREHQENSLRFMVLTSERLFAQREHCELELGGGYSLPSTLSLLPTTLPTSTGFPKPNSQVKELKQNSAFINHEKNGADGKHCESHQCARAFCQSIYLSKLGNVETGKKNPYEYIVSGDSLNYGSSLCFHGRTFSVKKSDDCKDYGNLFSHSVSLNEQKPVHFGKSQYECDECRETCSESLCLVQTERSGPGETPFRCEERCAAFPMASSFSDCNIIQTTEKPSVCNQCGKSFSCCKLIHQRTHTGEKPFECTQCGKSFSQSYDLVIHQRTHTGEKPYECDLCGKSFTQRSKLITHQRIHTGEKPYQCIECRKSFRWNSNLIVHQRIHTGEKPYECTHCGKSFSQSYELVTHKRTHTGEKPFKCTQCGKSFSQKYDLVVHQRTHTGEKPYECNLCGKSFSQSSKLITHQRIHTGEKPYQCIECGKSFRWNSNLVIHQRIHTGEKPYDCTHCGKSFSQSYQLVAHKRTHTGEKPYECNECGKAFNRSTQLIRHLQIHTGEKPYKCNQCNKAFARSSYLVMHQRTHTGEKPFECSQCGKAFSGSSNLLSHHRIHSGEKPYECSDCGKSFRQRSQLVVHRRTHTGEKP

SEQ ID NO: 887997 - protein, 573 aa, Homo sapiens [sequence omitted]

SEQ ID NO: 887998 - protein, 101 aa, Homo sapiens
TSKMVRYEAGFGEFTVSRVRLERRTRPEPPQVIWACRRNEQGLRGVPHAARPSKGRGLMGSGSLRPQGRGRPVQSGFPCRSARLGLSLSGGSPAAELGRNL

SEQ ID NO: 887999 - protein, 101 aa, Homo sapiens; identical to SEQ ID NO: 887998

SEQ ID NO: 888000 - protein, 106 aa, Homo sapiens
MEARSMLVPPQASVCFEDVAMAFTQEEWEQLDLAQRTLYREVTLETWEHIVSLGLFLSKSDVISQLEQEEDLCRAEQEAPRGTSGLSQVTGVVADGSFRFPVWDFT

SEQ ID NO: 888001 - protein, 101 aa, Homo sapiens; identical to SEQ ID NO: 887998

SEQ ID NO: 888002 - protein, 34 aa, Homo sapiens
MRKLRPGEVKETRSESYSGRSLFSLKKLKYFVKF

SEQ ID NO: 888003 - protein, 715 aa, Homo sapiens [sequence omitted]

SEQ ID NO: 888004 - protein, 715 aa, Homo sapiens [sequence omitted]

SEQ ID NO: 888005 - protein, 573 aa, Homo sapiens [sequence omitted]

SEQ ID NO: 888006 - protein, 715 aa, Homo sapiens [sequence omitted]

SEQ ID NO: 888007 - protein, 573 aa, Homo sapiens [sequence omitted]

SEQ ID NO: 888008 - protein, 505 aa, Homo sapiens
PTYVLGTRLGVSCQSIYLSKLGNVETGKKNPYEYIVSGDSLNYGSSLCFHGRTFSVKKSDDCKDYGNLFSHSVSLNEQKPVHFGKSQYECDECRETCSESLCLVQTERSGPGETPFRCEERCAAFPMASSFSDCNIIQTTEKPSVCNQCGKSFSCCKLIHQRTHTGEKPFECTQCGKSFSQSYDLVIHQRTHTGEKPYECDLCGKSFTQRSKLITHQRIHTGEKPYQCIECRKSFRWNSNLIVHQRIHTGEKPYECTHCGKSFSQSYELVTHKRTHTGEKPFKCTQCGKSFSQKYDLVVHQRTHTGEKPYECNLCGKSFSQSSKLITHQRIHTGEKPYQCIECGKSFRWNSNLVIHQRIHTGEKPYDCTHCGKSFSQSYQLVAHKRTHTGEKPYECNECGKAFNRSTQLIRHLQIHTGEKPYKCNQCNKAFARSSYLVMHQRTHTGEKPFECSQCGKAFSGSSNLLSHHRIHSGEKPYECSDCGKSFRQRSQLVVHRRTHTGEKP

SEQ ID NO: 888009 - protein, 101 aa, Homo sapiens; identical to SEQ ID NO: 887998

SEQ ID NO: 888010 - protein, 108 aa, Homo sapiens
MEARSMLVPPQASVCFEDVAMAFTQEEWEQLDLAQRTLYREVTLETWEHIVSLAGARRGPVQGRAGGPPRNEAQQKAETVQGQKDLRECGQLEPLRSRPEGSERVWPA

SEQ ID NO: 888011 - protein, 139 aa, Homo sapiens
MEARSMLVPPQASVCFEDVAMAFTQEEWEQLDLAQRTLYREVTLETWEHIVSLGLFLSKSDVISQLEQEEDLCRAEQEAPREKGMLPGSFLGLPIEDRFSLLEGCLIQFPQQLPLAQERGPAKSRDGTGPEGSERVWPA

SEQ ID NO: 888012 - protein, 173 aa, Homo sapiens
MLPPPPRQPPPQARAARGAVRLQRPFLRSPLGVLRLLQLLAGAAFWITIATSKYQGPVHFALFVSVLFWLLTLGLYFLTLLGKHELVPVLGSRWLMVNVAHDVLAAALYGAATGIMSDQMQRHSYCNLKDYPLPCAYHAFLAAAVCGGVCHGLYLLSALYGCGRRCQGKQEVA

SEQ ID NO: 888013 - protein, 173 aa, Homo sapiens; identical to SEQ ID NO: 888012

SEQ ID NO: 888014 - protein, 173 aa, Homo sapiens; identical to SEQ ID NO: 888012

SEQ ID NO: 888015 - protein, 173 aa, Homo sapiens; identical to SEQ ID NO: 888012

SEQ ID NO: 888016 - protein, 173 aa, Homo sapiens; identical to SEQ ID NO: 888012

SEQ ID NO: 888017 - protein, 119 aa, Homo sapiens
MRPVDADEAREPREEPGSPLSPAPRAGRENLASLERERARAHWRARRKLLEIQSLLDAIKSEVEAEERGARAPAPRPRAEAEERVARLCAEAERKAAEAARMGRRIVELHQRIAGCECC

SEQ ID NO: 888018 - protein, 119 aa, Homo sapiens; identical to SEQ ID NO: 888017

SEQ ID NO: 888019 - protein, 119 aa, Homo sapiens; identical to SEQ ID NO: 888017

SEQ ID NO: 888020 - protein, 119 aa, Homo sapiens; identical to SEQ ID NO: 888017

SEQ ID NO: 888021 - protein, 119 aa, Homo sapiens; identical to SEQ ID NO: 888017

SEQ ID NO: 888022 - protein, 119 aa, Homo sapiens; identical to SEQ ID NO: 888017

SEQ ID NO: 888023 - protein, 160 aa, Homo sapiens
  misc_feature (119)..(119): Xaa can be any naturally occurring amino acid
  misc_feature (121)..(121): Xaa can be any naturally occurring amino acid
  misc_feature (127)..(128): Xaa can be any naturally occurring amino acid
  misc_feature (156)..(156): Xaa can be any naturally occurring amino acid
LLGKRLGAELAEARVVKGPQWQRPGRRLVAHFGYRPRCGKLGQPVASLVVGDSEASALAAGEQPRRAPRAGRGGGVMRPVDADEAREPREEPGSPLSPAPRAGRENLASLERERARAHXLXLIIALXXKPSLLQQYVCFSQIIFSPVPHHPSRLSXVLIS

SEQ ID NO: 888024 - protein, 195 aa, Homo sapiens
LLGKRLGAELAEARVVKGPQWQRPGRRLVAHFGYRPRCGKLGQPVASLVVGDSEASALAAGEQPRRAPRAGRGGGVMRPVDADEAREPREEPGSPLSPAPRAGRENLASLERERARAHWRARRKLLEIQSLLDAIKSEVEAEERGARAPAPRPRAEAEERVARLCAEAERKAAEAARMGRRIVELHQRIAGCECC

SEQ ID NO: 888025 - protein, 119 aa, Homo sapiens; identical to SEQ ID NO: 888017

SEQ ID NO: 888026 - protein, 119 aa, Homo sapiens; identical to SEQ ID NO: 888017

SEQ ID NO: 888027 - protein, 300 aa, Homo sapiens
MAAAAGDADDEPRSGHSSSEGECAVAPEPLTDAEGLFSFADFGSALGGGGAGLSGRASGGAQSPLRYLHVLWQQDAEPRDELRCKIPAGRLRRAARPHRRLGPTGKEVHALKRLRDSANANDVETVQQLLEDGADPCAADDKGRTALHFASCNGNDQIVQLLLDHGADPNQRDGLGNTPLHLAACTNHVPVITTLLRGGARVDALDRAGRTPLHLAKSKLNILQEGHAQCLEAVRLEVKQIIHMLREYLERLGQHEQRERLDDLCTRLQMTSTKEQVDEVTDLLASFTSLSLQMQSMEKR

SEQ ID NO: 888028 - protein, 241 aa, Homo sapiens
MAAAAGDADDEPRSGHSSSEGECAVAPEPLTDAEGLFSFADFGSALGGGGAGLSGRASGGAQSPLRYLHVLWQQDAEPRDELRCKIPAGRLRRAARPHRRLGPTGKEVHALKRLRDSANANDVETVQQLLEDGADPCAADDKGRTALHFASCNGNDQIVQLLLDHGADPNQRDGLGNTPLHLAACTNHVPVITTLLRGGARVDALDRAGRTPLHLAKSKLNILQEGHAQCLEAVRLEVKQR

SEQ ID NO: 888029 - protein, 300 aa, Homo sapiens; identical to SEQ ID NO: 888027

SEQ ID NO: 888030 - protein, 300 aa, Homo sapiens; identical to SEQ ID NO: 888027

SEQ ID NO: 888031 - protein, 207 aa, Homo sapiens
METSHDSERLLVNNKMALKRLRDSANANDVETVQQLLEDGADPCAADDKGRTALHFASCNGNDQIVQLLLDHGADPNQRDGLGNTPLHLAACTNHVPVITTLLRGGARVDALDRAGRTPLHLAKSKLNILQEGHAQCLEAVRLEVKQIIHMLREYLERLGQHEQRERLDDLCTRLQMTSTKEQVDEVTDLLASFTSLSLQMQSMEKR

SEQ ID NO: 888032 - protein, 197 aa, Homo sapiens
MAAAAGDADDEPRSGHSSSEGECAVAPEPLTDAEGLFSFADFGSALGGGGAGLSGRASGGAQSPLRYLHVLWQQDAEPRDELRCKIPAGRLRRAARPHRRLGPTGKEVHVQQLLEDGADPCAADDKGRTALHFASCNGNDQIVQLLLDHGADPNQRDGLGNTPLHLAACTNHVPVITTLLRGDHPYAEGVSGAPRAT

SEQ ID NO: 888033 - protein, 145 aa, Homo sapiens
MAAAAGDADDEPRSGHSSSEGECAVAPEPLTDAEGLFSFADFGSALGGGGAGLSGRASGGAQSPLRYLHVLWQQDAEPRDELRCKIPAGRLRRAARPHRRLGHLPHGLHGALQASDPSLCSVLAMGLLQSAGVGLGGHPVARGTA

SEQ ID NO: 888034 - protein, 300 aa, Homo sapiens; identical to SEQ ID NO: 888027

SEQ ID NO: 888035 - protein, 300 aa, Homo sapiens; identical to SEQ ID NO: 888027

SEQ ID NO: 888036 - protein, 300 aa, Homo sapiens; identical to SEQ ID NO: 888027

SEQ ID NO: 888037 - protein, 300 aa, Homo sapiens; identical to SEQ ID NO: 888027

SEQ ID NO: 888038 - protein, 285 aa, Homo sapiens
MAAAAGDADDEPRSGHSSSEGECAVAPEPLTDAEGLFSFADFGSALGGGGAGLSGRASGGAQSPLRYLHVLWQQDAEPRDELRCKIPAGRLRRAARPHRRLGPTGKEVHALKRLRDSANANDVETVQQLLEDGADPCAADDKGRTALHFASCNGNDQIVQLLLDHGADPNQRDGLGNTPLHLAACTNHVPVITTLLRGGMWFLPLSVLFLPLTPRMLTSAGTWGPCRCPGPSWSHTPAPGQVKAEYPAGGPCPVPRGCASGGEAEVSTPSVWRPRHQGSTGQMLP

SEQ ID NO: 888039 - protein, 284 aa, Homo sapiens
MAAAAGDADDEPRSGHSSSEGECAVAPEPLTDAEGLFSFADFGSALGGGGAGLSGRASGGAQSPLRYLHVLWQQDAEPRDELRCKIPAGRLRRAARPHRRLGPTGKEVHVQQLLEDGADPCAADDKGRTALHFASCNGNDQIVQLLLDHGADPNQRDGLGNTPLHLAACTNHVPVITTLLRGGARVDALDRAGRTPLHLAKSKLNILQEGHAQCLEAVRLEVKQIIHMLREYLERLGQHEQRERLDDLCTRLQMTSTKEQVDEVTDLLASFTSLSLQMQSMEKR

SEQ ID NO: 888040 - protein, 708 aa, Homo sapiens
MATTAELFEEPFVADEYIERLVWRTPGGGSRGGPEAFDPKRLLEEFVNHIQELQIMDERIQRKVEKLEQQCQKEAKEFAKKVQELQKSNQVAFQHFQELDEHISYVATKVCHLGDQLEGVNTPRQRAVEAQKLMKYFNEFLDGELKSDVFTNSEKIKEAADIIQKLHLIAQELPFDRFSEVKSKIASKYHDLECQLIQEFTSAQRRGEISRMREVAAVLLHFKGYSHCVDVYIKQCQEGAYLRNDIFEDAGILCQRVNKQVGDIFSNPETVLAKLIQNVFEIKLQSFVKEQLEECRKSDAEQYLKNLYDLYTRTTNLSSKLMEFNLGTDKQTFLSKLIKSIFISYLENYIEVETGYLKSRSAMILQRYYDSKNHQKRSIGTGGIQDLKERIRQRTNLPLGPSIDTHGETFLSQEVVVNLLQETKQAFERCHRLSDPSDLPRNAFRIFTILVEFLCIEHIDYALETGLAGIPSSDSRNANLYFLDVVQQANTIFHLFDKQFNDHLMPLISSSPKLSECLQKKKEIIEQMEMKLDTGIDRTLNCMIGQMKHILAAEQKKTDFKPEDENNVLIQYTNACVKVCAYVRKQVEKIKNSMDGKNVDTVLMELGVRFHRLIYEHLQQYSYSCMGGMLAICDVAEYRKCAKDFKIPMVLHLFDTLHALCNLLVVAPDNLKQVCSGEQLANLDKNILHSFVQLRADYRSARLARHFS

SEQ ID NO: 888041 - protein, 708 aa, Homo sapiens; identical to SEQ ID NO: 888040

SEQ ID NO: 888042 - protein, 708 aa, Homo sapiens; identical to SEQ ID NO: 888040

SEQ ID NO: 888043 - protein, 708 aa, Homo sapiens; identical to SEQ ID NO: 888040

SEQ ID NO: 888044 - protein, 708 aa, Homo sapiens; identical to SEQ ID NO: 888040

SEQ ID NO: 888045 - protein, 708 aa, Homo sapiens; identical to SEQ ID NO: 888040

SEQ ID NO: 888046 - protein, 708 aa, Homo sapiens; identical to SEQ ID NO: 888040

SEQ ID NO: 888047 - protein, 156 aa, Homo sapiens
MATTAELFEEPFVADEYIERLVWRTPGGGSRGGPEAFDPKRLLEEFVNHIQELQIMDERIQRKVEKLEQQCQKEAKEFAKKVQELQKSNQVAFQHFQELDEHISYVATKVCHLGDQLEGVNTPRQRAVEAQKLMKYFNEFLDGELKSDVFTNSEKH

SEQ ID NO: 888048 - protein, 161 aa, Homo sapiens
MATTAELFEEPFVADEYIERLVWRTPGGGSRGGPEAFDPKRLLEEFVNHIQELQIMDERIQRKVEKLEQQCQKEAKEFAKKVQELQKSNQVAFQHFQELDEHISYVATKVCHLGDQLEGVNTPRQRAVEAQKLMKYFNEFLDGELKSDVFTNSEKVSAVRG

SEQ ID NO: 888049 - protein, 362 aa, Homo sapiens
MASGSAGKPTGEAASPAPASAIGGASSQPRKRLVSVCDHCKGKMQLVADLLLLSSEARPVLFEGPASSGAGAESFEQCRDTIIARTKGLSILTHDVQSQLNMGRFGEAGDSLVELGDLVVSLTECSAHAAYLAAVATPGAQPAQPGLVDRYRVTRCRHEVEQGCAVLRATPLADMTPQLLLEVSQGLSRNLKFLTDACALASDKSRDRFSREQFKLGVKCMSTSASALLACVREVKVAPSELARSRCALFSGPLVQAVSALVGFATEPQFLGRAAAVSAEGKAVQTAILGGAMSVVSACVLLTQCLRDLAQHPDGGAKMSDHRERLRNSACAVSEGCTLLSQALRERSSPRTLPPVNSNSVN

SEQ ID NO: 888050 - protein, 362 aa, Homo sapiens; identical to SEQ ID NO: 888049

SEQ ID NO: 888051 - protein, 362 aa, Homo sapiens; identical to SEQ ID NO: 888049

SEQ ID NO: 888052 - protein, 102 aa, Homo sapiens
MCAISAGSRPTLTRRGRDSAGHTLCPAAAGAASQELEAGDAPGAAARPREPAPAAVAGKCRLVGSRRLKPTCAAEPEVASSAAADSTARLSCLPRSSPRKGF

SEQ ID NO: 888053 - protein, 1415 aa, Homo sapiens
AAATIRYLKTTMAWKTLPIYLLLLLSVFVIQQVSSQDLSSCAGRCGEGYSRDATCNCDYNCQHYMECCPDFKRVCTAELSCKGRCFESFERGRECDCDAQCKKYDKCCPDYESFCAEVHNPTSPPSSKKAPPPSGASQTIKSTTKRSPKPPNKKKTKKVIESEEITEEHSVSENQESSSSSSSSSSSSTIWKIKSSKNSAANRELQKKLKVKDNKKNRTKKKPTPKPPVVDEAGSGLDNGDFKVTTPDTSTTQHNKVSTSPKITTAKPINPRPSLPPNSDTSKETSLTVNKETTVETKETTTTNKQTSTDGKEKTTSAKETQSIEKTSAKDLAPTSKVLAKPTPKAETTTKGPALTTPKEPTPTTPKEPASTTPKEPTPTTIKSAPTTPKEPAPTTTKSAPTTPKEPAPTTTKEPAPTTPKEPAPTTTKEPAPTTTKSAPTTPKEPAPTTPKKPAPTTPKEPAPTTPKEPTPTTPKEPAPTTKEPAPTTPKEPAPTAPKKPAPTTPKEPAPTTPKEPAPTTTKEPSPTTPKEPAPTTTKSAPTTTKEPAPTTTKSAPTTPKEPSPTTTKEPAPTTPKEPAPTTPKKPAPTTPKEPAPTTPKEPAPTTTKKPAPTAPKEPAPTTPKETAPTTPKKLTPTTPEKLAPTTPEKPAPTTPEELAPTTPEEPTPTTPEEPAPTTPKAAAPNTPKEPAPTTPKEPAPTTPKEPAPTTPKETAPTTPKGTAPTTLKEPAPTTPKKPAPKELAPTTTKEPTSTTSDKPAPTTPKGTAPTTPKEPAPTTPKEPAPTTPKGTAPTTLKEPAPTTPKKPAPKELAPTTTKGPTSTTSDKPAPTTPKETAPTTPKEPAPTTPKKPAPTTPETPPPTTSEVSTPTTTKEPTTIHKSPDESTPELSAEPTPKALENSPKEPGVPTTKTPAATKPEMTTTAKDKTTERDLRTTPETTTAAPKMTKETATTTEKTTESKITATTTQVTSTTTQDTTPFKITTLKTTTLAPKVTTTKKTITTTEIMNKPEETAKPKDRATNSKATTPKPQKPTKAPKKPTSTKKPKTMPRVRKPKTTPTPRKMTSTMPELNPTSRIAEAMLQTTTRPNQTPNSKLVEVNPKSEDAGGAEGETPHMLLRPHVFMPEVTPDMDYLPRVPNQGIIINPMLSDETNICNGKPVDGLTTLRNGTLVAFRGHYFWMLSPFSPPSPARRITEVWGIPSPIDTVFTRCNCEGKTFFFKDSQYWRFTNDIKDAGYPKPIFKGFGGLTGQIVAALSTAKYKNWPESVYFFKRGGSIQQYIYKQEPVQKCPGRRPALNYPVYGETTQVRRRRFERAIGPSQTHTIRIQYSPARLAYQDKGVLHNEVKVSILWRGLPNVVTSAISLPNIRKPDGYDYYAFSKDQYYNIDVPSRTARAITTRSGQTLSKVWYNCP

SEQ ID NO: 888054 - protein, 1371 aa, Homo sapiens
AAATIRYLKTTMAWKTLPIYLLLLLSVFVIQQVSSQDLSSCAGRCGEGYSRDATCNCDYNCQHYMECCPDFKRVCTAELSCKGRCFESFERGRECDCDAQCKKYDKCCPDYESFCAEVHNPTSPPSSKKAPPPSGASQTIKSTTKRSPKPPNKKKTKKVIESEEITEEHSVSENQESSSSSSSSSSSSTIWKIKSSKNSAANRELQKKLKVKDNKKNRTKKKPTPKPPVVDEAGSGLDNGDFKVTTPDTSTTQHNKVSTSPKITTAKPINPRPSLPPNSDTSKETSLTVNKETTVETKETTTTNKQTSTDGKEKTTSAKETQSIEKTSAKDLAPTSKVLAKPTPKAETTTKGPALTTPKEPTPTTPKEPASTTPKEPTPTTIKSAPTTPKEPAPTTTKSAPTTPKEPAPTTTKEPAPTTPKEPAPTTTKEPAPTTTKSAPTTPKEPAPTTPKKPAPTTPKEPAPTTPKEPTPTTPKEPAPTTKEPAPTTPKEPAPTAPKKPAPTTPKEPAPTTPKEPAPTTTKEPSPTTPKEPAPTTTKSAPTTTKEPAPTTTKSAPTTPKEPSPTTTKEPAPTTPKEPAPTTPKKPAPTTPKEPAPTTPKEPAPTTTKKPAPTAPKEPAPTTPKETAPTTPKKLTPTTPEKLAPTTPEKPAPTTPEELAPTTPEEPTPTTPEEPAPTTPKAAAPNTPKEPAPTTPKEPAPTTPKEPAPTTPKETAPTTPKGTAPTTLKEPAPTTPKKPAPKELAPTTTKEPTSTTSDKPAPTTPKGTAPTTPKEPAPTTPKEPAPTTPKGTAPTTLKEPAPTTPKKPAPKELAPTTTKGPTSTTSDKPAPTTPKETAPTTPKEPAPTTPKKPAPTTPETPPPTTSEVSTPTTTKEPTTIHKSPDESTPELSAEPTPKALENSPKEPGVPTTKTPAATKPEMTTTAKDKTTERDLRTTPETTTAAPKMTKETATTTEKTTESKITATTTQVTSTTTQDTTPFKITTLKTTTLAPKVTTTKKTITTTEIMNKPEETAKPKDRATNSKATTPKPQKPTKAPKKPTSTKKPKTMPRVRKPKTTPTPRKMTSTMPELNPTSRIAEAMLQTTTRPNQTPNSKLVEVNPKSEDAGGAEGETPHMLLRPHVFMPEVTPDMDYLPRVPNQGIIINPMLSDETNICNGKPVDGLTTLRNGTLVAFRGHYFWMLSPFSPPSPARRITEVWGIPSPIDTVFTRCNCEGKTFFFKDSQYWRFTNDIKDAGYPKPIFKGFGGLTGQIVAALSTAKYKNWPESVYFFKRGGSIQQYIYKQEPVQKCPGRRPALNYPVYGETTQVRRRRFERAIGPSQTHTIRIQYSPARLAYQDKGNIFIVLKKSLNISRCNTVSYTVRLMKYGY

SEQ ID NO: 888055 - protein, 911 aa, Homo sapiens
AAATIRYLKTTMAWKTLPIYLLLLLSVFVIQQVSSQDLSSCAGRCGEGYSRDATCNCDYNCQHYMECCPDFKRVCTAELSCKGRCFESFERGRECDCDAQCKKYDKCCPDYESFCAEVHNPTSPPSSKKAPPPSGASQTIKSTTKRSPKPPNKKKTKKVIESEEITEEHSVSENQESSSSSSSSSSSSTIWKIKSSKNSAANRELQKKLKVKDNKKNRTKKKPTPKPPVVDEAGSGLDNGDFKVTTPDTSTTQHNKVSTSPKITTAKPINPRPSLPPNSDTSKETSLTVNKETTVETKETTTTNKQTSTDGKEKTTSAKETQSIEKTSAKDLAPTSKVLAKPTPKAETTTKGPALTTPKEPTPTTPKEPASTTPKEPTPTTIKSAPTTPKEPAPTTTKSAPTTPKEPAPTTTKEPAPTTPKEPAPTTTKEPAPTTTKSAPTTPKEPAPTTPKKPAPTTPKEPAPTTPKEPTPTTPKEPAPTTKEPAPTTPKEPAPTAPKKPAPTTPKEPAPTTPKEPAPTTTKEPSPTTPKEPAPTTTKSAPTTTKEPAPTTTKSAPTTPKEPSPTTTKEPAPTTPKEPAPTTPKKPAPTTPKEPAPTTPKEPAPTTTKKPAPTAPKEPAPTTPKETAPTTPKKLTPTTPEKLAPTTPEKPAPTTPEELAPTTPEEPTPTTPEEPAPTTPKAAAPNTPKEPAPTTPKEPAPTTPKEPAPTTPKETAPTTPKGTAPTTLKEPAPTTPKKPAPKELAPTTTKEPTSTTSDKPAPTTPKGTAPTTPKGTAPTTLKEPAPTTPKKPAPKELAPTTTKGPTSTTSDKPAPTTPKETAPTTPKEPAPTTPKKPAPTTPETPPPTTSEVSTPTTTKEPTTIHKSPDESTPELSAEPTPKALENSPKEPGVPTTKTPAATKPEMIQPHK

SEQ ID NO: 888056 - protein, 1371 aa, Homo sapiens; identical to SEQ ID NO: 888054

SEQ ID NO: 888057 - protein, 129 aa, Homo sapiens
MWNCESIKPLSPLNYPVYGETTQVRRRRFERAIGPSQTHTIRIQYSPARLAYQDKGVLHNEVKVSILWRGLPNVVTSAISLPNIRKPDGYDYYAFSKDQYYNIDVPSRTARAITTRSGQTLSKVWYNCP

SEQ ID NO: 888058 - protein, 1183 aa, Homo sapiens
AAATIRYLKTTMAWKTLPIYLLLLLSVFVIQQVSSQDLSSCAGRCGEGYSRDATCNCDYNCQHYMECCPDFKRVCTAELSCKGRCFESFERGRECDCDAQCKKYDKCCPDYESFCAEVHNPTSPPSSKKAPPPSGASQTIKSTTKRSPKPPNKKKTKKVIESEEITEEHSVSENQESSSSSSSSSSSSTIWKIKSSKNSAANRELQKKLKVKDNKKNRTKKKPTPKPPVVDEAGSGLDNGDFKVTTPDTSTTQHNKVSTSPKITTAKPINPRPSLPPNSDTSKETSLTVNKETTVETKETTTTNKQTSTDGKEKTTSAKETQSIEKTSAKDLAPTSKVLAKPTPKAETTTKGPALTTPKEPTPTTPKEPASTTPKEPTPTTIKSAPTTPKEPAPTTTKSAPTTPKEPAPTTTKEPAPTTPKEPAPTTTKEPAPTTTKSAPTTPKEPAPTTPKKPAPTTPKEPAPTTPKEPTPTTPKEPAPTTKEPAPTTPKEPAPTAPKKPAPTTPKEPAPTTPKEPAPTTTKEPSPTTPKEPAPTTTKSAPTTTKEPAPTTTKSAPTTPKEPSPTTTKEPAPTTPKEPAPTTPKKPAPTTPKEPAPTTPKEPAPTTTKKPAPTAPKEPAPTTPKETAPTTPKKLTPTTPEKLAPTTPEKPAPTTPEELAPTTPEEPTPTTPEEPAPTTPKAAAPNTPKEPAPTTPKEPAPTTPKEPAPTTPKETAPTTPKGTAPTTLKEPAPTTPKKPAPKELAPTTTKEPTSTTSDKPAPTTPKGTAPTTPKEPAPTTPKEPAPTTPKGTAPTTLKEPAPTTPKKPAPKELAPTTTKGPTSTTSDKPAPTTPKETAPTTPKEPAPTTPKKPAPTTPETPPPTTSEVSTPTTTKEPTTIHKSPDESTPELSAEPTPKALENSPKEPGVPTTKTPAATKPEMTTTAKDKTTERDLRTTPETTTAAPKMTKETATTTEKTTESKITATTTQVTSTTTQDTTPFKITTLKTTTLAPKVTTTKKTITTTEIMNKPEETAKPKDRATNSKATTPKPQKPTKAPKKPTSTKKPKTMPRVRKPKTTPTPRKMTSTMPELNPTSRIAEAMLQTTTRPNQTPNSKLVEVNPKSEDAGGAEGETPHMLLRPHVFMPEVTPDMDYLPRVPNQGIIINPMLSDETNICNGKPVDGLTTLRNGTLVAFRGHYFRM

SEQ ID NO: 888059 - protein, 911 aa, Homo sapiens; identical to SEQ ID NO: 888055

SEQ ID NO: 888060 - protein, 176 aa, Homo sapiens
RKGGVAGGHFRFRWGGPPCAVMSRFKFIDIGINLTDPMFRGIYRGVQKHQDDLQDVIGRAVEIGVKKFMITGGNLQDSKDALHLAQTNGMFFSTVGCHPTRCGEFEKNNPDLYLKELLNLAENNKGKVVAIGECGLDFDRLQFCPKDTQLKYFEKQFELSEQTKLPMFLHVSKLTC

SEQ ID NO: 888061 - protein, 176 aa, Homo sapiens; identical to SEQ ID NO: 888060

SEQ ID NO: 888062 - protein, 176 aa, Homo sapiens; identical to SEQ ID NO: 888060

SEQ ID NO: 888063 - protein, 99 aa, Homo sapiens
RKGGVAGGHFRFRWGGPPCAVMSRFKFIDIGINLTDPMFRGIYRGVQKHQDDLQDVIGRAVEIGVKKFMITGGNLQDSKDALHLAQTNGILIFLLPKKK

SEQ ID NO: 888064 - protein, 108 aa, Homo sapiens
RTSSIVSRTHLKTEANLEVLKSIPSEKLMIETDAPWCGVKSTHAGSKYIRTAFPTKKKWESGHCLKDRNEPCHIIQILEIMSAVRDEDPLELANTLYNNTIKVFFPGI

SEQ ID NO: 888065 - protein, 176 aa, Homo sapiens; identical to SEQ ID NO: 888060

SEQ ID NO: 888066 - protein, 108 aa, Homo sapiens
MITGGNLQDSKDALHLAQTNGMFFSTVGCHPTRCGEFEKNNPDLYLKELLNLAENNKGKVVAIGECGLDFDRLQFCPKDTQLKYFEKQFELSEQTKLPMFLHVSKLTC

SEQ ID NO: 888067 - protein, 139 aa, Homo sapiens
MFRGIYRGVQKHQDDLQDVIGRAVEIGVKKFMITGGNLQDSKDALHLAQTNGMFFSTVGCHPTRCGEFEKNNPDLYLKELLNLAENNKGKVVAIGECGLDFDRLQFCPKDTQLKYFEKQFELSEQTKLPMFLHVSKLTC

SEQ ID NO: 888068 - protein, 139 aa, Homo sapiens
RKGGVAGGHFRFRWGGPPCAVMSRFKFIDDLQDVIGRAVEIGVKKFMITGGNLQDSKDALHLAQTNDILKNSLNCQNKQNYQCFFMCRNSHAEFLDIMKRNRDRCVGGVVHSFDGTKEAAAALIDLDLYIGFNGCSLEN

SEQ ID NO: 888069 - protein, 176 aa, Homo sapiens; identical to SEQ ID NO: 888060

SEQ ID NO: 888070 - protein, 176 aa, Homo sapiens; identical to SEQ ID NO: 888060

SEQ ID NO: 888071 - protein, 176 aa, Homo sapiens; identical to SEQ ID NO: 888060

SEQ ID NO: 888072 - protein, 176 aa, Homo sapiens; identical to SEQ ID NO: 888060

SEQ ID NO: 888073 - protein, 99 aa, Homo sapiens; identical to SEQ ID NO: 888063

SEQ ID NO: 888074 - protein, 122 aa, Homo sapiens
MHCIWHKQMVSSYFFYQKKNELSNFEEVFLKTASGMFFSTVGCHPTRCGEFEKNNPDLYLKELLNLAENNKGKVVAIGECGLDFDRLQFCPKDTQLKYFEKQFELSEQTKLPMFLHVSKLTC

SEQ ID NO: 888075 - protein, 176 aa, Homo sapiens; identical to SEQ ID NO: 888060

SEQ ID NO: 888076 - protein, 139 aa, Homo sapiens; identical to SEQ ID NO: 888067

SEQ ID NO: 888077 - protein, 108 aa, Homo sapiens; identical to SEQ ID NO: 888066

SEQ ID NO: 888078 - protein, 154 aa, Homo sapiens
RKGGVAGGHFRFRWGGPPCAVMSRFKFIDDLQDVIGRAVEIGVKKFMITGGNLQDSKDALHLAQTNGMFFSTVGCHPTRCGEFEKNNPDLYLKELLNLAENNKGKVVAIGECGLDFDRLQFCPKDTQLKYFEKQFELSEQTKLPMFLHVSKLTC

SEQ ID NO: 888079 - protein, 77 aa, Homo sapiens
RKGGVAGGHFRFRWGGPPCAVMSRFKFIDDLQDVIGRAVEIGVKKFMITGGNLQDSKDALHLAQTNGILIFLLPKKK

SEQ ID NO: 888080 - protein, 116 aa, Homo sapiens
SKDICMIDVGKERNKSAHLKTEANLEVLKSIPSEKLMIETDAPWCGVKSTHAGSKYIRTAFPTKKKWESGHCLKDRNEPCHIIQILEIMSAVRDEDPLELANTLYNNTIKVFFPGI

SEQ ID NO: 888081 - protein, 102 aa, Homo sapiens
MVAHLKTEANLEVLKSIPSEKLMIETDAPWCGVKSTHAGSKYIRTAFPTKKKWESGHCLKDRNEPCHIIQILEIMSAVRDEDPLELANTLYNNTIKVFFPGI

SEQ ID NO: 888082 - protein, 610 aa, Homo sapiens
ASSGRRGEGGWWRLPRSPSLPAVPTPGTMFPAGPPSHSLLRLPLLQLLLLVVQAVGRGLGRASPAGGPLEDVVIERYHIPRACPREVQMGDFVRYHYNGTFEDGKKFDSSYDRNTLVAIVVGVGRLITGMDRGLMGMCVNERRRLIVPPHLGYGSIGLAGLIPPDATLYFDVVLLDVWNKEDTVQVSTLLRPPHCPRMVQDGDFVRYHYNGTLLDGTSFDTSYSKGGTYDTYVGSGWLIKGMDQGLLGMCPGERRKIIIPPFLAYGEKGYGTVIPPQASLVFHVLLIDVHNPKDAVQLETLELPPGCVRRAGAGDFMRYHYNGSLMDGTLFDSSYSRNHTYNTYIGQGYIIPGMDQGLQGACMGERRRITIPPHLAYGENGTGDKIPGSAVLIFNVHVIDFHNPADVVEIRTLSRPSETCNETTKLGDFVRYHYNCSLLDGTQLFTSHDYGAPQEATLGANKVIEGLDTGLQGMCVGERRQLIVPPHLAHGESGARGVPGSAVLLFEVELVSREDGLPTGYLFVWHKDPPANLFEDMDLNKDGEVPPEEFSTFIKAQVSEGKGRLMPGQDPEKTIGDMFQNQDRNQDGKITVDELKLKSDEDEERVHEEL

SEQ ID NO: 888083 - protein, 584 aa, Homo sapiens
KLWYLTCKRRVIPAAHSPSLVLSCAAWEGAWGLGRASPAGGPLEDVVIERYHIPRACPREVQMGDFVRYHYNGTFEDGKKFDSSYDRNTLVAIVVGVGRLITGMDRGLMGMCVNERRRLIVPPHLGYGSIGLAGLIPPDATLYFDVVLLDVWNKEDTVQVSTLLRPPHCPRMVQDGDFVRYHYNGTLLDGTSFDTSYSKGGTYDTYVGSGWLIKGMDQGLLGMCPGERRKIIIPPFLAYGEKGYGTVIPPQASLVFHVLLIDVHNPKDAVQLETLELPPGCVRRAGAGDFMRYHYNGSLMDGTLFDSSYSRNHTYNTYIGQGYIIPGMDQGLQGACMGERRRITIPPHLAYGENGTGDKIPGSAVLIFNVHVIDFHNPADVVEIRTLSRPSETCNETTKLGDFVRYHYNCSLLDGTQLFTSHDYGAPQEATLGANKVIEGLDTGLQGMCVGERRQLIVPPHLAHGESGARGVPGSAVLLFEVELVSREDGLPTGYLFVWHKDPPANLFEDMDLNKDGEVPPEEFSTFIKAQVSEGKGRLMPGQDPEKTIGDMFQNQDRNQDGKITVDELKLKSDEDEERVHEEL

SEQ ID NO: 888084 - protein, 671 aa, Homo sapiens
ASSGRRGEGGWWRLPRSPSLPAVPTPGTMFPAGPPSHSLLRLPLLQLLLLVVQAVGRGLGRASPAGGPLEDVVIERYHIPRACPREVQMGDFVRYHYNGTFEDGKKFDSSYDRNTLVAIVVGVGRLITGMDRGLMGMCVNERRRLIVPPHLGYGSIGLAGLIPPDATLYFDVVLLDVWNKEDTVQVSTLLRPPHCPRMVQDGDFVRYHYNGTLLDGTSFDTSYSKGGTYDTYVGSGWLIKGMDQGLLGMCPGERRKIIIPPFLAYGEKGYGTVIPPQASLVFHVLLIDVHNPKDAVQLETLELPPGCVRRAGAGDFMRYHYNGSLMDGTLFDSSYSRNHTYNTYIGQGYIIPGMDQGLQGACMGERRRITIPPHLAYGENGTDSIGFLQGSAPLRPFRSGEGQPSLGREGGYGKTEPAYPQDPAVLGASVSSPVKWASHADPQGDKIPGSAVLIFNVHVIDFHNPADVVEIRTLSRPSETCNETTKLGDFVRYHYNCSLLDGTQLFTSHDYGAPQEATLGANKVIEGLDTGLQGMCVGERRQLIVPPHLAHGESGARGVPGSAVLLFEVELVSREDGLPTGYLFVWHKDPPANLFEDMDLNKDGEVPPEEFSTFIKAQVSEGKGRLMPGQDPEKTIGDMFQNQDRNQDGKITVDELKLKSDEDEERVHEEL

SEQ ID NO: 888085 - protein, 499 aa, Homo sapiens
PVFIDATSDLRSGRLITGMDRGLMGMCVNERRRLIVPPHLGYGSIGLAGLIPPDATLYFDVVLLDVWNKEDTVQVSTLLRPPHCPRMVQDGDFVRYHYNGTLLDGTSFDTSYSKGGTYDTYVGSGWLIKGMDQGLLGMCPGERRKIIIPPFLAYGEKGYGTVIPPQASLVFHVLLIDVHNPKDAVQLETLELPPGCVRRAGAGDFMRYHYNGSLMDGTLFDSSYSRNHTYNTYIGQGYIIPGMDQGLQGACMGERRRITIPPHLAYGENGTGDKIPGSAVLIFNVHVIDFHNPADVVEIRTLSRPSETCNETTKLGDFVRYHYNCSLLDGTQLFTSHDYGAPQEATLGANKVIEGLDTGLQGMCVGERRQLIVPPHLAHGESGARGVPGSAVLLFEVELVSREDGLPTGYLFVWHKDPPANLFEDMDLNKDGEVPPEEFSTFIKAQVSEGKGRLMPGQDPEKTIGDMFQNQDRNQDGKITVDELKLKSDEDEERVHEEL

SEQ ID NO: 888086 - protein, 752 aa, Homo sapiens
ASSGRRGEGGWWRLPRSPSLPAVPTPGTMFPAGPPSHSLLRLPLLQLLLLVVQAVGRGLGRASPAGGPLEDVVIERYHIPRACPREVQMGDFVRYHYNGTFEDGKKFDSSYDRNTLVAIVVGVGRLITGMDRGLMGMCVNERRRLIVPPHLGYGSIGLAGLIPPDATLYFDVVLLDVWNKEDTVQVSTLLRPPHCPRMVQDGDFVRYHYNGTLLDGTSFDTSYSKGGTYDTYVGSGWLIKGMDQGLLGMCPGERRKIIIPPFLAYGEKGYGTVIPPQASLVFHVLLIDVHNPKDAVQLETLELPPGCVRRAGAGDFMRYHYNGSLMDGTLFDSSYSRNHTYNTYIGQGYIIPGMDQGLQGACMGERRRITIPPHLAYGENGTDSIGFLQGSAPLRPFRSGEGQPSLGREGGYGKTEPAYPQDPAVLGASVSSPVKWASHADPQGKLLGVCKTVVEKGFLTGKLPSPAPCPSESLLELTLDKHPVPSSFGSSGREGVSGLGTSMERPQVASPSALSCPHSPILASGDKIPGSAVLIFNVHVIDFHNPADVVEIRTLSRPSETCNETTKLGDFVRYHYNCSLLDGTQLFTSHDYGAPQEATLGANKVIEGLDTGLQGMCVGERRQLIVPPHLAHGESGARGVPGSAVLLFEVELVSREDGLPTGYLFVWHKDPPANLFEDMDLNKDGEVPPEEFSTFIKAQVSEGKGRLMPGQDPEKTIGDMFQNQDRNQDGKITVDELKLKSDEDEERVHEEL

SEQ ID NO: 888087 - protein, 629 aa, Homo sapiens
ASSGRRGEGGWWRLPRSPSLPAVPTPGTMFPAGPPSHSLLRLPLLQLLLLVVQAVGRGLGRASPAGGPLEDVVIERYHIPRACPREVQMGDFVRYHYNGTFEDGKKFDSSYDRNTLVAIVVGVGRLITGMDRGLMGMCVNERRRLIVPPHLGYGSIGLAGLIPPDATLYFDVVLLDVWNKEDTVQVSTLLRPPHCPRMVQDGDFVRYHYNGTLLDGTSFDTSYSKGGTYDTYVGSGWLIKGMDQGLLGMCPGERRKIIIPPFLAYGEKGYGTVIPPQASLVFHVLLIDVHNPKDAVQLETLELPPGCVRRAGAGDFMRYHYNGSLMDGTLFDSSYSRNHTYNTYIGQGYIIPGMDQGLQGACMGERRRITIPPHLAYGENGTGDKIPGSAVLIFNVHVIDFHNPADVVEIRTLSRPSETCNETTKLGDFVRYHYNCSLLDGTQLFTSGETDAGSHEPSRPHFRGQRHDYGAPQEATLGANKVIEGLDTGLQGMCVGERRQLIVPPHLAHGESGARGVPGSAVLLFEVELVSREDGLPTGYLFVWHKDPPANLFEDMDLNKDGEVPPEEFSTFIKAQVSEGKGRLMPGQDPEKTIGDMFQNQDRNQDGKITVDELKLKSDEDEERVHEEL

SEQ ID NO: 888088 - protein, 137 aa, Homo sapiens [sequence omitted]

SEQ ID NO: 888089 - protein, 142 aa, Homo sapiens
MWRGGMCVGERRQLIVPPHLAHGESGARGVPGSAVLLFEVELVSREDGLPTGYLFVWHKDPPANLFEDMDLNKDGEVPPEEFSTFIKAQVSEGKGRLMPGQDPEKTIGDMFQNQDRNQDGKITVDELKLKSDEDEERVHEEL

SEQ ID NO: 888090 - protein, 631 aa, Homo sapiens
ASSGRRGEGGWWRLPRSPSLPAVPTPGTMFPAGPPSHSLLRLPLLQLLLLVVQAVGRGLGRASPAGGPLEDVVIERYHIPRACPREVQMGDFVRYHYNGTFEDGKKFDSSYDRNTLVAIVVGVGRLITGMDRGLMGMCVNERRRLIVPPHLGYGSIGLAGLIPPDATLYFDVVLLDVWNKEDTVQVSTLLRPPHCPRMVQDGDFVRYHYNGTLLDGTSFDTSYSKGGTYDTYVGSGWLIKGMDQGLLGMCPGERRKIIIPPFLAYGEKGYGTVIPPQASLVFHVLLIDVHNPKDAVQLETLELPPGCVRRAGAGDFMRYHYNGSLMDGTLFDSSYSRNHTYNTYIGQGYIIPGMDQGLQGACMGERRRITIPPHLAYGENGTGDKIPGSAVLIFNVHVIDFHNPADVVEIRTLSRPSETCNETTKLGDFVRYHYNCSLLDGTQLFTSHDYGAPQEATLGANKVIEGLDTGLQGMCVGERRQLIVPPHLAHGESGARGVPGSAVLLFEVELVSREDGLPTGYLFVWHKDPPANLFEDMDLNKDGEVPPEEFSTFIKAQVSEGKGRLMPGQDPEKTIGDMFQNQDRNQDGKITVDELKLKSDEDEERVHEELWSRSQLKQWQRRHLWCSHHPR

SEQ ID NO: 888091 - protein, 610 aa, Homo sapiens; identical to SEQ ID NO: 888082

SEQ ID NO: 888092 - protein, 610 aa, Homo sapiens; identical to SEQ ID NO: 888082

SEQ ID NO: 888093 - protein, 619 aa, Homo sapiens
ASSGRRGEGGWWRLPRSPSLPAVPTPGTMFPAGPPSHSLLRLPLLQLLLLVVQAVGRGLGRASPAGGPLEDVVIERYHIPRACPREVQMGDFVRYHYNGTFEDGKKFDSSYDRNTLVAIVVGVGRLITGMDRGLMGMCVNERRRLIVPPHLGYGSIGLAGLIPPDATLYFDVVLLDVWNKEDTVQVSTLLRPPHCPRMVQDGDFVRYHYNGTLLDGTSFDTSYSKGGTYDTYVGSGWLIKGMDQGLLGMCPGERRKIIIPPFLAYGEKGYGTVIPPQASLVFHVLLIDVHNPKDAVQLETLELPPGCVRRAGAGDFMRYHYNGSLMDGTLFDSSYSRNHTYNTYIGQGYIIPGMDQGLQGACMGERRRITIPPHLAYGENGTGDKIPGSAVLIFNVHVIDFHNPADVVEIRTLSRPSETCNETTKLGDFVRYHYNCSLLDGTQLFTSHDYGAPQEATLGANKVIEGLDTGLQGMCVGERRQLIVPPHLAHGESGARGVPGSAVLLFEVELVSREDGLPTGYLFVWHKDPPANLFEDMDLNKDGEVPPEEFSTFIKAQVSEGKGRLMPGQDPEKTIGDMFQNQDRNQDGKITVDELKLKSDEDEERVHEELCEGSCLGGC

SEQ ID NO: 888094 - protein, 593 aa, Homo sapiens
ASSGRRGEGGWWRLPRSPSLPAVPTPGTMFPAGPPSHSLLRLPLLQLLLLVVQAVGRGLGRASPAGGPLEDVVIERYHIPRACPREVQMGDFVRYHYNGTFEDGKKFDSSYDRNTLVAIVVGVGRLITGMDRGLMGMCVNERRRLIVPPHLGYGSIGLAGLIPPDATLYFDVVLLDVWNKEDTVQVSTLLRPPHCPRMVQDGDFVRYHYNGTLLDGTSFDTSYSKGGTYDTYVGSGWLIKGMDQGLLGMCPGERRKIIIPPFLAYGEKGYGTVIPPQASLVFHVLLIDVHNPKDAVQLETLELPPGCVRRAGAGDFMRYHYNGSLMDGTLFDSSYSRNHTYNTYIGQGYIIPGMDQGLQGACMGERRRITIPPHLAYGENGTGDKIPGSAVLIFNVHVIDFHNPADVVEIRTLSRPSETCNETTKLGDFVRYHYNCSLLDGTQLFTSHDYGAPQEATLGANKVIEGLDTGLQGMCVGERRQLIVPPHLAHGESGARGVPGSAVLLFEVELVSREDGLPTGYLFVWHKDPPANLFEDMDLNKDGEVPPEEFSTFIKAQVSEGKGRLMPGQDPEKTIEERKKTKGMCEGSCLGGC

SEQ ID NO: 888095 - protein, 471 aa, Homo sapiens
ASSGRRGEGGWWRLPRSPSLPAVPTPGTMFPAGPPSHSLLRLPLLQLLLLVVQAVGRGLGRASPAGGPLEDVVIERYHIPRACPREVQMGDFVRYHYNGTFEDGKKFDSSYDRNTLVAIVVGVGRLITGMDRGLMGMCVNERRRLIVPPHLGYGSIGLAGLIPPDATLYFDVVLLDVWNKEDTVQVSTLLRPPHCPRMVQDGDFVRYHYNGTLLDGTSFDTSYSKGGTYDTYVGSGWLIKGMDQGLLGMCPGERRKIIIPPFLAYGEKGYGTVIPPQASLVFHVLLIDVHNPKDAVQLETLELPPGCVRRAGAGDFMRYHYNGSLMDGTLFDSSYSRNHTYNTYIGQGYIIPGMDQGLQGACMGERRRITIPPHLAYGENGTDSIGFLQGSAPLRPFRSGEGQPSLGREGGYGKTEPAYPQDPAVLGASVSSPVKWASHADPQGKLLGVCKTVSGKGLSYWKAAFPCPLPQ

SEQ ID NO: 888096 - protein, 127 aa, Homo sapiens
PCFFLGTHAGCSLPETSHRLSPCHASTPAPTRTPAPVPFPALPELQGAGEPGKKEEKESTHWPPPGAPAPPKAMTLTARSPGSPLPQFSTFIKAQVSEGKGRLMPGQDPEKTIGDMFQNQDRNQDGK

SEQ ID NO: 888097 - protein, 358 aa, Homo sapiens
ASSGRRGEGGWWRLPRSPSLPAVPTPGTMFPAGPPSHSLLRLPLLQLLLLVVQAVGRGLGRASPAGGPLEDVVIERYHIPRACPREVQMGDFVRYHYNGTFEDGKKFDSSYDRNTLVAIVVGVGRLITGMDRGLMGMCVNERRRLIVPPHLGYGSIGLAGLIPPDATLYFDVVLLDVWNKEDTVQVSTLLRPPHCPRMVQDGDFVRYHYNGTLLDGTSFDTSYSKGGTYDTYVGSGWLIKGMDQGLLGMCPGERRKIIIPPFLAYGEKGYGEGGQGHKGKFRRRGKNQASTYSCSGCILHEGIQPRTQGGMKSTLGATKKGCFGRAWWLTLVIPALWEAKAGGSRGQEIETTVKPRLY

SEQ ID NO: 888098 - protein, 575 aa, Homo sapiens
MRPWTGSWRWIMLILFAWGTLLFYIGGHLVRDNDHPDHSSRELSKILAKLERLKQQNEDLRRMAESLRIPEGPIDQGPAIGRVRVLEEQLVKAKEQIENYKKQTRNGLGKDHEILRRRIENGAKELWFFLQSELKKLKNLEGNELQRHADEFLLDLGHHERSIMTDLYYLSQTDGAGDWREKEAKDLTELVQRRITYLQNPKDCSKAKKLVCNINKGCGYGCQLHHVVYCFMIAYGTQRTLILESQNWRYATGGWETVFRPVSETCTDRSGISTGHWSGEVKDKNVQVVELPIVDSLHPRPPYLPLAVPEDLADRLVRVHGDPAVWWVSQFVKYLIRPQPWLEKEIEEATKKLGFKHPVIGVHVRRTDKVGTEAAFHPIEEYMVHVEEHFQLLARRMQVDKKRVYLATDDPSLLKEAKTKYPNYEFISDNSISWSAGLHNRYTENSLRGVILDIHFLSQADFLVCTFSSQVCRVAYEIMQTLHPDASANFHSLDDIYYFGGQNAHNQIAIYAHQPRTADEIPMEPGDIIGVAGNHWDGYSKGVNRKLGRTGLYPSYKVREKIETVKYPTYPEAEK

SEQ ID NO: 888099 - protein, 575 aa, Homo sapiens; identical to SEQ ID NO: 888098

SEQ ID NO: 888100 - protein, 152 aa, Homo sapiens
ARPEQPVPSSPGPLLIPPPPPGPATRPFVSPRNGAGTAQGRAPWTQLALGLALSATARLAPPRALPQSVAPKAPLSGGGGSCFRFFLSVRSGVASSTQPPFPLPHRGAAAAEGCGFGSCDGERRRPPLLPPGVAAFAQRTSMTLMVFLFKIK

SEQ ID NO: 888101 - protein, 446 aa, Homo sapiens
MAITVSLVNNKRKIVVLAQPTTVKRKRITPYKSIMTDLYYLSQTDGAGDWREKEAKDLTELVQRRITYLQNPKDCSKAKKLVCNINKGCGYGCQLHHVVYCFMIAYGTQRTLILESQNWRYATGGWETVFRPVSETCTDRSGISTGHWSGEVKDKNVQVVELPIVDSLHPRPPYLPLAVPEDLADRLVRVHGDPAVWWVSQFVKYLIRPQPWLEKEIEEATKKLGFKHPVIGVHVRRTDKVGTEAAFHPIEEYMVHVEEHFQLLARRMQVDKKRVYLATDDPSLLKEAKTKYPNYEFISDNSISWSAGLHNRYTENSLRGVILDIHFLSQADFLVCTFSSQVCRVAYEIMQTLHPDASANFHSLDDIYYFGGQNAHNQIAIYAHQPRTADEIPMEPGDIIGVAGNHWDGYSKGVNRKLGRTGLYPSYKVREKIETVKYPTYPEAEK

SEQ ID NO: 888102 - protein, 575 aa, Homo sapiens; identical to SEQ ID NO: 888098

SEQ ID NO: 888103 - protein, 308 aa, Homo sapiens
MRPWTGSWRWIMLILFAWGTLLFYIGGHLVRDNDHPDHSSRELSKILAKLERLKQQNEDLRRMAESLRIPEGPIDQGPAIGRVRVLEEQLVKAKEQIENYKKQTRNGLGKDHEILRRRIENGAKELWFFLQSELKKLKNLEGNELQRHADEFLLDLGHHERSIMTDLYYLSQTDGAGDWREKEAKDLTELVQRRITYLQNPKDCSKAKKLVCNINKGCGYGCQLHHVVYCFMIAYGTQRTLILESQNWRYATGGWETVFRPVSETCTDRSGISTGHWSGTPIMNLLVITLFPGQLDCTIDTQKIHFVE

SEQ ID NO: 888104 - protein, 367 aa, Homo sapiens
MRPWTGSWRWIMLILFAWGTLLFYIGGHLVRDNDHPDHSSRELSKILAKLERLKQQNEDLRRMAESLRIPEGPIDQGPAIGRVRVLEEQLVKAKEQIENYKKQTRNGLGKDHEILRRRIENGAKELWFFLQSELKKLKNLEGNELQRHADEFLLDLGHHERSIMTDLYYLSQTDGAGDWREKEAKDLTELVQRRITYLQNPKDCSKAKKLVCNINKGCGYGCQLHHVVYCFMIAYGTQRTLILESQNWRYATGGWETVFRPVSETCTDRSGISTGHWSGEVKDKNVQVVELPIVDSLHPRPPYLPLAVPEDLADRLVRVHGDPAVWWVSQFVNHEAVDHMMELTAIATACVDSDIPACGLCVQSLGF

SEQ ID NO: 888105 - protein, 575 aa, Homo sapiens; identical to SEQ ID NO: 888098

SEQ ID NO: 888106 - protein, 575 aa, Homo sapiens; identical to SEQ ID NO: 888098

SEQ ID NO: 888107 - protein, 575 aa, Homo sapiens; identical to SEQ ID NO: 888098

SEQ ID NO: 888108 - protein, 575 aa, Homo sapiens; identical to SEQ ID NO: 888098

SEQ ID NO: 888109 - protein, 458 aa, Homo sapiens
MRPWTGSWRWIMLILFAWGTLLFYIGGHLVRDNDHPDHSSRELSKILAKLERLKQQNEDLRRMAESLRIPEGPIDQGPAIGRVRVLEEQLVKAKEQIENYKKQTRNGLGKDHEILRRRIENGAKELWFFLQSELKKLKNLEGNELQRHADEFLLDLGHHERSIMTDLYYLSQTDGAGDWREKEAKDLTELVQRRITYLQNPKDCSKAKKLVCNINKGCGYGCQLHHVVYCFMIAYGTQRTLILESQNWRYATGGWETVFRPVSETCTDRSGISTGHWSGEVKDKNVQVVELPIVDSLHPRPPYLPLAVPEDLADRLVRVHGDPAVWWVSQFVKYLIRPQPWLEKEIEEATKKLGFKHPVIGVHVRRTDKVGTEAAFHPIEEYMVHVEEHFQLLARRMQVDKKRVYLATDDPSLLKEAKTKYPNYEFISDNSISWSAGLHNRYTVPSVYFFIPGLSSCL

SEQ ID NO: 888110 - protein, 219 aa, Homo sapiens
LIPPPPPGPATRPFVSPRNGAGTAQGRAPWTQLALGLALSATARLAPPRALPQSVAPKAPLSGGGGSCFRFFLSVRSGVASSTQPPFPLPHRGAAAAEGCGFGSCDGERRRPPLLPPGVRGRFGSRAPRASGSWAGLRAGSEEAPRLSLLVHPGLLLQLLPVNQRLSEKWGGSPRDALADALAQPRGRGQRVRGARLSSRDAELRRCCPRRRASLPRAG

SEQ ID NO: 888111 - protein, 373 aa, Homo sapiens
PRWGLGGPLKRVDWLGVLRSANPDAPGRRGPASSPALWARSAPREGGWMPGSSGAGMEAAVAPGRDAPAPAASQPSGCGKHNSPERKVYMDYNATTPLEPEVIQAMTKAMWEAWGNPSSPYSAGRKAKDIINAARESLAKMIGGKPQDIIFTSGGTESNNLVIHSVVKHFHANQTSKGHTGGHHSPVKGAKPHFITSSVEHDSIRLPLEHLVEEQVAAVTFVPVSKVSGQTEVDDILAAVRPTTRLVTIMLANNETGIVMPVPEISQRIKALNQERVAAGLPPILVHTDAAQALGKQRVDVEDLGVDFLTIVGHKFYGPRIGALYIRGLGEFTPLYPMLFGGGQERNFRPGTENTPMIAGLGKVSPGELEEMS

SEQ ID NO: 888112 - protein, 436 aa, Homo sapiens
PRWGLGGPLKRVDWLGVLRSANPDAPGRRGPASSPALWARSAPREGGWMPGSSGAGMEAAVAPGRDAPAPAASQPSGCGKHNSPERKVYMDYNATTPLEPEVIQAMTKAMWEAWGNPSSPYSAGRKAKDIINAARESLAKMIGGKPQDIIFTSGGTESNNLVIHSVVKHFHANQTSKGHTGGHHSPVKGAKPHFITSSVEHDSIRLPLEHLVEEQVAAVTFVPVSKVSGQTEVDDILAAVRPTTRLVTIMLANNETGIVMPVPEISQRIKALNQERVAAGLPPILVHTDAAQALGKQRVDVEDLGVDFLTIVGHKFYGPRIGALYIRGLGEFTPLYPMLFGGGQERNFRPGTENTPMIAGLGKAAELVTQNCEAYEAHMRDVRDYLEERLEAEFGQKRIHLNSQFPGTQRLPNTCNFSIRGPRLQGDGPSPWSFRV

SEQ ID NO: 888113 - protein, 366 aa, Homo sapiens
PRWGLGGPLKRVDWLGVLRSANPDAPGRRGPASSPALWARSAPREGGWMPGSSGAGMEAAVAPGRDAPAPAASQPSGCGKHNSPERKVYMDYNATTPLEPEVIQAMTKAMWEAWGNPSSPYSAGRKAKDIINAARESLAKMIGGKPQDIIFTSGGTESNNLVIHSVVKHFHANQTSKGHTGGHHSPVKGAKPHFITSSVEHDSIRLPLEHLVEEQVAAVTFVPVSKVSGQTEVDDILAAVRPTTRLVTIMLANNETGIVMPVPEISQRIKALNQERVAAGLPPILVHTDAAQALGKQRVDVEDLGVDFLTIVGHKFYGPRIGALYIRGLGEFTPPASPSLTLFRPLAIRAAHFPVHGPQAFLSCPF

SEQ ID NO: 888114 - protein, 331 aa, Homo sapiens
PRWGLGGPLKRVDWLGVLRSANPDAPGRRGPASSPALWARSAPREGGWMPGSSGAGMEAAVAPGRDAPAPAASQPSGCGKHNSPERKVYMDYNATTPLEPEVIQAMTKAMWEAWGNPSSPYSAGRKAKDIINAARESLAKMIGGKPQDIIFTSGGTESNNLVIHSVVKHFHANQTSKGHTGGHHSPVKGAKPHFITSSVEHDSIRLPLEHLVEEQVAAVTFVPVSKVSGQTEVDDILAAVRPTTRLVTIMLANNETGIVMPVPEISQRIKALNQERVAAGLPPILVHTDAAQALGKQRVDVEDLGVDFLTIVGHKDREHPNDCWPWEGEPW

SEQ ID NO: 888115 - protein, 371 aa, Homo sapiens
REICTSAVRGLLFQYRGGAGMEAAVAPGRDAPAPAASQPSGCGKHNSPERKVYMDYNATTPLEPEVIQAMTKAMWEAWGNPSSPYSAAVTFVPVSKVSGQTEVDDILAAVRPTTRLVTIMLANNETGIVMPVPEISQRIKALNQERVAAGLPPILVHTDAAQALGKQRVDVEDLGVDFLTIVGHKFYGPRIGALYIRGLGEFTPLYPMLFGGGQERNFRPGTENTPMIAGLGKAAELVTQNCEAYEAHMRDVRDYLEERLEAEFGQKRIHLNSQFPGTQRLPNTCNFSIRGPRLQGHVVLAQCRVLMASVGAACHSDHGDQPSPVLLSYGVPFDVARNALRLSVGRSTTRAEVDLVVQDLKQAVAQLEDQA

SEQ ID NO: 888116 - protein, 219 aa, Homo sapiens
PRWGLGGPLKRVDWLGVLRSANPDAPGRRGPASSPALWARSAPREGGWMPGSSGAGMEAAVAPGRDAPAPAASQPSGCGKHNSPERKVYMDYNATTPLEPEVIQAMTKAMWEAWGNPSSPYSAGRKAKDIINAARESLAKMIGGKPQDIIFTSGGTESNNLVIHSVVKHFHANQTSKGHTGGHHSPVKGAKPHFITSSVEHDSIRLPLEHLVEEQVAGE

SEQ ID NO: 888117 - protein, 114 aa, Homo sapiens
REICTSAVRGLLFQYRGGAGMEAAVAPGRDAPAPAASQPSGCGKHNSPERKVYMDYNATTPLEPEVIQAMTKAMWEAWGNPSSPYSAGNSRRCTCSLMGDNGDGALLEKLHTHT

SEQ ID NO: 888118 - protein, 337 aa, Homo sapiens
REICTSAVRGLLFQYRGGAGMEAAVAPGRDAPAPAASQPSGCGKHNSPERKVYMDYNATTPLEPEVIQAMTKAMWEAWGNPSSPYSAGRKAKDIINAARESLAKMIGGKPQDIIFTSGGTESNNLVIHSVVKHFHANQTSKGHTGGHHSPVKGAKPHFITSSVEHDSIRLPLEHLVEEQVAAVTFVPVSKVSGQTEVDDILAAVRPTTRLVTIMLANNETGIVMPVPEISQRIKALNQERVAAGLPPILVHTDAAQALGKQRVDVEDLGVDFLTIVGHKFYGPRIGALYIRGLGEFTPLYPMLFGGGQERNFRPGTENTPMIAGLGKVSPGELEEMS

SEQ ID NO: 888119 - protein, 501 aa, Homo sapiens
PRWGLGGPLKRVDWLGVLRSANPDAPGRRGPASSPALWARSAPREGGWMPGSSGAGMEAAVAPGRDAPAPAASQPSGCGKHNSPERKVYMDYNATTPLEPEVIQAMTKAMWEAWGNPSSPYSAGRKAKDIINAARESLAKMIGGKPQDIIFTSGGTESNNLVIHSVVKHFHANQTSKGHTGGHHSPVKGAKPHFITSSVEHDSIRLPLEHLVEEQVAAVTFVPVSKVSGQTEVDDILAAVRPTTRLVTIMLANNETGIVMPVPEISQRIKALNQERVAAGLPPILVHTDAAQALGKQRVDVEDLGVDFLTIVGHKFYGPRIGALYIRGLGEFTPLYPMLFGGGQERNFRPGTENTPMIAGLGKAAELVTQNCEAYEAHMRDVRDYLEERLEAEFGQKRIHLNSQFPGTQRLPNTCNFSIRGPRLQGHVVLAQCRVLMASVGAACHSDHGDQPSPVLLSYGVPFDVARNALRLSVGRSTTRAEVDLVVQDLKQAVAQLEDQA

SEQ ID NO: 888120 - protein, 463 aa, Homo sapiens
PRWGLGGPLKRVDWLGVLRSANPDAPGRRGPASSPALWARSAPREGGWMPGSSGAGMEAAVAPGRDAPAPAASQPSGCGKHNSPERKVYMDYNATTPLEPEVIQAMTKAMWEAWGNPSSPYSAGRKAKDIINAARESLAKMIGGKPQDIIFTSGGTESNNLVIHSVVKHFHANQTSKGHTGGHHSPVKGAKPHFITSSVEHDSIRLPLEHLVEEQVAAVTFVPVSKVSGQTEVDDILAAVRPTTRLVTIMLANNETGIVMPVPEISQRIKALNQERVAAGLPPILVHTDAAQALGKQRVDVEDLGVDFLTIVGHKFYGPRIGALYIRGLGEFTPLYPMLFGGGQERNFRPGTENTPMIAGLGKAEFGQKRIHLNSQFPGTQRLPNTCNFSIRGPRLQGHVVLAQCRVLMASVGAACHSDHGDQGFFSQNALAFGHTSHVDICIGVIFSGITFLMCGFTVQGTT

SEQ ID NO: 888121 - protein, 531 aa, Homo sapiens
MYECGARVVISVQGWGGDGGGRGAGEGCAGTRGESAQRLRETQLAGEVRAFRAGLGSGRRLSPIVPRGRTKGAPGLWPLSRGASRAGMSARSAKVRDASFKEERVRAVAPQGPTERKVYMDYNATTPLEPEVIQAMTKAMWEAWGNPSSPYSAGRKAKDIINAARESLAKMIGGKPQDIIFTSGGTESNNLVIHSVVKHFHANQTSKGHTGGHHSPVKGAKPHFITSSVEHDSIRLPLEHLVEEQVAAVTFVPVSKVSGQTEVDDILAAVRPTTRLVTIMLANNETGIVMPVPEISQRIKALNQERVAAGLPPILVHTDAAQALGKQRVDVEDLGVDFLTIVGHKFYGPRIGALYIRGLGEFTPLYPMLFGGGQERNFRPGTENTPMIAGLGKAAELVTQNCEAYEAHMRDVRDYLEERLEAEFGQKRIHLNSQFPGTQRLPNTCNFSIRGPRLQGHVVLAQCRVLMASVGAACHSDHGDQPSPVLLSYGVPFDVARNALRLSVGRSTTRAEVDLVVQDLKQAVAQLEDQA

SEQ ID NO: 888122 - protein, 71 aa, Homo sapiens
GERPHRTAHIGPPTWDRPHRTVHMGPPTWQRRIGLPTWDRPHRTAHMDRPHGTAHMGPPTWDRPHRTVLQW

SEQ ID NO: 888123 - protein, 343 aa, Homo sapiens
AERRGRPLAGQRHVAAPAGILGHYLPPAHSPWVGEGSSGREGWRSGADGGSPAQPLPGSVLRPRPAPRPSPSPPAAPARPSVPPPAAPQYAQCTLEGAYEPGAAPAAAAGGADYGFLGSGPAYDFPGVLGRAAFSACLKASADGHPGAFQTASPAPGTYPKSVSPASGLPAAFSTFEWMKVKRNASKKDSGWVLWRRRVPGRIPWSLPRVQIRKMCQALRKFQEGALRGTSPGKLAEYGAASPSSAIRTNFSTKQLTELEKEFHFNKYLTRARRIEIANCLHLNDTQVKIWFQNRRMKQKKREREGLLATAIPVAPLQLPLSGTTPTKFIKNPGSPSQSQEPS

SEQ ID NO: 888124 - protein, 328 aa, Homo sapiens
MSSYLEYVSCSSSGGVGGDVLSLAPKFCRSDARPVALQPAFPLGNGDGAFVSCLPLAAARPSPSPPAAPARPSVPPPAAPQYAQCTLEGAYEPGAAPAAAAGGADYGFLGSGPAYDFPGVLGRAADDGGSHVHYATSAVFSGGGSFLLSGQVDYAAFGEPGPFPACLKASADGHPGAFQTASPAPGTYPKSVSPASGLPAAFSTFEWMKVKRNASKKGKLAEYGAASPSSAIRTNFSTKQLTELEKEFHFNKYLTRARRIEIANCLHLNDTQVKIWFQNRRMKQKKREREGLLATAIPVAPLQLPLSGTTPTKFIKNPGSPSQSQEPS

SEQ ID NO: 888125 - protein, 226 aa, Homo sapiens
MDGSHSAALKLQQLPPTSSSSAVSEASFSYKENLIGALLAIFGHLVVSIALNLQKYCHIRLAGSKDPRAYFKTKTWWLGLFLMLLGELGVFASYAFAPLSLIVPLSAVSVIASAIIGIIFIKEKWKPKDFLRRYVLSFVGCGLAVVGTYLLVTFAPNSHEKMTGENVTRHLVSWPFLLYMLVEIILFCLLLYFYKEKNANNIVVILLLVALLVLLCHPGWSAVVQS

SEQ ID NO: 888126 - protein, 406 aa, Homo sapiens
MDGSHSAALKLQQLPPTSSSSAVSEASFSYKENLIGALLAIFGHLVVSIALNLQKYCHIRLAGSKDPRAYFKTKTWWLGLFLMLLGELGVFASYAFAPLSLIVPLSAVSVIASAIIGIIFIKEKWKPKDFLRRYVLSFVGCGLAVVGTYLLVTFAPNSHEKMTGENVTRHLVSWPFLLYMLVEIILFCLLLYFYKEKNANNIVVILLLVALLGSMTVVTVKAVAGMLVLSIQGNLQLDYPIFYVMFVCMVATAVYQAAFLSQASQMYDSSLIASVGYILSTTIAITAGAIFYLDFIGEDVLHICMFALGCLIAFLGVFLITRNRKKPIPFEPYISMDAMPGMQNMHDKGMTVQPELKASFSYGALENNDNISEIYAPATLPVMQEEHGSRSASGVPYRVLEHTKKE

SEQ ID NO: 888127 - protein, 406 aa, Homo sapiens; identical to SEQ ID NO: 888126

SEQ ID NO: 888128 - protein, 406 aa, Homo sapiens; identical to SEQ ID NO: 888126

SEQ ID NO: 888129 - protein, 321 aa, Homo sapiens
MVLGVFASYAFAPLSLIVPLSAVSVIASAIIGIIFIKEKWKPKDFLRRYVLSFVGCGLAVVGTYLLVTFAPNSHEKMTGENVTRHLVSWPFLLYMLVEIILFCLLLYFYKEKNANNIVVILLLVALLGSMTVVTVKAVAGMLVLSIQGNLQLDYPIFYVMFVCMVATAVYQAAFLSQASQMYDSSLIASVGYILSTTIAITAGAIFYLDFIGEDVLHICMFALGCLIAFLGVFLITRNRKKPIPFEPYISMDAMPGMQNMHDKGMTVQPELKASFSYGALENNDNISEIYAPATLPVMQEEHGSRSASGVPYRVLEHTKKE

SEQ ID NO: 888130 - protein, 406 aa, Homo sapiens; identical to SEQ ID NO: 888126

SEQ ID NO: 888131 - protein, 368 aa, Homo sapiens
MDGSHSAALKLQQLPPTSSSSAVSEASFSYKENLIGALLAIFGHLVVSIALNLQKYCHIRLAGSKDPRAYFKTKTWWLGLFLMLLGELGVFASYAFAPLSLIVPLSAVSVIASAIIGIIFIKEKWKPKDFLRRYVLSFVGCGLAVVGTYLLVTFAPNSHEKMTGENVTRHLVSWPFLLYMLVEIILFCLLLYFYKEKNANNIVVILLLVALLGSMTVVTVKAVAGMLVLSIQGNLQLDYPIFYVMFVCMVATAVYQAAFLSQASQMYDSSLIASVGYILSTTIAITAGAIFYLDFIGEDVLHICMFALGCLIAFLGVFLITRNRKKPIPFEPYISMDAMPDSYLHNRQLLFKRYSNSRNLPHHNLESL

SEQ ID NO: 888132 - protein, 258 aa, Homo sapiens
MDGSHSAALKLQQLPPTSSSSAVSEASFSYKENLIGALLAIFGHLVVSIALNLQKYCHIRLAGSKDPRAYFKTKTWWLGLFLMLLGELGVFASYAFAPLSLIVPLSAVSVIASAIIGIIFIKEKWKPKDFLRRYVLSFVGCGLAVVGTYLLVTFAPNSHEKMTGENVTRHLVSWPFLLYMLVEIILFCLLLYFYKEKNANNIVVILLLVALLGSMTVVTVKAVAGMLVLSIQGNLQLDYPIFYVMFVCMVATAVYQAA

SEQ ID NO: 888133 - protein, 77 aa, Homo sapiens
ILAALNWEGMKEAVPPGCTKSPSHFSEGFDRWALEETPPSTARTGKHTPLCLPGRATEIGTSLSEAEEKAVNLPKQP

SEQ ID NO: 888134 - protein, 406 aa, Homo sapiens; identical to SEQ ID NO: 888126

SEQ ID NO: 888135 - protein, 406 aa, Homo sapiens; identical to SEQ ID NO: 888126

SEQ ID NO: 888136 - protein, 385 aa, Homo sapiens
HVHSCELSLQENLIGALLAIFGHLVVSIALNLQKYCHIRLAGSKDPRAYFKTKTWWLGLFLMLLGELGVFASYAFAPLSLIVPLSAVSVIASAIIGIIFIKEKWKPKDFLRRYVLSFVGCGLAVVGTYLLVTFAPNSHEKMTGENVTRHLVSWPFLLYMLVEIILFCLLLYFYKEKNANNIVVILLLVALLGSMTVVTVKAVAGMLVLSIQGNLQLDYPIFYVMFVCMVATAVYQAAFLSQASQMYDSSLIASVGYILSTTIAITAGAIFYLDFIGEDVLHICMFALGCLIAFLGVFLITRNRKKPIPFEPYISMDAMPGMQNMHDKGMTVQPELKASFSYGALENNDNISEIYAPATLPVMQEEHGSRSASGVPYRVLEHTKKE

SEQ ID NO: 888137 - protein, 192 aa, Homo sapiens [sequence omitted]

SEQ ID NO: 888138 - protein, 378 aa, Homo sapiens
MDGSHSAALKLQQLPPTSSSSAVSEASFSYKENLIGALLAIFGHLVVSIALNLQKYCHIRLAGSKDPRAYFKTKTWWLGLFLMLLGELGVFASYAFAPLSLIVPLSAVSVIASAIIGIIFIKEKWKPKDFLRRYVLSFVGCGLAVVGTYLLVTFAPNSHEKMTGENVTRHLVSWPFLLYMLVEIILFCLLLYFYKEKNANNIVVILLLVALLGSMTVVTVKAVAGMLVLSIQGNLQLDYPIFYVMFVCMVATAVYQAAFLSQASQMYDSSLIASVGYILSTTIAITAGAIFYLDFIGEDVLHICMFALGCLIAFLGVFLITRNRKKPIPFEPYISMDAMPVETSQFDGTVRIQDSIRLVLGNQPGSLPCEFQSCFNTG

SEQ ID NO: 888139 - protein, 1152 aa, Homo sapiens
AGPFSPRADGGGEKSGWAGTKAGSREATGCWGAPDFAGFVGPVEEAPRTDFGRGRAGLSAAMSAKAISEQTGKELLYKFICTTSAIQNRFKYARVTPDTDWARLLQDHPWLLSQNLVVKPDQLIKRRGKLGLVGVNLTLDGVKSWLKPRLGQEATVGKATGFLKNFLIEPFVPHSQAEEFYVCIYATREGDYVLFHHEGGVDVGDVDAKAQKLLVGVDEKLNPEDIKKHLLVHAPEDKKEILASFISGLFNFYEDLYFTYLEINPLVVTKDGVYVLDLAAKVDATADYICKVKWGDIEFPPPFGREAYPEEAYIADLDAKSGASLKLTLLNPKGRIWTMVAGGGASVVYSDTICDLGGVNELANYGEYSGAPSEQQTYDYAKTILSLMTREKHPDGKILIIGGSIANFTNVAATFKGIVRAIRDYQGPLKEHEVTIFVRRGGPNYQEGLRVMGEVGKTTGIPIHVFGTETHMTAIVGMALGHRPIPNQPPTAAHTANFLLNASGSTSTPAPSRTASFSESRADEVAPAKKAKPAMPQGKSTTLFSRHTKAIVWGMQTRAVQGMLDFDYVCSRDEPSVAAMVYPFTGDHKQKFYWGHKEILIPVFKNMADAMRKHPEVDVLINFASLRSAYDSTMETMNYAQIRTIAIIAEGIPEALTRKLIKKADQKGVTIIGPATVGGIKPGCFKIGNTGGMLDNILASKLYRPGSVAYVSRSGGMSNELNNIISRTTDGVYEGVAIGGDRYPGSTFMDHVLRYQDTPGVKMIVVLGEIGGTEEYKICRGIKEGRLTKPIVCWCIGTCATMFSSEVQFGHAGACANQASETAVAKNQALKEAGVFVPRSFDELGEIIQSVYEDLVANGVIVPAQEVPPPTVPMDYSWARELGLIRKPASFMTSICDERGQELIYAGMPITEVFKEEMGIGGVLGLLWFQKRLPKYSCQFIEMCLMVTADHGPAVSGAHNTIICARAGKDLVSSLTSGLLTIGDRFGGALDAAAKMFSKAFDSGIIPMEFVNKMKKEGKLIMGIGHRVKSINNPDMRVQILKDYVRQHFPATPLLDYALEVEKITTSKKPNLILNVDGLIGVAFVDMLRNCGSFTREEADEYIDIGALNGIFVLGRSMGFIGHYLDQKRLKQGLYRHPWDDISYVLPEHMSM

SEQ ID NO: 888140 - protein, 1162 aa, Homo sapiens
AGPFSPRADGGGEKSGWAGTKAGSREATGCWGAPDFAGFVGPVEEAPRTDFGRGRAGLSAAMSAKAISEQTGKELLYKFICTTSAIQNRFKYARVTPDTDWARLLQDHPWLLSQNLVVKPDQLIKRRGKLGLVGVNLTLDGVKSWLKPRLGQEATVGKATGFLKNFLIEPFVPHSQAEEFYVCIYATREGDYVLFHHEGGVDVGDVDAKAQKLLVGVDEKLNPEDIKKHLLVHAPEDKKEILASFISGLFNFYEDLYFTYLEINPLVVTKDGVYVLDLAAKVDATADYICKVKWGDIEFPPPFGREAYPEEAYIADLDAKSGASLKLTLLNPKGRIWTMVAGGGASVVYSDTICDLGGVNELANYGEYSGAPSEQQTYDYAKTILSLMTREKHPDGKILIIGGSIANFTNVAATFKGIVRAIRDYQGPLKEHEVTIFVRRGGPNYQEGLRVMGEVGKTTGIPIHVFGTETHMTAIVGMALGHRPIPNQPPTAAHTANFLLNASGSTSTPAPSRTASFSESRADEVAPAKKAKPAMPQDSVPSPRSLQGKSTTLFSRHTKAIVWGMQTRAVQGMLDFDYVCSRDEPSVAAMVYPFTGDHKQKFYWGHKEILIPVFKNMADAMRKHPEVDVLINFASLRSAYDSTMETMNYAQIRTIAIIAEGIPEALTRKLIKKADQKGVTIIGPATVGGIKPGCFKIGNTGGMLDNILASKLYRPGSVAYVSRSGGMSNELNNIISRTTDGVYEGVAIGGDRYPGSTFMDHVLRYQDTPGVKMIVVLGEIGGTEEYKICRGIKEGRLTKPIVCWCIGTCATMFSSEVQFGHAGACANQASETAVAKNQALKEAGVFVPRSFDELGEIIQSVYEDLVANGVIVPAQEVPPPTVPMDYSWARELGLIRKPASFMTSICDERGQELIYAGMPITEVFKEEMGIGGVLGLLWFQKRLPKYSCQFIEMCLMVTADHGPAVSGAHNTIICARAGKDLVSSLTSGLLTIGDRFGGALDAAAKMFSKAFDSGIIPMEFVNKMKKEGKLIMGIGHRVKSINNPDMRVQILKDYVRQHFPATPLLDYALEVEKITTSKKPNLILNVDGLIGVAFVDMLRNCGSFTREEADEYIDIGALNGIFVLGRSMGFIGHYLDQKRLKQGLYRHPWDDISYVLPEHMSM

SEQ ID NO: 888141 - protein, 1162 aa, Homo sapiens; identical to SEQ ID NO: 888140

SEQ ID NO: 888142 - protein, 641 aa, Homo sapiens
SVRQPWPLQVSWGYVFWVHSLCLCPPGKSTTLFSRHTKAIVWGMQTRAVQGMLDFDYVCSRDEPSVAAMVYPFTGDHKQKFYWGHKEILIPVFKNMADAMRKHPEVDVLINFASLRSAYDSTMETMNYAQIRTIAIIAEGIPEALTRKLIKKADQKGVTIIGPATVGGIKPGCFKIGNTGGMLDNILASKLYRPGSVAYVSRSGGMSNELNNIISRTTDGVYEGVAIGGDRYPGSTFMDHVLRYQDTPGVKMIVVLGEIGGTEEYKICRGIKEGRLTKPIVCWCIGTCATMFSSEVQFGHAGACANQASETAVAKNQALKEAGVFVPRSFDELGEIIQSVYEDLVANGVIVPAQEVPPPTVPMDYSWARELGLIRKPASFMTSICDERGQELIYAGMPITEVFKEEMGIGGVLGLLWFQKRLPKYSCQFIEMCLMVTADHGPAVSGAHNTIICARAGKDLVSSLTSGLLTIGDRFGGALDAAAKMFSKAFDSGIIPMEFVNKMKKEGKLIMGIGHRVKSINNPDMRVQILKDYVRQHFPATPLLDYALEVEKITTSKKPNLILNVDGLIGVAFVDMLRNCGSFTREEADEYIDIGALNGIFVLGRSMGFIGHYLDQKRLKQGLYRHPWDDISYVLPEHMSM

SEQ ID NO: 888143 - protein, 1024 aa, Homo sapiens
AGPFSPRADGGGEKSGWAGTKAGSREATGCWGAPDFAGFVGPVEEAPRTDFGRGRAGLSAAMSAKAISEQTGKELLYKFICTTSAIQNRFKYARVTPDTDWARLLQDHPWLLSQNLVVKPDQLIKRRGKLGLVGVNLTLDGVKSWLKPRLGQEATVGKATGFLKNFLIEPFVPHSQAEEFYVCIYATREGDYVLFHHEGGVDVGDVDAKAQKLLVGVDEKLNPEDIKKHLLVHAPEDKKEILASFISGLFNFYEDLYFTYLEINPLVVTKDGVYVLDLAAKVDATADYICKVKWGDIEFPPPFGREAYPEEAYIADLDAKSGASLKLTLLNPKGRIWTMVAGGGASVVYSDTICDLGGVNELANYGEYSGAPSEQQTYDYAKTILSLMTREKHPDGKILIIGGSIANFTNVAATFKGIVRAIRDYQGPLKEHEVTIFVRRGGPNYQEGLRVMGEVGKTTGIPIHVFGTETHMTAIVGMALGHRPIPNQPPTAAHTANFLLNASGSTSTPAPSRTASFSESRADEVAPAKKAKPAMPQDSVPSPRSLQGKSTTLFSRHTKAIVWGMQTRAVQGMLDFDYVCSRDEPSVAAMVYPFTGDHKQKFYWGHKEILIPVFKNMADAMRKHPEVDVLINFASLRSAYDSTMETMNYAQIRTIAIIAEGIPEALTRKLIKKADQKGVTIIGPATVGGIKPGCFKIGNTGGMLDNILASKLYRPGSVAYVSRSGGMSNELNNIISRTTDGVYEGVAIGGDRYPGSTFMDHVLRYQDTPGVKMIVVLGEIGGTEEYKICRGIKEGRLTKPIVCWCIGTCATMFSSEVQFGHAGACANQASETAVAKNQALKEAGVFVPRSFDELGEIIQSVYEDLVANGVIVPAQEVPPPTVPMDYSWARELGLIRKPASFMTSICDERGQELIYAGMPITEVFKEEMGIGGVLGLLWFQKRLPKYSCQFIEMCLMVTADHGPAVSGAHNTIICARAGKDLVSSLTSGLLTIGDRFGGALDAAAKITLPPRKSVQTAGSGACFI

SEQ ID NO: 888144 - protein, 117 aa, Homo sapiens
MRVQILKDYVRQHFPATPLLDYALEVEKITTSKKPNLILNVDGLIGVAFVDMLRNCGSFTREEADEYIDIGALNGIFVLGRSMGFIGHYLDQKRLKQGLYRHPWDDISYVLPEHMSM

SEQ ID NO: 888145 - protein, 146 aa, Homo sapiens
AAAYYYYIPGRSTLIMGIGHRVQSINNPDMRVQILKDYVRQHFPATPLLDYALEVEKITTSKKPNLILNVDGLIGVAFVDMLRNCGSFTREEADEYIDIGALNGIFVLGRSMGFIGHYLDQKRLKQGLYRHPWDDISYVLPEHMSM

SEQ ID NO: 888146 - protein, 1073 aa, Homo sapiens
AGPFSPRADGGGEKSGWAGTKAGSREATGCWGAPDFAGFVGPVEEAPRTDFGRGRAGLSAAMSAKAISEQTGKELLYKFICTTSAIQNRFKYARVTPDTDWARLLQDHPWLLSQNLVVKPDQLIKRRGKLGLVGVNLTLDGVKSWLKPRLGQEATVGKATGFLKNFLIEPFVPHSQAEEFYVCIYATREGDYVLFHHEGGVDVGDVDAKAQKLLVGVDEKLNPEDIKKHLLVHAPEDKKEILASFISGLFNFYEDLYFTYLEINPLVVTKDGVYVLDLAAKVDATADYICKVKWGDIEFPPPFGREAYPEEAYIADLDAKSGASLKLTLLNPKGRIWTMVAGGGASVVYSDTICDLGGVNELANYGEYSGAPSEQQTYDYAKTILSLMTREKHPDGKILIIGGSIANFTNVAATFKGIVRAIRDYQGPLKEHEVTIFVRRGGPNYQEGLRVMGEVGKTTGIPIHVFGTETHMTAIVGMALGHRPIPNQPPTAAHTANFLLNASGSTSTPAPSRTASFSESRADEVAPAKKAKPAMPQDSVPSPRSLQGKSTTLFSRHTKAIVWGMQTRAVQGMLDFDYVCSRDEPSVAAMVYPFTGDHKQKFYWGHKEILIPVFKNMADAMRKHPEVDVLINFASLRSAYDSTMETMNYAQIRTIAIIAEGIPEALTRKLIKKADQKGVTIIGPATVGGIKPGCFKIGNTGGMLDNILASKLYRPGSVAYVSRSGGMSNELNNIISRTTDGVYEGVAIGGDRYPGSTFMDHVLRYQDTPGVKMIVVLGEIGGTEEYKICRGIKEGRLTKPIVCWCIGTCATMFSSEVQFGHAGACANQASETAVAKNQALKEAGVFVPRSFDELGEIIQSVYEDLVANGVIVPAQEVPPPTVPMDYSWARELGLIRKPASFMTSICDERGQELIYAGMPITEVFKEEMGIGGVLGLLWFQKRLPKYSCQFIEMCLMVTADHGPAVSGAHNTIICARAGKDLVSSLTSGLLTIGDRFGGALDAAAKMFSKAFDSGIIPMEFVNKMKKEGKLIMGIGHRVKSVSCYSPKKVGWRPGAVAHACNHSTLGGQGRWIT

SEQ ID NO: 888147 - protein, 701 aa, Homo sapiens
AGPFSPRADGGGEKSGWAGTKAGSREATGCWGAPDFAGFVGPVEEAPRTDFGRGRAGLSAAMSAKAISEQTGKELLYKFICTTSAIQNRFKYARVTPDTDWARLLQDHPWLLSQNLVVKPDQLIKRRGKLGLVGVNLTLDGVKSWLKPRLGQEATVGKATGFLKNFLIEPFVPHSQAEEFYVCIYATREGDYVLFHHEGGVDVGDVDAKAQKLLVGVDEKLNPEDIKKHLLVHAPEDKKEILASFISGLFNFYEDLYFTYLEINPLVVTKDGVYVLDLAAKVDATADYICKVKWGDIEFPPPFGREAYPEEAYIADLDAKSGASLKLTLLNPKGRIWTMVAGGGASVVYSDTICDLGGVNELANYGEYSGAPSEQQTYDYAKTILSLMTREKHPDGKILIIGGSIANFTNVAATFKGIVRAIRDYQGPLKEHEVTIFVRRGGPNYQEGLRVMGEVGKTTGIPIHVFGTETHMTAIVGMALGHRPIPNQPPTAAHTANFLLNASGSTSTPAPSRTASFSESRADEVAPAKKAKPAMPQDSVPSPRSLQGKSTTLFSRHTKAIVWGMQTRAVQGMLDFDYVCSRDEPSVAAMVYPFTGDHKQKFYWGHKEILIPVFKNMADAMRKHPEVDVLINFASLRSAYDSTMETMNYAQIRTIAIIAEGIPEALTRKLIKKADQKGVTIIGPATVSFPSGKPFTFDAIL

SEQ ID NO: 888148 - protein, 829 aa, Homo sapiens
AGPFSPRADGGGEKSGWAGTKAGSREATGCWGAPDFAGFVGPVEEAPRTDFGRGRAGLSAAMSAKAISEQTGKELLYKFICTTSAIQNRFKYARVTPDTDWARLLQDHPWLLSQNLVVKPDQLIKRRGKLGLVGVNLTLDGVKSWLKPRLGQEATVGKATGFLKNFLIEPFVPHSQAEEFYVCIYATREGDYVLFHHEGGVDVGDVDAKAQKLLVGVDEKLNPEDIKKHLLVHAPEDKKEILASFISGLFNFYEDLYFTYLEINPLVVTKDGVYVLDLAAKVDATADYICKVKWGDIEFPPPFGREAYPEEAYIADLDAKSGASLKLTLLNPKGRIWTMVAGGGASVVYSDTICDLGGVNELANYGEYSGAPSEQQTYDYAKTILSLMTREKHPDGKILIIGGSIANFTNVAATFKGIVRAIRDYQGPLKEHEVTIFVRRGGPNYQEGLRVMGEVGKTTGIPIHVFGTETHMTAIVGMALGHRPIPNQPPTAAHTANFLLNASGSTSTPAPSRTASFSESRADEVAPAKKAKPAMPQGKSTTLFSRHTKAIVWGMQTRAVQGMLDFDYVCSRDEPSVAAMVYPFTGDHKQKFYWGHKEILIPVFKNMADAMRKHPEVDVLINFASLRSAYDSTMETMNYAQIRTIAIIAEGIPEALTRKLIKKADQKGVTIIGPATVGGIKPGCFKIGNTGGMLDNILASKLYRPGSVAYVSRSGGMSNELNNIISRTTDGVYEGVAIGGDRYPGLHFPGSCCNAIQDLQESPPHRGSWRTLGGPDGIFHFAGASGGARSLYPSLSRASGVFPCVSLGPVGPPAPFPTPQSVSTRSSPV

SEQ ID NO: 888149 - protein, 472 aa, Homo sapiens
AGPFSPRADGGGEKSGWAGTKAGSREATGCWGAPDFAGFVGPVEEAPRTDFGRGRAGLSAAMSAKAISEQTGKELLYKFICTTSAIQNRFKYARVTPDTDWARLLQDHPWLLSQNLVVKPDQLIKRRGKLGLVGVNLTLDGVKSWLKPRLGQEATVGKATGFLKNFLIEPFVPHSQAEEFYVCIYATREGDYVLFHHEGGVDVGDVDAKAQKLLVGVDEKLNPEDIKKHLLVHAPEDKKEILASFISGLFNFYEDLYFTYLEINPLVVTKDGVYVLDLAAKVDATADYICKVKWGDIEFPPPFGREAYPEEAYIADLDAKSGASLKLTLLNPKGRIWTMVAGGGASVVYSDTICDLGGVNELANYGEYSGAPSEQQTYDYAKTILSLMTREKHPDGKILIIGGSIANFTNVAATFKGIVRAIRDYQGPLKEHEVTIFVRRGGPNYQEGLRVMGEVARTLDVTHCSHKLTFVA

SEQ ID NO: 888150 - protein, 442 aa, Homo sapiens
AGPFSPRADGGGEKSGWAGTKAGSREATGCWGAPDFAGFVGPVEEAPRTDFGRGRAGLSAAMSAKAISEQTGKELLYKFICTTSAIQNRFKYARVTPDTDWARLLQDHPWLLSQNLVVKPDQLIKRRGKLGLVGVNLTLDGVKSWLKPRLGQEATVGKATGFLKNFLIEPFVPHSQAEEFYVCIYATREGDYVLFHHEGGVDVGDVDAKAQKLLVGVDEKLNPEDIKKHLLVHAPEDKKEILASFISGLFNFYEDLYFTYLEINPLVVTKDGVYVLDLAAKVDATADYICKVKWGDIEFPPPFGREAYPEEAYIADLDAKSGASLKLTLLNPKGRIWTMVAGGGASVVYSDTICDLGGVNELANYGEYSGAPSEQQTYDYAKTILSLMTREKHPDGKILIIGGSIANFTNVAATFKVTVATVVQFLGKVVWGKQGRGLESRV

SEQ ID NO: 888151 - protein, 1162 aa, Homo sapiens; identical to SEQ ID NO: 888140

SEQ ID NO: 888152 - protein, 1162 aa, Homo sapiens; identical to SEQ ID NO: 888140

SEQ ID NO: 888153 - protein, 1101 aa, Homo sapiens
MSAKAISEQTGKELLYKFICTTSAIQNRFKYARVTPDTDWARLLQDHPWLLSQNLVVKPDQLIKRRGKLGLVGVNLTLDGVKSWLKPRLGQEATVGKATGFLKNFLIEPFVPHSQAEEFYVCIYATREGDYVLFHHEGGVDVGDVDAKAQKLLVGVDEKLNPEDIKKHLLVHAPEDKKEILASFISGLFNFYEDLYFTYLEINPLVVTKDGVYVLDLAAKVDATADYICKVKWGDIEFPPPFGREAYPEEAYIADLDAKSGASLKLTLLNPKGRIWTMVAGGGASVVYSDTICDLGGVNELANYGEYSGAPSEQQTYDYAKTILSLMTREKHPDGKILIIGGSIANFTNVAATFKGIVRAIRDYQGPLKEHEVTIFVRRGGPNYQEGLRVMGEVGKTTGIPIHVFGTETHMTAIVGMALGHRPIPNQPPTAAHTANFLLNASGSTSTPAPSRTASFSESRADEVAPAKKAKPAMPQDSVPSPRSLQGKSTTLFSRHTKAIVWGMQTRAVQGMLDFDYVCSRDEPSVAAMVYPFTGDHKQKFYWGHKEILIPVFKNMADAMRKHPEVDVLINFASLRSAYDSTMETMNYAQIRTIAIIAEGIPEALTRKLIKKADQKGVTIIGPATVGGIKPGCFKIGNTGGMLDNILASKLYRPGSVAYVSRSGGMSNELNNIISRTTDGVYEGVAIGGDRYPGSTFMDHVLRYQDTPGVKMIVVLGEIGGTEEYKICRGIKEGRLTKPIVCWCIGTCATMFSSEVQFGHAGACANQASETAVAKNQALKEAGVFVPRSFDELGEIIQSVYEDLVANGVIVPAQEVPPPTVPMDYSWARELGLIRKPASFMTSICDERGQELIYAGMPITEVFKEEMGIGGVLGLLWFQKRLPKYSCQFIEMCLMVTADHGPAVSGAHNTIICARAGKDLVSSLTSGLLTIGDRFGGALDAAAKMFSKAFDSGIIPMEFVNKMKKEGKLIMGIGHRVKSINNPDMRVQILKDYVRQHFPATPLLDYALEVEKITTSKKPNLILNVDGLIGVAFVDMLRNCGSFTREEADEYIDIGALNGIFVLGRSMGFIGHYLDQKRLKQGLYRHPWDDISYVLPEHMSM

SEQ ID NO: 888154 - protein, 662 aa, Homo sapiens
SLLISPQTPAPSRTASFSESRADEVAPAKKAKPAMPQDSVPSPRSLQGKSTTLFSRHTKAIVWGMQTRAVQGMLDFDYVCSRDEPSVAAMVYPFTGDHKQKFYWGHKEILIPVFKNMADAMRKHPEVDVLINFASLRSAYDSTMETMNYAQIRTIAIIAEGIPEALTRKLIKKADQKGVTIIGPATVGGIKPGCFKIGNTGGMLDNILASKLYRPGSVAYVSRSGGMSNELNNIISRTTDGVYEGVAIGGDRYPGSTFMDHVLRYQDTPGVKMIVVLGEIGGTEEYKICRGIKEGRLTKPIVCWCIGTCATMFSSEVQFGHAGACANQASETAVAKNQALKEAGVFVPRSFDELGEIIQSVYEDLVANGVIVPAQEVPPPTVPMDYSWARELGLIRKPASFMTSICDERGQELIYAGMPITEVFKEEMGIGGVLGLLWFQKRLPKYSCQFIEMCLMVTADHGPAVSGAHNTIICARAGKDLVSSLTSGLLTIGDRFGGALDAAAKMFSKAFDSGIIPMEFVNKMKKEGKLIMGIGHRVKSINNPDMRVQILKDYVRQHFPATPLLDYALEVEKITTSKKPNLILNVDGLIGVAFVDMLRNCGSFTREEADEYIDIGALNGIFVLGRSMGFIGHYLDQKRLKQGLYRHPWDDISYVLPEHMSM

SEQ ID NO: 888155 - protein, 280 aa, Homo sapiens
SLFPISAQELGLIRKPASFMTSICDERGQELIYAGMPITEVFKEEMGIGGVLGLLWFQKRLPKYSCQFIEMCLMVTADHGPAVSGAHNTIICARAGKDLVSSLTSGLLTIGDRFGGALDAAAKMFSKAFDSGIIPMEFVNKMKKEGKLIMGIGHRVKSINNPDMRVQILKDYVRQHFPATPLLDYALEVEKITTSKKPNLILNVDGLIGVAFVDMLRNCGSFTREEADEYIDIGALNGIFVLGRSMGFIGHYLDQKRLKQGLYRHPWDDISYVLPEHMSM

SEQ ID NO: 888156 - protein, 141 aa, Homo sapiens
LALHGASVLFTGFLKGPSALMALHLLEDALERAVKQHFPATPLLDYALEVEKITTSKKPNLILNVDGLIGVAFVDMLRNCGSFTREEADEYIDIGALNGIFVLGRSMGFIGHYLDQKRLKQGLYRHPWDDISYVLPEHMSM

SEQ ID NO: 888157 - protein, 942 aa, Homo sapiens
AGPFSPRADGGGEKSGWAGTKAGSREATGCWGAPDFAGFVGPVEEAPRTDFGRGRAGLSAAMSAKAISEQTGKELLYKFICTTSAIQNRFKYARVTPDTDWARLLQDHPWLLSQNLVVKPDQLIKRRGKLGLVGVNLTLDGVKSWLKPRLGQEATVGKATGFLKNFLIEPFVPHSQAEEFYVCIYATREGDYVLFHHEGGVDVGDVDAKAQKLLVGVDEKLNPEDIKKHLLVHAPEDKKEILASFISGLFNFYEDLYFTYLEINPLVVTKDGVYVLDLAAKVDATADYICKVKWGDIEFPPPFGREAYPEEAYIADLDAKSGASLKLTLLNPKGRIWTMVAGGGASVVYSDTICDLGGVNELANYGEYSGAPSEQQTYDYAKTILSLMTREKHPDGKILIIGGSIANFTNVAATFKGIVRAIRDYQGPLKEHEVTIFVRRGGPNYQEGLRVMGEVGKTTGIPIHVFGTETHMTAIVGMALGHRPIPNQPPTAAHTANFLLNASGSTSTPAPSRTASFSESRADEVAPAKKAKPAMPQDSVPSPRSLQGKSTTLFSRHTKAIVWGMQTRAVQGMLDFDYVCSRDEPSVAAMVYPFTGDHKQKFYWGHKEILIPVFKNMADAMRKHPEVDVLINFASLRSAYDSTMETMNYAQIRTIAIIAEGIPEALTRKLIKKADQKGVTIIGPATVGGIKPGCFKIGNTGGMLDNILASKLYRPGSVAYVSRSGGMSNELNNIISRTTDGVYEGVAIGGDRYPGSTFMDHVLRYQDTPGVKMIVVLGEIGGTEEYKICRGIKEGRLTKPIVCWCIGTCATMFSSEVQFGHAGACANQASETAVAKNQALKEAGVFVPRSFDELGEIIQSVYEDLVANGVIVPAQEVPPPTVPMDYSWARELGLIRKPASFMTSICDERGQELIYAGMPITEVFKEEMGIGGVLGLLWFQKR

SEQ ID NO: 888158 - protein, 1191 aa, Homo sapiens
MERPLENGDESPDSQGHATDWRFAVCSFRDAWEEEEPASQMHVKDPGPPRPPAGATQDEELQGSPLSRKFQLPPAADESGDAQRGTVESSSVLSEGPGPSGVESLLCPMSSHLSLAQGESDTPGVGLVGDPGPSRAMPSGLSPGALDSDPVGLGDPLSEISKLLEAAPSGSGLPKPADCLLAQDLCWELLASGMATLPGTRDVQGRAVLLLCAHSPAWLQSECSSQELIRLLLYLRSIPRPEVQALGLTVLVDARICAPSSSLFSGLSQLQEAAPGAVYQVLLVGSTLLKEVPSGLQLEQLPSQSLLTHIPTAGLPTSLGGGLPYCHQAWLDFRRRLEALLQNCQAACALLQGAIESVKAVPQPMEPGEVGQLLQQTEVLMQQVLDSPWLAWLQCQGGRELTWLKQEVPEVTLSPDYRTAMDKADELYDRVDGLLHQLTLQSNQRIQALELVQTLEARESGLHQIEVWLQQVGWPALEEAGEPSLDMLLQAQGSFQELYQVAQEQVRQGEKFLQPLTGWEAAELDPPGARFLALRAQLTEFSRALAQRCQRLADAERLFQLFREALTWAEEGQRVLAELEQERPGVVLQQLQLHWTRHPDLPPAHFRKMWALATGLGSEAIRQECRWAWARCQDTWLALDQKLEASLKLPPVGSTASLCVSQVPAAPAHPPLRKAYSFDRNLGQSLSEPACHCHHAATIAACRRPEAGGGALPQASPTVPPPGSSDPRSLNRLQLVLAEMVATEREYVRALEYTMENYFPELDRPDVPQGLRGQRAHLFGNLEKLRDFHCHFFLRELEACTRHPPRVAYAFLRHRVQFGMYALYSKNKPRSDALMSSYGHTFFKDKQQALGDHLDLASYLLKPIQRMGKYALLLQELARACGGPTQELSALREAQSLVHFQLRHGNDLLAMDAIQGCDVNLKEQGQLVRQDEFVVRTGRHKSVRRIFLFEELLLFSKPRHGPTGVDTFAYKRSFKMADLGLTECCGNSNLRFEIWFRRRKARDTFVLQASSLAIKQAWTADISHLLWRQAVHNKEVRMAEMVSMGVGNKAFRDIAPSEEAINDRTVNYVLKCREVRSRASIAVAPFDHDSLYLGASNSLPGDPASCSVLGSLNLHLYRDPALLGLRCPLYPSFPEEAALEAEAELGGQPSLTAEDSEISSQCPSASGSSGSDSSCVSGQALGRGLEDLPCV

SEQ ID NO: 888159 - protein, 1191 aa, Homo sapiens; identical to SEQ ID NO: 888158

SEQ ID NO: 888160 - protein, 1160 aa, Homo sapiens
MERPLENGDESPDSQGHATDWRFAVCSFRDAWEEEEPASQMHVKDPGPPRPPAGATQDEELQGSPLSRKFQLPPAADESGDAQRGTVESSSVLSEGPGPSGVESLLCPMSSHLSLAQGESDTPGVGLVGDPGPSRAMPSGLSPGALDSDPVGLGDPLSEISKLLEAAPSGSGLPKPADCLLAQDLCWELLASGMATLPGTRDVQGRAVLLLCAHSPAWLQSECSSQELIRLLLYLRSIPRPEVQALGLTVLVDARICAPSSSLFSGLSQLQEAAPGAVYQVLLVGSTLLKEVPSGLQLEQLPSQSLLTHIPTAGLPTSLGGGLPYCHQAWLDFRRRLEALLQNCQAACALLQGAIESVKAVPQPMEPGEVGQLLQQTEVLMQQVLDSPWLAWLQCQGGRELTWLKQEVPEVTLSPDYRTAMDKADELYDRVDGLLHQLTLQSNQRIQALELVQTLEARESGLHQIEVWLQQVGWPALEEAGEPSLDMLLQAQGSFQELYQVAQEQVRQGEKFLQPLTGWEAAELDPPGARFLALRAQLTEFSRALAQRCQRLADAERLFQLFREALTWAEEGQRVLAELEQERPGVVLQQLQLHWTRHPDLPPAHFRKMWALATGLGSEAIRQECRWAWARCQDTWLALDQKLEASLKLPPVGSTASLCVSQVPAAPAHPPLRKAYSFDRNLGQSLSEPACHCHHAATIAACRRPEAGGGALPQASPTVPPPGSSDPRSLNRLQLVLAEMVATEREYVRALEYTMENYFPELDRPDVPQGLRGQRAHLFGNLEKLRDFHCHFFLRELEACTRHPPRVAYAFLRHRVQFGMYALYSKNKPRSDALMSSYGHTFFKDKQQALGDHLDLASYLLKPIQRMGKYALLLQELARACGGPTQELSALREAQSLVHFQLRHGNDLLAMDAIQGCDVNLKEQGQLVRQDEFVVRTGRHKSVRRIFLFEELLLFSKPRHGPTGVDTFAYKRSFKMADLGLTECCGNSNLRFEIWFRRRKARDTFVLQASSLAIKQAWTADISHLLWRQAVHNKEVRMAEMVSMGVGNKAFRDIAPSEEAINDRTVNYVLKCREVRSRASIAVAPFDHDSLYLGASNSLPGDPASCSVLGSLNLHLYRDPALLGLRCPLYPSFPEEAALEAEAELGGQPSLSLSPGLDEQ

SEQ ID NO: 888161 - protein, 170 aa, Homo sapiens
MSRSIPLMSTLHPEVRMAEMVSMGVGNKAFRDIAPSEEAINDRTVNYVLKCREVRSRASIAVAPFDHDSLYLGASNSLPGDPASCSVLGSLNLHLYRDPALLGLRCPLYPSFPEEAALEAEAELGGQPSLTAEDSEISSQCPSASGSSGSDSSCVSGQALGRGLEDLPCV

SEQ ID NO: 888162 - protein, 131 aa, Homo sapiens
MERPLENGDESPDSQGHATDWRFAVCSFRDAWEEEEPASQMHVKDPGTRDVQGRAVLLLCAHSPAWLQSECSSQELIRLLLYLRSIPRPEVQALGLTVLVDARICAPSSSLFSGSPLSPVSQLPRGSSTGG

SEQ ID NO: 888163 - protein, 1191 aa, Homo sapiens; identical to SEQ ID NO: 888158

SEQ ID NO: 888164 - protein, 1191 aa, Homo sapiens; identical to SEQ ID NO: 888158

SEQ ID NO: 888165 - protein, 1191 aa, Homo sapiens; identical to SEQ ID NO: 888158

SEQ ID NO: 888166 - protein, 1191 aa, Homo sapiens; identical to SEQ ID NO: 888158

SEQ ID NO: 888167 - protein, 102 aa, Homo sapiens
SEISSQCPSASGSSGSDSSCVSGQALGRGLEDLPCVSAICPIPTSPSPAQAEPVTVTSPSPAQARPLLWVELGVGGPEPFPRHLLGPESGKQAFMPGLALQV

SEQ ID NO: 888168 - protein, 253 aa, Homo sapiens
MGGKNKKHKAPAAAVVRAAVSASRAKSAEAGIAGEAQSKKPVSRPATAAAAAAGSREPRVKQGPKIYSFNSTNDSSGPANLDKSILKVVINNKLEQRIIGVINEHKKQNNDKGMISGRLTAKKLQDLYMALQAFSFKTKDIEDAMTNTLLYGGDLHSALDWLCLNLSDDALPEGFSQEFEEQQPKSRPKFQSPQIQATISPPLQPKTKTYEEDPKSKNCSLQPKRRINGVLAEWFDCDPMEKMKLRDKNGQKI

SEQ ID NO: 888169 - protein, 966 aa, Homo sapiens
MRLLLCRVRVIKSEDDVLGSMPYNLNRRWACKLSTWGATLALYRLVKGQSVHQLLPPTYRDVWLEWSDAEKKREELNKMETNKPRDLFIAKLLNKLKQQQQQQQQHSENKRENSEDPEESWENLVSDEDFSALSLESANVEDLEPVRNLFRKLQSTPKYQKLLKERQQLPVFKHRDSIVETLKRHRVVVVAGETGSGKSTQVPHFLLEDLLLNEWEASKCNIVCTQPRRISAVSLANRVCDELGCENGPGGRNSLCGYQIRMESRACESTRLLYCTTGVLLRKLQEDGLLSNVSHVIVDEVHERSVQSDFLLIILKEILQKRSDLHLILMSATVDSEKFSTYFTHCPILRISGRSYPVEVFHLEDIIEETGFVLEKDSEYCQKFLEEEEEVTINVTSKAGGIKKYQEYIPVQTGAHADLNPFYQKYSSRTQHAILYMNPHKINLDLILELLAYLDKSPQFRNIEGAVLIFLPGLAHIQQLYDLLSNDRRFYSERYKVIALHSILSTQDQAAAFTLPPPGVRKIVLATNIAETGITIPDVVFVIDTGRTKENKYHESSQMSSLVETFVSKASALQRQGRAGRVRDGFCFRMYTRERFEGFMDYSVPEILRVPLEELCLHIMKCNLGSPEDFLSKALDPPQLQVISNAMNLLRKIGACELNEPKLTPLGQHLAALPVNVKIGKMLIFGAIFGCLDPVATLAAVMTEKSPFTTPIGRKDEADLAKSALAMADSDHLTIYNAYLGWKKARQEGGYRSEITYCRRNFLNRTSLLTLEDVKQELIKLVKAAGFSSSTTSTSWEGNRASQTLSFQEIALLKAVLVAGLYDNVGKIIYTKSVDVTEKLACIVETAQGKAQVHPSSVNRDLQTHGWLLYQEKIRYARVYLRETTLITPFPVLLFGGDIEVQHRERLLSIDGWIYFQAPVKIAVIFKQLRVLIDSVLRKKLENPKMSLENDKILQIITELIKTENN

SEQ ID NO: 888170 - protein, 966 aa, Homo sapiens; identical to SEQ ID NO: 888169

SEQ ID NO: 888171 - protein, 966 aa, Homo sapiens; identical to SEQ ID NO: 888169

SEQ ID NO: 888172 - protein, 419 aa, Homo sapiens [sequence omitted]

SEQ ID NO: 888173 - protein, 86 aa, Homo sapiens
TFYLSRWKKARQEGGYRSEITYCRRNFLNRTSLLTLEAPVKIAVIFKQLRVLIDSVLRKKLENPKMSLENDKILQIITELIKTENN

SEQ ID NO: 888174 - protein, 1370 aa, Homo sapiens
MGGKNKKHKAPAAAVVRAAVSASRAKSAEAGIAGEAQSKKPVSRPATAAAAAAGSREPRVKQGPKIYSFNSTNDSSGPANLDKSILKVVINNKLEQRIIGVINEHKKQNNDKGMISGRLTAKKLQDLYMALQAFSFKTKDIEDAMTNTLLYGGDLHSALDWLCLNLSDDALPEGFSQEFEEQQPKSRPKFQSPQIQATISPPLQPKTKTYEEDPKSKPKKEEKNMEVNMKEWILRYAEQQNEEEKNENSKSLEEEEKFDPNERYLHLAAKLLDAKEQAATFKLEKNKQGQKEAQEKIRKFQREMETLEDHPVFNPAMKISHQQNERKKPPVATEGESALNFNLFEKSAAATEEEKDKKKEPHDVRNFDYTARSWTGKSPKQFLIDWVRKNLPKSPNPSFEKVPVGRYWKCRVRVIKSEDDVLGSMPYNLNRRWACKLSTWGATLALYRLVKGQSVHQLLPPTYRDVWLEWSDAEKKREELNKMETNKPRDLFIAKLLNKLKQQQQQQQQHSENKRENSEDPEESWENLVSDEDFSALSLESANVEDLEPVRNLFRKLQSTPKYQKLLKERQQLPVFKHRDSIVETLKRHRVVVVAGETGSGKSTQVPHFLLEDLLLNEWEASKCNIVCTQPRRISAVSLANRVCDELGCENGPGGRNSLCGYQIRMESRACESTRLLYCTTGVLLRKLQEDGLLSNVSHVIVDEVHERSVQSDFLLIILKEILQKRSDLHLILMSATVDSEKFSTYFTHCPILRISGRSYPVEVFHLEDIIEETGFVLEKDSEYCQKFLEEEEEVTINVTSKAGGIKKYQEYIPVQTGAHADLNPFYQKYSSRTQHAILYMNPHKINLDLILELLAYLDKSPQFRNIEGAVLIFLPGLAHIQQLYDLLSNDRRFYSERYKVIALHSILSTQDQAAAFTLPPPGVRKIVLATNIAETGITIPDVVFVIDTGRTKENKYHESSQMSSLVETFVSKASALQRQGRAGRVRDGFCFRMYTRERFEGFMDYSVPEILRVPLEELCLHIMKCNLGSPEDFLSKALDPPQLQVISNAMNLLRKIGACELNEPKLTPLGQHLAALPVNVKIGKMLIFGAIFGCLDPVATLAAVMTEKSPFTTPIGRKDEADLAKSALAMADSDHLTIYNAYLGWKKARQEGGYRSEITYCRRNFLNRTSLLTLEDVKQELIKLVKAAGFSSSTTSTSWEGNRASQTLSFQEIALLKAVLVAGLYDNVGKIIYTKSVDVTEKLACIVETAQGKAQVHPSSVNRDLQTHGWLLYQEKIRYARVYLRETTLITPFPVLLFGGDIEVQHRERLLSIDGWIYFQAPVKIAVIFKQLRVLIDSVLRKKLENPKMSLENDKILQIITELIKTENN

SEQ ID NO: 888175 - protein, 966 aa, Homo sapiens; identical to SEQ ID NO: 888169

SEQ ID NO: 888176 - protein, 113 aa, Homo sapiens
PVGRGQVSAGLACGKALELGTGPPDEVAVCSHTHTHTHTHTHTGSRPRIEAAQKLLPGFFSSELVLSQTPSSQGTRISNESWKPSHSFPQSEEAVVMSPSPTGFPTRRGLGPR

SEQ ID NO: 888177 - protein, 106 aa, Homo sapiens
  misc_feature (21)..(21): Xaa can be any naturally occurring amino acid
FCDKNQEQDDDKRGKSTATFXDCGTHATHTHTHTHTGSRPRIEAAQKLLPGFFSSELVLSQTPSSQGTRISNESWKPSHSFPQSEEAVVMSPSPTGFPTRRGLGPR

SEQ ID NO: 888178 - protein, 134 aa, Homo sapiens
MGPWLSRECSKQPACRPSLTNDEHFLGSALDTETSVFTPASIMVFGASRARGLSGGKRTGPDLPELTGPPRWVWDILEALHLSLDRGPGGAWNVAKKKVTQGMSVFYPSAWVGFSKIIICRRKASIYDAICNYI

SEQ ID NO: 888179 - protein, 125 aa, Homo sapiens
MEARPSPPRSHAPDATATAGARSSLGCFSIWICIPSLGRESSGPLVMSQEEWGLGALLSVSVRPQTLHLALKSHSYLGPLPVVPPSPPCPAKSPACPPLSILPPLPLPPVETVFLSVCPFGPDPA

SEQ ID NO: 888180 - protein, 113 aa, Homo sapiens; identical to SEQ ID NO: 888176

SEQ ID NO: 888181 - protein, 113 aa, Homo sapiens; identical to SEQ ID NO: 888176

SEQ ID NO: 888182 - protein, 399 aa, Homo sapiens
MERKNPSRESPRRLSAKVGKGTEMKKVARQLGMAAAESDKDSGFSDGSSECLSSAEQMESEDMLSALGWSREDRPRQNSKTAKNAFPTLSPMVVMKNVLVKQGSSSSQLQSWTVQPSFEVISAQPQLLFLHPPVPSPVSPCHTGEKKSDSRNYLPILNSYTKIAPHPGKRGLSLGPEEKGTSGVQKKICTERLGPSLSSSEPTKAGAVPSSPSTPAPPSAKLAEDSALQGVPSLVAGGSPQTLQPVSSSHVAKAPSLTFASPASPVCASDSTLHGLESNSPLSPLSANYSSPLWAAEHLCRSPDIFSEQRQSKHRRFQNTLVVLHKSGLLEITLKTKELIRQNQATQVELDQLKEQTQLFIEATKSRAPQAWAKLQASLTPGSSNTGSDLEAFSDHPAI

SEQ ID NO: 888183 - protein, 576 aa, Homo sapiens
MIVFGWAVFLASRSLGQGLLLTLEEHIAHFLGTGGAATTMGNSCICRDDSGTDDSVDTQQQQAENSAVPTADTRSQPRDPVRPPRRGRGPHEPRRKKQNVDGLVLDTLAVIRTLVDNDQEPPYSMITLHEMAETDEGWLDVVQSLIRVIPLEDPLGPAVITLLLDECPLPTKDALQKLTEILNLNGEVACQDSSHPAKHRNTSAVLGCLAEKLAGPASIGLLSPGILEYLLQCLKLQSHPTVMLFALIALEKFAQTSENKLTISESSISDRLVTLESWANDPDYLKRQVGFCAQWSLDNLFLKEGRQLTYEKVNLSSIRAMLNSNDVSEYLKISPHGLEARCDASSFESVRCTFCVDAGVWYYEVTVVTSGVMQIGWATRDSKFLNHEGYGIGDDEYSCAYDGCRQLIWYNARSKPHIHPCWKEGDTVGFLLDLNEKQMIFFLNGNQLPPEKQVFSSTVSGFFAAASFMSYQQCEFNFGAKPFKYPPSMKFSTFNDYAFLTAEEKIILPRHRRLALLKQVSIRENCCSLCCDEVADTQLKPCGHSDLCMDCALQLETCPLCRKEIVSRIRQISHIS

SEQ ID NO: 888184 - protein, 576 aa, Homo sapiens; identical to SEQ ID NO: 888183

SEQ ID NO: 888185 - protein, 576 aa, Homo sapiens; identical to SEQ ID NO: 888183

SEQ ID NO: 888186 - protein, 325 aa, Homo sapiens [sequence omitted]

SEQ ID NO: 888187 - protein, 117 aa, Homo sapiens
MIVFGWAVFLASRSLGQGLLLTLEEHIAHFLGTGGAATTMGNSCICRDDSGTDDSVDTQQQQAENSAVPTADTRSQPRDPVRPPRRGRGPHEPRRKKQNVDGLVLDTLAVIRTLVDK

SEQ ID NO: 888188 - protein, 576 aa, Homo sapiens; identical to SEQ ID NO: 888183

SEQ ID NO: 888189 - protein, 318 aa, Homo sapiens
LLLLNSRPRRRDRLVTLESWANDPDYLKRQVGFCAQWSLDNLFLKEGRQLTYEKVNLSSIRAMLNSNDVSEYLKISPHGLEARCDASSFESVRCTFCVDAGVWYYEVTVVTSGVMQIGWATRDSKFLNHEGYGIGDDEYSCAYDGCRQLIWYNARSKPHIHPCWKEGDTVGFLLDLNEKQMIFFLNGNQLPPEKQVFSSTVSGFFAAASFMSYQQCEFNFGAKPFKYPPSMKFSTFNDYAFLTAEEKIILPRHRRLALLKQVSIRENCCSLCCDEVADTQLKPCGHSDLCMDCALQLETCPLCRKEIVSRIRQISHIS

SEQ ID NO: 888190 - protein, 214 aa, Homo sapiens
CNGWPDCNGWPECGWATRDSKFLNHEGYGIGDDEYSCAYDGCRQLIWYNARSKPHIHPCWKEGDTVGFLLDLNEKQMIFFLNGNQLPPEKQVFSSTVSGFFAAASFMSYQQCEFNFGAKPFKYPPSMKFSTFNDYAFLTAEEKIILPRHRRLALLKQVSIRENCCSLCCDEVADTQLKPCGHSDLCMDCALQLETCPLCRKEIVSRIRQISHIS

SEQ ID NO: 888191 - protein, 330 aa, Homo sapiens [sequence omitted]

SEQ ID NO: 888192 - protein, 387 aa, Homo sapiens
MEKIEEQFANLHIVKCSLGTKEPTYLLGIDTSKTVQAGKENLVAVLCSNGSIRIYDKERLNVLREFSGYPGLLNGVRFANSCDSVYSACTDGTVKCWDARVAREKPVQLFKGYPSNIFISFDINCNDHIICAGTEKVDDDALLVFWDARMNSQNLSTTKDSLGAYSETHSDDVTQVRFHPSNPNMVVSGSSDGLVNVFDINIDNEEDALVTTCNSISSVSCIGWSGKGYKQIYCMTHDEGFYWWDLNHLDTDEPVTRLNIQDVREVVNMKEDALDYLIGGLYHEKTDTLHVIGGTNKGRIHLMNCSMSGLTHVTSLQGGHAATVRSFCWNVQDDSLLTGGEDAQLLLWKPGAIEKTFTKKESMKIASSVHQRVRVHSNDSYKRRKKQ

SEQ ID NO: 888193 - protein, 387 aa, Homo sapiens; identical to SEQ ID NO: 888192

SEQ ID NO: 888194 - protein, 387 aa, Homo sapiens; identical to SEQ ID NO: 888192

SEQ ID NO: 888195 - protein, 283 aa, Homo sapiens
MEKIEEQFANLHIVKCSLGTKEPTYLLGIDTSKTVQAGKENLVAVLCSNGSIRIYDKERLNVLREFSGYPGLLNGVRFANSCDSVYSACTDGTVKCWDARVAREKPVQLFKGYPSNIFISFDINCNDHIICAGTEKVDDDALLVFWDARMNSQNLSTTKDSLGAYSETHSDDVTQVRFHPSNPNMVVSGSSDGLVNVFDINIDNEEDALVTTCNSISSVSCIGWSGKGYKQIYCMTHDEGFYWWDLNHLDTDEPVTRLNIQDVREVVNMKEDALDYLIGGPCD

SEQ ID NO: 888196 - protein, 135 aa, Homo sapiens
MGQATLRDPPKSQSKAQTSDEGAGSPQGPSSEVRARRGAASGGARCEGRAFHCRWRELACPVGIREEPPPRTPRSAMAEVAIVSAATKTVLTCTTFPSIFPGVPLTLHLRVQQAGFRECSVQKRKNCRESSPSFC

SEQ ID NO: 888197 - protein, 135 aa, Homo sapiens; identical to SEQ ID NO: 888196

SEQ ID NO: 888198 - protein, 135 aa, Homo sapiens; identical to SEQ ID NO: 888196

SEQ ID NO: 888199 - protein, 135 aa, Homo sapiens; identical to SEQ ID NO: 888196

SEQ ID NO: 888200 - protein, 1485 aa, Homo sapiens
MAAPAQPKKIVAPTVSQINAEFVTQLACKYWAPHIKKKSPFDIKVIEDIYEKEIVKSRFAIRKIMLLEFSQYLENYLWMNYSPEVSSKAYLMSICCMVNEKFRENVPAWEIFKKKPDHFPFFFKHILKAALAETDGEFSLHEQTVLLLFLDHCFNSLEVDLIRSQVQQLISLPMWMGLQLARLELELKKTPKLRKFWNLIKKNDEKMDPEAREQAYQERRFLSQLIQKFISVLKSVPLSEPVTMDKVHYCERFIELMIDLEALLPTRRWFNTILDDSHLLVHCYLSNLVRREEDGHLFSQLLDMLKFYTGFEINDQTGNALTENEMTTIHYDRITSLQRAAFAHFPELYDFALSNVAEVDTRESLVKFFGPLSSNTLHQVASYLCLLPTLPKNEDTTFDKEFLLELLVSRHERRISQIQQLNQMPLYPTEKIIWDENIVPTEYYSGEGCLALPKLNLQFLTLHDYLLRNFNLFRLESTYEIRQDIEDSVSRMKPWQSEYGGVVFGGWARMAQPIVAFTVVEVAKPNIGENWPTRVRADVTINLNVRDHIKDEWEGLRKHDVCFLITVRPTKPYGTKFDRRRPFIEQVGLVYVRGCEIQGMLDDKGRVIEDGPEPRPNLRGESRTFRVFLDPNQYQQDMTNTIQNGAEDVYETFNIIMRRKPKENNFKAVLETIRNLMNTDCVVPDWLHDIILGYGDPSSAHYSKMPNQIATLDFNDTFLSIEHLKASFPGHNVKVTVEDPALQIPPFRITFPVRSGKGKKRKDADVEDEDTEEAKTLIVEPHVIPNRGPYPYNQPKRNTIQFTHTQIEAIRAGMQPGLTMVVGPPGTGKTDVAVQIISNIYHNFPEQRTLIVTHSNQALNQLFEKIMALDIDERHLLRLGHGEEELETEKDFSRYGRVNYVLARRIELLEEVKRLQKSLGVPGDASYTCETAGYFFLYQVMSRWEEYISKVKNKGSTLPDVTEVSTFFPFHEYFANAPQPIFKGRSYEEDMEIAEGCFRHIKKIFTQLEEFRASELLRSGLDRSKYLLVKEAKIIAMTCTHAALKRHDLVKLGFKYDNILMEEAAQILEIETFIPLLLQNPQDGFSRLKRWIMIGDHHQLPPVIKNMAFQKYSNMEQSLFTRFVRVGVPTVDLDAQGRARASLCNLYNWRYKNLGNLPHVQLLPEFSTANAGLLYDFQLINVEDFQGVGESEPNPYFYQNLGEAEYVVALFMYMCLLGYPADKISILTTYNGQKHLIRDIINRRCGNNPLIGRPNKVTTVDRFQGQQNDYILLSLVRTRAVGHLRDVRRLVVAMSRARLGLYIFARVSLFQNCFELTPAFSQLTARPLHLHIIPTEPFPTTRKNGERPSHEVQIIKNMPQMANFVYNMYMHLIQTTHHYHQTLLQLPPAMVEEGEEVQNQETELETEEEAMTVQADIIPSPTDTSCRQETPAFQTDTTPSETGATSTPEAIPALSETTPTVVGAVSAPAEANTPQDATSAPEETK

SEQ ID NO: 888201 - protein, 158 aa, Homo sapiens
PVPSRALLRNRLSLNDLSSSSTMARIWDLLFILFTLQLACKYWAPHIKKKSPFDIKVIEDIYEKEIVKSRFAIRKIMLLEFSQYLENYLWMNYSPEVSSKAYLMSICCMVNEKFRENVPAWEVTDLKYFIAFILTHISHYKVAELLLIVVLLEQNFTQ

SEQ ID NO: 888202 - protein, 1467 aa, Homo sapiens
MAAPAQPKKIVAPTVSQINAEFVTQLACKYWAPHIKKKSPFDIKVIEDIYEKEIVKSRFAIRKIMLLEFSQYLENYLWMNYSPEVSSKAYLMSICCMVNEKFRENVPAWEIFKKKPDHFPFFFKHILKAALAETDGEFSLHEQTVLLLFLDHCFNSLEVDLIRSQVQQLISLPMWMGLQLARLELELKKTPKLRKFWNLIKKNDEKMDPEAREQAYQERRFLSQLIQKFISVLKSVPLSEPVTMDKVHYCERFIELMIDLEALLPTRRWFNTILDDSHLLVHCYLSNLVRREEDGHLFSQLLDMLKFYTGFEINDQTGNALTENEMTTIHYDRITSLQRAAFAHFPELYDFALSNVAEVDTRESLVKFFGPLSSNTLHQVASYLCLLPTLPKNEDTTFDKEFLLELLVSRHERRISQIQQLNQMPLYPTEKIIWDENIVPTEYYSGEGCLALPKLNLQFLTLHDYLLRNFNLFRLESTYEIRQDIEDSVSRMKPWQSEYGGVVFGGWARMAQPIVAFTVVEVAKPNIGENWPTRVRADVTINLNVRDHIKDEWEGLRKHDVCFLITVRPTKPYGTKFDRRRPFIEQVGLVYVRGCEIQGMLDDKGRVIEDGPEPRPNLRGESRTFRVFLDPNQYQQDMTNTIQNGAEDVYETFNIIMRRKPKENNFKAVLETIRNLMNTDCVVPDWLHDIILGYGDPSSAHYSKMPNQIATLDFNDTFLSIEHLKASFPGHNVKVTVEDPALQIPPFRITFPVRSGKGKKRKDADVEDEDTEEAKTLIVEPHVIPNRGPYPYNQPKRNTIQFTHTQIEAIRAGMQPGLTMVVGPPGTGKTDVAVQIISNIYHNFPEQRTLIVTHSNQALNQLFEKIMALDIDERHLLRLGHGEEELETEKDFSRYGRVNYVLARRIELLEEVKRLQKSLGVPGDASYTCETAGYFFLYQVMSRWEEYISKVKNKGSTLPDVTEVSTFFPFHEYFANAPQPIFKGRSYEEDMEIAEGCFRHIKKIFTQLEEFRASELLRSGLDRSKYLLVKEAKIIAMTCTHAALKRHDLVKLGFKYDNILMEEAAQILEIETFIPLLLQNPQDGFSRLKRWIMIGDHHQLPPVIKNMAFLPTVDLDAQGRARASLCNLYNWRYKNLGNLPHVQLLPEFSTANAGLLYDFQLINVEDFQGVGESEPNPYFYQNLGEAEYVVALFMYMCLLGYPADKISILTTYNGQKHLIRDIINRRCGNNPLIGRPNKVTTVDRFQGQQNDYILLSLVRTRAVGHLRDVRRLVVAMSRARLGLYIFARVSLFQNCFELTPAFSQLTARPLHLHIIPTEPFPTTRKNGERPSHEVQIIKNMPQMANFVYNMYMHLIQTTHHYHQTLLQLPPAMVEEGEEVQNQETELETEEEAMTVQADIIPSPTDTSCRQETPAFQTDTTPSETGATSTPEAIPALSETTPTVVGAVSAPAEANTPQDATSAPEETK

SEQ ID NO: 888203 - protein, 1485 aa, Homo sapiens; identical to SEQ ID NO: 888200

SEQ ID NO: 888204 - protein, 889 aa, Homo sapiens
MRGMLDDKGRVIEDGPEPRPNLRGESRTFRVFLDPNQYQQDMTNTIQNGAEDVYETFNIIMRRKPKENNFKAVLETIRNLMNTDCVVPDWLHDIILGYGDPSSAHYSKMPNQIATLDFNDTFLSIEHLKASFPGHNVKVTVEDPALQIPPFRITFPVRSGKGKKRKDADVEDEDTEEAKTLIVEPHVIPNRGPYPYNQPKRNTIQFTHTQIEAIRAGMQPGLTMVVGPPGTGKTDVAVQIISNIYHNFPEQRTLIVTHSNQALNQLFEKIMALDIDERHLLRLGHGEEELETEKDFSRYGRVNYVLARRIELLEEVKRLQKSLGVPGDASYTCETAGYFFLYQVMSRWEEYISKVKNKGSTLPDVTEVSTFFPFHEYFANAPQPIFKGRSYEEDMEIAEGCFRHIKKIFTQLEEFRASELLRSGLDRSKYLLVKEAKIIAMTCTHAALKRHDLVKLGFKYDNILMEEAAQILEIETFIPLLLQNPQDGFSRLKRWIMIGDHHQLPPVIKNMAFQKYSNMEQSLFTRFVRVGVPTVDLDAQGRARASLCNLYNWRYKNLGNLPHVQLLPEFSTANAGLLYDFQLINVEDFQGVGESEPNPYFYQNLGEAEYVVALFMYMCLLGYPADKISILTTYNGQKHLIRDIINRRCGNNPLIGRPNKVTTVDRFQGQQNDYILLSLVRTRAVGHLRDVRRLVVAMSRARLGLYIFARVSLFQNCFELTPAFSQLTARPLHLHIIPTEPFPTTRKNGERPSHEVQIIKNMPQMANFVYNMYMHLIQTTHHYHQTLLQLPPAMVEEGEEVQNQETELETEEEAMTVQADIIPSPTDTSCRQETPAFQTDTTPSETGATSTPEAIPALSETTPTVVGAVSAPAEANTPQDATSAPEETK

SEQ ID NO: 888205 - protein, 192 aa, Homo sapiens
MSRARLGLYIFARVSLFQNCFELTPAFSQLTARPLHLHIIPTEPFPTTRKNGERPSHEVQIIKNMPQMANFVYNMYMHLIQTTHHYHQTLLQLPPAMVEEGEEVQNQETELETEEEAMTVQADIIPSPTDTSCRQETPAFQTDTTPSETGATSTPEAIPALSETTPTVVGAVSAPAEANTPQDATSAPEETK

SEQ ID NO: 888206 - protein, 1142 aa, Homo sapiens
MAAPAQPKKIVAPTVSQINAEFVTQLACKYWAPHIKKKSPFDIKVIEDIYEKEIVKSRFAIRKIMLLEFSQYLENYLWMNYSPEVSSKAYLMSICCMVNEKFRENVPAWEIFKKKPDHFPFFFKHILKAALAETDGEFSLHEQTVLLLFLDHCFNSLEVDLIRSQVQQLISLPMWMGLQLARLELELKKTPKLRKFWNLIKKNDEKMDPEAREQAYQERRFLSQLIQKFISVLKSVPLSEPVTMDKVHYCERFIELMIDLEALLPTRRWFNTILDDSHLLVHCYLSNLVRREEDGHLFSQLLDMLKFYTGFEINDQTGNALTENEMTTIHYDRITSLQRAAFAHFPELYDFALSNVAEVDTRESLVKFFGPLSSNTLHQVASYLCLLPTLPKNEDTTFDKEFLLELLVSRHERRISQIQQLNQMPLYPTEKIIWDENIVPTEYYSGEGCLALPKLNLQFLTLHDYLLRNFNLFRLESTYEIRQDIEDSVSRMKPWQSEYGGVVFGGWARMAQPIVAFTVVEVAKPNIGENWPTRVRADVTINLNVRDHIKDEWEGLRKHDVCFLITVRPTKPYGTKFDRRRPFIEQVGLVYVRGCEIQGMLDDKGRVIEDGPEPRPNLRGESRTFRVFLDPNQYQQDMTNTIQNGAEDVYETFNIIMRRKPKENNFKAVLETIRNLMNTDCVVPDWLHDIILGYGDPSSAHYSKMPNQIATLDFNDTFLSIEHLKASFPGHNVKVTVEDPALQIPPFRITFPVRSGKGKKRKDADVEDEDTEEAKTLIVEPHVIPNRGPYPYNQPKRNTIQFTHTQIEAIRAGMQPGLTMVVGPPGTGKTDVAVQIISNIYHNFPEQRTLIVTHSNQALNQLFEKIMALDIDERHLLRLGHGEEELETEKDFSRYGRVNYVLARRIELLEEVKRLQKSLGVPGDASYTCETAGYFFLYQVMSRWEEYISKVKNKGSTLPDVTEVSTFFPFHEYFANAPQPIFKGRSYEEDMEIAEGCFRHIKKIFTQLEEFRASELLRSGLDRSKYLLVKEAKIIAMTCTHAALKRHDLVKLGFKYDNILMEEAAQILEIETFIPLLLQNPQDGFSRLKRWIMIGDHHQLPPVIKNMAFQKYSNMEQSLFTRFVRVGVPTVDLDAQGRARAR

SEQ ID NO: 888207 - protein, 422 aa, Homo sapiens
MSLHFLYYCSEPTLDVKIAFCQGFDKQVDVSYIAKHYNMSKSKVDNQFYSVEVGDSTFTVLKRYQNLKPIGSGAQGIVCAAYDAVLDRNVAIKKLSRPFQNQTHAKRAYRELVLMKCVNHKNIISLLNVFTPQKTLEEFQDVYLVMELMDANLCQVIQMELDHERMSYLLYQMLCGIKHLHSAGIIHRDLKPSNIVVKSDCTLKILDFGLARTAGTSFMMTPYVVTRYYRAPEVILGMGYKENVDIWSVGCIMGEMVRHKILFPGRDYIDQWNKVIEQLGTPCPEFMKKLQPTVRNYVENRPKYAGLTFPKLFPDSLFPADSEHNKLKASQARDLLSKMLVIDPAKRISVDDALQHPYINVWYDPAEVEAPPPQIYDKQLDEREHTIEEWKELIYKEVMNSEEKTKNGVVKGQPSPSAQVQQ

SEQ ID NO: 888208 - protein, 402 aa, Homo sapiens
MSLHFLYYCSEPTLDVKIAFCQGFDKQVDVSYIAKHYNMSKSKVDNQFYSVEVGDSTFTVLKRYQNLKPIGSGAQGIVCAAYDAVLDRNVAIKKLSRPFQNQTHAKRAYRELVLMKCVNHKITSVMELMDANLCQVIQMELDHERMSYLLYQMLCGIKHLHSAGIIHRDLKPSNIVVKSDCTLKILDFGLARTAGTSFMMTPYVVTRYYRAPEVILGMGYKENVDIWSVGCIMGEMVRHKILFPGRDYIDQWNKVIEQLGTPCPEFMKKLQPTVRNYVENRPKYAGLTFPKLFPDSLFPADSEHNKLKASQARDLLSKMLVIDPAKRISVDDALQHPYINVWYDPAEVEAPPPQIYDKQLDEREHTIEEWKELIYKEVMNSEEKTKNGVVKGQPSPSAQVQQ

SEQ ID NO: 888209 - protein, 440 aa, Homo sapiens
MSLHFLYYCSEPTLDVKIAFCQGVCSLQVKQGFDKQVDVSYIAKHYNMSKSKVDNQFYSVEVGDSTFTVLKRYQNLKPIGSGAQGIVCAAYDAVLDRNVAIKKLSRPFQNQTHAKRAYRELVLMKCVNHKNIISLLNVFTPQKTLEEFQDVYLVMELMDANLCQVIQMELDHERMSYLLYQMLCGIKHLHSAGIIHRDLKPSNIVVKSDCTLKILDFGLARTAGTSFMMTPYVVTRYYRAPEVILGMGYKENVDIWSVGCIMGEMVRHKILFPGRDYIDQWNKVIEQLGTPCPEFMKKLQPTVRNYVENRPKYAGLTFPKLFPDSLFPADSEHNKLKASQARDLLSKMLVIDPAKRISVDDALQHPYINVWYDPAEVEAPPPQIYDKQLDEREHTIEEWKELIYKEVMNSEEKTKNGVVKGQPSPSVDVATAHSGSMLLL

SEQ ID NO: 888210 - protein, 422 aa, Homo sapiens; identical to SEQ ID NO: 888207

SEQ ID NO: 888211 - protein, 431 aa, Homo sapiens
MSLHFLYYCSEPTLDVKIAFCQGVCSLQVKQGFDKQVDVSYIAKHYNMSKSKVDNQFYSVEVGDSTFTVLKRYQNLKPIGSGAQGIVCAAYDAVLDRNVAIKKLSRPFQNQTHAKRAYRELVLMKCVNHKNIISLLNVFTPQKTLEEFQDVYLVMELMDANLCQVIQMELDHERMSYLLYQMLCGIKHLHSAGIIHRDLKPSNIVVKSDCTLKILDFGLARTAGTSFMMTPYVVTRYYRAPEVILGMGYKENVDIWSVGCIMGEMVRHKILFPGRDYIDQWNKVIEQLGTPCPEFMKKLQPTVRNYVENRPKYAGLTFPKLFPDSLFPADSEHNKLKASQARDLLSKMLVIDPAKRISVDDALQHPYINVWYDPAEVEAPPPQIYDKQLDEREHTIEEWKELIYKEVMNSEEKTKNGVVKGQPSPSAQVQQ

SEQ ID NO: 888212 - protein, 431 aa, Homo sapiens; identical to SEQ ID NO: 888211

SEQ ID NO: 888213 - protein, 177 aa, Homo sapiens
MLQTSNYSLVLSLQFLLLSYDLFVNSFSELLQKTPVIQLVLFIIQDIAVLFNIIIIFLMFFNTFVFQAGLVNLLFHKFKGTIILTAVYFALSISLHVWVMNLRWKNSNSFIWTDGLQMLFVFQRLGKDQSKVRPLSGPTCVSFSEGLDAGFPDLSQLAWDGCDSHTRNRRDYCPCPC

SEQ ID NO: 888214 - protein, 162 aa, Homo sapiens
MLQTSNYSLVLSLQFLLLSYDLFVNSFSELLQKTPVIQLVLFIIQDIAVLFNIIIIFLMFFNTFVFQAGLVNLLFHKFKGTIILTAVYFALSISLHVWVMNLRWKNSNSFIWTDGLQMLFVFQRLAAVLYCYFYKRTAVRLGDPHFYQDSLWLRKEFMQVRR

SEQ ID NO: 888215 - protein, 162 aa, Homo sapiens; identical to SEQ ID NO: 888214

SEQ ID NO: 888216 - protein, 162 aa, Homo sapiens; identical to SEQ ID NO: 888214

SEQ ID NO: 888217 - protein, 162 aa, Homo sapiens; identical to SEQ ID NO: 888214

SEQ ID NO: 888218 - protein, 162 aa, Homo sapiens; identical to SEQ ID NO: 888214

SEQ ID NO: 888219 - protein, 162 aa, Homo sapiens; identical to SEQ ID NO: 888214

SEQ ID NO: 888220 - protein, 105 aa, Homo sapiens
MLQTSNYSLVLSLQFLLLSYDLFVNSFSELLQKTPVIQLVLFIIQDIAVLFNIIIIFLMFFNTFVFQAGLVNLLFHKFKGTIILTAVYFALSISLHVWVMVRVAV

SEQ ID NO: 888221 - protein, 105 aa, Homo sapiens; identical to SEQ ID NO: 888220

SEQ ID NO: 888222 - protein, 119 aa, Homo sapiens [sequence omitted]

SEQ ID NO: 888223 - protein, 104 aa, Homo sapiens
MFFNTFVFQAGLVNLLFHKFKGTIILTAVYFALSISLHVWVMNLRWKNSNSFIWTDGLQMLFVFQRLAAVLYCYFYKRTAVRLGDPHFYQDSLWLRKEFMQVRR

SEQ ID NO: 888224 - protein, 161 aa, Homo sapiens
MCPWGPEKTEGRCSRPVTTAWCSLCSSCCCPMTSLSIPSQNCIQDIAVLFNIIIIFLMFFNTFVFQAGLVNLLFHKFKGTIILTAVYFALSISLHVWVMNLRWKNSNSFIWTDGLQMLFVFQRLAAVLYCYFYKRTAVRLGDPHFYQDSLWLRKEFMQVRR

SEQ ID NO: 888225 - protein, 177 aa, Homo sapiens; identical to SEQ ID NO: 888213

SEQ ID NO: 888226 - protein, 108 aa, Homo sapiens
MLQTSNYSLVLSLQFLLLSYDLFVNSFSELLQKTPVIQLVLFIIQDIAVLFNIIIIFLMFFNTFVFQAGLVNLLFHKFKGTIILTAVYFALSISLHVWVMFGPNSNFS

SEQ ID NO: 888227 - protein, 134 aa, Homo sapiens
MLQTSNYSLVLSLQFLLLSYDLFVNSFSELLQKTPVIQLVLFIIQDIAVLFNIIIIFLMFFNTFVFQAGLVNLLFHKFKGTIILTAVYFALSISLHVWVMNLRWKNSNSFIWTDGLQMLFVFQRLESRKLLSYL

SEQ ID NO: 888228 - protein, 119 aa, Homo sapiens [sequence omitted]

SEQ ID NO: 888229 - protein, 211 aa, Homo sapiens
MGCGQSNQSFQCSGCNWRWNARIKKIMQTDEEIGKVAAAVPVIISRALELFLESLLKKACQVTQSRNAKTMTTSHLKQCIELEQQFDFLKDLVASVPDMQGDGEDNHMDGDKGARRGRKPGSGGRKNGGMGTKSKDKKLSGTDSEQEDESEDTDTDGEEETSQPPPQASHPSAHFQSPPTPFLPFASTLPLPPAPPGPSAPDEEDEEDYDS

SEQ ID NO: 888230 - protein, 205 aa, Homo sapiens
MPSKKKKYNARFPPARIKKIMQTDEEIGKVAAAVPVIISRALELFLESLLKKACQVTQSRNAKTMTTSHLKQCIELEQQFDFLKDLVASVPDMQGDGEDNHMDGDKGARRGRKPGSGGRKNGGMGTKSKDKKLSGTDSEQEDESEDTDTDGEEETSQPPPQASHPSAHFQSPPTPFLPFASTLPLPPAPPGPSAPDEEDEEDYDS

SEQ ID NO: 888231 - protein, 446 aa, Homo sapiens
HVGLGVKCSKEVATAIRGAIILAKLSIVPVRRGYWGNKIGKPHTVPCKVTGRCGSVLVRLIPAPRGTGIVSAPVPKKLLMMAGIDDCYTSARGCTATLGNFAKATFDAISKTYSYLTPDLWKETVFTKSPYQEFTDHLVKTHTRVSVQLDSGSSCGYNIGFLYKKNNSEFKRVTVLKKKTDAWAGGEQAREPGGCGRRRWTRRGERGPEMPSKKKKYNARFPPARIKKIMQTDEEIGKVAAAVPVIICILPGADRVEGRGGGRQRVALSCPGVLLDSSSARALELFLESLLKKACQVTQSRNAKTMTTSHLKQCIELEQQFDFLKDLVASVPDMQGDGEDNHMDGDKGARRGRKPGSGGRKNGGMGTKSKDKKLSGTDSEQEDESEDTDTDGEEETSQPPPQASHPSAHFQSPPTPFLPFASTLPLPPAPPGPSAPDEEDEEDYDS

SEQ ID NO: 888232 - protein, 460 aa, Homo sapiens
HVGLGVKCSKEVATAIRGAIILAKLSIVPVRRGYWGNKIGKPHTVPCKVTGRCGSVLVRLIPAPRGTGIVSAPVPKKLLMMAGIDDCYTSARGCTATLGNFAKATFDAISKTYSYLTPDLWKETVFTKSPYQEFTDHLVKTHTRVSVQLDSGSSCGYNIGFLYKKNNSEFKRVTVLKKKTDAWAGGEQAREPGGCGRRRWTRRGERGPEMPSKKKKYNARFPPARIKKIMQTDEEIGKVAAAVPVIISRALELFLESLLKKACQVTQSRNAKTMTTSHLKQCIELEQQFDFLKDLVASVPDMQGDGEDNHMDGDKGARRWGQGLAYSGEGQGHRAWGWQGVGSTPGRWTVPSQRGRKPGSGGRKNGGMGTKSKDKKLSGTDSEQEVSEAPALRPALGDGTGSLAKLTEEQLTFCTVPGTERAEEAASPEDDTEYPAGQPGRHPNTKPHDTTKPNNHHKNP

SEQ ID NO: 888233 - protein, 183 aa, Homo sapiens
AWCDSVLRGCSLEQRSFISVRLLSYLSACRHPMEDSMDMDMSPLRPQNYLFGCELKADKDYHFKVDNDENEHQLSLRTVSLGAGAKDELHIVEAEAMNYEGSPIKVTLATLKMSVQPTVSLGGFEITPPVVLRLKCGSGPVHISGQHLVAVEEDAESEDERGRRRLRLLAPSAPQTIAPFSWF

SEQ ID NO: 888234 - protein, 414 aa, Homo sapiens
HVGLGVKCSKEVATAIRGAIILAKLSIVPVRRGYWGNKIGKPHTVPCKVTGRCGSVLVRLIPAPRGTGIVSAPVPKKLLMMAGIDDCYTSARGCTATLGNFAKATFDAISKTYSYLTPDLWKETVFTKSPYQEFTDHLVKTHTRVSVQLDSGSSCGYNIGFLYKKNNSEFKRVTVLKKKTDAWAGGEQAREPGGCGRRRWTRRGERGPEMPSKKKKYNARFPPARIKKIMQTDEEIGKVAAAVPVIISRALELFLESLLKKACQVTQSRNAKTMTTSHLKQCIELEQQFDFLKDLVASVPDMQGDGEDNHMDGDKGARRGRKPGSGGRKNGGMGTKSKDKKLSGTDSEQEDESEDTDTDGEEETSQPPPQASHPSAHFQSPPTPFLPFASTLPLPPAPPGPSAPDEEDEEDYDS

SEQ ID NO: 888235 - protein, 375 aa, Homo sapiens
HVGLGVKCSKEVATAIRGAIILAKLSIVPVRRGYWGNKIGKPHTVPCKVTGRCGSVLVRLIPAPRGTGIVSAPVPKKLLMMAGIDDCYTSARGCTATLGNFAKATFDAISKTYSYLTPDLWKETVFTKSPYQEFTDHLVKTHTRVSVQLDSGSSCGYNIGFLYKKNNSEFKRVTVLKKKTDAWAGGEQAREPGGCGRRRWTRRGERGPEMPSKKKKYNARFPPARIKKIMQTDEEIGKVAAAVPVIISRALELFLESLLKKACQGDGEDNHMDGDKGARRGRKPGSGGRKNGGMGTKSKDKKLSGTDSEQEDESEDTDTDGEEETSQPPPQASHPSAHFQSPPTPFLPFASTLPLPPAPPGPSAPDEEDEEDYDS

SEQ ID NO: 888236 - protein, 262 aa, Homo sapiens
AAARLLAPEHAREPPRSAPEPPAVPPAASRAPPPAHPRTLWPTPPAGPFCRMVAHNQVAADNAVSTAAEPRRRPEPSSSSSSSPAAPARPRPCPAVPAPAPGDTHFRTFRSHADYRRITRASALLDACGFYWGPLSVHGAHERLRAEPVGTFLVRDSRQRNCFFALSVKMASGPTSIRVHFQAGRFHLDGSRESFDCLFELLEHYVAAPRRMLGAPLRQRRVRPLQELCRQRIVATVGRENLARIPLNPVLRDYLSSFPFQI

SEQ ID NO: 888237 - protein, 262 aa, Homo sapiens; identical to SEQ ID NO: 888236

SEQ ID NO: 888238 - protein, 262 aa, Homo sapiens; identical to SEQ ID NO: 888236

SEQ ID NO: 888239 - protein, 199 aa, Homo sapiens
NTYVRAKPKKTRKLIIFIFLAAAPARPRPCPAVPAPAPGDTHFRTFRSHADYRRITRASALLDACGFYWGPLSVHGAHERLRAEPVGTFLVRDSRQRNCFFALSVKMASGPTSIRVHFQAGRFHLDGSRESFDCLFELLEHYVAAPRRMLGAPLRQRRVRPLQELCRQRIVATVGRENLARIPLNPVLRDYLSSFPFQI

SEQ ID NO: 888240 - protein, 103 aa, Homo sapiens
NTYVRAKPKKTRKLIIFIFLDRGPRAPAAVPRGPGPGPRRHALPHIPFARRLPAHHARQRAPGRLRILLGAPERARGARAAARRARGHLPGARQPPAELLFRP

SEQ ID NO: 888241 - protein, 262 aa, Homo sapiens; identical to SEQ ID NO: 888236

SEQ ID NO: 888242 - protein, 173 aa, Homo sapiens
AAARLLAPEHAREPPRSAPEPPAVPPAASRAPPPAHPRTLWPTPPAGPFCRMVAHNQVAADNAVSTAAEPRRRPEPSSSSSSSPAAPARPRPCPAVPAPAPGDTHFRTFRSHADYRRITRASALLDACGFYWGPLSVHGAHERLRAEPVGTFLVRDSRQRNCFFALTVSGART

SEQ ID NO: 888243 - protein, 169 aa, Homo sapiens
MVAHNQVAADNAVSTAAEPRRRPEPSSSSSSSPAAPARPRPCPAVPAPAPGDTHFRTFRSHADYRRITRASALLDACGFYWGPLSVHGAHERLRAEPVGTFLVRDSRQRNCFFALSVKMASGPTSIRVHFQAGRFHLDGSRESFDCLFELLEHYVAAPRRMLGAPLRQR

SEQ ID NO: 888244 - protein, 108 aa, Homo sapiens
MATCGTRLCAPPPMTGGWSPASRRSTTASSQGWWRRCTLPMGSLSSSLATASAVYTCSISCCASPRPGRTALLMASSLLGLPGVAPSSPCWSWPQVTTRASPSCPASS

SEQ ID NO: 888245 - protein, 440 aa, Homo sapiens
MGPPGSPWQWVTLLLGLLLPPAAPFWLLNVLFPPHTTPKAELSNHTRPVILVPGCLGNQLEAKLDKPDVVNWMCYRKTEDFFTIWLDLNMFLPLGVDCWIDNTRVVYNRSSGLVSNAPGVQIRVPGFGKTYSVEYLDSSKLAGYLHTLVQNLVNNGYVRDETVRAAPYDWRLEPGQQEEYYRKLAGLVEEMHAAYGKPVFLIGHSLGCLHLLYFLLRQPQAWKDRFIDGFISLGAPWGGSIKPMLVLASGDNQGIPIMSSIKLKEEQRITTTSPWMFPSRMAWPEDHVFISTPSFNYTGRDFQRFFADLHFEEGWYMWLQSRDLLAGLPAPGVEVYCLYGVGLPTPRTYIYDHGFPYTDPVGVLYEDGDDTVATRSTELCGLWQGRQPQPVHLLPLHGIQHLNMVFSNLTLEHINAILLGAYRQGPPASPTASPEPPPPE

SEQ ID NO: 888246 - protein, 440 aa, Homo sapiens; identical to SEQ ID NO: 888245

SEQ ID NO: 888247 - protein, 108 aa, Homo sapiens; identical to SEQ ID NO: 888244

SEQ ID NO: 888248 - protein, 108 aa, Homo sapiens; identical to SEQ ID NO: 888244

SEQ ID NO: 888249 - protein, 122 aa, Homo sapiens
MCYRKTEDFFTIWLDLNMFLPLGVDCWIDNTRYSHVLHPSPNTLPLGYWLLSGTPAPQGCLQPELWARVQRPWCPDPRPWLWQDLLCGVPGQQQAGRVPAHTGAEPGQQWLRAGRDCARRPL

SEQ ID NO: 888250 - protein, 257 aa, Homo sapiens
MGPPGSPWQWVTLLLGLLLPPAAPFWLLNVLFPPHTTPKAELSNHTRPVILVPGCLGNQLEAKLDKPDVVNWMCYRKTEDFFTIWLDLNMFLPLGVDCWIDNTRVVYNRSSGLVSNAPGVQIRVPGFGKTYSVEYLDSSKLAGYLHTLVQNLVNNGYVRDETVRAAPYDWRLEPGQQEEYYRKLAGLVEEMHAAYGKPVFLIGHSLGCLHLLYFLLRQPQAWKDRFIDGFISLGAPWGGSIKPMLVLASGSGTRAQH

SEQ ID NO: 888251 - protein, 259 aa, Homo sapiens
MGPPGSPWQWVTLLLGLLLPPAAPFWLLNVLFPPHTTPKAELSNHTRPVILVPGCLGNQLEAKLDKPDVVNWMCYRKTEDFFTIWLDLNMFLPLGVDCWIDNTRVVYNRSSGLVSNAPGVQIRVPGFGKTYSVEYLDSSKLAGYLHTLVQNLVNNGYVRDETVRAAPYDWRLEPGQQEEYYRKLAGLVEEMHAAYGKPVFLIGHSLGCLHLLYFLLRQPQAWKDRFIDGFISLGAPWGGSIKPMLVLASGVPLPRDVLH

SEQ ID NO: 888252 - protein, 256 aa, Homo sapiens
MGPPGSPWQWVTLLLGLLLPPAAPFWLLNVLFPPHTTPKAELSNHTRPVILVPGCLGNQLEAKLDKPDVVNWMCYRKTEDFFTIWLDLNMFLPLGVDCWIDNTRVVYNRSSGLVSNAPGVQIRVPGFGKTYSVEYLDSSKLAGYLHTLVQNLVNNGYVRDETVRAAPYDWRLEPGQQEEYYRKLAGLVEEMHAAYGKPVFLIGHSLGCLHLLYFLLRQPQAWKDRFIDGFISLGAPWGGSIKPMLVLASGEKASNT

SEQ ID NO: 888253 - protein, 133 aa, Homo sapiens
MERLVARGTFPVLVRTSACRSLFGPVDHEELSRELQARLAELNAEDQNRWDYDFQQDMPLRGPGRLQWTEVDSDSVPAFYRETVQISSPSARDQRLRSRRAMSPRRVPLPSRRPWRAGSVEQTPAQEAAVSPI

SEQ ID NO: 888254 - protein, 349 aa, Homo sapiens
MSDASLRSTSTMERLVARGTFPVLVRTSACRSLFGPVDHEELSRELQARLAELNAEDQNRWDYDFQQDMPLRGPGRLQWTEVDSDSVPAFYRETVQVGRCRLLLAPRPVAVAVAVSPPLEPAAESLDGLEEAPEQLPSVPVPAPASTPPPVPVLAPAPAPAPAPVAAPVAAPVAVAVLAPAPAPAPAPAPAPAPVAAPAPAPAPAPAPAPAPAPAPDAAPQESAEQGANQGQRGQEPLADQLHSGISGRPAAGTAAASANGAAIKKLSGPLISDFFAKRKRSAPEKSSGDVPAPCPSPKPPPLACGLGGADPRARGCGEPNLEPQRAPRETCRGSGRWKGAGPRLGPFM

SEQ ID NO: 888255 - protein, 338 aa, Homo sapiens
MERLVARGTFPVLVRTSACRSLFGPVDHEELSRELQARLAELNAEDQNRWDYDFQQDMPLRGPGRLQWTEVDSDSVPAFYRETVQVGRCRLLLAPRPVAVAVAVSPPLEPAAESLDGLEEAPEQLPSVPVPAPASTPPPVPVLAPAPAPAPAPVAAPVAAPVAVAVLAPAPAPAPAPAPAPAPVAAPAPAPAPAPAPAPAPAPAPDAAPQESAEQGANQGQRGQEPLADQLHSGISGRPAAGTAAASANGAAIKKLSGPLISDFFAKRKRSAPEKSSGDVPAPCPSPKPPPLACGLGGADPRARGCGEPNLEPQRAPRETCRGSGRWKGAGPRLGPFM

SEQ ID NO: 888256 - protein, 516 aa, Homo sapiens
MERLVARGTFPVLVRTSACRSLFGPVDHEELSRELQARLAELNAEDQNRWDYDFQQDMPLRGPGRLQWTEVDSDSVPAFYRETVQVGRCRLLLAPRPVAVAVAVSPPLEPAAESLDGLEEAPEQLPSVPVPAPASTPPPVPVLAPAPAPAPAPVAAPVAAPVAVAVLAPAPAPAPAPAPAPAPVAAPAPAPAPAPAPAPAPAPAPDAAPQESAEQGANQGQRGQEPLADQLHSGISGRPAAGTAAASANGAAIKKLSGPLISGEPRTAPPRPGPAPLCPAGRSPQPSGASLGSRLLTVALKGPQRSGRGCAYPPPRPVVVPSTASRGPGWEAESRPRPPGSAVFAPGRGSPSPGAPAPREHGVEGVKRGGGPGGLDSTLRGDVNKADPPRTSARAGPPPPPRGRGRRPHPGRPAPRALSRPPLGSPGRPRPDRPRALSPADFFAKRKRSAPEKSSGDVPAPCPSPKPPPLACGLGGADPRARGCGEPNLEPQRAPRETCRGSGRWKGAGPRLGPFM

SEQ ID NO: 888257 - protein, 338 aa, Homo sapiens; identical to SEQ ID NO: 888255

SEQ ID NO: 888258 - protein, 338 aa, Homo sapiens; identical to SEQ ID NO: 888255

SEQ ID NO: 888259 - protein, 336 aa, Homo sapiens
MERKISRIHLVSEPSITHFLQVSWEKTLESGFVITLTDGHSAWTGTVSESEISQEADDMAMEKGKYVGELRKALLSGAGPADVYTFNFSKESCYFFFEKNLKDVSFRLGSFNLEKVENPAEVIRELICYCLDTIAENQAKNEHLQKENERLLRDWNDVQGRFEKCVSAKEALETDLYKRFILVLNEKKTKIRSLHNKLLNAAQEREKDIKQEGETAICSEMTADRDPVYDESTDEESENQTDLSGLASAAVSKDDSIISSLDVTDIAPSRKRRQRMQRNLGTEPKMAPQENQLQEKENSRPDSSLPETSKKEHISAENMSLETLRNSSPEDLFDEI

SEQ ID NO: 888260 - protein, 336 aa, Homo sapiens; identical to SEQ ID NO: 888259

SEQ ID NO: 888261 - protein, 310 aa, Homo sapiens
MERKISRIHLVSEPSITHFLQVSWEKTLESGFVITLTDGHSAWTGTVSESEISQEADDMAMEKGKYVGELRKALLSGAGPADVYTFNFSKESCYFFFEKNLKDVSFRLGSFNLEKVENPAEVIRELICYCLDTIAENQAKNEHLQKENERLLRDWNDVQGRFEKCVSAKEALETDLYKRFILVLNEKKTKIRSLHNKLLNAAQEREKDIKQEGETAICSEMTADRDPVYDESTDEESENQTDLSGLASAAVSKDDSIISSLDVTDIAPSRKRRQRMQRNLGTEPKMAPQENQLQEKEKGRKKETSEKEAV

SEQ ID NO: 888262 - protein, 120 aa, Homo sapiens
MIPLFQVLMSLILHQVEKGDSECKEILGQNLKWLLRRISFKKRKNGVLLCHQAIINDIGCNFRVIKKIRKWGERKGGNRKKIKERTEKEGKKKGRKAGRKQQGRKRRRKTDNHKADFSGN

SEQ ID NO: 888263 - protein, 336 aa, Homo sapiens; identical to SEQ ID NO: 888259

SEQ ID NO: 888264 - protein, 336 aa, Homo sapiens; identical to SEQ ID NO: 888259

SEQ ID NO: 888265 - protein, 309 aa, Homo sapiens
VSPVRSSYTQFTPRTVTGTVSESEISQEADDMAMEKGKYVGELRKALLSGAGPADVYTFNFSKESCYFFFEKNLKDVSFRLGSFNLEKVENPAEVIRELICYCLDTIAENQAKNEHLQKENERLLRDWNDVQGRFEKCVSAKEALETDLYKRFILVLNEKKTKIRSLHNKLLNAAQEREKDIKQEGETAICSEMTADRDPVYDESTDEESENQTDLSGLASAAVSKDDSIISSLDVTDIAPSRKRRQRMQRNLGTEPKMAPQENQLQEKENSRPDSSLPETSKKEHISAENMSLETLRNSSPEDLFDEI

SEQ ID NO: 888266 - protein, 116 aa, Homo sapiens
MTADRDPVYDESTDEESENQTDLSGLASAAVSKDDSIISSLDVTDIAPSRKRRQRMQRNLGTEPKMAPQENQLQEKENSRPDSSLPETSKKEHISAENMSLETLRNSSPEDLFDEI

SEQ ID NO: 888267 - protein, 271 aa, Homo sapiens
MERKISRIHLVSEPSITHFLQVSWEKTLESGFVITLTDGHSAWTGTVSESEISQEADDMAMEKGKYVGELRKALLSGAGPADVYTFNFSKESCYFFFEKNLKDVSFRLGSFNLEKVENPAEVIRELICYCLDTIAENQAKNEHLQKENERLLRDWNDVQGRFEKCVSAKEALETDLYKRFILVLNEKKTKIRSLHNKLLNAAQEREKDIKQEGETAICSEMTADRDPVYDESTDEESENQTDLSGLASEGGRRRLQRKRPCDGSKIREKRC

SEQ ID NO: 888268 - protein, 157 aa, Homo sapiens
MERKISRIHLVSEPSITHFLQVSWEKTLESGFVITLTDGHSAWTGTVSESEISQEADDMAMEKGKYVGELRKALLSGAGPADVYTFNFSKESCYFFFEKNLKDVSFRLGSFNLEKVENPAEVIRELICYCLDTIGNLEDFQRAIWKYVRGIEIFGLC

SEQ ID NO: 888269 - protein, 121 aa, Homo sapiens
APPHSPLSDKVTFHPYYNKSKTPTLLFPAVTTYAHENMPLAKDLLHPSPEEEKRKHKKKRLVQSPNSYFMDVKCPGCYKITTVFSHAQTVVLCVGCSTVLCQPTGGKARLTEGCSFRRKQH

SEQ ID NO: 888270 - protein, 102 aa, Homo sapiens
QFCFPVEFPAVTTYAHENMPLAKDLLHPSPEEEKRKHKKKRLVQSPNSYFMDVKCPGCYKITTVFSHAQTVVLCVGCSTVLCQPTGGKARLTEGCSFRRKQH

SEQ ID NO: 888271 - protein, 76 aa, Homo sapiens
  misc_feature (58)..(58): Xaa can be any naturally occurring amino acid
  misc_feature (70)..(70): Xaa can be any naturally occurring amino acid
  misc_feature (73)..(73): Xaa can be any naturally occurring amino acid
EDPRYSSGTSLFIVSGGDDLRTREHASRKGSPSSLSRRGEEETQEETPGAEPQFLTFXGALGLNNNLGPXKEXGFN

SEQ ID NO: 888272 - protein, 109 aa, Homo sapiens
LRIPAIHRAPRYSSFPAVTTYAHENMPLAKDLLHPSPEEEKRKHKKKRLVQSPNSYFMDVKCPGCYKITTVFSHAQTVVLCVGCSTVLCQPTGGKARLTEGCSFRRKQH

SEQ ID NO: 888273 - protein, 123 aa, Homo sapiens
TSKIHTGEKRYNVRNMGKHLLWMISCLNIRKFRIVRNFVTIRSVDKPSLCTKNLLNTRELILMRNLVNIKECVKNFHHGLGFAQLLSIHTSEKSLSVRNVGRFIATLNTLEFGEDNSCEKVFE

SEQ ID NO: 888274 - protein, 175 aa, Homo sapiens
YPVRGWVAKQVEGAGFTSASWAGRWWSYAVKASTFLAISTETSHFRAPSRIFWRTVRGMLPHKTKRGQAALDRLKVFDGIPPPYDKKKRMVVPAALKVVRLKPTRKFAYLGRLAHEVGWKYQAVTATLEEKRKEKAKIHYRKKKQLMRLRKQAEKNVEKKIDKYTEVLKTHGLLV

SEQ ID NO: 888275 - protein, 142 aa, Homo sapiens
MNTNPSRGPYHFRAPSRIFWRTVRGMLPHKTKRGQAALDRLKVFDGIPPPYDKKKRMVVPAALKVVRLKPTRKFAYLGRLAHEVGWKYQAVTATLEEKRKEKAKIHYRKKKQLMRLRKQAEKNVEKKIDKYTEVLKTHGLLV

SEQ ID NO: 888276 - protein, 77 aa, Homo sapiens
ETAHEATDLGFLFPLLLQVGWKYQAVTATLEEKRKEKAKIHYRKKKQLMRLRKQAEKNVEKKIDKYTEVLKTHGLLV

SEQ ID NO: 888277 - protein, 210 aa, Homo sapiens
LFQAAAKMAEVQVLVLDGRGHLLGRLAAIVAKQVLLGRKVVVVRCEGINISGNFYRNKLKYLAFLRKRMNTNPSRGPYHFRAPSRIFWRTVRGMLPHKTKRGQAALDRLKVFDGIPPPYDKKKRMVVPAALKVVRLKPTRKFAYLGRLAHEVGWKYQAVTATLEEKRKEKAKIHYRKKKQLMRLRKQAEKNVEKKIDKYTEVLKTHGLLV

SEQ ID NO: 888278 - protein, 125 aa, Homo sapiens
PHPGALLHPGALLHQRGQAALDRLKVFDGIPPPYDKKKRMVVPAALKVVRLKPTRKFAYLGRLAHEVGWKYQAVTATLEEKRKEKAKIHYRKKKQLMRLRKQAEKNVEKKIDKYTEVLKTHGLLV

SEQ ID NO: 888279 - protein, 116 aa, Homo sapiens
MSPSAFKQLREAVTKTLSLLPASYAQGACGTWTAAALKVVRLKPTRKFAYLGRLAHEVGWKYQAVTATLEEKRKEKAKIHYRKKKQLMRLRKQAEKNVEKKIDKYTEVLKTHGLLV

SEQ ID NO: 888280 - protein, 210 aa, Homo sapiens; identical to SEQ ID NO: 888277

SEQ ID NO: 888281 - protein, 210 aa, Homo sapiens; identical to SEQ ID NO: 888277

SEQ ID NO: 888282 - protein, 195 aa, Homo sapiens
LFQAAAKMAEVQVLVLDGRGHLLGRLAAIVAKQVLLGRKVVVVRCEGINISGNFYRNKLKYLAFLRKRMNTNPSRGPYHFRAPSRIFWRTVRGMLPHKTKRGQAALDRLKVFDGIPPPYDKKKRMVVPAALKVVRLKPTRKFAYLGRLAHEVGWKYQAVTATLEEKRKEKAKIHYRKKKQLMRLRKQAEKNVEKQ

SEQ ID NO: 888283 - protein, 476 aa, Homo sapiens
SRTRGTPVPEVLQKCTPGPGFREADSSLPHECRELWSPPDASCETAQGAAGYAGTAEPFRRASGLRVPSPRADAQRLRLPKSPCGRARKWRRRRRPGAPEAAVMELPSGPGPERLFDSHRLPGDCFLLLVLLLYAPVGFCLLVLRLFLGIHVFLVSCALPDSVLRRFVVRTMCAVLGLVARQEDSGLRDHSVRVLISNHVTPFDHNIVNLLTTCSTPLLNSPPSFVCWSRGFMEMNGRGELVESLKRFCASTRLPPTPLLLFPEEEATNGREGLLRFSSWPFSIQDVVQPLTLQVQRPLVSVTVSDASWVSELLWSLFVPFTVYQVRWLRPVHRQLGEANEEFALRVQQLVAKELGQTGTRLTPADKAEHMKRQRHPRLRPQSAQSSFPPSPGPSPDVQLATLAQRVKEVLPHVPLGVIQRDLAKTGCVDLTITNLLEGAVAFMPEDITKGTQSLPTASASKAFDACLMMMTPQAL

SEQ ID NO: 888284 - protein, 279 aa, Homo sapiens
MNGRGELVESLKRFCASTRLPPTPLLLFPEEEATNGREGLLRFSSWPFSIQDVVQPLTLQVQRPLVSVTVSDASWVSELLWSLFVPFTVYQVRWLRPVHRQLGEANEEFALRVQQLVAKELGQTGTRLTPADKAEHMKRQRHPRLRPQSAQSSFPPSPGPSPDVQLATLAQRVKEVLPHVPLGVIQRDLAKTGCVDLTITNLLEGAVAFMPEDITKGTQSLPTASASKFPSSGPVTPQPTALTFAKSSWARQESLQERKQALYEYARRRFTERRAQEAD

SEQ ID NO: 888285 - protein, 513 aa, Homo sapiens
SRTRGTPVPEVLQKCTPGPGFREADSSLPHECRELWSPPDASCETAQGAAGYAGTAEPFRRASGLRVPSPRADAQRLRLPKSPCGRARKWRRRRRPGAPEAAVMELPSGPGPERLFDSHRLPGDCFLLLVLLLYAPVGFCLLVLRLFLGIHVFLVSCALPDSVLRRFVVRTMCAVLGLVARQEDSGLRDHSVRVLISNHVTPFDHNIVNLLTTCSTPLLNSPPSFVCWSRGFMEMNGRGELVESLKRFCASTRLPPTPLLLFPEEEATNGREGLLRFSSWPFSIQDVVQPLTLQVQRPLVSVTVSDASWVSELLWSLFVPFTVYQVRWLRPVHRQLGEANEEFALRVQQLVAKELGQTGTRLTPADKAEHMKRQRHPRLRPQSAQSSFPPSPGPSPDVQLATLAQRVKEVLPHVPLGVIQRDLAKTGCVDLTITNLLEGAVAFMPEDITKGTQSLPTASASKFPSSGPVTPQPTALTFAKSSWARQESLQERKQALYEYARRRFTERRAQEAD

SEQ ID NO: 888286 - protein, 370 aa, Homo sapiens
SRTRGTPVPEVLQKCTPGPGFREADSSLPHECRELWSPPDASCETAQGAAGYAGTAEPFRRASGLRVPSPRADAQRLRLPKSPCGRARKWRRRRRPGAPEAAVMELPSGPGPERLFDSHRLPGDCFLLLVLLLYAPVGFCLLVLRLFLGIHVFLVSCALPDSVLRRFVVRTMCAVLGLVARQEDSGLRDHSVRVLISNHVTPFDHNIVNLLTTCSTPLLNSPPSFVCWSRGFMEMNGRGELVESLKRFCASTRLPPTPLLLFPEEEATNGREGLLRFSSWPFSIQDVVQPLTLQVQRPLVSVTVSDASWVSELLWSLFVPFTVYQVRWLRPVHRQLGEANEEFALRVQQVVGCTDRVEAGSLLRRRGRKA

SEQ ID NO: 888287 - protein, 448 aa, Homo sapiens
SRTRGTPVPEVLQKCTPGPGFREADSSLPHECRELWSPPDASCETAQGAAGYAGTAEPFRRASGLRVPSPRADAQRLRLPKSPCGRARKWRRRRRPGAPEAAVMELPSGPGPERLFDSHRLPGDCFLLLVLLLYAPVGFCLLVLRLFLGIHVFLVSCALPDSVLRRFVVRTMCAVLGLVARQEDSGLRDHSVRVLISNHVTPFDHNIVNLLTTCSTPLLNSPPSFVCWSRGFMEMNGRGELVESLKRFCASTRLPPTPLLLFPEEEATNGREGLLRFSSWPFSIQDVVQPLTLQVQRPLVSVTVSDASWVSELLWSLFVPFTVYQVRWLRPVHRQLGEANEEFALRVQQLVAKELGQTGTRLTPADKAEHMKRQRHPRLRPQSAQSSFPPSPGPSPDVQLATLAQRVKEVLPHVPLGVIQRDLGMGKGGPTLGDGHREEKWVVKEESK

SEQ ID NO: 888288 - protein, 486 aa, Homo sapiens
SRTRGTPVPEVLQKCTPGPGFREADSSLPHECRELWSPPDASCETAQGAAGYAGTAEPFRRASGLRVPSPRADAQRLRLPKSPCGRARKWRRRRRPGAPEAAVMELPSGPGPERLFDSHRLPGDCFLLLVLLLYAPVGFCLLVLRLFLGIHVFLVSCALPDSVLRRFVVRTMCAVLGLVARQEDSGLRDHSVRVLISNHVTPFDHNIVNLLTTCSTPLLNSPPSFVCWSRGFMEMNGRGELVESLKRFCASTRLPPTPLLLFPEEEATNGREGLLRFSSWPFSIQDVVQPLTLQVQRPLVSVTVSDASWVSELLWSLFVPFTVYQVRWLRPVHRQLGEANEEFALRVQQLVAKELGQTGTRLTPADKAEHMKRQRHPRLRPQSAQSSFPPSPGPSPDVQLATLAQRVKEVLPHVPLGVIQRDLAKTGCVDLTITNLLEGAVAFMPEDITKGTQSLPTASASKGETQEMVRSKCWGELGAGYVLPYP

SEQ ID NO: 888289 - protein, 328 aa, Homo sapiens
SRTRGTPVPEVLQKCTPGPGFREADSSLPHECRELWSPPDASCETAQGAAGYAGTAEPFRRASGLRVPSPRADAQRLRLPKSPCGRARKWRRRRRPGAPEAAVMELPSGPGPERLFDSHRLPGDCFLLLVLLLYAPVGFCLLVLRLFLGIHVFLVSCALPDSVLRRFVVRTMCAVLGLVARQEDSGLRDHSVRVLISNHVTPFDHNIVNLLTTCSTPLLNSPPSFVCWSRGFMEMNGRGELVESLKRFCASTRLPPTPLLLFPEEEATNGREGLLRFSSWPFSIQDVVQPLTLQVQRPLVSVTVSDASWVSELLWSLFVPFTVYQVRY

SEQ ID NO: 888290 - protein, 493 aa, Homo sapiens
SRTRGTPVPEVLQKCTPGPGFREADSSLPHECRELWSPPDASCETAQGAAGYAGTAEPFRRASGLRVPSPRADAQRLRLPKSPCGRARKWRRRRRPGAPEAAVMELPSGPGPERLFDSHRLPGDCFLLLVLLLYAPVGFCLLVLRLFLGIHVFLVSCALPDSVLRRFVVRTMCAVLGLVARQEDSGLRDHSVRVLISNHVTPFDHNIVNLLTTCSTPLLNSPPSFVCWSRGFMEMNGRGELVESLKRFCASTRLPPTPLLLFPEEEATNGREGLLRFSSWPFSIQDVVQPLTLQVQRPLVSVTVSDASWVSELLWSLFVPFTVYQVRWLRPVHRQLGEANEEFALRVQQLVAKELGQTGTRLTPADKAEHMKRQRHPRLRPQSAQSSFPPSPGPSPDVQLATLAQRVKEVLPHVPLGVIQRDLAKTGCVDLTITNLLEGAVAFMPEDITKGTQSLPTASASKWARQESLQERKQALYEYARRRFTERRAQEAD

SEQ ID NO: 888291 - protein, 252 aa, Homo sapiens
SRTRGTPVPEVLQKCTPGPGFREADSSLPHECRELWSPPDASCETAQGAAGYAGTAEPFRRASGLRVPSPRADAQRLRLPKSPCGRARKWRRRRRPGAPEAAVMELPSGPGPERLFDSHRLPGDCFLLLVLLLYAPVGFCLLVLRLFLGIHVFLVSCALPDSVLRRFVVRTMCAVLGLVARQEDSGLRDHSVRVLISNHVTPFDHNIVNLLTTCSTVSESEAESATGRFPGAQLKAPLSPLAFRMEDTEPYP

SEQ ID NO: 888292 - protein, 328 aa, Homo sapiens; identical to SEQ ID NO: 888289

SEQ ID NO: 888293 - protein, 448 aa, Homo sapiens; identical to SEQ ID NO: 888287

SEQ ID NO: 888294 - protein, 278 aa, Homo sapiens
SRTRGTPVPEVLQKCTPGPGFREADSSLPHECRELWSPPDASCETAQGAAGYAGTASTFRRASGLRVPSPRADAQRLRLPKSPCGRARKWRRRRRPGAPEAAVMELPSGPGPERLFDSHRLPGDCFLLLVLLLYAPVGFCLLVLRLFLGIHVFLVSCALPDSVLRRFVVRTMCAVLGLVARQEDSGLRDHSVRVLISNHVTPFDHNIVNLLTTCSTFLAIFYPRCGTTSYPASSETPGLCDGVRCLLGLRTAVVTFRPFHGVSSKVASSCSSPTRGSE

SEQ ID NO: 888295 - protein, 167 aa, Homo sapiens
SRTRGTPVPEVLQKCTPGPGFREADSSLPHECRELWSPPDASCETAQGAAGYAGTASPSGAPQDFGSPHPGRMPKDSAFPRAPAAGRENGGGGDGRALLKQQLWSFPQGRGRSGSLTRTGFRVTASYCSCCCSTRQSGSASSSCASFSGSTSSWSAARCQTASFADS

SEQ ID NO: 888296 - protein, 181 aa, Homo sapiens
SRVSHACRFRVALRVQQLVAKELGQTGTRLTPADKAEHMKRQRHPRLRPQSAQSSFPPSPGPSPDVQLATLAQRVKEVLPHVPLGVIQRDLAKTGCVDLTITNLLEGAVAFMPEDITKGTQSLPTASASKFPSSGPVTPQPTALTFAKSSWARQESLQERKQALYEYARRRFTERRAQEAD

SEQ ID NO: 888297 - protein, 280 aa, Homo sapiens
SRTRGTPVPEVLQKCTPGPGFREADSSLPHECRELWSPPDASCETAQGAAGYAGTAEPFRRASGLRVPSPRADAQRLRLPKSPCGRARKWRRRRRPGAPEAAVMELPSGPGPERLFDSHRLPGDCFLLLVLLLYAPVGFCLLVLRLFLGIHVFLVSCALPDSVLRRFVVRTMCAVLGLVARQEDSGLRDHSVRVLISNHVTPFDHNIVNLLTTCSTPLLNSPPSFVCWSRGFMEMNGRGELVESLKRFCASTRLPPTPLLLFPEEEATNGREGLLRFRWV

SEQ ID NO: 888298 - protein, 513 aa, Homo sapiens; identical to SEQ ID NO: 888285

SEQ ID NO: 888299 - protein, 513 aa, Homo sapiens; identical to SEQ ID NO: 888285

SEQ ID NO: 888300 - protein, 279 aa, Homo sapiens; identical to SEQ ID NO: 888284

SEQ ID NO: 888301 - protein, 545 aa, Homo sapiens
SRTRGTPVPEVLQKCTPGPGFREADSSLPHECRELWSPPDASCETAQGAAGYAGTAEPFRRASGLRVPSPRADAQRLRLPKSPCGRARKWRRRRRPGAPEAAVMELPSGPGPERLFDSHRLPGDCFLLLVLLLYAPVGFCLLVLRLFLGIHVFLVSCALPDSVLRRFVVRTMCAVLGLVARQEDSGLRDHSVRVLISNHVTPFDHNIVNLLTTCSTPLLNSPPSFVCWSRGFMEMNGRGELVESLKRFCASTRLPPTPLLLFPEEEATNGREGLLRFSSWPFSIQDVVQPLTLQVQRPLVSVTVSDASWVSELLWSLFVPFTVYQVRWLRPVHRQLGEANEEFALRVQQLVAKELGQTGTRLTPADKAEHMKRQRHPRLRPQSAQSSFPPSPGPSPDVQLATLAQRVKEVLPHVPLGVIQRDLAKTGCVDLTITNLLEGAVAFMPEDITKGTQSLPTASASKFPSSGPVTPQPTALTFAKSSWARQESLQERKQALYEYARRRSQKRRAQEGDDSQDGCPEREEIGAYTSQGGWGGRGWVPSYFG

SEQ ID NO: 888302 - protein, 465 aa, Homo sapiens
SRTRGTPVPEVLQKCTPGPGFREADSSLPHECRELWSPPDASCETAQGAAGYAGTAEPFRRASGLRVPSPRADAQRLRLPKSPCGRARKWRRRRRPGAPEAAVMELPSGPGPERLFDSHRLPGDCFLLLVLLLYAPVGFCLLVLRLFLGIHVFLVSCALPDSVLRRFVVRTMCAVLGLVARQEDSGLRDHSVRVLISNHVTPFDHNIVNLLTTCSTPLLNSPPSFVCWSRGFMEMNGRGELVESLKRFCASTRLPPTPLLLFPEEEATNGREGLLRFSSWPFSIQDVVQPLTLQVQRPLVSVTVSDASWVSELLWSLFVPFTVYQVRWLRPVHRQLGEANEEFALRVQQLVAKELGQTGTRLTPADKAEHMKRQRHPRLRPQSAQSSFPPSPGPSPDVQLATLAQRVKEVLPHVPLGVIQRDLAKTGCVDLTITNLLEGAVAFMPEDITKGTQSLPTASASKTLA

SEQ ID NO: 888303 - protein, 479 aa, Homo sapiens
SRTRGTPVPEVLQKCTPGPGFREADSSLPHECRELWSPPDASCETAQGAAGYAGTAEPFRRASGLRVPSPRADAQRLRLPKSPCGRARKWRRRRRPGAPEAAVMELPSGPGPERLFDSHRLPGDCFLLLVLLLYAPVGFCLLVLRLFLGIHVFLVSCALPDSVLRRFVVRTMCAVLGLVARQEDSGLRDHSVRVLISNHVTPFDHNIVNLLTTCSTPLLNSPPSFVCWSRGFMEMNGRGELVESLKRFCASTRLPPTPLLLFPEEEATNGREGLLRFSSWPFSIQDVVQPLTLQVQRPLVSVTVSDASWVSELLWSLFVPFTVYQVRWLRPVHRQLGEANEEFALRVQQLVAKELGQTGTRLTPADKAEHMKRQRHPRLRPQSAQSSFPPSPGPSPDVQLATLAQRVKEVLPHVPLGVIQRDLAKTGCVDLTITNLLEGAVAFMPEDITKGTQSLPTASASKPHPTHNRLDGWVVKREG

SEQ ID NO: 888304 - protein, 280 aa, Homo sapiens; identical to SEQ ID NO: 888297

SEQ ID NO: 888305 - protein, 495 aa, Homo sapiens
SRTRGTPVPEVLQKCTPGPGFREADSSLPHECRELWSPPDASCETAQGAAGYAGTAEPFRRASGLRVPSPRADAQRLRLPKSPCGRARKWRRRRRPGAPEAAVMELPSGPGPERLFDSHRLPGDCFLLLVLLLYAPVGFCLLVLRLFLGIHVFLVSCALPDSVLRRFVVRTMCAVLGLVARQEDSGLRDHSVRVLISNHVTPFDHNIVNLLTTCSTPLLNSPPSFVCWSRGFMEMNGRGELVESLKRFCASTRLPPTPLLLFPEEEATNGREGLLRFSSWPFSIQDVVQPLTLQVQRPLVSVTVSDASWVSELLWSLFVPFTVYQVRWLRPVHRQLGEANEEFALRVQQLVAKELGQTGTRLTPADKAEHMKRQRHPRLRPQSAQSSFPPSPGPSPDVQLATLAQRVKEVLPHVPLGVIQRDLAFMPEDITKGTQSLPTASASKFPSSGPVTPQPTALTFAKSSWARQESLQERKQALYEYARRRFTERRAQEAD

SEQ ID NO: 888306 - protein, 280 aa, Homo sapiens; identical to SEQ ID NO: 888297

SEQ ID NO: 888307 - protein, 306 aa, Homo sapiens
SRTRGTPVPEVLQKCTPGPGFREADSSLPHECRELWSPPDASCETAQGAAGYAGTASTFRRASGLRVPSPRADAQRLRLPKSPCGRARKWRRRRRPGAPEAAVMELPSGPGPERLFDSHRWLRPVHRQLGEANEEFALRVQQLVAKELGQTGTRLTPADKAEHMKRQRHPRLRPQSAQSSFPPSPGPSPDVQLATLAQRVKEVLPHVPLGVIQRDLAKTGCVDLTITNLLEGAVAFMPEDITKGTQSLPTASASKFPSSGPVTPQPTALTFAKSSWARQESLQERKQALYEYARRRFTERRAQEAD

SEQ ID NO: 888308 - protein, 328 aa, Homo sapiens; identical to SEQ ID NO: 888289

SEQ ID NO: 888309 - protein, 437 aa, Homo sapiens
MENQVLVIRIKIPNSGAVDWTVHSGPQLLFRDVLDVIGQVLPEATTTAFEYEDEDGDRITVRSDEEMKAMLSYYYSTVMEQQVNGQLIEPLQIFPRACKPPGERNIHGLKVNTRAGPSQHSSPAVSDSLPSNSLKKSSAELKKILANGQMNEQDIRYRDTLGHGNGGTVYKAYHVPSGKILAVKVILLDITLELQKQIMSELEILYKCDSSYIIGFYGAFFVENRISICTEFMDGGSLDVYRKMPEHVLGRIAVAVVKGLTYLWSLKILHRDVKPSNMLVNTRGQVKLCDFGVSTQLVNSIAKTYVGTNAYMAPERISGEQYGIHSDVWSLGISFMELALGRFPYPQIQKNQGSLMPLQLLQCIVDEDSPVLPVGEFSEPFVHFITQCMRKQPKERPAPEELMGHPFIVQFNDGNAAVVSMWVCRALEERRSQQGPP

SEQ ID NO: 888310 - protein, 438 aa, Homo sapiens
MLWLALGPFPAMENQVLVIRIKIPNSGAVDWTVHSGPQLLFRDVLDVIGQVLPEATTTAFEYEDEDGDRITVRSDEEMKAMLSYYYSTVMEQQVNGQLIEPLQIFPRACKPPGERNIHGLKVNTRAGPSQHSSPAVSDSLPSNSLKKSSAELKKILANGQMNEQDIRYRDTLGHGNGGTVYKAYHVPSGKILAVKVILLDITLELQKQIMSELEILYKCDSSYIIGFYGAFFVENRISICTEFMDGGSLDVYRKMPEHVLGRIAVAVVKGLTYLWSLKILHRDVKPSNMLVNTRGQVKLCDFGVSTQLVNSIAKTYVGTNAYMAPERISGEQYGIHSDVWSLGISFMEIQKNQGSLMPLQLLQCIVDEDSPVLPVGEFSEPFVHFITQCMRKQPKERPAPEELMGHPFIVQFNDGNAAVVSMWVCRALEERRSQQGPP

SEQ ID NO: 888311 - protein, 511 aa, Homo sapiens
MLWLALGPFPAMENQVLVIRIKIPNSGAVDWTVHSGPQLLFRDVLDVIGQVLPEATTTAFEYEDEDGDRITVRSDEEMKAMLSYYYSTVMEQQVNGQLIEPLQIFPRACKPPGERNIHGLKVNTRAGPSQHSSPAVSDSLPSNSLKKSSAELKKILANGQMNEQDIRYRDTLGHGNGGTVYKAYHVPSGKILAVKTPSSSAFGLLDLTPVICRGLSGLQLQTEGCTVGFPTFEVFRLGLASLLLSLQMAYCGTSPCHPVILLDITLELQKQIMSELEILYKCDSSYIIGFYGAFFVENRISICTEFMDGGSLDVYRKMPEHVLGRIAVAVVKGLTYLWSLKILHRDVKPSNMLVNTRGQVKLCDFGVSTQLVNSIAKTYVGTNAYMAPERISGEQYGIHSDVWSLGISFMELALGRFPYPQIQKNQGSLMPLQLLQCIVDEDSPVLPVGEFSEPFVHFITQCMRKQPKERPAPEELMGHPFIVQFNDGNAAVVSMWVCRALEERRSQQGPP

SEQ ID NO: 888312 - protein, 411 aa, Homo sapiens [sequence omitted]

SEQ ID NO: 888313 - protein, 371 aa, Homo sapiens
MKAMLSYYYSTVMEQQVNGQLIEPLQIFPRACKPPGERNIHGLKVNTRAGPSQHSSPAVSDSLPSNSLKKSSAELKKILANGQMNEQDIRYRDTLGHGNGGTVYKAYHVPSGKILAVKVILLDITLELQKQIMSELEILYKCDSSYIIGFYGAFFVENRISICTEFMDGGSLDVYRKMPEHVLGRIAVAVVKGLTYLWSLKILHRDVKPSNMLVNTRGQVKLCDFGVSTQLVNSIAKTYVGTNAYMAPERISGEQYGIHSDVWSLGISFMELALGRFPYPQIQKNQGSLMPLQLLQCIVDEDSPVLPVGEFSEPFVHFITQCMRKQPKERPAPEELMGHPFIVQFNDGNAAVVSMWVCRALEERRSQQGPP

SEQ ID NO: 888314 - protein, 83 aa, Homo sapiens
AATAAAQPPADCMFQASMRSPNMEPFKQQKVEDFYDIGEELGRATRSSCSSMMEMPPWCPCGCAGRWRRGGASRGPREAAAGH

SEQ ID NO: 888315 - protein, 438 aa, Homo sapiens; identical to SEQ ID NO: 888310

SEQ ID NO: 888316 - protein, 438 aa, Homo sapiens
MLWLALGPFPAMENQVLVIRIKIPNSGAVDWTVHSGPQLLFRDVLDVIGQVLPEATTTAFEYEDEDGDRITVRSDEEMKAMLSYYYSTVMEQQVNGQLIEPLQIFPRACKPPGERNIHGLKVNTRAGPSQHSSPAVSDSLPSNSLKKSSAELKKILANGQMNEQDIRYRDTLGHGNGGTVYKAYHVPSGKILAVKTPSSSAFGLLDLTPVICRGLSGLQLQTEGCTVGFPTFEVFRLGLASLLLSLQMAYCGTSPCHPVILLDITLELQKQIMSELEILYKCDSSYIIGFYGAFFVENRISICTEFMDGGSLDVYRKMPEHVLGRIAVAVVKGLTYLWSLKILHRDVKPSNMLVNTRGQVKLCDFGVSTQLVNSIAKTYVGTNAYMAPERISGEQYGIHSDVWSLGISFMELALGRFPYPQVRLFITAVCHCDIHSYV

SEQ ID NO: 888317 - protein, 289 aa, Homo sapiens
MLWLALGPFPAMENQVLVIRIKIPNSGAVDWTVHSGPQLLFRDVLDVIGQVLPEATTTAFEYEDEDGDRITVRSDEEMKAMLSYYYSTVMEQQVNGQLIEPLQIFPRACKPPGERNIHGLKVNTRAGPSQHSSPAVSDSLPSNSLKKSSAELKKILANGQMNEQDIRYRDTLGHGNGGTVYKAYHVPSGKILAVKVILLDITLELQKQIMSELEILYKCDSSYIIGFYGAFFVENRISICTEFMDGGSLDVYRKMPEHVLGRIAVAVVKGLTYLWSLKILHRANKDLCT

SEQ ID NO: 888318 - protein, 184 aa, Homo sapiens
MENQVLVIRIKIPNSGAVDWTVHSGPQLLFRDVLDVIGQVLPEATTTAFEYEDEDGDRITVRSDEEMKAMLSYYYSTVMEQQVNGQLIEPLQIFPRACKPPGERNIHGLKVNTRAGPSQHSSPAVSDSLPSNSLKKSSAELKKILANGQMNEQDIRYRDTLGHGNGGTVYKAYHVPSGKILAVK

SEQ ID NO: 888319 - protein, 76 aa, Homo sapiens
FRSNSVAAAFLLLLSPLPPSPPPQPPPVRAASGGRSSACARRALCLRVGQKTRPLNLPRGLSVVWRPWGSFLIAPD

SEQ ID NO: 888320 - protein, 437 aa, Homo sapiens; identical to SEQ ID NO: 888309

SEQ ID NO: 888321 - protein, 437 aa, Homo sapiens; identical to SEQ ID NO: 888309

SEQ ID NO: 888322 - protein, 437 aa, Homo sapiens; identical to SEQ ID NO: 888309

SEQ ID NO: 888323 - protein, 342 aa, Homo sapiens
MYLLLTPTCVLDGAIMYTLWIMYYTVYSKFFSFWTLGPTPVICRGLSGLQLQTEGCTVGFPTFEVFRLGLASLLLSLQMAYCGTSPCHPVILLDITLELQKQIMSELEILYKCDSSYIIGFYGAFFVENRISICTEFMDGGSLDVYRKMPEHVLGRIAVAVVKGLTYLWSLKILHRDVKPSNMLVNTRGQVKLCDFGVSTQLVNSIAKTYVGTNAYMAPERISGEQYGIHSDVWSLGISFMELALGRFPYPQIQKNQGSLMPLQLLQCIVDEDSPVLPVGEFSEPFVHFITQCMRKQPKERPAPEELMGHPFIVQFNDGNAAVVSMWVCRALEERRSQQGPP

SEQ ID NO: 888324 - protein, 467 aa, Homo sapiens
MLWLALGPFPAMENQVLVIRIKIPNSGAVDWTVHSGPQLLFRDVLDVIGQVLPEATTTAFEYEDEDGDRITVRSDEEMKAMLSYYYSTVMEQQVNGQLIEPLQIFPRACKPPGERNIHGLKVNTRAGPSQHSSPAVSDSLPSNSLKKSSAELKKILANGQMNEQDIRYRDTLGHGNGGTVYKAYHVPSGKILAVKVILLDITLELQKQIMSELEILYKCDSSYIIGFYGAFFVENRISICTEFMDGGSLDVYRKMPEHVLGRIAVAVVKGLTYLWSLKILHRDVKPSNMLVNTRGQVKLCDFGVSTQLVNSIAKTYVGTNAYMAPERISGEQYGIHSDVWSLGISFMEIQKNQGSLMPLQLLQCIVDEDSPVLPVGEFSEPFVHFITQCMRKQPKERPAPEELMGHPFIVQFNDGNAAVVSMWVCRALEERRSLASLPSPSPLSAGGLAWGAPCVAHPTRPSPYLLV

SEQ ID NO: 888325 - protein, 380 aa, Homo sapiens
MLWLALGPFPAMENQVLVIRIKIPNSGAVDWTVHSGPQLLFRDVLDVIGQVLPEATTTAFEYEDEDGDRITVRSDEEMKAMLSYYYSTVMEQQVNGQLIEPLQIFPRACKPPGERNIHGLKVNTRAGPSQHSSPAVSDSLPSNSLKKSSAELKKILANGQMNEQDIRYRDTLGHGNGGTVYKAYHVPSGKILAVKVILLDITLELQKQIMSELEILYKCDSSYIIGFYGAFFVENRISICTEFMDGGSLDVYRKMPEHVLGRIAVAVVKGLTYLWSLKILHRDVKPSNMLVNTRGQVKLCDFGVSTQLVNSIAKTYVGTNAYMAPERISGEQYGIHSDVWSLGISFMEPLQLLQCIVDEDSPVLPVGEFSEPFVHFITQW

SEQ ID NO: 888326 - protein, 182 aa, Homo sapiens
MEAPRVPAHFCFPNVFLYKGSGPSASLMGIKVLMLCDKKKQPTHTNTTRNTRTKTPTPHRQDPPQDQQQTAKKHRDTSTTHNPQHQHTEGARPPLHHPTTQATHDARPPHQMSQRAPPRRGNRQTEDAGAASKAHANRPTTQTHEEEETNGREGRSGNNQRKKAPHHNQNGRKHNRRASHRN

SEQ ID NO: 888327 - protein, 177 aa, Homo sapiens
PCSGARLGELPLVLHFSSYRAVGEGGPEDCELSAFRLELPLGIPPGGRAGPWGGTLWRTSFYGRFRHFLDIIDPRTLFVTERRLREAVQLLEDYKHGTLRPGVTNEQLWSAQKIKQAILHPDTNEKIFMPFRMSGYIPFGTPIALLETALTRVVLPMPILVLPPIVMSMLEKLKHPN

SEQ ID NO: 888328 - protein, 112 aa, Homo sapiens
MADTATTASAAAASAASASSDAPPFQLGKPRFQQTSFYGRFRHFLDIIDPRTLFVTEEEGCLCSKNALNKASEEEVALLDRGEEWCILILNGERRGKEEEEKNSGKESMILR

SEQ ID NO: 888329 - protein, 136 aa, Homo sapiens
PCSGARLGELPLVLHFSSYRAVGEGGPEDCELSAFRLELPLGIPPGGRAGPWGGTLWRTSFYGRFRHFLDIIDPRTLFVTEEEGCLCSKNALNKASEEEVALLDRGEEWCILILNGERRGKEEEEKNSGKESMILR

SEQ ID NO: 888330 - protein, 340 aa, Homo sapiens
MADTATTASAAAASAASASSDAPPFQLGKPRFQQTSFYGRFRHFLDIIDPRTLFVTERRLREAVQLLEDYKHGTLRPGVTNEQLWSAQKIKQAILHPDTNEKIFMPFRMSGYIPFGTPIVVGLLLPNQTLASTVFWQWLNQSHNACVNYANRNATKPSPASKFIQGYLGAVISAVSIAVGLNVLVQKANKFTPATRLLIQRFVPFPAVASANICNVVLMRYGELEEGIDVLDSDGNLVGSSKIAARHALLETALTRVVLPMPILVLPPIVMSMLEKTALLQARPRLLLPVQSLVCLAAFGLALPLAISLFPQMSEIETSQLEPEIAQATSSRTVVYNKGL

SEQ ID NO: 888331 - protein, 173 aa, Homo sapiens
MPFRMSGYIPFGTPIVVGLLLPNQTLASTVFWQWLNQSHNACVNYANRNATKPSPASKFIQGYLGAVISAVSIAVGLNVLVQKANKFTPATRLLIQRFVPFPAVGPAGDGADASGPAHAHPGATPDRHVHAGEDGSPAGTPPAAPPCAKPRVPGSLRPGPAAGHQPLPANVRD

SEQ ID NO: 888332 - protein, 177 aa, Homo sapiens
MPFRMSGYIPFGTPIVVGLLLPNQTLASTVFWQWLNQSHNACVNYANRNATKPSPASKFIQGYLGAVISAVSIAVGLNVLVQKANKFTPATRLLIQRFVPFPAVASANICNVVLMRYGELEEGIDVLDSDGNLVGSSKIAARHALLETALTRVVLPMPILVLPPIVMSMLEKLKHPN

SEQ ID NO: 888333 - protein, 236 aa, Homo sapiens
MPFRMSGYIPFGTPIVVGLLLPNQTLASTVFWQWLNQSHNACVNYANRNATKPSPASKFIQGYLGAVISAVSIAVGLNVLVQKANKFTPATRLLIQRFVPFPAVASANICNVVLMRYGELEEGIDVLDSDGNLVGSSKIAARHALLETALTRVVLPMPILVLPPIVMSMLEKTALLQARPRLLLPVQSLVCLAAFGLALPLAISLFPQMSEIETSQLEPEIAQATSSRTVVYNKGL

SEQ ID NO: 888334 - protein, 131 aa, Homo sapiens
PCSGARLGELPLVLHFSSYRAVGEGGPEDCELSAFRLELPLGIPPGGRAGPWGGTLWRTSFYGRFRHFLDIIDPRTLFVTEVSHGCHLSGPWAFVPCHFRICGSLREGEDGGVKRIGEVRGERKVTNSLYL

SEQ ID NO: 888335 - protein, 236 aa, Homo sapiens; identical to SEQ ID NO: 888333

SEQ ID NO: 888336 - protein, 364 aa, Homo sapiens
PCSGARLGELPLVLHFSSYRAVGEGGPEDCELSAFRLELPLGIPPGGRAGPWGGTLWRTSFYGRFRHFLDIIDPRTLFVTERRLREAVQLLEDYKHGTLRPGVTNEQLWSAQKIKQAILHPDTNEKIFMPFRMSGYIPFGTPIVVGLLLPNQTLASTVFWQWLNQSHNACVNYANRNATKPSPASKFIQGYLGAVISAVSIAVGLNVLVQKANKFTPATRLLIQRFVPFPAVASANICNVVLMRYGELEEGIDVLDSDGNLVGSSKIAARHALLETALTRVVLPMPILVLPPIVMSMLEKTALLQARPRLLLPVQSLVCLAAFGLALPLAISLFPQMSEIETSQLEPEIAQATSSRTVVYNKGL

SEQ ID NO: 888337 - protein, 97 aa, Homo sapiens
QPDSGVQQGVVSVVSGLGTEHCAAGELEGQARRLTAAVASANICNVVLMRYGELEEGIDVLDSDGNLVGSSKIAARHALLETALTRVVLPMPIHILT

SEQ ID NO: 888338 - protein, 80 aa, Homo sapiens
QAFDLGFASLQNCFLHHHNSMWSDRIGFKEETKSHLLQETALPSTSSPYSLVLQTPKLCRRKAAWYMGRKTRLSDLESTS

SEQ ID NO: 888339 - protein, 521 aa, Homo sapiens
MEASVLSPTSWEKRRAWLRQSRNWQTQVLEEEAAAALQDVPDPEPSSLDDVFQEGNPINKIEDWLQDCGYSEEGFSEEAGQFIYNGFCSHGTSFEDDLTLGAEATLLAANGKLFSRSFLETARPCQLLDLGCSLASSSMTGGTNKTSSSISEILDKVQEDAEDVLFSLGFGQEDHKDTSRIPARFFTTPSQAKGIDFQLFLKSQVRRIEMEDPCLMLASRFKQVQTLAVTADAFFCLYSYVSKTPVQKFTPSHMFWNCNHPTDVPSIRILSREPEPQSPRDRLRKAISKMCLYTCPRDRPPPPHNTPKRNSLDQVVLEVMDKVKEEKQFLQQDSDLGQFSQEDPVPPAEGKKLPTSPYPCVFCCEEETQQRMSTVLAPSQTLDSNPKVPCCTHSLPIEDPQWSTDPAQIRRELCSLPATNTETHPAKDETFWKRKSRARKSLFQKNLMGRKVKSLDLSITQQKWKQSVDRPELRRSLSQQPQDTFDLEEVQSNSEEEQSQSRWPSRPRHPHHHQTFAGKDS

SEQ ID NO: 888340 - protein, 449 aa, Homo sapiens
MEASVLSPTSWEKRRAWLRQSRNWQTQVLEEEAAAALQDVPDPEPSSLDDVFQEGNPINKIEDWLQDCGYSEEGFSEEAGQFIYNGFCSHGTSFEDDLTLGAEATLLAANGKLFSRSFLETARPCQLLDLGCSLASSSMTGGTNKTSSSISEILDKVQEDAFFCLYSYVSKTPVQKFTPSHMFWNCNHPTDVPSIRILSREPEPQSPRDRLRKAISKMCLYTCPRDRPPPPHNTPKRNSLDQVVLEVMDKVKEEKQFLQQDSDLGQFSQEDPVPPAEGKKLPTSPYPCVFCCEEETQQRMSTVLAPSQTLDSNPKVPCCTHSLPIEDPQWSTDPAQIRRELCSLPATNTETHPAKDETFWKRKSRARKSLFQKNLMGRKVKSLDLSITQQKWKQSVDRPELRRSLSQQPQDTFDLEEVQSNSEEEQSQSRWPSRPRHPHHHQTFAGKDS

SEQ ID NO: 888341 - protein, 383 aa, Homo sapiens
MTGGTNKTSSSISEILDKVQEDAEDVLFSLGFGQEDHKDTSRIPARFFTTPSQAKGIDFQLFLKSQVRRIEMEDPCLMLASRFKQVQTLAVTADAFFCLYSYVSKTPVQKFTPSHMFWNCNHPTDVPSIRILSREPEPQSPRDRLRKAISKMCLYTCPRDRPPPPHNTPKRNSLDQVVLEVMDKVKEEKQFLQQDSDLGQFSQEDPVPPAEGKKLPTSPYPCVFCCEEETQQRMSTVLAPSQTLDSNPKVPCCTHSLPIEDPQWSTDPAQIRRELCSLPATNTETHPAKDETFWKRKSRARKSLFQKNLMGRKVKSLDLSITQQKWKQSVDRPELRRSLSQQPQDTFDLEEVQSNSEEEQSQSRWPSRPRHPHHHQTFAGKDS

SEQ ID NO: 888342 - protein, 411 aa, Homo sapiens
MTGGTNKTSSSISEILDKVQEDAEDVLFSLGFGQEDHKDTSRIPARFFTTPSQAKGIDFQLFLKSQVRRIEMEDPCLMLASRFKQVQTLAVTADAFFCLYSYVSKTPVQKFTPSHMFWNCNHPTDVPSIRILSREPEPQSPRDRLRKAISKMCLYTCPRDRPPPPHNTPKRNSLDQVVLEVMDKVKEEKQFLQQDSDLGQFSQEDPVPPAEGKKLPTSPYPCVFCCEEETQQRMSTVLAPSQTLDSNPKVPCCTHSLPIEDPQWSTDPAQIRRELCSLPATNTETHPAKDETFWKRKSRARKSLFQKNLMGRKVKSLDLSITQQKWKQSVDRPELRRSLSQQPQDTFDLEEAFSTTTTACGLTELASKKKLKATSCRKLHCPQHPAPTPWSSKPPNSAGERQHGTWGGRPD

SEQ ID NO: 888343 - protein, 383 aa, Homo sapiens; identical to SEQ ID NO: 888341

SEQ ID NO: 888344 - protein, 383 aa, Homo sapiens; identical to SEQ ID NO: 888341

SEQ ID NO: 888345 - protein, 383 aa, Homo sapiens; identical to SEQ ID NO: 888341

SEQ ID NO: 888346 - protein, 383 aa, Homo sapiens; identical to SEQ ID NO: 888341

SEQ ID NO: 888347 - protein, 599 aa, Homo sapiens
MDGSRRVRATSVLPRYGPPCLFKGHLSTKSNAFCTDSSSLRLSTLQLVKNHMAVHYNKILSAKAAVDCSVPVSVSTSIKYADQQRREKLKKELAQCEKEFKLTKTAMRANYKNNSKSLFNTLQKPSGEPQIEDDMLKEEMNGFSSFARSLVPSSERLHLSLHKSSKVITNGPEKNSSSSPSSVDYAASGPRKLSSGALYGRRPRSTFPNSHRFQLVISKAPSGDLLDKHSELFSNKQLPFTPRTLKTEAKSFLSQYRYYTPAKRKKDFTDQRIEAETQTELSFKSELGTAETKNMTDSEMNIKQASNCVTYDAKEKIAPLPLEGHDSTWDEIKDDALQHSSPRAMCQYSLKPPSTRKIYSDEEELLYLSFIEDVTDEILKLGLFSNRFLERLFERHIKQNKHLEEEKMRHLLHVLKVDLGCTSEENSVKQNDVDMLNVFDFEKAGNSEPNELKNESEVTIQQERQQYQKALDMLLSAPKDENEIFPSPTEFFMPIYKSKHSEGVIIQQVNDETNLETSTLDENHPSISDSLTDRETSVNVIEGDSDPEKVEISNGLCGLNTSPSQSVQFSSVKGDNNHDMELSTLKIMEMSIEDCPLDV

SEQ ID NO: 888348 - protein, 567 aa, Homo sapiens
MDGSRRVRATSVLPRYGPPCLFKGHLSTKSNAAVDCSVPVSVSTSIKYADQQRREKLKKELAQCEKEFKLTKTAMRANYKNNSKSLFNTLQKPSGEPQIEDDMLKEEMNGFSSFARSLVPSSERLHLSLHKSSKVITNGPEKNSSSSPSSVDYAASGPRKLSSGALYGRRPRSTFPNSHRFQLVISKAPSGDLLDKHSELFSNKQLPFTPRTLKTEAKSFLSQYRYYTPAKRKKDFTDQRIEAETQTELSFKSELGTAETKNMTDSEMNIKQASNCVTYDAKEKIAPLPLEGHDSTWDEIKDDALQHSSPRAMCQYSLKPPSTRKIYSDEEELLYLSFIEDVTDEILKLGLFSNRFLERLFERHIKQNKHLEEEKMRHLLHVLKVDLGCTSEENSVKQNDVDMLNVFDFEKAGNSEPNELKNESEVTIQQERQQYQKALDMLLSAPKDENEIFPSPTEFFMPIYKSKHSEGVIIQQVNDETNLETSTLDENHPSISDSLTDRETSVNVIEGDSDPEKVEISNGLCGLNTSPSQSVQFSSVKGDNNHDMELSTLKIMEMSIEDCPLDV

SEQ ID NO: 888349 - protein, 493 aa, Homo sapiens
MRANYKNNSKSLFNTLQKPSGEPQIEDDMLKEEMNGFSSFARSLVPSSERLHLSLHKSSKVITNGPEKNSSSSPSSVDYAASGPRKLSSGALYGRRPRSTFPNSHRFQLVISKAPSGDLLDKHSELFSNKQLPFTPRTLKTEAKSFLSQYRYYTPAKRKKDFTDQRIEAETQTELSFKSELGTAETKNMTDSEMNIKQASNCVTYDAKEKIAPLPLEGHDSTWDEIKDDALQHSSPRAMCQYSLKPPSTRKIYSDEEELLYLSFIEDVTDEILKLGLFSNRFLERLFERHIKQNKHLEEEKMRHLLHVLKVDLGCTSEENSVKQNDVDMLNVFDFEKAGNSEPNELKNESEVTIQQERQQYQKALDMLLSAPKDENEIFPSPTEFFMPIYKSKHSEGVIIQQVNDETNLETSTLDENHPSISDSLTDRETSVNVIEGDSDPEKVEISNGLCGLNTSPSQSVQFSSVKGDNNHDMELSTLKIMEMSIEDCPLDV

SEQ ID NO: 888350 - protein, 585 aa, Homo sapiens
MDGSRRVRATSVLPRYGPPCLFKGHLSTKSNAAVDCSVPVSVSTSIKCIHVPWWFAAPINLSSTLDADQQRREKLKKELAQCEKEFKLTKTAMRANYKNNSKSLFNTLQKPSGEPQIEDDMLKEEMNGFSSFARSLVPSSERLHLSLHKSSKVITNGPEKNSSSSPSSVDYAASGPRKLSSGALYGRRPRSTFPNSHRFQLVISKAPSGDLLDKHSELFSNKQLPFTPRTLKTEAKSFLSQYRYYTPAKRKKDFTDQRIEAETQTELSFKSELGTAETKNMTDSEMNIKQASNCVTYDAKEKIAPLPLEGHDSTWDEIKDDALQHSSPRAMCQYSLKPPSTRKIYSDEEELLYLSFIEDVTDEILKLGLFSNRFLERLFERHIKQNKHLEEEKMRHLLHVLKVDLGCTSEENSVKQNDVDMLNVFDFEKAGNSEPNELKNESEVTIQQERQQYQKALDMLLSAPKDENEIFPSPTEFFMPIYKSKHSEGVIIQQVNDETNLETSTLDENHPSISDSLTDRETSVNVIEGDSDPEKVEISNGLCGLNTSPSQSVQFSSVKGDNNHDMELSTLKIMEMSIEDCPLDV

SEQ ID NO: 888351 - protein, 535 aa, Homo sapiens
MNLGAPVLGANIPRIDADQQRREKLKKELAQCEKEFKLTKTAMRANYKNNSKSLFNTLQKPSGEPQIEDDMLKEEMNGFSSFARSLVPSSERLHLSLHKSSKVITNGPEKNSSSSPSSVDYAASGPRKLSSGALYGRRPRSTFPNSHRFQLVISKAPSGDLLDKHSELFSNKQLPFTPRTLKTEAKSFLSQYRYYTPAKRKKDFTDQRIEAETQTELSFKSELGTAETKNMTDSEMNIKQASNCVTYDAKEKIAPLPLEGHDSTWDEIKDDALQHSSPRAMCQYSLKPPSTRKIYSDEEELLYLSFIEDVTDEILKLGLFSNRFLERLFERHIKQNKHLEEEKMRHLLHVLKVDLGCTSEENSVKQNDVDMLNVFDFEKAGNSEPNELKNESEVTIQQERQQYQKALDMLLSAPKDENEIFPSPTEFFMPIYKSKHSEGVIIQQVNDETNLETSTLDENHPSISDSLTDRETSVNVIEGDSDPEKVEISNGLCGLNTSPSQSVQFSSVKGDNNHDMELSTLKIMEMSIEDCPLDV

SEQ ID NO: 888352 - protein, 493 aa, Homo sapiens; identical to SEQ ID NO: 888349

SEQ ID NO: 888353 - protein, 458 aa, Homo sapiens
MDGSRRVRATSVLPRYGPPCLFKGHLSTKSNAFCTDSSSLRLSTLQLVKNHMAVHYNKILSAKAAVDCSVPVSVSTSIKYADQQRREKLKKELAQCEKEFKLTKTAMRANYKNNSKSLFNTLQKPSGEPQIEDDMLKEEMNGFSSFARSLVPSSERLHLSLHKSSKVITNGPEKNSSSSPSSVDYAASGPRKLSSGALYGRRPRSTFPNSHRFQLVISKAPSGDLLDKHSELFSNKQLPFTPRTLKTEAKSFLSQYRYYTPAKRKKDFTDQRIEAETQTELSFKSELGTAETKNMTDSEMNIKQASNCVTYDAKEKIAPLPLEGHDSTWDEIKDDALQHSSPRAMCQYSLKPPSTRKIYSDEEELLYLSFIEDVTDEILKLGLFSNRFLERLFERHIKQNKHLEEEKMRHLLHVLKVDLGCTSEENSFSSVKGDNNHDMELSTLKIMEMSIEDCPLDV

SEQ ID NO: 888354 - protein, 504 aa, Homo sapiens
MDGSRRVRATSVLPRYGPPCLFKGHLSTKSNAFCTDSSSLRLSTLQLVKNHMAVHYNKILSAKAAVDCSVPVSVSTSIKYADQQRREKLKKELAQCEKEFKLTKTAMRANYKNNSKSLFNTLQKPSGEPQIEDDMLKEEMNGFSSFARSLVPSSERLHLSLHKSSKVITNGPEKNSSSSPSSVDYAASGPRKLSSGALYGRRPRSTFPNSHRFQLVISKAPSGDLLDKHSELFSNKQLPFTPRTLKTEAKSFLSQYRYYTPAKRKKDFTDQRIEAETQTELSFKSELGTAETKNMTDSEMNIKQASNCVTYDAKEKIAPLPLEGHDSTWDEIKDDALQHSSPRAMCQYSLKPPSTRKIYSDEEELLYLSFIEDVTDEILKLGLFSNRFLERLFERHIKQNKHLEEEKMRHLLHVLKVDLGCTSEENSVKQNDVDMLNVFDFEKAGNSEPNELKNESEVTIQQERQQYQKALDMYCRHQRMRTRYSLHQLNFSCLFINQSIQKGL

SEQ ID NO: 888355 - protein, 444 aa, Homo sapiens
MDGSRRVRATSVLPRYGPPCLFKGHLSTKSNAFCTDSSSLRLSTLQLVKNHMAVHYNKILSAKAAVDCSVPVSVSTSIKYADQQRREKLKKELAQCEKEFKLTKTAMRANYKNNSKSLFNTLQKPSGEPQIEDDMLKEEMNGFSSFARSLVPSSERLHLSLHKSSKVITNGPEKNSSSSPSSVDYAASGPRKLSSGALYGRRPRSTFPNSHRFQLVISKAPSGDLLDKHSELFSNKQLPFTPRTLKTEAKSFLSQYRYYTPAKRKKDFTDQRIEAETQTELSFKSELGTAETKNMTDSEMNIKQASNCVTYDAKEKIAPLPLEGHDSTWDEIKDDALQHSSPRAMCQYSLKPPSTRKIYSDEEELLYLSFIEDVTDEILKLGLFSNRFLERLFERHIKQNKHLEEEKMRHLLHVLKVDLGCTSEENSIPDAATTGPKTTPLEDE

SEQ ID NO: 888356 - protein, 174 aa, Homo sapiens
MKYKNLMARALYDNVPECAEELAFRKGDILTVIEQNTGGLEGWWLCSLHGRQGIVPGNRVKLLIGPMQETASSHEQPASGLMQQTFGQQKLYQVPNPQAAPRDTIYQVPPSYQNQGIYQVPTGHGTQEQEVYQVPPSVQRSIGGTSGPHVGKKVFQRDGQVSYFLVRASKQTSL

SEQ ID NO: 888357 - protein, 834 aa, Homo sapiens
MKYKNLMARALYDNVPECAEELAFRKGDILTVIEQNTGGLEGWWLCSLHGRQGIVPGNRVKLLIGPMQETASSHEQPASGLMQQTFGQQKLYQVPNPQAAPRDTIYQVPPSYQNQGIYQVPTGHGTQEQEVYQVPPSVQRSIGGTSGPHVGKKVITPVRTGHGYVYEYPSRYQKDVYDIPPSHTTQGVYDIPPSSAKGPVFSVPVGEIKPQGVYDIPPTKGVYAIPPSACRDEAGLREKDYDFPPPMRQAGRPDLRPEGVYDIPPTCTKPAGKDLHVKYNCDIPGAAEPVARRHQSLSPNHPPPQLGQSVGSQNDAYDVPRGVQFLEPPAETSEKANPQERDGVYDVPLHNPPDAKGSRDLVDGINRLSFSSTGSTRSNMSTSSTSSKESSLSASPAQDKRLFLDPDTAIERLQRLQQALEMGVSSLMALVTTDWRCYGYMERHINEIRTAVDKVELFLKEYLHFVKGAVANAACLPELILHNKMKRELQRVEDSHQILSQTSHDLNECSWSLNILAINKPQNKCDDLDRFVMVAKTVPDDAKQLTTTINTNAEALFRPGPGSLHLKNGPESIMNSTEYPHGGSQGQLLHPGDHKAQAHNKALPPGLSKEQAPDCSSSDGSERSWMDDYDYVHLQGKEEFERQQKELLEKENIMKQNKMQLEHHQLSQFQLLEQEITKPVENDISKWKPSQSLPTTNSGVSAQDRQLLCFYYDQCETHFISLLNAIDALFSCVSSAQPPRIFVAHSKFVILSAHKLVFIGDTLTRQVTAQDIRNKVMNSSNQLCEQLKTIVMATKMAALHYPSTTALQEMVHQVTDLSRNAQLFKRSLLEMATF

SEQ ID NO: 888358 - protein, 834 aa, Homo sapiens; identical to SEQ ID NO: 888357

SEQ ID NO: 888359 - protein, 834 aa, Homo sapiens; identical to SEQ ID NO: 888357

SEQ ID NO: 888360 - protein, 818 aa, Homo sapiens
MKYKNLMARALYDNVPECAEELAFRKGDILTVIEQNTGGLEGWWLCSLHGRQGIVPGNRVKLLIGPMQETASSHEQPASGLMQQTFGQQKLYQVPNPQAAPRDTIYQVPPSYQNQGIYQVPTGHGTQEQEVYQVPPSVQRSIGGTSGPHVGKKVITPVRTGHGYVYEYPSRYQKDVYDIPPSHTTQGVYDIPPSSAKGPVFSVPVGEIKPQGVYDIPPTKGVYAIPPSACRDEAGLREKDYDFPPPMRQAGRPDLRPEGVYDIPPTCTKPAGKDLHVKYNCDIPGAAEPVARRHQSLSPNHPPPQLGQSVGSQNDAYDVPRGVQFLEPPAETSEKANPQERDGVYDVPLHNPPDAKGSRDLVDGINRLSFSSTGSTRSNMSTSSTSSKEILTVSLPSSGQKQALEMGVSSLMALVTTDWRCYGYMERHINEIRTAVDKVELFLKEYLHFVKGAVANAACLPELILHNKMKRELQRVEDSHQILSQTSHDLNECSWSLNILAINKPQNKCDDLDRFVMVAKTVPDDAKQLTTTINTNAEALFRPGPGSLHLKNGPESIMNSTEYPHGGSQGQLLHPGDHKAQAHNKALPPGLSKEQAPDCSSSDGSERSWMDDYDYVHLQGKEEFERQQKELLEKENIMKQNKMQLEHHQLSQFQLLEQEITKPVENDISKWKPSQSLPTTNSGVSAQDRQLLCFYYDQCETHFISLLNAIDALFSCVSSAQPPRIFVAHSKFVILSAHKLVFIGDTLTRQVTAQDIRNKVMNSSNQLCEQLKTIVMATKMAALHYPSTTALQEMVHQVTDLSRNAQLFKRSLLEMATF

SEQ ID NO: 888361 - protein, 834 aa, Homo sapiens
MWTRNLMARALYDNVPECAEELAFRKGDILTVIEQNTGGLEGWWLCSLHGRQGIVPGNRVKLLIGPMQETASSHEQPASGLMQQTFGQQKLYQVPNPQAAPRDTIYQVPPSYQNQGIYQVPTGHGTQEQEVYQVPPSVQRSIGGTSGPHVGKKVITPVRTGHGYVYEYPSRYQKDVYDIPPSHTTQGVYDIPPSSAKGPVFSVPVGEIKPQGVYDIPPTKGVYAIPPSACRDEAGLREKDYDFPPPMRQAGRPDLRPEGVYDIPPTCTKPAGKDLHVKYNCDIPGAAEPVARRHQSLSPNHPPPQLGQSVGSQNDAYDVPRGVQFLEPPAETSEKANPQERDGVYDVPLHNPPDAKGSRDLVDGINRLSFSSTGSTRSNMSTSSTSSKESSLSASPAQDKRLFLDPDTAIERLQRLQQALEMGVSSLMALVTTDWRCYGYMERHINEIRTAVDKVELFLKEYLHFVKGAVANAACLPELILHNKMKRELQRVEDSHQILSQTSHDLNECSWSLNILAINKPQNKCDDLDRFVMVAKTVPDDAKQLTTTINTNAEALFRPGPGSLHLKNGPESIMNSTEYPHGGSQGQLLHPGDHKAQAHNKALPPGLSKEQAPDCSSSDGSERSWMDDYDYVHLQGKEEFERQQKELLEKENIMKQNKMQLEHHQLSQFQLLEQEITKPVENDISKWKPSQSLPTTNSGVSAQDRQLLCFYYDQCETHFISLLNAIDALFSCVSSAQPPRIFVAHSKFVILSAHKLVFIGDTLTRQVTAQDIRNKVMNSSNQLCEQLKTIVMATKMAALHYPSTTALQEMVHQVTDLSRNAQLFKRSLLEMATF

SEQ ID NO: 888362 - protein, 685 aa, Homo sapiens
MKYKVITPVRTGHGYVYEYPSRYQKDVYDIPPSHTTQGVYDIPPSSAKGPVFSVPVGEIKPQGVYDIPPTKGVYAIPPSACRDEAGLREKDYDFPPPMRQAGRPDLRPEGVYDIPPTCTKPAGKDLHVKYNCDIPGAAEPVARRHQSLSPNHPPPQLGQSVGSQNDAYDVPRGVQFLEPPAETSEKANPQERDGVYDVPLHNPPDAKGSRDLVDGINRLSFSSTGSTRSNMSTSSTSSKESSLSASPAQDKRLFLDPDTAIERLQRLQQALEMGVSSLMALVTTDWRCYGYMERHINEIRTAVDKVELFLKEYLHFVKGAVANAACLPELILHNKMKRELQRVEDSHQILSQTSHDLNECSWSLNILAINKPQNKCDDLDRFVMVAKTVPDDAKQLTTTINTNAEALFRPGPGSLHLKNGPESIMNSTEYPHGGSQGQLLHPGDHKAQAHNKALPPGLSKEQAPDCSSSDGSERSWMDDYDYVHLQGKEEFERQQKELLEKENIMKQNKMQLEHHQLSQFQLLEQEITKPVENDISKWKPSQSLPTTNSGVSAQDRQLLCFYYDQCETHFISLLNAIDALFSCVSSAQPPRIFVAHSKFVILSAHKLVFIGDTLTRQVTAQDIRNKVMNSSNQLCEQLKTIVMATKMAALHYPSTTALQEMVHQVTDLSRNAQLFKRSLLEMATF

SEQ ID NO: 888363 - protein, 611 aa, Homo sapiens
MKYKNLMARALYDNVPECAEELAFRKGDILTVIEQNTGGLEGWWLCSLHGRQGIVPGNRVKLLIGPMQETASSHEQPASGLMQQTFGQQKLYQVPNPQAAPRDTIYQVPPSYQNQGIYQVPTGHGTQEQEVYQVPPSVQRSIGGTSGPHVGKKVITPVRTGHGYVYEYPSRYQKDVYDIPPSHTTQGVYDIPPSSAKGPVFSVPVGEIKPQGVYDIPPTKGVYAIPPSACRDEAGLREKDYDFPPPMRQAGRPDLRPEGVYDIPPTCTKPAGKDLHVKYNCDIPGAAEPVARRHQSLSPNHPPPQLGQSVGSQNDAYDVPRGVQFLEPPAETSEKANPQERDGVYDVPLHNPPDAKGSRDLVDGINRLSFSSTGSTRSNMSTSSTSSKESSLSASPAQDKSWMDDYDYVHLQGKEEFERQQKELLEKENIMKQNKMQLEHHQLSQFQLLEQEITKPVENDISKWKPSQSLPTTNSGVSAQDRQLLCFYYDQCETHFISLLNAIDALFSCVSSAQPPRIFVAHSKFVILSAHKLVFIGDTLTRQVTAQDIRNKVMNSSNQLCEQLKTIVMATKMAALHYPSTTALQEMVHQVTDLSRNAQLFKRSLLEMATF

SEQ ID NO: 888364 - protein, 834 aa, Homo sapiens; identical to SEQ ID NO: 888357

SEQ ID NO: 888365 - protein, 814 aa, Homo sapiens
MKYKNLMARALYDNVPECAEELAFRKGDILTVIEQNTGGLEGWWLCSLHGRQGIVPGNRVKLLIGPMQETASSHEQPASGLMQQTFGQQKLYQVPNPQAAPRDTIYQVPPSYQNQGIYQVPTGHGTQEQEVYQVPPSVQRSIGGTSGPHVGKKVITPVRTGHGYVYEYPSRYQKDVYDIPPSHTTQGVYDIPPSSAKGPVFSVPVGEIKPQGVYDIPPTKGVYAIPPSACRDEAGLREKDYDFPPPMRQAGRPDLRPEGVYDIPPTCTKPAGKDLHVKYNCDIPGAAEPVARRHQSLSPNHPPPQLGQSVGSQNDAYDVPRGVQFLEPPAETSEKANPQERDGVYDVPLHNPPDAKGSRDLVDGINRLSFSSTGSTRSNMSTSSTSSKESSLSASPAQDKRLFLDPDTAIERLQRLQQALEMGVSSLMALVTTDWRCYGYMERHINEIRTAVDKVELFLKEYLHFVKGAVANAACLPELILHNKMKRELQRVEDSHQILSQTSHDLNECSWSLNILAINKPQNKCDDLDRFVMVAKTVPDDAKQLTTTINTNAEALFRPGPGSLHLKNGPESIMNSTEYPHGGSQGQLLHPGDHKAQAHNKALPPGLSKEQAPDCSSSDGSERSWMDDYDYVHLQGKEEFERQQKELLEKENIMKQNKMQLEHHQLSQFQLLEQEITKPVENDISKWKPSQSLPTTNSGVSAQDRQLLCFYYDQCETHFISLLNAIDALFSCVSSAQPPRIFVAHSKFVILSAHKLVFIGDTLTRARWNWAPKGGKTQIFPGPKTQKKGVPKFGKNPFPPKGPKKTPQKGPFPL

SEQ ID NO: 888366 - protein, 693 aa, Homo sapiens
MKYKNLMARALYDNVPECAEELAFRKGDILTVIEQNTGGLEGWWLCSLHGRQGIVPGNRVKLLIGPMQETASSHEQPASGLMQQTFGQQKLYQVPNPQAAPRDTIYQVPPSYQNQGIYQVPTGHGTQEQEVYQVPPSVQRSIGGTSGPHVGKKVITPVRTGHGYVYEYPSRYQKDVYDIPPSHTTQGVYDIPPSSAKGPVFSVPVGEIKPQGVYDIPPTKGVYAIPPSACRDEAGLREKDYDFPPPMRQAGRPDLRPEGVYDIPPTCTKPAGKDLHVKYNCDIPGAAEPVARRHQSLSPNHPPPQLGQSVGSQNDAYDVPRGVQFLEPPAETSEKANPQERDGVYDVPLHNPPDAKGSRDLVDGINRLSFSSTGSTRSNMSTSSTSSKESSLSASPAQDKRLFLDPDTAIERLQRLQQALEMGVSSLMALVTTDWRCYGYMERHINEIRTAVDKVELFLKEYLHFVKGAVANAACLPELILHNKMKRELQRVEDSHQILSQTSHDLNECSWSLNILAINKPQNKCDDLDRFVMVAKTVPDDAKQLTTTINTNAEALFRPGPGSLHLKNGPESIMNSTEYPHGGSQGQLLHPGDHKAQAHNKALPPGLSKEQAPDCSSSDGSERSWMDDYDYVHLQGKEEFERQQKELLEKENIMKQNKMQLEHHQVSSIRAKTAWHWKDFPPSTKERYHFKRL

SEQ ID NO: 888367 - protein, 177 aa, Homo sapiens
MKYKNLMARALYDNVPECAEELAFRKGDILTVIEQNTGGLEGWWLCSLHGRQGIVPGNRVKLLIGPMQETASSHEQPASGLMQQTFGQQKLYQVPNPQAAPRDTIYQVPPSYQNQGIYQVPTGHGTQEQEVYQVPPSVQRSIGGTSGPHVGKKAPSQLCIKEVKWMPKERSAPKETC

SEQ ID NO: 888368 - protein, 174 aa, Homo sapiens; identical to SEQ ID NO: 888356

SEQ ID NO: 888369 - protein, 177 aa, Homo sapiens; identical to SEQ ID NO: 888367

SEQ ID NO: 888370 - protein, 110 aa, Homo sapiens
MRQAGRPDLRPEGVYDIPPTCTKPAGKDLHVKYNCDIPGAAEPVARRHQSLSPNHPPPQLGQSVGSQNDAYDVPRGVQFLEPPAETSEKANPQERDGVYDVPLHNPPDAK

SEQ ID NO: 888371 - protein, 750 aa, Homo sapiens [sequence omitted]

SEQ ID NO: 888372 - protein, 750 aa, Homo sapiens [sequence omitted]

SEQ ID NO: 888373 - protein, 732 aa, Homo sapiens
MLRAKNQLFLLSPHYLRQVKESSGSRLIQQRLLHQQQPLHPEWAALAKKQLKGKNPEDLIWHTPEGISIKPLYSKRDTMDLPEELPGVKPFTRGPYPTMYTFRPWTIRQYAGFSTVEESNKFYKDNIKAGQQGLSVAFDLATHRGYDSDNPRVRGDVGMAGVAIDTVEDTKILFDGIPLEKMSVSMTMNGAVIPVLANFIVTGEEQGVPKEKLTGTIQNDILKEFMVRNTYIFPPEPSMKIIADIFEYTAKHMPKFNSISISGYHMQEAGADAILELAYTLADGLEYSRTGLQAGLTIDEFAPRLSFFWGIGMNFYMEIAKMRAGRRLWAHLIEKMFQPKNSKSLLLRAHCQTSGWSLTEQDPYNNIVRTAIEAMAAVFGGTQSLHTNSFDEALGLPTGIPKVADPWGGSYMMECLTNDVYDAALKLINEIEEMGGMAKAVAEGIPKLRIEECAARRQARIDSGSEVIVGVNKYQLEKEDAVEVLAIDNTSVRNRQIEKLKKIKSSRDQALAERCLAALTECAASGDGNILALAVDASRARCTVGEITDALKKVFGEHKANDRMVSGAYRQEFGESKEITSAIKRVHKFMEREGRRPRLLVAKMGQDGHDRGAKVIATGFADLGFDVDIGPLFQTPREVAQQAVDADVHAVGVSTLAAGHKTLVPELIKELNSLGRPDILVMCGGVIPPQDYEFLFEVGVSNVFGPGTRIPKAAVQVLDDIEKCLEKKQQSV

SEQ ID NO: 888374 - protein, 732 aa, Homo sapiens
MLRAKNQLFLLSPHYLRQVKESSGSRLIQQRLLHQQQPLHPEWAALAKKQLKGKNPEDLIWHTPEGISIKPLYSKRDTMDLPEELPGVKPFTRGPYPTMYTFRPWTIRQYAGFSTVEESNKFYKDNIKAGQQGLSVAFDLATHRGYDSDNPRVRGDVGMAGVAIDTVEDTKILFDGIPLEKMSVSMTMNGAVIPVLANFIVTGEEQGVPKEKLTGTIQNDILKEFMVRNTYIFPPEPSMKIIADIFEYTAKHMPKFNSISISGYHMQEAGADAILELAYTLADGLEYSRTGLQAGLTIDEFAPRLSFFWGIGMNFYMEIAKMRAGRRLWAHLIEKMFQPKNSKSLLLRAHCQTSGWSLTEQDPYNNIVRTAIEAMAAVFGGTQSLHTNSFDEALGLPTVKSARIARNTQIIIQEESGIPKVADPWGGSYMMECLTNDVYDAALKLINEIEEMGGMAKAVAEGIPKLRIEECAARRQARIDSGSEVIVGVNKYQLEKEDAVEVLAIDNTSVRNRQIEKLKKIKSSRDQALAERCLAALTECAASGDGNILALAVDASRARCTVGEITDALKKEFGESKEITSAIKRVHKFMEREGRRPRLLVAKMGQDGHDRGAKVIATGFADLGFDVDIGPLFQTPREVAQQAVDADVHAVGVSTLAAGHKTLVPELIKELNSLGRPDILVMCGGVIPPQDYEFLFEVGVSNVFGPGTRIPKAAVQVLDDIEKCLEKKQQSV

SEQ ID NO: 888375 - protein, 652 aa, Homo sapiens
MYTFRPWTIRQYAGFSTVEESNKFYKDNIKAGQQGLSVAFDLATHRGYDSDNPRVRGDVGMAGVAIDTVEDTKILFDGIPLEKMSVSMTMNGAVIPVLANFIVTGEEQGVPKEKLTGTIQNDILKEFMVRNTYIFPPEPSMKIIADIFEYTAKHMPKFNSISISGYHMQEAGADAILELAYTLADGLEYSRTGLQAGLTIDEFAPRLSFFWGIGMNFYMEIAKMRAGRRLWAHLIEKMFQPKNSKSLLLRAHCQTSGWSLTEQDPYNNIVRTAIEAMAAVFGGTQSLHTNSFDEALGLPTVKSARIARNTQIIIQEESGIPKVADPWGGSYMMECLTNDVYDAALKLINEIEEMGGMAKAVAEGIPKLRIEECAARRQARIDSGSEVIVGVNKYQLEKEDAVEVLAIDNTSVRNRQIEKLKKIKSSRDQALAERCLAALTECAASGDGNILALAVDASRARCTVGEITDALKKVFGEHKANDRMVSGAYRQEFGESKEITSAIKRVHKFMEREGRRPRLLVAKMGQDGHDRGAKVIATGFADLGFDVDIGPLFQTPREVAQQAVDADVHAVGVSTLAAGHKTLVPELIKELNSLGRPDILVMCGGVIPPQDYEFLFEVGVSNVFGPGTRIPKAAVQVLDDIEKCLEKKQQSV

SEQ ID NO: 888376 - protein, 750 aa, Homo sapiens [sequence omitted]

SEQ ID NO: 888377 - protein, 376 aa, Homo sapiens [sequence omitted]

SEQ ID NO: 888378 - protein, 750 aa, Homo sapiens [sequence omitted]

SEQ ID NO: 888379 - protein, 220 aa, Homo sapiens
MFNYIEYYGKQISLSQNNEVNGTTISCFRCTVGEITDALKKVFGEHKANDRMVSGAYRQEFGESKEITSAIKRVHKFMEREGRRPRLLVAKMGQDGHDRGAKVIATGFADLGFDVDIGPLFQTPREVAQQAVDADVHAVGVSTLAAGHKTLVPELIKELNSLGRPDILVMCGGVIPPQDYEFLFEVGVSNVFGPGTRIPKAAVQVLDDIEKCLEKKQQSV

SEQ ID NO: 888380 - protein, 750 aa, Homo sapiens [sequence omitted]

SEQ ID NO: 888381 - protein, 603 aa, Homo sapiens
MLRAKNQLFLLSPHYLRQVKESSGSRLIQQRLLHQQQPLHPEWAALAKKQLKGKNPEDLIWHTPEGISIKPLYSKRDTMDLPEELPGVKPFTRGPYPTMYTFRPWTIRQYAGFSTVEESNKFYKDNIKAGQQGLSVAFDLATHRGYDSDNPRVRGDVGMAGVAIDTVEDTKILFDGIPLEKMSVSMTMNGAVIPVLANFIVTGEEQGVPKEKLTGTIQNDILKEFMVRNTYIFPPEPSMKIIADIFEYTAKHMPKFNSISISGYHMQEAGADAILELAYTLADGLEYSRTGLQAGLTIDEFAPRLSFFWGIGMNFYMEIAKMRAGRRLWAHLIEKMFQPKNSKSLLLRAHCQTSGWSLTEQDPYNNIVRTAIEAMAAVFGGTQSLHTNSFDEALGLPTVKSARIARNTQIIIQEESGIPKVADPWGGSYMMECLTNDVYDAALKLINEIEEMGGMAKAVAEGIPKLRIEECAARRQARIDSGSEVIVGVNKYQLEKEDAVEVLAIDNTSVRNRQIEKLKKIKSSRDQALAERCLAALTECAASGDGNILALAVDASRARCTVGEITDALKKVFGEHKANDRMVSGAYRQEFGESKEITSAIKR

SEQ ID NO: 888382 - protein, 585 aa, Homo sapiens
MLRAKNQLFLLSPHYLRQVKESSGSRLIQQRLLHQQQPLHPEWAALAKKQLKGKNPEDLIWHTPEGISIKPLYSKRDTMDLPEELPGVKPFTRGPYPTMYTFRPWTIRQYAGFSTVEESNKFYKDNIKAGQQGLSVAFDLATHRGYDSDNPRVRGDVGMAGVAIDTVEDTKILFDGIPLEKMSVSMTMNGAVIPVLANFIVTGEEQGVPKEKLTGTIQNDILKEFMVRNTYIFPPEPSMKIIADIFEYTAKHMPKFNSISISGYHMQEAGADAILELAYTLADGLEYSRTGLQAGLTIDEFAPRLSFFWGIGMNFYMEIAKMRAGRRLWAHLIEKMFQPKNSKSLLLRAHCQTSGWSLTEQDPYNNIVRTAIEAMAAVFGGTQSLHTNSFDEALGLPTVKSARIARNTQIIIQEESGIPKVADPWGGSYMMECLTNDVYDAALKLINEIEEMGGMAKAVAEGIPKLRIEECAARRQARIDSGSEVIVGVNKYQLEKEDAVEVLAIDNTSVRNRQIEKLKKIKSSRDQALAERCLAALTECAASGDGNILALAVDASRARWTVGENTDAWKRILGTLCVEGEPPQI

SEQ ID NO: 888383 - protein, 190 aa, Homo sapiens
MLRAKNQLFLLSPHYLRQVKESSGSRLIQQRLLHQQQPLHPEWAALAKKQLKGKNPEDLIWHTPEGISIKPLYSKRDTMDLPEELPGVKPFTRGPYPTMYTFRPWTIRQYAGFSTVEESNKFYKDNIKAGQQGLSVAFDLATHRGYDSDNPRVRGDVGMAGVAIDTVEDTKILFDGIPLDYSNLERNKVS

SEQ ID NO: 888384 - protein, 266 aa, Homo sapiens
RTVADRLRPPAPGVMQLPPALCARLAAGPGAAEPLPVERDPAAGAAPFRFVARPVRFPREHQFFEDGDVQRHLYLQDVIMQVADVPEKPRVPAFACQVAGCCQVFDALDDYEHHYHTLHGNVCSFCKRAFPSGHLLDAHILEWHDSLFQILSERQDMYQCLVEGCTEKFKTSRDRKDHMVRMHLYPADFRFDKPKKSRSPASAEAPGDSGERSEGEAMEICSEPVAASPAPAGERRIYRHRIPSTICFGQGAARGFKSNKKKTKQC

SEQ ID NO: 888385 - protein, 202 aa, Homo sapiens
RTVADRLRPPAPGVMQLPPALCARLAAGPGAAEPLPVERDPAAGAAPFRFVARPVRFPREHQFFEDGDVQRHLYLQDVIMQVADVPEKPRVPAFACQVAGCCQVFDALDDYEHHYHTLHGNVCSFCKRAFPSGHLLDAHILEWHDSLFQILSERQDMYQCLVEGCTEKFKTSRDRKDHMPSLSRSPRGQWRAVRRGGHGNLL

SEQ ID NO: 888386 - protein, 306 aa, Homo sapiens
RTVADRLRPPAPGVMQLPPALCARLAAGPGAAEPLPVERDPAAGAAPFRFVARPVRFPREHQFFEDGDVQRHLYLQDVIMQVADVPEKPRVPAFACQVAGCCQVFDALDDYEHHYHTLHGNVCSFCKRAFPSGHLLDAHILEWHDSLFQILSERQDMYQCLVEGCTEKFKTSRDRKDHMVRMHLYPADFRFDKPKKSRSPASAEAPGDSGERSEGEAMEICSEPVAASPAPAEYPLPSALVRVPLEDLKATRRKPNNADRLRKGVGGSHHCWAWHPPWAFLRPSGVAALGARPSPSSPSLFLSKWH

SEQ ID NO: 888387 - protein, 261 aa, Homo sapiens
RTVADRLRPPAPGVMQLPPALCARLAAGPGAAEPLPVERDPAAGAAPFRFVARPVRFPREHQFFEDGDVQRHLYLQDVIMQVADVPEKPRVPAFACQVAGCCQVFDALDDYEHHYHTLHGNVCSFCKRAFPSGHLLDAHILEWHDSLFQILSERQDMYQCLVEGCTEKFKTSRDRKDHMVRMHLYPADFRFDKPKKSRSPASAEAPGDSGERSEGEAMEICSEPVAASPAPAGERRIYRHRSVSELFLKPVLNMCSVLRIL

SEQ ID NO: 888388 - protein, 109 aa, Homo sapiens
MFPAPSLQMPGLWPVNEPRGAGTVGVFMEWTWGSRKSQPQRAWQEPPSLRSSSQRVCVGGWGAVTTAGRGIRLGPFSDLLVWPPWGPGPRHPPHPCSSANGISSCHQKL

SEQ ID NO: 888389 - protein, 94 aa, Homo sapiens
RTVADRLRPPAPGVMQLPPALCARLAAGPGAAEPLPVERDPAAGAAPFRFVARPVRFPREHQFFEDGDVQRHLYLQDVIMQVADVPEKPSISAW

SEQ ID NO: 888390 - protein, 110 aa, Homo sapiens
MYQCLVEGCTEKFKTSRDRKDHMVRMHLYPADFRFDKPKKSRSPASAEAPGDSGERSEGEAMEICSEPVAASPAPAGERRIYRHRIPSTICFGQGAARGFKSNKKKTKQC

SEQ ID NO: 888391 - protein, 113 aa, Homo sapiens [sequence omitted]

SEQ ID NO: 888392 - protein, 185 aa, Homo sapiens
CSPSTTASSGSRWAPGPRGEPLARPPAAPTPLARLGLRGRRRRGPTPLGRPAARRRATFPHCRRRDRRLRSPLRTAPRPGRSSGLGGRTRTKRKRRRRPGVVEALRAGGRREPFSPSPEAGLRSRMGWRARGSDPHESERPSHSHHRRLAPEREARSQIFSQGTTIRRGAGGLLPRTVLHQGPEP

SEQ ID NO: 888393 - protein, 75 aa, Homo sapiens
PGGARGSRQPPPPLAALPDPGVALLRGSPQAQRQDFAAGWGEIPAPNPSAPLALVYPTCRGDWGFPPRLRGRMEL

SEQ ID NO: 888394 - protein, 185 aa, Homo sapiens; identical to SEQ ID NO: 888392

SEQ ID NO: 888395 - protein, 185 aa, Homo sapiens; identical to SEQ ID NO: 888392

SEQ ID NO: 888396 - protein, 185 aa, Homo sapiens; identical to SEQ ID NO: 888392

SEQ ID NO: 888397 - protein, 185 aa, Homo sapiens; identical to SEQ ID NO: 888392

SEQ ID NO: 888398 - protein, 340 aa, Homo sapiens
MGKDYYQTLGLARGASDEEIKRAYRRQALRYHPDKNKEPGAEEKFKEIAEAYDVLSDPRKREIFDRYGEEGLKGSGPSGGSGGGANGTSFSYTFHGDPHAMFAEFFGGRNPFDTFFGQRNGEEGMDIDDPFSGFPMGMGGFTNVNFGRSRSAQEPARKKQDPPVTHDLRVSLEEIYSGCTKKMKISHKRLNPDGKSIRNEDKILTIEVKKGWKEGTKITFPKEGDQTSNNIPADIVFVLKDKPHNIFKRDGSDVIYPARISLREALCGCTVNVPTLDGRTIPVVFKDVIRPGMRRKVPGEGLPLPKTPEKRGDLIIEFEVIFPERIPQTSRTVLEQVLPI

SEQ ID NO: 888399 - protein, 340 aa, Homo sapiens; identical to SEQ ID NO: 888398

SEQ ID NO: 888400 - protein, 343 aa, Homo sapiens
AWWRIRHEDQTLGLARGASDEEIKRAYRRQALRYHPDKNKEPGAEEKFKEIAEAYDVLSDPRKREIFDRYGEEGLKGSGPSGGSGGGANGTSFSYTFHGDPHAMFAEFFGGRNPFDTFFGQRNGEEGMDIDDPFSGFPMGMGGFTNVNFGRSRSAQEPARKKQDPPVTHDLRVSLEEIYSGCTKKMKISHKRLNPDGKSIRNEDKILTIEVKKGWKEGTKITFPKEGDQTSNNIPADIVFVLKDKPHNIFKRDGSDVIYPARISLREALCGCTVNVPTLDGRTIPVVFKDVIRPGMRRKVPGEGLPLPKTPEKRGDLIIEFEVIFPERIPQTSRTVLEQVLPI

SEQ ID NO: 888401 - protein, 285 aa, Homo sapiens
GDSEDPPSVDRYGEEGLKGSGPSGGSGGGANGTSFSYTFHGDPHAMFAEFFGGRNPFDTFFGQRNGEEGMDIDDPFSGFPMGMGGFTNVNFGRSRSAQEPARKKQDPPVTHDLRVSLEEIYSGCTKKMKISHKRLNPDGKSIRNEDKILTIEVKKGWKEGTKITFPKEGDQTSNNIPADIVFVLKDKPHNIFKRDGSDVIYPARISLREALCGCTVNVPTLDGRTIPVVFKDVIRPGMRRKVPGEGLPLPKTPEKRGDLIIEFEVIFPERIPQTSRTVLEQVLPI

SEQ ID NO: 888402 - protein, 281 aa, Homo sapiens
MDASVDRYGEEGLKGSGPSGGSGGGANGTSFSYTFHGDPHAMFAEFFGGRNPFDTFFGQRNGEEGMDIDDPFSGFPMGMGGFTNVNFGRSRSAQEPARKKQDPPVTHDLRVSLEEIYSGCTKKMKISHKRLNPDGKSIRNEDKILTIEVKKGWKEGTKITFPKEGDQTSNNIPADIVFVLKDKPHNIFKRDGSDVIYPARISLREALCGCTVNVPTLDGRTIPVVFKDVIRPGMRRKVPGEGLPLPKTPEKRGDLIIEFEVIFPERIPQTSRTVLEQVLPI

SEQ ID NO: 888403 - protein, 340 aa, Homo sapiens; identical to SEQ ID NO: 888398

SEQ ID NO: 888404 - protein, 282 aa, Homo sapiens
GRPGPESGAASEGLKGSGPSGGSGGGANGTSFSYTFHGDPHAMFAEFFGGRNPFDTFFGQRNGEEGMDIDDPFSGFPMGMGGFTNVNFGRSRSAQEPARKKQDPPVTHDLRVSLEEIYSGCTKKMKISHKRLNPDGKSIRNEDKILTIEVKKGWKEGTKITFPKEGDQTSNNIPADIVFVLKDKPHNIFKRDGSDVIYPARISLREALCGCTVNVPTLDGRTIPVVFKDVIRPGMRRKVPGEGLPLPKTPEKRGDLIIEFEVIFPERIPQTSRTVLEQVLPI

SEQ ID NO: 888405 - protein, 340 aa, Homo sapiens; identical to SEQ ID NO: 888398

SEQ ID NO: 888406 - protein, 240 aa, Homo sapiens
MFAEFFGGRNPFDTFFGQRNGEEGMDIDDPFSGFPMGMGGFTNVNFGRSRSAQEPARKKQDPPVTHDLRVSLEEIYSGCTKKMKISHKRLNPDGKSIRNEDKILTIEVKKGWKEGTKITFPKEGDQTSNNIPADIVFVLKDKPHNIFKRDGSDVIYPARISLREALCGCTVNVPTLDGRTIPVVFKDVIRPGMRRKVPGEGLPLPKTPEKRGDLIIEFEVIFPERIPQTSRTVLEQVLPI

SEQ ID NO: 888407 - protein, 240 aa, Homo sapiens; identical to SEQ ID NO: 888406

SEQ ID NO: 888408 - protein, 322 aa, Homo sapiens
MGKDYYQTLGLARGASDEEIKRAYRRQALRYHPDKNKEPGAEEKFKEIAEAYDVLSDPRKREIFDRYGEEGLKGSGPSGGSGGGANGTSFSYTFHGDPHAMFAEFFGGRNPFDTFFGQRNGEEGMDIDDPFSGFPMGMGGFTNVNFGRSRSAQEPARKKQDPPVTHDLRVSLEEIYSGCTKKMKISHKRLNPDGKSIRNEDKILTIEVKKGWKEGTIVFVLKDKPHNIFKRDGSDVIYPARISLREALCGCTVNVPTLDGRTIPVVFKDVIRPGMRRKVPGEGLPLPKTPEKRGDLIIEFEVIFPERIPQTSRTVLEQVLPI

SEQ ID NO: 888409 - protein, 340 aa, Homo sapiens; identical to SEQ ID NO: 888398

SEQ ID NO: 888410 - protein, 313 aa, Homo sapiens
MGKDYYQTLGLARGASDEEIKRAYRRQALRYHPDKNKEIAEAYDVLSDPRKREIFDRYGEEGLKGSGPSGGSGGGANGTSFSYTFHGDPHAMFAEFFGGRNPFDTFFGQRNGEEGMDIDDPFSGFPMGMGGFTNVNFGRSRSAQEPARKKQDPPVTHDLRVSLEEIYSGCTKKMKISHKRLNPDGKSIRNEDKILTIEVKKGWKEGTIVFVLKDKPHNIFKRDGSDVIYPARISLREALCGCTVNVPTLDGRTIPVVFKDVIRPGMRRKVPGEGLPLPKTPEKRGDLIIEFEVIFPERIPQTSRTVLEQVLPI

SEQ ID NO: 888411 - protein, 171 aa, Homo sapiens
MGKDYYQTLGLARGASDEEIKRAYRRQALRYHPDKNKEPGAEEKFKEIAEAYDVLSDPRKREIFDRYGEEGLKGSGPSGGSGGGANGTSFSYTFHGDPHAMFAEFFGGRNPFDTFFGQRNGEEGMDIDDPFSGFPMGMGGFTNVNFGRSLEKASPSPKHPRNVGTSLLSLK

SEQ ID NO: 888412 - protein, 68 aa, Homo sapiens
ELAGIINEHIAPSSVVDQFVLYSVFVSHVLLFSMENSVFSLAIIEFEVIFPERIPQTSRTVLEQVLPI

SEQ ID NO: 888413 - protein, 340 aa, Homo sapiens; identical to SEQ ID NO: 888398

SEQ ID NO: 888414 - protein, 95 aa, Homo sapiens
HLFKDNFAPLRFVTNIGLPTWGHWGTHDQSVRMLTCERTDQGPFQSSRISGPFYQLWTMRGWEGPGRAFVLLNVFQSIYYNLSKSHTRLQWFFEL

SEQ ID NO: 888415 - protein, 71 aa, Homo sapiens
  misc_feature (14)..(14): Xaa can be any naturally occurring amino acid
FAAASTRTARRRQXGDQGPFQSSRISGPFYQLWTMRGWEGPGRAFVLLNVFQSIYYNLSKSHTRLQWFFEL

SEQ ID NO: 888416 - protein, 340 aa, Homo sapiens; identical to SEQ ID NO: 888398

SEQ ID NO: 888417 - protein, 340 aa, Homo sapiens; identical to SEQ ID NO: 888398

SEQ ID NO: 888418 - protein, 354 aa, Homo sapiens
MGKDYYQTLGLARGASDEEIKRAYRRQALRYHPDKNKEPGAEEKFKEIAEAYDVLSDPRKREIFDRYGEEGLKGSGPSGGSGGGANGTSFSYTFHGDPHAMFAEFFGGRNPFDTFFGQRNGEEGMDIDDPFSGFPMGMGGFTNVNFGRSRSAQEPARKKQDPPVTHDLRVSLEEIYSGCTKKMKISHKRLNPDGKSIRNEDKILTIEVKKGWKEGTKITFPKEGDQTSNNIPADIVFVLKDKPHNIFKRDGSDVIYPARISLREALCGCTVNVPTLDGRTIPVVFKDVIRPGMRRKVPGEGLPLPKTPEKRGDLKSWGGKGSWNKCLFPGGQSSAQTFRLIVSCHCQHETKVCD

SEQ ID NO: 888419 - protein, 217 aa, Homo sapiens
MGKDYYQTLGLARGASDEEIKRAYRRQALRYHPDKNKEPGAEEKFKEIAEAYDVLSDPRKREIFDRYGEEGLKGSGPSGGSGGGANGTSFSYTFHGDPHAMFAEFFGGRNPFDTFFGQRNGEEGMDIDDPFSGFPMGMGGFTNVNFGRSRSAQEPARKKQDPPVTHDLRVSLEEIYSGCTKKMKISHKRSTDERSTDERSTDERSTDERSTDASVDR

SEQ ID NO: 888420 - protein, 315 aa, Homo sapiens
MGKDYYQTLGLARGASDEEIKRAYRRQALRYHPDKNKEPGAEEKFKEIAEAYDVLSDPRKREIFDRYGEEGLKGSGPSGGSGGGANGTSFSYTFHGDPHAMFAEFFGGRNPFDTFFGQRNGEEGMDIDDPFSGFPMGMGGFTNVNFGRSRSAQEPARKKQDPPVTHDLRVSLEEIYSGCTKKMKISHKRLNPDGKSIRNEDKILTIEVKKGWKEGTKITFPKEGDQTSNNIPADIVFVLKDKPHNIFKRDGSDVIYPARISLREALCGCTVNVPTLDGRTIPVVFKDVIRPGMRRKVPLKPSNGTFGAAACSIGF

SEQ ID NO: 888421 - protein, 172 aa, Homo sapiens
MGKDYYQTLGLARGASDEEIKRAYRRQALRYHPDKNKEPGAEEKFKEIAEAYDVLSDPRKREIFDRYGEEGLKGSGPSGGSGGGANGTSFSYTFHGDPHTKDADVTAVPEIRLDTLQGDWSGEPVMHRDDPILLSVPTDTWGVNNVVPLTAYARMHAHEHTIVEVVIDSRHM

SEQ ID NO: 888422 - protein, 1791 aa, Homo sapiens
MMCLKILRISLAILAGWALCSANSELGWTRKKSLVEREHLNQVLLEGERCWLGAKVRRPRASPQHHLFGVYPSRAGNYLRPYPVGEQEIHHTGRSKPDTEGNAVSLVPPDLTENPAGLRGAVEEPAAPWVGDSPIGQSELLGDDDAYLGNQRSKESLGEAGIQKGSAMAATTTTAIFTTLNEPKPETQRRGWAKSRQRRQVWKRRAEDGQGDSGISSHFQPWPKHSLKHRVKKSPPEESNQNGGEGSYREAETFNSQVGLPILYFSGRRERLLLRPEVLAEIPREAFTVEAWVKPEGGQNNPAIIAGVFDNCSHTVSDKGWALGIRSGKDKGKRDARFFFSLCTDRVKKATILISHSRYQPGTWTHVAATYDGRHMALYVDGTQVASSLDQSGPLNSPFMASCRSLLLGGDSSEDGHYFRGHLGTLVFWSTALPQSHFQHSSQHSSGEEEATDLVLTASFEPVNTEWVPFRDEKYPRLEVLQGFEPEPEILSPLQPPLCGQTVCDNVELISQYNGYWPLRGEKVIRYQVVNICDDEGLNPIVSEEQIRLQHEALNEAFSRYNISWQLSVHQVHNSTLRHRVVLVNCEPSKIGNDHCDPECEHPLTGYDGGDCRLQGRCYSWNRRDGLCHVECNNMLNDFDDGDCCDPQVADVRKTCFDPDSPKRAYMSVKELKEALQLNSTHFLNIYFASSVREDLAGAATWPWDKDAVTHLGGIVLSPAYYGMPGHTDTMIHEVGHVLGLYHVFKGVSERESCNDPCKETVPSMETGDLCADTAPTPKSELCREPEPTSDTCGFTRFPGAPFTNYMSYTDDNCTDNFTPNQVARMHCYLDLVYQQWTESRKPTPIPIPPMVIGQTNKSLTIHWLPPISGVVYDRASGSLCGACTEDGTFRQYVHTASSRRVCDSSGYWTPEEAVGPPDVDQPCEPSLQAWSPEVHLYHMNMTVPCPTEGCSLELLFQHPVQADTLTLWVTSFFMESSQVLFDTEILLENKESVHLGPLDTFCDIPLTIKLHVDGKVSGVKVYTFDERIEIDAALLTSQPHSPLCSGCRPVRYQVLRDPPFASGLPVVVTHSHRKFTDVEVTPGQMYQYQVLAEAGGELGEASPPLNHIHGAPYCGDGKVSERLGEECDDGDLVSGDGCSKVCELEEGFNCVGEPSLCYMYEGDGICEPFERKTSIVDCGIYTPKGYLDQWATRAYSSHEDKKKCPVSLVTGEPHSLICTSYHPDLPNHRPLTGWFPCVASENETQDDRSEQPEGSLKKEDEVWLKVCFNRPGEARAIFIFLTTDGLVPGEHQQPTVTLYLTDVRGSNHSLGTYGLSCQHNPLIINVTHHQNVLFHHTTSVLLNFSSPRVGISAVALRTSSRIGLSAPSNCISEDEGQNHQGQSCIHRPCGKQDSCPSLLLDHADVVNCTSIGPGLMKCAITCQRGFALQASSGQYIRPMQKEILLTCSSGHWDQNVSCLPVDCGVPDPSLVNYANFSCSEGTKFLKRCSISCVPPAKLQGLSPWLTCLEDGLWSLPEVYCKLECDAPPIILNANLLLPHCLQDNHDVGTICKYECKPGYYVAESAEGKVRNKLLKIQCLEGGIWEQGSCIPVVCEPPPPVFEGMYECTNGFSLDSQCVLNCNQEREKLPILCTKEGLWTQEFKLCENLQGECPPPPSELNSVEYKCEQGYGIGAVCSPLCVIPPSDPVMLPENITADTLEHWMEPVKVQSIVCTGRRQWHPDPVLVHCIQSCEPFQADGWCDTINNRAYCHYDGGDCCSSTLSSKKVIPFAADCDLDECTCRDPKAEENQ

SEQ ID NO: 888423 - protein, 1791 aa, Homo sapiens; identical to SEQ ID NO: 888422

SEQ ID NO: 888424 - protein, 1791 aa, Homo sapiens; identical to SEQ ID NO: 888422

SEQ ID NO: 888425 - protein, 1791 aa, Homo sapiens; identical to SEQ ID NO: 888422

SEQ ID NO: 888426 - protein, 1791 aa, Homo sapiens; identical to SEQ ID NO: 888422

SEQ ID NO: 888427 - protein, 1624 aa, Homo sapiens
MMCLKILRISLAILAGWALCSANSELGWTRKKSLVEREHLNQVLLEGERCWLGAKVRRPRASPQHHLFGVYPSRAGNYLRPYPVGEQEIHHTGRSKPDTEGNAVSLVPPDLTENPAGLRGAVEEPAAPWVGDSPIGQSELLGDDDAYLGNQRSKESLGEAGIQKGSAMAATTTTAIFTTLNEPKPETQRRGWAKSRQRRQVWKRRAEDGQGDSGISSHFQPWPKHSLKHRVKKSPPEESNQNGGEGSYREAETFNSQVGLPILYFSGRRERLLLRPEVLAEIPREAFTVEAWVKPEGGQNNPAIIAGVFDNCSHTVSDKGWALGIRSGKDKGKRDARFFFSLCTDRVKKATILISHSRYQPGTWTHVAATYDGRHMALYVDGTQVASSLDQSGPLNSPFMASCRSLLLGGDSSEDGHYFRGHLGTLVFWSTALPQSHFQHSSQHSSGEEEATDLVLTASFEPVNTEWVPFRDEKYPRLEVLQGFEPEPEILSPLQPPLCGQTVCDNVELISQYNGYWPLRGEKVIRYQVVNICDDEGLNPIVSEEQIRLQHEALNEAFSRYNISWQLSVHQVHNSTLRHRVVLVNCEPSKIGNDHCDPECEHPLTGYDGGDCRLQGRCYSWNRRDGLCHVECNNMLNDFDDGDCCDPQVADVRKTCFDPDSPKRAYMSVKELKEALQLNSTHFLNIYFASSVREDLAGAATWPWDKDAVTHLGGIVLSPAYYGMPGHTDTMIHEVGHVLGLYHVFKGVSERESCNDPCKETVPSMETGDLCADTAPTPKSELCREPEPTSDTCGFTRFPGAPFTNYMSYTDDNCTDNFTPNQVARMHCYLDLVYQQWTESRKPTPIPIPPMVIGQTNKSLTIHWLPPISGVVYDRASGSLCGACTEDGTFRQYVHTASSRRVCDSSGYWTPEEAVGPPDVDQPCEPSLQAWSPEVHLYHMNMTVPCPTEGCSLELLFQHPVQADTLTLWVTSFFMESSQVLFDTEILLENKESVHLGPLDTFCDIPLTIKLHVDGKVSGVKVYTFDERIEIDAALLTSQPHSPLCSGCRPVRYQVLRDPPFASGLPVVVTHSHRKFTDVEVTPGQMYQYQVLAEAGGELGEASPPLNHIHGAPYCGDGKVSERLGEECDDGDLVSGDGCSKVCELEEGFNCVGEPSLCYMYEGDGICEPFERKTSIVDCGIYTPKGYLDQWATRAYSSHEDKKKCPVSLVTGEPHSLICTSYHPDLPNHRPLTGWFPCVASENETQDDRSEQPEGSLKKEDEVWLKVCFNRPGEARAIFIFLTTDGLVPGEHQQPTVTLYLTDVRGSNHSLGTYGLSCQHNPLIINVTHHQNVLFHHTTSVLLNFSSPRVGISAVALRTSSRIGLSAPSNCISEDEGQNHQGQSCIHRPCGKQDSCPSLLLDHADVVNCTSIGPGLMKCAITCQRGFALQASSGQYIRPMQKEILLTCSSGHWDQNVSCLPVDCGVPDPSLVNYANFSCSEGTKFLKRCSISCVPPAKLQGLSPWLTCLEDGLWSLPEVYCKLECDAPPIILNANLLLPHCLQDNHDVGTICKYECKPGYYVAESAEGKVRNKLLKIQCLEGGIWEQGSCIPVVCEPPPPVFEGMYEGPWFAGPGGNGPKGGPR

SEQ ID NO: 888428 - protein, 1240 aa, Homo sapiens
MMCLKILRISLAILAGWALCSANSELGWTRKKSLVEREHLNQVLLEGERCWLGAKVRRPRASPQHHLFGVYPSRAGNYLRPYPVGEQEIHHTGRSKPDTEGNAVSLVPPDLTENPAGLRGAVEEPAAPWVGDSPIGQSELLGDDDAYLGNQRSKESLGEAGIQKGSAMAATTTTAIFTTLNEPKPETQRRGWAKSRQRRQVWKRRAEDGQGDSGISSHFQPWPKHSLKHRVKKSPPEESNQNGGEGSYREAETFNSQVGLPILYFSGRRERLLLRPEVLAEIPREAFTVEAWVKPEGGQNNPAIIAGVFDNCSHTVSDKGWALGIRSGKDKGKRDARFFFSLCTDRVKKATILISHSRYQPGTWTHVAATYDGRHMALYVDGTQVASSLDQSGPLNSPFMASCRSLLLGGDSSEDGHYFRGHLGTLVFWSTALPQSHFQHSSQHSSGEEEATDLVLTASFEPVNTEWVPFRDEKYPRLEVLQGFEPEPEILSPLQPPLCGQTVCDNVELISQYNGYWPLRGEKVIRYQVVNICDDEGLNPIVSEEQIRLQHEALNEAFSRYNISWQLSVHQVHNSTLRHRVVLVNCEPSKIGNDHCDPECEHPLTGYDGGDCRLQGRCYSWNRRDGLCHVECNNMLNDFDDGDCCDPQVADVRKTCFDPDSPKRAYMSVKELKEALQLNSTHFLNIYFASSVREDLAGAATWPWDKDAVTHLGGIVLSPAYYGMPGHTDTMIHEVGHVLGLYHVFKGVSERESCNDPCKETVPSMETGDLCADTAPTPKSELCREPEPTSDTCGFTRFPGAPFTNYMSYTDDNCTDNFTPNQVARMHCYLDLVYQQWTESRKPTPIPIPPMVIGQTNKSLTIHWLPPISGVVYDRASGSLCGACTEDGTFRQYVHTASSRRVCDSSGYWTPEEAVGPPDVDQPCEPSLQAWSPEVHLYHMNMTVPCPTEGCSLELLFQHPVQADTLTLWVTSFFMESSQVLFDTEILLENKESVHLGPLDTFCDIPLTIKLHVDGKVSGVKVYTFDERIEIDAALLTSQPHSPLCSGCRPVRYQVLRDPPFASGLPVVVTHSHRKFTDVEVTPGQMYQYQVLAEAGGELGEASPPLNHIHGAPYCGDGKVSERLGEECDDGDLVSGDGCSKVCELEEGFNCVGEPSLCYMYEGDGICEPFERKTSIVDCGIYTPKGYLDQWATRAYSSHEDKKKCPVSLVTGEPHSLICTSYHPDLPSGRHGGGEGRLFE

SEQ ID NO: 888429 - protein, 827 aa, Homo sapiens
MMCLKILRISLAILAGWALCSANSELGWTRKKSLVEREHLNQVLLEGERCWLGAKVRRPRASPQHHLFGVYPSRAGNYLRPYPVGEQEIHHTGRSKPDTEGNAVSLVPPDLTENPAGLRGAVEEPAAPWVGDSPIGQSELLGDDDAYLGNQRSKESLGEAGIQKGSAMAATTTTAIFTTLNEPKPETQRRGWAKSRQRRQVWKRRAEDGQGDSGISSHFQPWPKHSLKHRVKKSPPEESNQNGGEGSYREAETFNSQVGLPILYFSGRRERLLLRPEVLAEIPREAFTVEAWVKPEGGQNNPAIIAGVFDNCSHTVSDKGWALGIRSGKDKGKRDARFFFSLCTDRVKKATILISHSRYQPGTWTHVAATYDGRHMALYVDGTQVASSLDQSGPLNSPFMASCRSLLLGGDSSEDGHYFRGHLGTLVFWSTALPQSHFQHSSQHSSGEEEATDLVLTASFEPVNTEWVPFRDEKYPRLEVLQGFEPEPEILSPLQPPLCGQTVCDNVELISQYNGYWPLRGEKVIRYQVVNICDDEGLNPIVSEEQIRLQHEALNEAFSRYNISWQLSVHQVHNSTLRHRVVLVNCEPSKIGNDHCDPECEHPLTGYDGGDCRLQGRCYSWNRRDGLCHVECNNMLNDFDDGDCCDPQVADVRKTCFDPDSPKRAYMSVKELKEALQLNSTHFLNIYFASSVREDLAGAATWPWDKDAVTHLGGIVLSPAYYGMPGHTDTMIHEVGHVLGLYHVFKGVSERESCNDPCKETVPSMETGDLCADTAPTPKSELCREPEPTSDTCGFTRFPGAPFTNYMSYTGITTVLFCFLLRIHGGL

SEQ ID NO: 888430 - protein, 481 aa, Homo sapiens
LHNVGPSPECVPISIMCAHHQNVLFHHTTSVLLNFSSPRVGISAVALRTSSRIGLSAPSNCISEDEGQNHQGQSCIHRPCGKQDSCPSLLLDHADVVNCTSIGPGLMKCAITCQRGFALQASSGQYIRPMQKEILLTCSSGHWDQNVSCLPVDCGVPDPSLVNYANFSCSEGTKFLKRCSISCVPPAKLQGLSPWLTCLEDGLWSLPEVYCKLECDAPPIILNANLLLPHCLQDNHDVGTICKYECKPGYYVAESAEGKVRNKLLKIQCLEGGIWEQGSCIPVVCEPPPPVFEGMYECTNGFSLDSQCVLNCNQEREKLPILCTKEGLWTQEFKLCENLQGECPPPPSELNSVEYKCEQGYGIGAVCSPLCVIPPSDPVMLPENITADTLEHWMEPVKVQSIVCTGRRQWHPDPVLVHCIQSCEPFQADGWCDTINNRAYCHYDGGDCCSSTLSSKKVIPFAADCDLDECTCRDPKAEENQ

SEQ ID NO: 888431 - protein, 341 aa, Homo sapiens
THNGVHTAPIPYPCSHLYSTEFSSEGGGGHSPCKFLKRCSISCVPPAKLQGLSPWLTCLEDGLWSLPEVYCKLECDAPPIILNANLLLPHCLQDNHDVGTICKYECKPGYYVAESAEGKVRNKLLKIQCLEGGIWEQGSCIPVVCEPPPPVFEGMYECTNGFSLDSQCVLNCNQEREKLPILCTKEGLWTQEFKLCENLQGECPPPPSELNSVEYKCEQGYGIGAVCSPLCVIPPSDPVMLPENITADTLEHWMEPVKVQSIVCTGRRQWHPDPVLVHCIQSCEPFQADGWCDTINNRAYCHYDGGDCCSSTLSSKKVIPFAADCDLDECTCRDPKAEENQ

SEQ ID NO: 888432 - protein, 1791 aa, Homo sapiens; identical to SEQ ID NO: 888422

SEQ ID NO: 888433 - protein, 1791 aa, Homo sapiens; identical to SEQ ID NO: 888422

SEQ ID NO: 888434 - protein, 1760 aa, Homo sapiens
MMCLKILRISLAILAGWALCSANSELGWTRKKSLVEREHLNQVLLEGERCWLGAKVRRPRASPQHHLFGVYPSRAGNYLRPYPVGEQEIHHTGRSKPDTEGNAVSLVPPDLTENPAGLRGAVEEPAAPWVGDSPIGQSELLGDDDAYLGNQRSKESLGEAGIQKGSAMAATTTTAIFTTLNEPKPETQRRGWAKSRQRRQVWKRRAEDGQGDSGISSHFQPWPKHSLKHRVKKSPPEESNQNGGEGSYREAETFNSQVGLPILYFSGRRERLLLRPEVLAEIPREAFTVEAWVKPEGGQNNPAIIAGVFDNCSHTVSDKGWALGIRSGKDKGKRDARFFFSLCTDRVKKATILISHSRYQPGTWTHVAATYDGRHMALYVDGTQVASSLDQSGPLNSPFMASCRSLLLGGDSSEDGHYFRGHLGTLVFWSTALPQSHFQHSSQHSSGEEEATDLVLTASFEPVNTEWVPFRDEKYPRLEVLQGFEPEPEILSPLQPPLCGQTVCDNVELISQYNGYWPLRGEKVIRYQVVNICDDEGLNPIVSEEQIRLQHEALNEAFSRYNISWQLSVHQVHNSTLRHRVVLVNCEPSKIGNDHCDPECEHPLTGYDGGDCRLQGRCYSWNRRDGLCHVECNNMLNDFDDGDCCDPQVADVRKTCFDPDSPKRAYMSVKELKEALQLNSTHFLNIYFASSVREDLAGAATWPWDKDAVTHLGGIVLSPAYYGMPGHTDTMIHEVGHVLGLYHVFKGVSERESCNDPCKETVPSMETGDLCADTAPTPKSELCREPEPTSDTCGFTRFPGAPFTNYMSYTDDNCTDNFTPNQVARMHCYLDLVYQQWTESRKPTPIPIPPMVIGQTNKSLTIHWLPPISGVVYDRASGSLCGACTEDGTFRQYVHTASSRRVCDSSGYWTPEEAVGPPDVDQPCEPSLQAWSPEVHLYHMNMTVPCPTEGCSLELLFQHPVQADTLTLWVTSFFMESSQVLFDTEILLENKESVHLGPLDTFCDIPLTIKLHVDGKVSGVKVYTFDERIEIDAALLTSQPHSPLCSGCRPVRYQVLRDPPFASGLPVVVTHSHRKFTDVEVTPGQMYQYQVLAEAGGELGEASPPLNHIHGAPYCGDGKVSERLGEECDDGDLVSGDGCSKVCELEEGFNCVGEPSLCYMYEGDGICEPFERKTSIVDCGIYTPKGYLDQWATRAYSSHEDKKKCPVSLVTGEPHSLICTSYHPDLPNHRPLTGWFPCVASENETQDDRSEQPEGSLKKEDEVWLKVCFNRPGEARAIFIFLTTDGLVPGEHQQPTVTLYLTDVRGSNHSLGTYGLSCQHNPLIINVTHHQNVLFHHTTSVLLNFSSPRVGISAVALRTSSRIGLSAPSNCISEDEGQNHQGQSCIHRPCGKQDSCPSLLLDHADVVNCTSIGPGLMKCAITCQRGFALQASSGQYIRPMQKEILLTCSSGHWDQNVSCLPVDCGVPDPSLVNYANFSCSEGTKFLKRCSISCVPPAKLQGLSPWLTCLEDGLWSLPEVYCKLECDAPPIILNANLLLPHCLQDNHDVGTICKYECKPGYYVAESAEGKVRNKLLKIQCLEGGIWEQGSCIPVVCEPPPPVFEGMYECTNGFSLDSQCVLNCNQEREKLPILCTKEGLWTQEFKLCENLQGECPPPPSELNSVEYKCEQGYGIGAVCSPLCVIPPSDPVMLPENITADTLEHWMEPVKVQSIVCTGRRQWHPDPVLVHCIQSCETHLSDSSEPSSPKLFSMGPRCCGASS

SEQ ID NO: 888435 - protein, 1122 aa, Homo sapiens
MMCLKILRISLAILAGWALCSANSELGWTRKKSLVEREHLNQVLLEGERCWLGAKVRRPRASPQHHLFGVYPSRAGNYLRPYPVGEQEIHHTGRSKPDTEGNAVSLVPPDLTENPAGLRGAVEEPAAPWVGDSPIGQSELLGDDDAYLGNQRSKESLGEAGIQKGSAMAATTTTAIFTTLNEPKPETQRRGWAKSRQRRQVWKRRAEDGQGDSGISSHFQPWPKHSLKHRVKKSPPEESNQNGGEGSYREAETFNSQVGLPILYFSGRRERLLLRPEVLAEIPREAFTVEAWVKPEGGQNNPAIIAGVFDNCSHTVSDKGWALGIRSGKDKGKRDARFFFSLCTDRVKKATILISHSRYQPGTWTHVAATYDGRHMALYVDGTQVASSLDQSGPLNSPFMASCRSLLLGGDSSEDGHYFRGHLGTLVFWSTALPQSHFQHSSQHSSGEEEATDLVLTASFEPVNTEWVPFRDEKYPRLEVLQGFEPEPEILSPLQPPLCGQTVCDNVELISQYNGYWPLRGEKVIRYQVVNICDDEGLNPIVSEEQIRLQHEALNEAFSRYNISWQLSVHQVHNSTLRHRVVLVNCEPSKIGNDHCDPECEHPLTGYDGGDCRLQGRCYSWNRRDGLCHVECNNMLNDFDDGDCCDPQVADVRKTCFDPDSPKRAYMSVKELKEALQLNSTHFLNIYFASSVREDLAGAATWPWDKDAVTHLGGIVLSPAYYGMPGHTDTMIHEVGHVLGLYHVFKGVSERESCNDPCKETVPSMETGDLCADTAPTPKSELCREPEPTSDTCGFTRFPGAPFTNYMSYTDDNCTDNFTPNQVARMHCYLDLVYQQWTESRKPTPIPIPPMVIGQTNKSLTIHWLPPISGVVYDRASGSLCGACTEDGTFRQYVHTASSRRVCDSSGYWTPEEAVGPPDVDQPCEPSLQAWSPEVHLYHMNMTVPCPTEGCSLELLFQHPVQADTLTLWVTSFFMESSQVLFDTEILLENKESVHLGPLDTFCDIPLTIKLHVDGKVSGVKVYTFDERIEIDAALLTSQPHSPLCSGCRPVRYQVLRDPPFASGLPVVVTHSHRKFTDVEVTPGQMYQYQVLAEAGGELGEASPPLNHIHGAPYCGDGKVSE

SEQ ID NO: 888436 - protein, 317 aa, Homo sapiens
MMCLKILRISLAILAGWALCSANSELGWTRKKSLVEREHLNQVLLEGERCWLGAKVRRPRASPQHHLFGVYPSRAGNYLRPYPVGEQEIHHTGRSKPDTEGNAVSLVPPDLTENPAGLRGAVEEPAAPWVGDSPIGQSELLGDDDAYLGNQRSKESLGEAGIQKGSAMAATTTTAIFTTLNEPKPETQRRGWAKSRQRRQVWKRRAEDGQGDSGISSHFQPWPKHSLKHRVKKSPPEESNQNGGEGSYREAETFNSQVGLPILYFSGRRERLLLRPEVLAEIPREAFTVEAWVKPEGGQNNPAIIAGNTLLLGFLNL

SEQ ID NO: 888437 - protein, 83 aa, Homo sapiens
AAKSLLLLTGSQPVLRWFYFSYPSCIHRPCGKQDSCPSLLLDHADVVNCTSIGPGLMKCAITCQRGFALQASSGQYIRPMQVS

SEQ ID NO: 888438 - protein, 541 aa, Homo sapiens
MSSNSDTGDLQESLKHGLTPIGAGLPDRHGSPIPARGRLVMLPKVETEALGLARSHGEQGQMPENMQVSQFKMVNYSYDEDLEELCPVCGDKVSGYHYGLLTCESCKGFFKRTVQNNKRYTCIENQNCQIDKTQRKRCPYCRFQKCLSVGMKLEAVRADRMRGGRNKFGPMYKRDRALKQQKKALIRANGLKLEAMSQVIQAMPSDLTISSAIQNIHSASKGLPLNHAALPPTDYDRSPFVTSPISMTMPPHGSLQGYQTYGHFPSRAIKSEYPDPYTSSPESIMGYSYMDSYQTSSPASIPHLILELLKCEPDEPQVQAKIMAYLQQEQANRSKHEKLSTFGLMCKMADQTLFSIVEWARSSIFFRELKVDDQMKLLQNCWSELLILDHIYRQVVHGKEGSIFLVTGQQVDYSIIASQAGATLNNLMSHAQELVAKLRSLQFDQREFVCLKFLVLFSLDVKNLENFQLVEGVQEQVNAALLDYTMCNYPQQTEKFGQLLLRLPEIRAISMQAEEYLYYKHLNGDVPYNNLLIEMLHAKRA

SEQ ID NO: 888439 - protein, 565 aa, Homo sapiens
MSSNSDTGDLQESLKHGLTPIDRGNCRSGCFSFAATLRQRSLLTSCAGLPDRHGSPIPARGRLVMLPKVETEALGLARSHGEQGQMPENMQVSQFKMVNYSYDEDLEELCPVCGDKVSGYHYGLLTCESCKGFFKRTVQNNKRYTCIENQNCQIDKTQRKRCPYCRFQKCLSVGMKLEAVRADRMRGGRNKFGPMYKRDRALKQQKKALIRANGLKLEAMSQVIQAMPSDLTISSAIQNIHSASKGLPLNHAALPPTDYDRSPFVTSPISMTMPPHGSLQGYQTYGHFPSRAIKSEYPDPYTSSPESIMGYSYMDSYQTSSPASIPHLILELLKCEPDEPQVQAKIMAYLQQEQANRSKHEKLSTFGLMCKMADQTLFSIVEWARSSIFFRELKVDDQMKLLQNCWSELLILDHIYRQVVHGKEGSIFLVTGQQVDYSIIASQAGATLNNLMSHAQELVAKLRSLQFDQREFVCLKFLVLFSLDVKNLENFQLVEGVQEQVNAALLDYTMCNYPQQTEKFGQLLLRLPEIRAISMQAEEYLYYKHLNGDVPYNNLLIEMLHAKRA

SEQ ID NO: 888440 - protein, 167 aa, Homo sapiens [sequence omitted]

SEQ ID NO: 888441 - protein, 68 aa, Homo sapiens
MSSNSDTGDLQESLKHGLTPIDNTENTGTRKMREQHTTISHLFRRAEPPRCAGKESFPAAPRSSGSAS

SEQ ID NO: 888442 - protein, 495 aa, Homo sapiens
MSSNSDTGDLQESLKHGLTPIVSQFKMVNYSYDEDLEELCPVCGDKVSGYHYGLLTCESCKGFFKRTVQNNKRYTCIENQNCQIDKTQRKRCPYCRFQKCLSVGMKLEAVRADRMRGGRNKFGPMYKRDRALKQQKKALIRANGLKLEAMSQVIQAMPSDLTISSAIQNIHSASKGLPLNHAALPPTDYDRSPFVTSPISMTMPPHGSLQGYQTYGHFPSRAIKSEYPDPYTSSPESIMGYSYMDSYQTSSPASIPHLILELLKCEPDEPQVQAKIMAYLQQEQANRSKHEKLSTFGLMCKMADQTLFSIVEWARSSIFFRELKVDDQMKLLQNCWSELLILDHIYRQVVHGKEGSIFLVTGQQVDYSIIASQAGATLNNLMSHAQELVAKLRSLQFDQREFVCLKFLVLFSLDVKNLENFQLVEGVQEQVNAALLDYTMCNYPQQTEKFGQLLLRLPEIRAISMQAEEYLYYKHLNGDVPYNNLLIEMLHAKRA

SEQ ID NO: 888443 - protein, 487 aa, Homo sapiens
MSSNSDTGDLQESLKHGLTPIDRGNCRSGCFSFAATLRQRSLLTSCAGLPDRHGSPIPARGRLVMLPKVETEALGLARSHGEQGQMPENMQVSQFKMVNYSYDEDLEELCPVCGDKVSGYHYGLLTCESCKGFFKRTVQNNKRYTCIENQNCQIDKTQRKRCPYCRFQKCLSVGMKLEAVRADRMRGGRNKFGPMYKRDRALKQQKKALIRANGLKLEAMSQVIQAMPSDLTISSAIQNIHSASKGLPLNHAALPPTDYDRSPFVTSPISMTMPPHGSLQGYQTYGHFPSRAIKSEYPDPYTSSPESIMGYSYMDSYQTSSPASIPHLILELLKCEPDEPQVQAKIMAYLQQEQANRSKHEKLSTFGLMCKMADQTLFSIVEWARSSIFFRELKGLTLSPSLECSGTILAHGNLHLLHSSDSPASASRVAGITGVHHNTHLIFVFLVEMGFCHVGQAGLKTPDLRVICLPRPPKVAGIMGMSHCAWP

SEQ ID NO: 888444 - protein, 367 aa, Homo sapiens
MAYRVLGRAGPPQPRRARRLLFAFTLSLSCTYLCYSFLCCCDDLGRSRLLGAPRCLRGPSAGGQKLLQKSRPCDPSGPTPSEPSAPSAPAAAVPAPRLSGSNHSGSPKLGTKRLPQALIVGVKKGGTRAVLEFIRVHPDVRALGTEPHFFDRNYGRGLDWYRSLMPRTLESQITLEKTPSYFVTQEAPRRIFNMSRDTKLIVVVRNPVTRAISDYTQTLSKKPDIPTFEGLSFRNRTLGLVDVSWNAIRIGMYVLHLESWLQYFPLAQIHFVSGERLITDPAGEMGRVQDFLGIKRFITDKHFYFNKTKGFPCLKKTESSLLPRCLGKSKGRTHVQIDPEVIDQLREFYRPYNIKFYETVGQDFRWE

SEQ ID NO: 888445 - protein, 235 aa, Homo sapiens
QWNDHSSLQPQTPGLKRSSHLSFPRELTYRSLMPRTLESQITLEKTPSYFVTQEAPRRIFNMSRDTKLIVVVRNPVTRAISDYTQTLSKKPDIPTFEGLSFRNRTLGLVDVSWNAIRIGMYVLHLESWLQYFPLAQIHFVSGERLITDPAGEMGRVQDFLGIKRFITDKHFYFNKTKGFPCLKKTESSLLPRCLGKSKGRTHVQIDPEVIDQLREFYRPYNIKFYETVGQDFRWE

SEQ ID NO: 888446 - protein, 1323 aa, Homo sapiens
LELLWRPTRGGGRGDPPLSTWTVAKASADAFTPGRGGRTAVAAAAAERARGLGAPDGRRDLAAPARRVRPFYGLGRREACLCARFHSPFLGTHGWGKFLRQPGWAVDGESWAERNRAREAPSSSSPVAFPRRGLRSSGRGPRCPPARGQARARLACLCIGPSERGSAARLTAEPEARNLRRLPSSGAAPHPGEHGGGVGHGLRRRRRGRRKMAAGKSGGSAGEITFLEALARSESKRDGGFKNNWSFDHEEESEGDTDKDGTNLLSVDEDEDSETSKGKKLNRRSEIVANSSGEFILKTYVRRNKSESFKTLKGNPIGLNMLSNNKKLSENTQNTSLCSGTVVHGRRFHHAHAQIPVVKTAAQSSLDRKERKEYPPHVQKVEINPVRLSRLQGVERIMKKTEESESQVEPEIKRKVQQKRHCSTYQPTPPLSPASKKCLTHLEDLQRNCRQAITLNESTGPLLRTSIHQNSGGQKSQNTGLTTKKFYGNNVEKVPIDIIVNCDDSKHTYLQTNGKVILPGAKIPKITNLKERKTSLSDLNDPIILSSDDDDDNDRTNRRESISPQPADSACSSPAPSTGKVEAALNENTCRAERELRSIPEDSELNTVTLPRKARMKDQFGNSIINTPLKRRKVFSQEPPDALALSCQSSFDSVILNCRSIRVGTLFRLLIEPVIFCLDFIKIQLDEPDHDPVEIILNTSDLTKCEWCNVRKLPVVFLQAIPAVYQKLSIQLQMNKEDKVWNDCKGVNKLTNLEEQYIILIFQNGLDPPANMVFESIINEIGIKNNISNFFAKIPFEEANGRLVACTRTYEESIKGSCGQKENKIKTVSFESKIQLRSKQEFQFFDEEEETGENHTIFIGPVEKLIVYPPPPAKGGISVTNEDLHCLNEGEFLNDVIIDFYLKYLVLEKLKKEDADRIHIFSSFFYKRLNQRERRNHETTNLSIQQKRHGRVKTWTRHVDIFEKDFIFVPLNEAAHWFLAVVCFPGLEKPKYEPNPHYHENAVIQKCSTVEDSCISSSASEMESCSQNSSAKPVIKKMLNKKHCIAVIDSNPGQEESDPRYKRNICSVKYSVKKINHTASENEEFNKGESTSQKVADRTKSENGLQNESLSSTHHTDGLSKIRLNYSDESPEAGKMLEDELVDFSEDQDNQDDSSDDGFLADDNCSSEIGQWHLKPTICKQPCILLMDSLRGPSRSNVVKILREYLEVEWEVKKGSKRSFSKDVMKGSNPKVPQQNNFSDCGVYVLQYVESFFENPILSFELPMNLANWFPPPRMRTKREEIRNIILKLQEDQSKEKRKHKDTYSTEAPLGEGTEQYVNSISD

SEQ ID NO: 888447 - protein, 1316 aa, Homo sapiens
LELLWRPTRGGGRGDPPLSTWTVAKASADAFTPGRGGRTAVAAAAAERARGLGAPDGRRDLAAPARRVRPFYGLGRREACLCARFHSPFLGTHGWGKFLRQPGWAVDGESWAERNRAREAPSSSSPVAFPRRGLRSSGRGPRCPPARGQARARLACLCIGPSERGSAARLTAEPEARNLRRLPSSGAAPHPGEHGGGVGHGLRRRRRGRRKMAAGKSGGSAGEITFLEALARSESKRDGGFKNNWSFDHEEESEGDTDKDGTNLLSVDEDEDSETSKGKKLNRRSEIVANSSGEFILKTYVRRNKSESFKTLKGNPIGLNMLSNNKKLSENTQNTSLCSGTVVHGRRFHHAHAQIPVVKTAAQRKEYPPHVQKVEINPVRLSRLQGVERIMKKTEESESQVEPEIKRKVQQKRHCSTYQPTPPLSPASKKCLTHLEDLQRNCRQAITLNESTGPLLRTSIHQNSGGQKSQNTGLTTKKFYGNNVEKVPIDIIVNCDDSKHTYLQTNGKVILPGAKIPKITNLKERKTSLSDLNDPIILSSDDDDDNDRTNRRESISPQPADSACSSPAPSTGKVEAALNENTCRAERELRSIPEDSELNTVTLPRKARMKDQFGNSIINTPLKRRKVFSQEPPDALALSCQSSFDSVILNCRSIRVGTLFRLLIEPVIFCLDFIKIQLDEPDHDPVEIILNTSDLTKCEWCNVRKLPVVFLQAIPAVYQKLSIQLQMNKEDKVWNDCKGVNKLTNLEEQYIILIFQNGLDPPANMVFESIINEIGIKNNISNFFAKIPFEEANGRLVACTRTYEESIKGSCGQKENKIKTVSFESKIQLRSKQEFQFFDEEEETGENHTIFIGPVEKLIVYPPPPAKGGISVTNEDLHCLNEGEFLNDVIIDFYLKYLVLEKLKKEDADRIHIFSSFFYKRLNQRERRNHETTNLSIQQKRHGRVKTWTRHVDIFEKDFIFVPLNEAAHWFLAVVCFPGLEKPKYEPNPHYHENAVIQKCSTVEDSCISSSASEMESCSQNSSAKPVIKKMLNKKHCIAVIDSNPGQEESDPRYKRNICSVKYSVKKINHTASENEEFNKGESTSQKVADRTKSENGLQNESLSSTHHTDGLSKIRLNYSDESPEAGKMLEDELVDFSEDQDNQDDSSDDGFLADDNCSSEIGQWHLKPTICKQPCILLMDSLRGPSRSNVVKILREYLEVEWEVKKGSKRSFSKDVMKGSNPKVPQQNNFSDCGVYVLQYVESFFENPILSFELPMNLANWFPPPRMRTKREEIRNIILKLQEDQSKEKRKHKDTYSTEAPLGEGTEQYVNSISD

SEQ ID NO: 888448 - protein, 1298 aa, Homo sapiens
LELLWRPTRGGGRGDPPLSTWTVAKASADAFTPGRGGRTAVAAAAAERARGLGAPDGRRDLAAPARRVRPFYGLGRREACLCARFHSPFLGTHGWGKFLRQPGWAVDGESWAERNRAREAPSSSSPVAFPRRGLRSSGRGPRCPPARGQARARLACLCIGPSERGSAARLTAEPEARNLRRLPSSGAAPHPGEHGGGVGHGLRRRRRGRRKMAAGKSGGSAGEITFLEALARSESKRDGGFKNNWSFDHEEESEGDTDKDGTNLLSVDEDEDSETSKGKKLNRRSEIVANSSGEFILKTYVRRNKSESFKTLKGNPIGLNMLSNNKKLSENTQNTSLCSGTVVHGRRFHHAHAQIPVVKTAAQRKEYPPHVQKVEINPVRLSRLQGVERIMKKTEESESQVEPEIKRKVQQKRHCSTYQPTPPLSPASKKCLTHLEDLQRNCRQAITLNESTGPLLRTSIHQNSGGQKSQNTGLTTKKFYGNNVEKVPIDIIVNCDDSKHTYLQTNGKVILPGAKIPKITNLKERKTSLSDLNDPIILSSDDDDDNDRTNRRESISPQPADSACSSPAPSTGKVEAALNENTCRAERELRSIPEDSELNTVTLPRSRKVFSQEPPDALALSCQSSFDSVILNCRSIRVGTLFRLLIEPVIFCLDFIKIQLDEPDHDPVEIILNTSDLTKCEWCNVRKLPVVFLQAIPAVYQKLSIQLQMNKEDKVWNDCKGVNKLTNLEEQYIILIFQNGLDPPANMVFESIINEIGIKNNISNFFAKIPFEEANGRLVACTRTYEESIKGSCGQKENKIKTVSFESKIQLRSKQEFQFFDEEEETGENHTIFIGPVEKLIVYPPPPAKGGISVTNEDLHCLNEGEFLNDVIIDFYLKYLVLEKLKKEDADRIHIFSSFFYKRLNQRERRNHETTNLSIQQKRHGRVKTWTRHVDIFEKDFIFVPLNEAAHWFLAVVCFPGLEKPKYEPNPHYHENAVIQKCSTVEDSCISSSASEMESCSQNSSAKPVIKKMLNKKHCIAVIDSNPGQEESDPRYKRNICSVKYSVKKINHTASENEEFNKGESTSQKVADRTKSENGLQNESLSSTHHTDGLSKIRLNYSDESPEAGKMLEDELVDFSEDQDNQDDSSDDGFLADDNCSSEIGQWHLKPTICKQPCILLMDSLRGPSRSNVVKILREYLEVEWEVKKGSKRSFSKDVMKGSNPKVPQQNNFSDCGVYVLQYVESFFENPILSFELPMNLANWFPPPRMRTKREEIRNIILKLQEDQSKEKRKHKDTYSTEAPLGEGTEQYVNSISD

SEQ ID NO: 888449 - protein, 646 aa, Homo sapiens
  misc_feature (4)..(4): Xaa can be any naturally occurring amino acid
GDPXTLPDPPQIAFPREIILNTSDLTKCEWCNVRKLPVVFLQAIPAVYQKLSIQLQMNKEDKVWNDCKGVNKLTNLEEQYIILIFQNGLDPPANMVFESIINEIGIKNNISNFFAKIPFEEANGRLVACTRTYEESIKGSCGQKENKIKTVSFESKIQLRSKQEFQFFDEEEETGENHTIFIGPVEKLIVYPPPPAKGGISVTNEDLHCLNEGEFLNDVIIDFYLKYLVLEKLKKEDADRIHIFSSFFYKRLNQRERRNHETTNLSIQQKRHGRVKTWTRHVDIFEKDFIFVPLNEAAHWFLAVVCFPGLEKPKYEPNPHYHENAVIQKCSTVEDSCISSSASEMESCSQNSSAKPVIKKMLNKKHCIAVIDSNPGQEESDPRYKRNICSVKYSVKKINHTASENEEFNKGESTSQKVADRTKSENGLQNESLSSTHHTDGLSKIRLNYSDESPEAGKMLEDELVDFSEDQDNQDDSSDDGFLADDNCSSEIGQWHLKPTICKQPCILLMDSLRGPSRSNVVKILREYLEVEWEVKKGSKRSFSKDVMKGSNPKVPQQNNFSDCGVYVLQYVESFFENPILSFELPMNLANWFPPPRMRTKREEIRNIILKLQEDQSKEKRKHKDTYSTEAPLGEGTEQYVNSISD

SEQ ID NO: 888450 - protein, 302 aa, Homo sapiens [sequence omitted]

SEQ ID NO: 888451 - protein, 1175 aa, Homo sapiens
LELLWRPTRGGGRGDPPLSTWTVAKASADAFTPGRGGRTAVAAAAAERARGLGAPDGRRDLAAPARRVRPFYGLGRREACLCARFHSPFLGTHGWGKFLRQPGWAVDGESWAERNRAREAPSSSSPVAFPRRGLRSSGRGPRCPPARGQARARLACLCIGPSERGSAARLTAEPEARNLRRLPSSGAAPHPGEHGGGVGHGLRRRRRGRRKMAAGKSGGSAGEITFLEALARSESKRDGGFKNNWSFDHEEESEGDTDKDGTNLLSVDEDEDSETSKGKKLNRRSEIVANSSGEFILKTYVRRNKSESFKTLKGNPIGLNMLSNNKKLSENTQNTSLCSGTVVHGRRFHHAHAQIPVVKTAAQRKEYPPHVQKVEINPVRLSRLQGVERIMKKTEESESQVEPEIKRKVQQKRHCSTYQPTPPLSPASKKCLTHLEDLQRNCRQAITLNESTGPLLRTSIHQNSGGQKSQNTGLTTKKFYGNNVEKVPIDIIVNCDDSKHTYLQTNGKVILPGAKIPKITNLKERKTSLSDLNDPIILSSDDDDDNDRTNRRESISPQPADSACSSPAPSTGKVEAALNENTCRAERELRSIPEDSELNTVTLPRKARMKDQFGNSIINTPLKRRKVFSQEPPDALALSCQSSFDSVILNCRSIRVGTLFRLLIEPVIFCLDFIKIQLDEPDHDPVEIILNTSDLTKCEWCNVRKLPVVFLQAIPAVYQKLSIQLQMNKEDKVWNDCKGVNKLTNLEEQYIILIFQNGLDPPANMVFESIINEIGIKNNISNFFAKIPFEEANGRLVACTRTYEESIKGSCGQKENKIKTVSFESKIQLRSKQEFQFFDEEEETGENHTIFIGPVEKLIVYPPPPAKGGISVTNEDLHCLNEGEFLNDVIIDFYLKYLVLEKLKKEDADRIHIFSSFFYKRLNQRERRNHETTNLSIQQKRHGRVKTWTRHVDIFEKDFIFVPLNEAAHWFLAVVCFPGLEKPKYEPNPHYHENAVIQKCSTVEDSCISSSASEMESCSQNSSAKPVIKKMLNKKHCIAVIDSNPGQEESDPRYKRNICSVKYSVKKINHTASENEEFNKGESTSQKVADRTKSENGLQNESLSSTHHTDGLSKIRLNYSDESPEAGKMLEDELVDFSEDQDNQTLYPTYGLTPRPFSVKCCQNFKRVFRSGMGS

SEQ ID NO: 888452 - protein, 188 aa, Homo sapiens
MLEDELVDFSEDQDNQDDSSDDGFLADDNCSSEIGQWHLKPTICKQPCILLMDSLRGPSRSNVVKILREYLEVEWEVKKGSKRSFSKDVMKGSNPKVPQQNNFSDCGVYVLQYVESFFENPILSFELPMNLANWFPPPRMRTKREEIRNIILKLQEDQSKEKRKHKDTYSTEAPLGEGTEQYVNSISD

SEQ ID NO: 888453 - protein, 583 aa, Homo sapiens
MLSNNKKLSENTQNTSLCSGTVVHGRRFHHAHAQIPVVKTAAQSSLDRKERKEYPPHVQKVEINPVRLSRLQGVERIMKKTEESESQVEPEIKRKVQQKRHCSTYQPTPPLSPASKKCLTHLEDLQRNCRQAITLNESTGPLLRTSIHQNSGGQKSQNTGLTTKKFYGNNVEKVPIDIIVNCDDSKHTYLQTNGKVILPGAKIPKITNLKERKTSLSDLNDPIILSSDDDDDNDRTNRRESISPQPADSACSSPAPSTGKVEAALNENTCRAERELRSIPEDSELNTVTLPRKARMKDQFGNSIINTPLKRRKVFSQEPPDALALSCQSSFDSVILNCRSIRVGTLFRLLIEPVIFCLDFIKIQLDEPDHDPVEIILNTSDLTKCEWCNVRKLPVVFLQAIPAVYQKLSIQLQMNKEDKVWNDCKGVNKLTNLEEQYIILIFQNGLDPPANMVFESIINEIGIKNNISNFFAKIPFEEANGRLVACTRTYEESIKGSCGQKENKIKTVSFESKIQLRSKQEFQFFDEEEETGENHTIFIGPVEKLIVYPPPPAKGGISVTNEDLHCLNEGEFLNDVIIDFYLK

SEQ ID NO: 888454 - protein, 967 aa, Homo sapiens
LELLWRPTRGGGRGDPPLSTWTVAKASADAFTPGRGGRTAVAAAAAERARGLGAPDGRRDLAAPARRVRPFYGLGRREACLCARFHSPFLGTHGWGKFLRQPGWAVDGESWAERNRAREAPSSSSPVAFPRRGLRSSGRGPRCPPARGQARARLACLCIGPSERGSAARLTAEPEARNLRRLPSSGAAPHPGEHGGGVGHGLRRRRRGRRKMAAGKSGGSAGEITFLEALARSESKRDGGFKNNWSFDHEEESEGDTDKDGTNLLSVDEDEDSETSKGKKLNRRSEIVANSSGEFILKTYVRRNKSESFKTLKGNPIGLNMLSNNKKLSENTQNTSLCSGTVVHGRRFHHAHAQIPVVKTAAQRKEYPPHVQKVEINPVRLSRLQGVERIMKKTEESESQVEPEIKRKVQQKRHCSTYQPTPPLSPASKKCLTHLEDLQRNCRQAITLNESTGPLLRTSIHQNSGGQKSQNTGLTTKKFYGNNVEKVPIDIIVNCDDSKHTYLQTNGKVILPGAKIPKITNLKERKTSLSDLNDPIILSSDDDDDNDRTNRRESISPQPADSACSSPAPSTGKVEAALNENTCRAERELRSIPEDSELNTVTLPRKARMKDQFGNSIINTPLKRRKVFSQEPPDALALSCQSSFDSVILNCRSIRVGTLFRLLIEPVIFCLDFIKIQLDEPDHDPVEIILNTSDLTKCEWCNVRKLPVVFLQAIPAVYQKLSIQLQMNKEDKVWNDCKGVNKLTNLEEQYIILIFQNGLDPPANMVFESIINEIGIKNNISNFFAKIPFEEANGRLVACTRTYEESIKGSCGQKENKIKTVSFESKIQLRSKQEFQFFDEEEETGENHTIFIGPVEKLIVYPPPPAKGGISVTNEDLHCLNEGEFLNDVIIDFYLKYLVLEKLKKEDADRIHIFSSFFYKRLNQRERRNHETTNLSIQQKRHGRVKTWTRHVDIFEKDFIFVPLNEA

SEQ ID NO: 888455 - protein, 364 aa, Homo sapiens
LELLWRPTRGGGRGDPPLSTWTVAKASADAFTPGRGGRTAVAAAAAERARGLGAPDGRRDLAAPARRVRPFYGLGRREACLCARFHSPFLGTHGWGKFLRQPGWAVDGESWAERNRAREAPSSSSPVAFPRRGLRSSGRGPRCPPARGQARARLACLCIGPSERGSAARLTAEPEARNLRRLPSSGAAPHPGEHGGGVGHGLRRRRRGRRKMAAGKSGGSAGEITFLEALARSESKRDGGFKNNWSFDHEEESEGDTDKDGTNLLSVDEDEDSETSKGKKLNRRSEIVANSSGEFILKTYVRRNKSESFKTLKGNPIGLNMLSNNKKLSENTQNTSLCSGTVVHGRRFHHAHAQIPVVKTAAQR

SEQ ID NO: 888456 - protein, 1323 aa, Homo sapiens; identical to SEQ ID NO: 888446

SEQ ID NO: 888457 - protein, 1003 aa, Homo sapiens
MLSNNKKLSENTQNTSLCSGTVVHGRRFHHAHAQIPVVKTAAQSSLDRKERKEYPPHVQKVEINPVRLSRLQGVERIMKKTEESESQVEPEIKRKVQQKRHCSTYQPTPPLSPASKKCLTHLEDLQRNCRQAITLNESTGPLLRTSIHQNSGGQKSQNTGLTTKKFYGNNVEKVPIDIIVNCDDSKHTYLQTNGKVILPGAKIPKITNLKERKTSLSDLNDPIILSSDDDDDNDRTNRRESISPQPADSACSSPAPSTGKVEAALNENTCRAERELRSIPEDSELNTVTLPRKARMKDQFGNSIINTPLKRRKVFSQEPPDALALSCQSSFDSVILNCRSIRVGTLFRLLIEPVIFCLDFIKIQLDEPDHDPVEIILNTSDLTKCEWCNVRKLPVVFLQAIPAVYQKLSIQLQMNKEDKVWNDCKGVNKLTNLEEQYIILIFQNGLDPPANMVFESIINEIGIKNNISNFFAKIPFEEANGRLVACTRTYEESIKGSCGQKENKIKTVSFESKIQLRSKQEFQFFDEEEETGENHTIFIGPVEKLIVYPPPPAKGGISVTNEDLHCLNEGEFLNDVIIDFYLKYLVLEKLKKEDADRIHIFSSFFYKRLNQRERRNHETTNLSIQQKRHGRVKTWTRHVDIFEKDFIFVPLNEAAHWFLAVVCFPGLEKPKYEPNPHYHENAVIQKCSTVEDSCISSSASEMESCSQNSSAKPVIKKMLNKKHCIAVIDSNPGQEESDPRYKRNICSVKYSVKKINHTASENEEFNKGESTSQKVADRTKSENGLQNESLSSTHHTDGLSKIRLNYSDESPEAGKMLEDELVDFSEDQDNQDDSSDDGFLADDNCSSEIGQWHLKPTICKQPCILLMDSLRGPSRSNVVKILREYLEVEWEVKKGSKRSFSKDVMKGSNPKVPQQNNFSDCGVYVLQYVESFFENPILSFELPMNLANWFPPPRMRTKREEIRNIILKLQEDQSKEKRKHKDTYSTEAPLGEGTEQYVNSISD

SEQ ID NO: 888458 - protein, 976 aa, Homo sapiens
LELLWRPTRGGGRGDPPLSTWTVAKASADAFTPGRGGRTAVAAAAAERARGLGAPDGRRDLAAPARRVRPFYGLGRREACLCARFHSPFLGTHGWGKFLRQPGWAVDGESWAERNRAREAPSSSSPVAFPRRGLRSSGRGPRCPPARGQARARLACLCIGPSERGSAARLTAEPEARNLRRLPSSGAAPHPGEHGGGVGHGLRRRRRGRRKMAAGKSGGSAGEITFLEALARSESKRDGGFKNNWSFDHEEESEGDTDKDGTNLLSVDEDEDSETSKGKKLNRRSEIVANSSGEFILKTYVRRNKSESFKTLKGNPIGLNMLSNNKKLSENTQNTSLCSGTVVHGRRFHHAHAQIPVVKTAAQRKEYPPHVQKVEINPVRLSRLQGVERIMKKTEESESQVEPEIKRKVQQKRHCSTYQPTPPLSPASKKCLTHLEDLQRNCRQAITLNESTGPLLRTSIHQNSGGQKSQNTGLTTKKFYGNNVEKVPIDIIVNCDDSKHTYLQTNGKVILPGAKIPKITNLKERKTSLSDLNDPIILSSDDDDDNDRTNRRESISPQPADSACSSPAPSTGKVEAALNENTCRAERELRSIPEDSELNTVTLPRKARMKDQFGNSIINTPLKRRKVFSQEPPDALALSCQSSFDSVILNCRSIRVGTLFRLLIEPVIFCLDFIKIQLDEPDHDPVEIILNTSDLTKCEWCNVRKLPVVFLQAIPAVYQKLSIQLQMNKEDKVWNDCKGVNKLTNLEEQYIILIFQNGLDPPANMVFESIINEIGIKNNISNFFAKIPFEEANGRLVACTRTYEESIKGSCGQKENKIKTVSFESKIQLRSKQEFQFFDEEEETGENHTIFIGPVEKLIVYPPPPAKGGISVTNEDLHCLNEGEFLNDVIIDFYLKYLVLEKLKKEDADRIHIFSSFFYKRLNQRERRNHETTNLSIQQKRHGRVKTWTRHVDIFEKDFIFVPLNEAWLKQNQTKL

SEQ ID NO: 888459 - protein, 302 aa, Homo sapiens [sequence omitted]

SEQ ID NO: 888460 - protein, 221 aa, Homo sapiens
PPGCRIRHEVPHIIHGLSKIRLNYSDESPEAGKMLEDELVDFSEDQDNQDDSSDDGFLADDNCSSEIGQWHLKPTICKQPCILLMDSLRGPSRSNVVKILREYLEVEWEVKKGSKRSFSKDVMKGSNPKVPQQNNFSDCGVYVLQYVESFFENPILSFELPMNLANWFPPPRMRTKREEIRNIILKLQEDQSKEKRKHKDTYSTEAPLGEGTEQYVNSISD

SEQ ID NO: 888461 - protein, 196 aa, Homo sapiens
EESSRSLANVYLIFVDFSEDQDNQDDSSDDGFLADDNCSSEIGQWHLKPTICKQPCILLMDSLRGPSRSNVVKILREYLEVEWEVKKGSKRSFSKDVMKGSNPKVPQQNNFSDCGVYVLQYVESFFENPILSFELPMNLANWFPPPRMRTKREEIRNIILKLQEDQSKEKRKHKDTYSTEAPLGEGTEQYVNSISD

SEQ ID NO: 888462 - protein, 672 aa, Homo sapiens
LELLWRPTRGGGRGDPPLSTWTVAKASADAFTPGRGGRTAVAAAAAERARGLGAPDGRRDLAAPARRVRPFYGLGRREACLCARFHSPFLGTHGWGKFLRQPGWAVDGESWAERNRAREAPSSSSPVAFPRRGLRSSGRGPRCPPARGQARARLACLCIGPSERGSAARLTAEPEARNLRRLPSSGAAPHPGEHGGGVGHGLRRRRRGRRKMAAGKSGGSAGEITFLEALARSESKRDGGFKNNWSFDHEEESEGDTDKDGTNLLSVDEDEDSETSKGKKLNRRSEIVANSSGEFILKTYVRRNKSESFKTLKGNPIGLNMLSNNKKLSENTQNTSLCSGTVVHGRRFHHAHAQIPVVKTAAQRKEYPPHVQKVEINPVRLSRLQGVERIMKKTEESESQVEPEIKRKVQQKRHCSTYQPTPPLSPASKKCLTHLEDLQRNCRQAITLNESTGPLLRTSIHQNSGGQKSQNTGLTTKKFYGNNVEKVPIDIIVNCDDSKHTYLQTNGKVILPGAKIPKITNLKERKTSLSDLNDPIILSSDDDDDNDRTNRRESISPQPADSACSSPAPSTGKVEAALNENTCRAERELRSIPEDSELNTVTLPRKARMKDQFGNSIINTPLKRRKVFSQEPPDALALSCQSSFDSVILNCRSIRVGTLFRLLIEPVIVSTS

SEQ ID NO: 888463 - protein, 142 aa, Homo sapiens
RRSLALSSRLECSGMISAHCNLRLPSSSDSLASVSRVAGIIGIHHHAQLIFVFLVEMGFHHVGQAGLELLTSGDLPTSASQSAGITGVSHCARPILNFRHCTQYNCYPYRIVLKVSSYCLLCLLTLLVAALLLCLVIFEFIV

SEQ ID NO: 888464 - protein, 723 aa, Homo sapiens
MAAAATMAAAARELVLRAGTSDMEEEEGPLAGGPGLQEPLQLGELDITSDEFILDEVDVHIQANLEDELVKEALKTGVDLRHYSKQVELELQQIEQKSIRDYIQESENIASLHNQITACDAVLERMEQMLGAFQSDLSSISSEIRTLQEQSGAMNIRLRNRQAVRGKLGELVDGLVVPSALVTAILEAPVTEPRFLEQLQELDAKAAAVREQEARGTAACADVRGVLDRLRVKAVTKIREFILQKIYSFRKPMTNYQIPQTALLKYRFFYQFLLGNERATAKEIRDEYVETLSKIYLSYYRSYLGRLMKVQYEEVAEKDDLMGVEDTAKKGFFSKPSLRSRNTIFTLGTRGSVISPTELEAPILVPHTAQRGEQRYPFEALFRSQHYALLDNSCREYLFICEFFVVSGPAAHDLFHAVMGRTLSMTLKHLDSYLADCYDAIAVFLCIHIVLRFRNIAAKRDVPALDRYWEQVLALLWPRFELILEMNVQSVRSTDPQRLGGLDTRPHYITRRYAEFSSALVSINQTIPNERTMQLLGQLQVEVENFVLRVAAEFSSRKEQLVFLINNYDMMLGVLMERAADDSKEVESFQQLLNARTQEFIEELLSPPFGGLVAFVKEAEALIERGQAERLRGEEARVTQLIRGFGSSWKSSVESLSQDVMRSFTNFRNGTSIIQGALTQLIQLYHRFHRVLSQPQLRALPARAELINIHHLMVELKKHKPNF

SEQ ID NO: 888465 - protein, 598 aa, Homo sapiens
MEQMLGAFQSDLSSISSEIRTLQEQSGAMNIRLRNRQAVRGKLGELVDGLVVPSALVTAILEAPVTEPRFLEQLQELDAKAAAVREQEARGTAACADVRGVLDRLRVKAVTKIREFILQKIYSFRKPMTNYQIPQTALLKYRFFYQFLLGNERATAKEIRDEYVETLSKIYLSYYRSYLGRLMKVQYEEVAEKDDLMGVEDTAKKGFFSKPSLRSRNTIFTLGTRGSVISPTELEAPILVPHTAQRGEQRYPFEALFRSQHYALLDNSCREYLFICEFFVVSGPAAHDLFHAVMGRTLSMTLKHLDSYLADCYDAIAVFLCIHIVLRFRNIAAKRDVPALDRYWEQVLALLWPRFELILEMNVQSVRSTDPQRLGGLDTRPHYITRRYAEFSSALVSINQTIPNERTMQLLGQLQVEVENFVLRVAAEFSSRKEQLVFLINNYDMMLGVLMERAADDSKEVESFQQLLNARTQEFIEELLSPPFGGLVAFVKEAEALIERGQAERLRGEEARVTQLIRGFGSSWKSSVESLSQDVMRSFTNFRNGTSIIQGALTQLIQLYHRFHRVLSQPQLRALPARAELINIHHLMVELKKHKPNF

SEQ ID NO: 888466 - protein, 723 aa, Homo sapiens; identical to SEQ ID NO: 888464

SEQ ID NO: 888467 - protein, 664 aa, Homo sapiens
MAAAATMAAAARELVLRAGTSDMEEEEGPLAGGPGLQEPLQLGELDITSDEFILDEVDVHIQANLEDELVKEALKTGVDLRHYSKQVELELQQIEQKSIRDYIQESENIASLHNQITACDAVLERMEQMLGAFQSDLSSISSEIRTLQEQSGAMNIRLRNRQAVRGKLGELVDGLVVPSALVTAILEAPVTEPRFLEQLQELDAKAAAVREQEARGTAACADVRGVLDRLRVKAVTKIREFILQKIYSFRKPMTNYQIPQTALLKYRFFYQFLLGNERATAKEIRDEYVETLSKIYLSYYRSYLGRLMKVQYEEVAEKDDLMGVEDTAKKGFFSKPSLRSRNTIFTLGTRGSVISPTELEAPILVPHTAQRGEQRYPFEALFRSQHYALLDNSCREYLFICEFFVVSGPAAHDLFHAVMGRTLSMTLKHLDSYLADCYDAIAVFLCIHIVLRFRNIAAKRDVPALDRYWEQVLALLWPRFELILEMNVQSVRSTDPQRLGGLDTRPHYITRRYAEFSSALVSINQTIPNERTMQLLGQLQVEVENFVLRVAAEFSSRKEQLVFLINNYDMMLGVLMERAADDSKEVESFQQLLNARTQEFIEELLSPPFGGLVAFVKEAEALIERGQAERLRGEEGSADPADPALSSLPPGAVPAAAPSPPCPG

SEQ ID NO: 888468 - protein, 769 aa, Homo sapiens
MAAAATMAAAARELVLRAGTSDMEEEEGPLAGGPGLQEPLQLGELDITSDEFILDEVDVHIQANLEDELVKEALKTGVDLRHYSKQVELELQQIEQKSIRDYIQESENIASLHNQITACDAVLERMEQMLGAFQSDLSSISSEIRTLQEQSGAMNIRLRNRQAVRGKLGELVDGLVVPSALVTAILEAPVTEPRFLEQLQELDAKAAAVREQEARGTAACADVRGVLDRLRVKAVTKIREFILQKIYSFRKPMTNYQIPQTALLKYRFFYQFLLGNERATAKEIRDEYVETLSKIYLSYYRSYLGRLMKVQYEEVAEKDDLMGVEDTAKKGFFSKPSLRSRNTIFTLGTRGSVISPTELEAPILVPHTAQRGEQRYPFEALFRSQHYALLDNSCREYLFICEFFVVSGPAAHDLFHAVMGRTLSMTLKHLDSYLADCYDAIAVFLCIHIVLRFRNIAAKRDVPALDRYWEQVLALLWPRFELILEMNVQSVRSTDPQRLGGLDTRPHYITRRYAEFSSALVSINQTIPNERTMQLLGQLQVEVENFVLRVAAEFSSRKEQLVFLINNYDMMLGVLMERAADDSKEVESFQQLLNARTQEFIEELLSPPFGGLVAFVKEAEALIERGQVSSSTFTTLWWSSRSISPTSDVPETALRSAGHLHGLLHPIPYPSSPGVPLPVFPLLPRPLTWLTCLHSQHLAQQDKLDPLGLLNIPVSSGFPRPLPCGLPKWPLSFLQSVTLLSCSHTPKACFFPCKNHCLNLWFTQLVTMS

SEQ ID NO: 888469 - protein, 305 aa, Homo sapiens [sequence omitted]

SEQ ID NO: 888470 - protein, 305 aa, Homo sapiens [sequence omitted]

SEQ ID NO: 888471 - protein, 238 aa, Homo sapiens
MNVQSVRSTDPQRLGGLDTRPHYITRRYAEFSSALVSINQTIPNERTMQLLGQLQVEVENFVLRVAAEFSSRKEQLVFLINNYDMMLGVLMERAADDSKEVESFQQLLNARTQEFIEELLSPPFGGLVAFVKEAEALIERGQAERLRGEEARVTQLIRGFGSSWKSSVESLSQDVMRSFTNFRNGTSIIQGALTQLIQLYHRFHRVLSQPQLRALPARAELINIHHLMVELKKHKPNF

SEQ ID NO: 888472 - protein, 723 aa, Homo sapiens; identical to SEQ ID NO: 888464

SEQ ID NO: 888473 - protein, 238 aa, Homo sapiens; identical to SEQ ID NO: 888471

SEQ ID NO: 888474 - protein, 191 aa, Homo sapiens
MQLLGQLQVEVENFVLRVAAEFSSRKEQLVFLINNYDMMLGVLMERAADDSKEVESFQQLLNARTQEFIEELLSPPFGGLVAFVKEAEALIERGQAERLRGEEARVTQLIRGFGSSWKSSVESLSQDVMRSFTNFRNGTSIIQGALTQLIQLYHRFHRVLSQPQLRALPARAELINIHHLMVELKKHKPNF

SEQ ID NO: 888475 - protein, 484 aa, Homo sapiens
MAAAARELVLRAGTSDMEEEEGPLAGGPGLQEPLQLGELDITSDEFILDEVDVHIQANLEDELVKEALKTGVDLRHYSKQVELELQQIEQKSIRDYIQESENIASLHNQITACDAVLERMEQMLGAFQSDLSSISSEIRTLQEQSGAMNIRLRNRQAVRGKLGELVDGLVVPSALVTAILEAPVTEPRFLEQLQELDAKAAAVREQEARGTAACADVRGVLDRLRVKAVTKIREFILQKIYSFRKPMTNYQIPQTALLKYRFFYQFLLGNERATAKEIRDEYVETLSKIYLSYYRSYLGRLMKVQYEEVAEKDDLMGVEDTAKKGFFSKPSLRSRNTIFTLGTRGSVISPTELEAPILVPHTAQRGEQRYPFEALFRSQHYALLDNSCREYLFICEFFVVSGPAAHDLFHAVMGRTLSMTLVRLLFPVPFNTFVPSLHQQHSGVMTLVELKSGSPHSKMSKPWLGVVVHTHNPSTLGVQGSRIA

SEQ ID NO: 888476 - protein, 336 aa, Homo sapiens
MAAAARELVLRAGTSDMEEEEGPLAGGPGLQEPLQLGELDITSDEFILDEVDVHIQANLEDELVKEALKTGVDLRHYSKQVELELQQIEQKSIRDYIQESENIASLHNQITACDAVLERMEQMLGAFQSDLSSISSEIRTLQEQSGAMNIRLRNRQAVRGKLGELVDGLVVPSALVTAILEAPVTEPRFLEQLQELDAKAAAVREQEARGTAACADVRGVLDRLRVKAVTKIREFILQKIYSFRKPMTNYQIPQTALLKYRFFYQFLLGNERATAKEIRDEYVETLSKIYLSYYRSYLGRLMKVQYEEVAEKDDLMGVEDTAKKDILVLGNPHARP

SEQ ID NO: 888477 - protein, 534 aa, Homo sapiens
MEQMLGAFQSDLSSISSEIRTLQEQSGAMNIRLRNRQAVRGKLGELVDGLVVPSALVTAILEAPVTEPRFLEQLQELDAKAAAVREQEARGTAACADVRGVLDRLRVKAVTKIREFILQKIYSFRKPMTNYQIPQTALLKYRFFYQFLLGNERATAKEIRDEYVETLSKIYLSYYRSYLGRLMKVQYPFEALFRSQHYALLDNSCREYLFICEFFVVSGPAAHDLFHAVMGRTLSMTLKHLDSYLADCYDAIAVFLCIHIVLRFRNIAAKRDVPALDRYWEQVLALLWPRFELILEMNVQSVRSTDPQRLGGLDTRPHYITRRYAEFSSALVSINQTIPNERTMQLLGQLQVEVENFVLRVAAEFSSRKEQLVFLINNYDMMLGVLMERAADDSKEVESFQQLLNARTQEFIEELLSPPFGGLVAFVKEAEALIERGQAERLRGEEARVTQLIRGFGSSWKSSVESLSQDVMRSFTNFRNGTSIIQGALTQLIQLYHRFHRVLSQPQLRALPARAELINIHHLMVELKKHKPNF

SEQ ID NO: 888478 - protein, 473 aa, Homo sapiens [sequence omitted]

SEQ ID NO: 888479 - protein, 598 aa, Homo sapiens; identical to SEQ ID NO: 888465

SEQ ID NO: 888480 - protein, 702 aa, Homo sapiens
MAAAATMAAAARELVLRAGTSDMEEEEGPLAGGPGLQEPLQLGELDITSDEFILDEVDVHIQANLEDELVKEALKTGVDLRHYSKQVELELQQIEQKSIRDYIQESENIASLHNQITACDAVLERMEQMLGAFQSDLSSISSEIRTLQEQSGAMNIRLRNRQAVRGKLGELVDGLVVPSALVTAILEAPVTEPRFLEQLQELDAKAAAVREQEARGTAACADVRGVLDRLRVKAVTKIREFILQKIYSFRKPMTNYQIPQTALLKYRFFYQFLLGNERATAKEIRDEYVETLSKIYLSYYRSYLGRLMKVQYEEVAEKDDLMGVEDTAKKGFFSKPSLRSRNTIFTLGTRGSVISPTELEAPILVPHTAQRGEQRYPFEALFRSQHYALLDNSCREYLFICEFFVVSGPAAHDLFHAVMGRTLSMTLKHLDSYLADCYDAIAVFLCIHIVLRFRNIAAKRDVPALDRYWEQVLALLWPRFELILEMNVQSVRSTDPQRLGGLDTRPHYITRRYAEFSSALVSINQTIPNERTMQLLGQLQVEVENFVLRVAAEFSSRKEQLVFLINNYDMMLGVLMERAADDSKEVESFQQLLNARTQEFIEELLSPPFGGLVAFVKEAEALIERGQAERLRGEEARVTQLIRGFGSSWKSSVESLSQDVMRSFTNFRNGTSIIQVTCKSQAPLRSPIINYFPHLFAGLSII

SEQ ID NO: 888481 - protein, 159 aa, Homo sapiens [sequence omitted]

SEQ ID NO: 888482 - protein, 862 aa, Homo sapiens
MKTVLMVAEKPSLAQSIAKILSRGSLSSHKGLNGACSVHEYTGTFAGQPVRFKMTSVCGHVMTLDFLGKYNKWDKVDPAELFSQAPTEKKEANPKLNMVKFLQVEGRGCDYIVLWLDCDKEGENICFEVLDAVLPVMNKAHGGEKTVFRARFSSITDTDICNAMACLGEPDHNEALSVDARQELDLRIGCAFTRFQTKYFQGKYGDLDSSLISFGPCQTPTLGFCVERHDKIQSFKPETYWVLQAKVNTDKDRSLLLDWDRVRVFDREIAQMFLNMTKLEKEAQVEATSRKEKAKQRPLALNTVEMLRVASSSLGMGPQHAMQTAERLYTQGYISYPRTETTHYPENFDLKGSLRQQANHPYWADTVKRLLAEGINRPRKGHDAGDHPPITPMKSATEAELGGDAWRLYEYITRHFIATVSHDCKYLQSTISFRIGPELFTCSGKTVLSPGFTEVMPWQSVPLEESLPTCQRGDAFPVGEVKMLEKQTNPPDYLTEAELITLMEKHGIGTDASIPVHINNICQRNYVTVESGRRLKPTNLGIVLVHGYYKIDAELVLPTIRSAVEKQLNLIAQGKADYRQVLGHTLDVFKRKFHYFVDSIAGMDELMEVSFSPLAATGKPLSRCGKCHRFMKYIQAKPSRLHCSHCDETYTLPQNGTIKLYKELRCPLDDFELVLWSSGSRGKSYPLCPYCYNHPPFRDMKKGMGCNECTHPSCQHSLSMLGIGQCVECESGVLVLDPTSGPKWKVACNKCNVVAHCFENAHRVRVSADTCSVCEAALLDVDFNKAKSPLPGDETQHMGCVFCDPVFQELVELKHAASCHPMHRGGPGRRQGRGRGRARRPPGKPNPRRPKDKMSALAAYFV

SEQ ID NO: 888483 - protein, 862 aa, Homo sapiens; identical to SEQ ID NO: 888482

SEQ ID NO: 888484 - protein, 862 aa, Homo sapiens; identical to SEQ ID NO: 888482

SEQ ID NO: 888485 - protein, 862 aa, Homo sapiens; identical to SEQ ID NO: 888482

SEQ ID NO: 888486 - protein, 862 aa, Homo sapiens; identical to SEQ ID NO: 888482

SEQ ID NO: 888487 - protein, 862 aa, Homo sapiens; identical to SEQ ID NO: 888482

SEQ ID NO: 888488 - protein, 890 aa, Homo sapiens
MKTVLMVAEKPSLAQSIAKILSRGSLSSHKGLNGACSVHEYTGTFAGQPVRFKMTSVCGHVMTLDFLGKYNKWDKVDPAELFSQAPTEKKEANPKLNMVKFLQVEGRGCDYIVLWLDCDKEGENICFEKMKPLIPSKEAAWPGSGGDPESHCTAFLVLDAVLPVMNKAHGGEKTVFRARFSSITDTDICNAMACLGEPDHNEALSVDARQELDLRIGCAFTRFQTKYFQGKYGDLDSSLISFGPCQTPTLGFCVERHDKIQSFKPETYWVLQAKVNTDKDRSLLLDWDRVRVFDREIAQMFLNMTKLEKEAQVEATSRKEKAKQRPLALNTVEMLRVASSSLGMGPQHAMQTAERLYTQGYISYPRTETTHYPENFDLKGSLRQQANHPYWADTVKRLLAEGINRPRKGHDAGDHPPITPMKSATEAELGGDAWRLYEYITRHFIATVSHDCKYLQSTISFRIGPELFTCSGKTVLSPGFTEVMPWQSVPLEESLPTCQRGDAFPVGEVKMLEKQTNPPDYLTEAELITLMEKHGIGTDASIPVHINNICQRNYVTVESGRRLKPTNLGIVLVHGYYKIDAELVLPTIRSAVEKQLNLIAQGKADYRQVLGHTLDVFKRKFHYFVDSIAGMDELMEVSFSPLAATGKPLSRCGKCHRFMKYIQAKPSRLHCSHCDETYTLPQNGTIKLYKELRCPLDDFELVLWSSGSRGKSYPLCPYCYNHPPFRDMKKGMGCNECTHPSCQHSLSMLGIGQCVECESGVLVLDPTSGPKWKVACNKCNVVAHCFENAHRVRVSADTCSVCEAALLDVDFNKAKSPLPGDETQHMGCVFCDPVFQELVELKHAASCHPMHRGGPGRRQGRGRGRARRPPGKPNPRRPKDKMSALAAYFV

SEQ ID NO: 888489 - protein, 890 aa, Homo sapiens; identical to SEQ ID NO: 888488

SEQ ID NO: 888490 - protein, 808 aa, Homo sapiens
MKTVLMVAEKPSLAQSIAKILSRGSLSSHKGLNGACSVHEYTGTFAGQPVRFKMTSVCGHVMTLDFLGKYNKWDKVDPAELFSQAPTEKKEANPKLNMVKFLQVEGRGCDYIVLWLDCDKEGENICFEVLDAVLPVMNKAHGGEKTVFRARFSSITDTDICNAMACLGEPDHNEALSVDARQELDLRIGCAFTRFQTKYFQGKYGDLDSSLISFGPCQTPTLGFCVERHDKIQSFKPETYWVLQAKVNTDKDRSLLLDWDRVRVFDREIAQMFLNMTKLHQLPTDRDHHYPENFDLKGSLRQQANHPYWADTVKRLLAEGINRPRKGHDAGDHPPITPMKSATEAELGGDAWRLYEYITRHFIATVSHDCKYLQSTISFRIGPELFTCSGKTVLSPGFTEVMPWQSVPLEESLPTCQRGDAFPVGEVKMLEKQTNPPDYLTEAELITLMEKHGIGTDASIPVHINNICQRNYVTVESGRRLKPTNLGIVLVHGYYKIDAELVLPTIRSAVEKQLNLIAQGKADYRQVLGHTLDVFKRKFHYFVDSIAGMDELMEVSFSPLAATGKPLSRCGKCHRFMKYIQAKPSRLHCSHCDETYTLPQNGTIKLYKELRCPLDDFELVLWSSGSRGKSYPLCPYCYNHPPFRDMKKGMGCNECTHPSCQHSLSMLGIGQCVECESGVLVLDPTSGPKWKVACNKCNVVAHCFENAHRVRVSADTCSVCEAALLDVDFNKAKSPLPGDETQHMGCVFCDPVFQELVELKHAASCHPMHRGGPGRRQGRGRGRARRPPGKPNPRRPKDKMSALAAYFV

SEQ ID NO: 888491 - protein, 238 aa, Homo sapiens [sequence omitted]

SEQ ID NO: 888492 - protein, 152 aa, Homo sapiens
THRDFRTAFSARVEQEPETHAPCLAVCHRFCMTDYILCIMRGVGVGAKSVAPVTLTPPAWHCLQAKPSRLHCSHCDETYTLPQNGTIKLYKELRCPLDDFELVLWSSGSRGKSYPLCPYCYNHPPFRDMKKGECSHSLLSTGSCSLFSVPTP

SEQ ID NO: 888493 - protein, 890 aa, Homo sapiens
MKTVLMVAEKPSLAQSIAKILSRGSLSSHKGLNGACSVHEYTGTFAGQPVRFKMTSVCGHVMTLDFLGKYNKWDKVDPAELFSQAPTEKKEANPKLNMVKFLQVEGRGCDYIVLWLDCDKEGENICFEKMKPLIPSKEAAWPGSGGDPSPTALAFLVLDAVLPVMNKAHGGEKTVFRARFSSITDTDICNAMACLGEPDHNEALSVDARQELDLRIGCAFTRFQTKYFQGKYGDLDSSLISFGPCQTPTLGFCVERHDKIQSFKPETYWVLQAKVNTDKDRSLLLDWDRVRVFDREIAQMFLNMTKLEKEAQVEATSRKEKAKQRPLALNTVEMLRVASSSLGMGPQHAMQTAERLYTQGYISYPRTETTHYPENFDLKGSLRQQANHPYWADTVKRLLAEGINRPRKGHDAGDHPPITPMKSATEAELGGDAWRLYEYITRHFIATVSHDCKYLQSTISFRIGPELFTCSGKTVLSPGFTEVMPWQSVPLEESLPTCQRGDAFPVGEVKMLEKQTNPPDYLTEAELITLMEKHGIGTDASIPVHINNICQRNYVTVESGRRLKPTNLGIVLVHGYYKIDAELVLPTIRSAVEKQLNLIAQGKADYRQVLGHTLDVFKRKFHYFVDSIAGMDELMEVSFSPLAATGKPLSRCGKCHRFMKYIQAKPSRLHCSHCDETYTLPQNGTIKLYKELRCPLDDFELVLWSSGSRGKSYPLCPYCYNHPPFRDMKKGMGCNECTHPSCQHSLSMLGIGQCVECESGVLVLDPTSGPKWKVACNKCNVVAHCFENAHRVRVSADTCSVCEAALLDVDFNKAKSPLPGDETQHMGCVFCDPVFQELVELKHAASCHPMHRGGPGRRQGRGRGRARRPPGKPNPRRPKDKMSALAAYFV

SEQ ID NO: 888494 - protein, 690 aa, Homo sapiens
MKTVLMVAEKPSLAQSIAKILSRGSLSSHKGLNGACSVHEYTGTFAGQPVRFKMTSVCGHVMTLDFLGKYNKWDKVDPAELFSQAPTEKKEANPKLNMVKFLQVEGRGCDYIVLWLDCDKEGENICFEVNTDKDRSLLLDWDRVRVFDREIAQMFLNMTKLHQLPTDRDHHYPENFDLKGSLRQQANHPYWADTVKRLLAEGINRPRKGHDAGDHPPITPMKSATEAELGGDAWRLYEYITRHFIATVSHDCKYLQSTISFRIGPELFTCSGKTVLSPGFTEVMPWQSVPLEESLPTCQRGDAFPVGEVKMLEKQTNPPDYLTEAELITLMEKHGIGTDASIPVHINNICQRNYVTVESGRRLKPTNLGIVLVHGYYKIDAELVLPTIRSAVEKQLNLIAQGKADYRQVLGHTLDVFKRKFHYFVDSIAGMDELMEVSFSPLAATGKPLSRCGKCHRFMKYIQAKPSRLHCSHCDETYTLPQNGTIKLYKELRCPLDDFELVLWSSGSRGKSYPLCPYCYNHPPFRDMKKGMGCNECTHPSCQHSLSMLGIGQCVECESGVLVLDPTSGPKWKVACNKCNVVAHCFENAHRVRVSADTCSVCEAALLDVDFNKAKSPLPGDETQHMGCVFCDPVFQELVELKHAASCHPMHRGGPGRRQGRGRGRARRPPGKPNPRRPKDKMSALAAYFV

SEQ ID NO: 888495 - protein, 622 aa, Homo sapiens
MKTVLMVAEKPSLAQSIAKILSRGSLSSHKGLNGACSVHEYTGTFAGQPVRFKMTSVCGHVMTLDFLGKYNKWDKVDPAELFSQAPTEKKEANPKLNMVKFLQVEGRGCDYIVLWLDCDKEGENICFEKMKPLIPSKEAAWPGSGGDPESHCTAFLVLDAVLPVMNKAHGGEKTVFRARFSSITDTDICNAMACLGEPDHNEALSVDARQELDLRIGCAFTRFQTKYFQGKYGDLDSSLISFGPCQTPTLGFCVERHDKIQSFKPETYWVLQAKVNTDKDRSLLLDWDRVRVFDREIAQMFLNMTKLEKEAQVEATSRKEKAKQRPLALNTVEMLRVASSSLGMGPQHAMQTAERLYTQGYISYPRTETTHYPENFDLKGSLRQQANHPYWADTVKRLLAEGINRPRKGHDAGDHPPITPMKSATEAELGGDAWRLYEYITRHFIATVSHDCKYLQSTISFRIGPELFTCSGKTVLSPGFTEVMPWQSVPLEESLPTCQRGDAFPVGEVKMLEKQTNPPDYLTEAELITLMEKHGIGTDASIPVHINNICQRNYVTVESGRRLKPTNLGIVLVHGYYKIDAELVLPTIRSAVEKQLNLIAQGKADYRQVLGHTLDVFKRKFH

SEQ ID NO: 888496 - protein, 238 aa, Homo sapiens [sequence omitted]

SEQ ID NO: 888497 - protein, 1455 aa, Homo sapiens
MAGRPLRIGDQLVLEEDYDETYIPSEQEILEFAREIGIDPIKEPELMWLAREGIVAPLPGEWKPCQDITGDIYYFNFANGQSMWDHPCDEHYRSLVIQERAKLSTSGAIKKKKKKKEKKDKKDRDPPKSSLALGSSLAPVHVPLGGLAPLRGLVDTPPSALRGSQSVSLGSSVESGRQLGELMLPSQGLKTSAYTKGLLGSIYEDKTALSLLGLGEETNEEDEEESDNQSVHSSSEPLRNLHLDIGALGGDFEYEESLRTSQPEEKKDVSLDSDAAGPPTPCKPSSPGADSSLSSAVGKGRQGSGARPGLPEKEENEKSEPKICRNLVTPKADPTGSEPAKASEKEAPEDTVDAGEEGSRREEAAKEPKKKASALEEGSSDASQELEISEHMKEPQLSDSIASDPKSFHGLDFGFRSRISEHLLDVDVLSPVLGGACRQAQQPLGIEDKDDSQSSQDELQSKQSKGLEERYHRLSPPLPHEERAQSPPRSLATEEEPPQGPEGQPEWKEAEELGEDSAASLSLQLSLQREQAPSPPAACEKGKEQHSQAEELGPGQEEAEDPEEKVAVSPTPPVSPEVRSTEPVAPPEQLSEAALKAMEEAVAQVLEQDQRHLLESKQEKMQQLREKLCQEEEEEILRLHQQKEQSLSSLRERLQKAIEEEEARMREEESQRLSWLRAQVQSSTQADEDQIRAEQEASLQKLREELESQQKAERASLEQKNRQMLEQLKEEIEASEKSEQAALNAAKEKALQQLREQLEGERKEAVATLEKEHSAELERLCSSLEAKHREVVSSLQKKIQEAQQKEEAQLQKCLGQVEHRVHQKSYHVAGYEHELSSLLREKRQEVEGEHERRLDKMKEEHQQVMAKAREQYEAEERKQRAELLGHLTGELERLQRAHERELETVRQEQHKRLEDLRRRHREQERKLQDLELDLETRAKDVKARLALLEVQEETARREKQQLLDVQRQVALKSEEATATHQQLEEAQKEHTHLLQSNQQLREILDELQARKLKLESQVDLLQAQSQQLQKHFSSLEAEAQKKQHLLREVTVEENNASPHFEPDLHIEDLRKSLGTNQTKEVSSSLSQSKEDLYLDSLSSHNVWHLLSAEGVALRSAKEFLVQQTRSMRRRQTALKAAQQHWRHELASAQEVAKDPPGIKALEDMRKNLEKETRHLDEMKSAMRKGHNLLKKKEEKLNQLESSLWEEASDEGTLGGSPTKKAVTFDLSDMDSLSSESSESFSPPHLDSTPSLTSRKIHGLSHSLRQISSQLSSVLSILDSLNPQSPPPLLASMPAQLPPRDPKSTPTPTYYGSLARFSALSSATPTSTQWAWDSGQGPRLPSSVAQTVDDFLLEKWRKYFPSGIPLLSNSPTPLESRLGYMSASEQLRLLQHSHSQVPEAGSTTFQGIIEANRRWLERVKNDPRLPLFSSTPKPKATLSLLQLGLDEHNRVKVYRF

SEQ ID NO: 888498 - protein, 1314 aa, Homo sapiens
EVSLLTRLVSNSRSQAVLPSWSPKVLELQESLRTSQPEEKKDVSLDSDAAGPPTPCKPSSPGADSSLSSAVGKGRQGSGARPGLPEKEENEKSEPKICRNLVTPKADPTGSEPAKASEKEAPEDTVDAGEEGSRREEAAKEPKKKASALEEGSSDASQELEISEHMKEPQLSDSIASDPKSFHGLDFGFRSRISEHLLDVDVLSPVLGGACRQAQQPLGIEDKDDSQSSQDELQSKQSKGLEERYHRLSPPLPHEERAQSPPRSLATEEEPPQGPEGQPEWKEAEELGEDSAASLSLQLSLQREQAPSPPAACEKGKEQHSQAEELGPGQEEAEDPEEKVAVSPTPPVSPEVRSTEPVAPPEQLSEAALKAMEEAVAQVLEQDQRHLLESKQEKMQQLREKLCQEEEEEILRLHQQKEQSLSSLRERLQKAIEEEEARMREEESQRLSWLRAQVQSSTQADEDQIRAEQEASLQKLREELESQQKAERASLEQKNRQMLEQLKEEIEASEKSEQAALNAAKEKALQQLREQLEGERKEAVATLEKEHSAELERLCSSLEAKHREVVSSLQKKIQEAQQKEEAQLQKCLGQVEHRVHQKSYHVAGYEHELSSLLREKRQEVEGEHERRLDKMKEEHQQVMAKAREQYEAEERKQRAELLGHLTGELERLQRAHERELETVRQEQHKRLEDLRRRHREQERKLQDLELDLETRAKDVKARLALLEVQEETARREKQQLLDVQRQVALKSEEATATHQQLEEAQKEHTHLLQSNQQLREILDELQARKLKLESQVDLLQAQSQQLQKHFSSLEAEAQKKQHLLREVTVEENNASPHFEPDLHIEDLRKSLGTNQTKEVSSSLSQSKEDLYLDSLSSHNVWHLLSAEGVALRSAKEFLVQQTRSMRRRQTALKAAQQHWRHELASAQEVAKDPPGIKALEDMRKNLEKETRHLDEMKSAMRKGHNLLKKKEEKLNQLESSLWEEAFGTYAEPCLPPTLLCGSLCDLLRPGYLVELWAPEESTHQVLSSHTSQGRQPTYHLEFVATKLLGEQMEMAIFHGFAASDEGTLGGSPTKKAVTFDLSDMDSLSSESSESFSPPHREWWRQQRIDSTPSLTSRKIHGLSHSLRQISSQLSSVLSILDSLNPQSPPPLLASMPAQLPPRDPKSTPTPTYYGSLARFSALSSATPTSTQWAWDSGQGPRLPSSVAQTVDDFLLEKWRKYFPSGIPLLSNSPTPLESRLGYMSASEQLRLLQHSHSQVPEAGSTTFQGIIEANRRWLERVKNDPRLPLFSSTPKPKATLSLLQLGLDEHNRVKVYRF

SEQ ID NO: 888499 - protein, 596 aa, Homo sapiens
RVRQYEAEERKQRAELLGHLTGELERLQRAHERELETVRQEQHKRLEDLRRRHREQERKLQDLELDLETRAKDVKARLALLEVQEETARREKQQLLDVQRQVALKSEEATATHQQLEEAQKEHTHLLQSNQQLREILDELQARKLKLESQVDLLQAQSQQLQKHFSSLEAEAQKKQHLLREVTVEENNASPHFEPDLHIEDLRKSLGTNQTKEVSSSLSQSKEDLYLDSLSSHNVWHLLSAEGVALRSAKEFLVQQTRSMRRRQTALKAAQQHWRHELASAQEVAKDPPGIKALEDMRKNLEKETRHLDEMKSAMRKGHNLLKKKEEKLNQLESSLWEEASDEGTLGGSPTKKAVTFDLSDMDSLSSESSESFSPPHREWWRQQRIDSTPSLTSRKIHGLSHSLRQISSQLSSVLSILDSLNPQSPPPLLASMPAQLPPRDPKSTPTPTYYGSLARFSALSSATPTSTQWAWDSGQGPRLPSSVAQTVDDFLLEKWRKYFPSGIPLLSNSPTPLESRLGYMSASEQLRLLQHSHSQVPEAGSTTFQGIIEANRRWLERVKNDPRLPLFSSTPKPKATLSLLQLGLDEHNRVKVYRF

SEQ ID NO: 888500 - protein, 1414 aa, Homo sapiens
MAGRPLRIGDQLVLEEDYDETYIPSEQEILEFAREIGIDPIKEPELMWLAREGIVAPLPGEWKPCQDITGDIYYFNFANGQSMWDHPCDEHYRSLVIQERAKLSTSGAIKKKKKKKEKKDKKDRDPPKSSLALGSSLAPVHVPLGGLAPLRGLVDTPPSALRGSQSVSLGSSVESGRQLGELMLPSQGLKTSAYTKGLLGSIYEDKTALSLLGLGEETNEEDEEESDNQSVHSSSEPLRNLHLDIGALGGDFEYEESLRTSQPEEKKDVSLDSDAAGPPTPCKPSSPGADSSLSSAVGKGRQGSGARPGLPEKEENEKSEPKICRNLVTPKADPTGSEPAKASEKEAPEDTVDAGEEGSRREEAAKEPKKKASALEEGSSDASQELEISEHMKEPQLSDSIASDPKSFHGLDFGFRSRISEHLLDVDVLSPVLGGACRQAQQPLGIEDKDDSQSSQDELQSKQSKGLEERYHRLSPPLPHEERAQSPPRSLATEEEPPQGPEGQPEWKEAEELGEDSAASLSLQLSLQRRSTEPVAPPEQLSEAALKAMEEAVAQVLEQDQRHLLESKQEKMQQLREKLCQEEEEEILRLHQQKEQSLSSLRERLQKAIEEEEARMREEESQRLSWLRAQVQSSTQADEDQIRAEQEASLQKLREELESQQKAERASLEQKNRQMLEQLKEEIEASEKSEQAALNAAKEKALQQLREQLEGERKEAVATLEKEHSAELERLCSSLEAKHREVVSSLQKKIQEAQQKEEAQLQKCLGQVEHRVHQKSYHVAGYEHELSSLLREKRQEVEGEHERRLDKMKEEHQQVMAKAREQYEAEERKQRAELLGHLTGELERLQRAHERELETVRQEQHKRLEDLRRRHREQERKLQDLELDLETRAKDVKARLALLEVQEETARREKQQLLDVQRQVALKSEEATATHQQLEEAQKEHTHLLQSNQQLREILDELQARKLKLESQVDLLQAQSQQLQKHFSSLEAEAQKKQHLLREVTVEENNASPHFEPDLHIEDLRKSLGTNQTKEVSSSLSQSKEDLYLDSLSSHNVWHLLSAEGVALRSAKEFLVQQTRSMRRRQTALKAAQQHWRHELASAQEVAKDPPGIKALEDMRKNLEKETRHLDEMKSAMRKGHNLLKKKEEKLNQLESSLWEEASDEGTLGGSPTKKAVTFDLSDMDSLSSESSESFSPPHREWWRQQRIDSTPSLTSRKIHGLSHSLRQISSQLSSVLSILDSLNPQSPPPLLASMPAQLPPRDPKSTPTPTYYGSLARFSALSSATPTSTQWAWDSGQGPRLPSSVAQTVDDFLLEKWRKYFPSGIPLLSNSPTPLESRLGYMSASEQLRLLQHSHSQVPEAGSTTFQGIIEANRRWLERVKNDPRLPLFSSTPKPKATLSLLQLGLDEHNRVKVYRF

SEQ ID NO: 888501 - protein, 1414 aa, Homo sapiens; identical to SEQ ID NO: 888500

SEQ ID NO: 888502 - protein, 1414 aa, Homo sapiens; identical to SEQ ID NO: 888500

SEQ ID NO: 888503 - protein, 923 aa, Homo sapiens
MSQFKRQRINPLPGGRNFSGTASTSLLGPPPGLLTPPVATELSQNARHLQGGEKQRVFTGIVTSLHDYFGVVDEEVFFQLSVVKGRLPQLGEKVLVKAAYNPGQAVPWNAVKVQTLSNQPLLKSPAPPLLHVAALGQKQGILGAQPQLIFQPHRIPPLFPQKPLSLFQTSHTLHLSHLNRFPARGPHGRLDQGRSDDYDSKKRKQRAGGEPWGAKKPRHDLPPYRVHLTPYTVDSPICDFLELQRRYRSLLVPSDFLSVHLSWLSAFPLSQPFSLHHPSRIQVSSEKEAAPDAGAEPITADSDPAYSSKVLLLSSPGLEELYRCCMLFVDDMAEPRETPEHPLKQIKFLLGRKEEEAVLVGGEWSPSLDGLDPQADPQVLVRTAIRCAQAQTGIDLSGCTKWWRFAEFQYLQPGPPRRLQTVVVYLPDVWTIMPTLEEWEALCQQKAAEAAPPTQEAQGETEPTEQAPDALEQAADTSRRNAETPEATTQQETDTDLPEAPPPPLEPAVIARPGCVNLSLHGIVEDRRPKERISFEVMVLAELFLEMLQRDFGYRVYKMLLSLPEKVVSPPEPEKEEAAKEEATKEEEAIKEEVVKEPKDEAQNEGPATESEAPLKEDGLLPKPLSSGGEEEEKPRGEASEDLCEMALDPELLLLRDDGEEEFAGAKLEDSEVRSVASNQSEMEFSSLQDMPKELDPSAVLPLDCLLAFVFFDANWCGYLHRRDLERILLTLGIRLSAEQAKQLVSRVVTQNICQYRSLQYSRQEGLDGGLPEEVLFGNLDLLPPPGKSTKPGAAPTEHKALVSHNGSLINVGSLLQRAEQQDSGRLYLENKIHTLELKLEESHNRFSATEVTNKTLAAEMQELRVRLAEAEETARTAERQKSQLQRLLQELRRRLTPLQLEIQRVVEKADSWVEKEEPAPSN

SEQ ID NO: 888504 - protein, 882 aa, Homo sapiens
MSHCLLLLQGGEKQRVFTGIVTSLHDYFGVVDEEVFFQLSVVKGRLPQLGEKVLVKAAYNPGQAVPWNAVKVQTLSNQPLLKSPAPPLLHVAALGQKQGILGAQPQLIFQPHRIPPLFPQKPLSLFQTSHTLHLSHLNRFPARGPHGRLDQGRSDDYDSKKRKQRAGGEPWGAKKPRHDLPPYRVHLTPYTVDSPICDFLELQRRYRSLLVPSDFLSVHLSWLSAFPLSQPFSLHHPSRIQVSSEKEAAPDAGAEPITADSDPAYSSKVLLLSSPGLEELYRCCMLFVDDMAEPRETPEHPLKQIKFLLGRKEEEAVLVGGEWSPSLDGLDPQADPQVLVRTAIRCAQAQTGIDLSGCTKWWRFAEFQYLQPGPPRRLQTVVVYLPDVWTIMPTLEEWEALCQQKAAEAAPPTQEAQGETEPTEQAPDALEQAADTSRRNAETPEATTQQETDTDLPEAPPPPLEPAVIARPGCVNLSLHGIVEDRRPKERISFEVMVLAELFLEMLQRDFGYRVYKMLLSLPEKVVSPPEPEKEEAAKEEATKEEEAIKEEVVKEPKDEAQNEGPATESEAPLKEDGLLPKPLSSGGEEEEKPRGEASEDLCEMALDPELLLLRDDGEEEFAGAKLEDSEVRSVASNQSEMEFSSLQDMPKELDPSAVLPLDCLLAFVFFDANWCGYLHRRDLERILLTLGIRLSAEQAKQLVSRVVTQNICQYRSLQYSRQEGLDGGLPEEVLFGNLDLLPPPGKSTKPGAAPTEHKALVSHNGSLINVGSLLQRAEQQDSGRLYLENKIHTLELKLEESHNRFSATEVTNKTLAAEMQELRVRLAEAEETARTAERQKSQLQRLLQELRRRLTPLQLEIQRVVEKADSWVEKEEPAPSN

SEQ ID NO: 888505 - protein, 923 aa, Homo sapiens
MSQFKRQRINPLPGGRNFSGTASTSLLGPPPGLLTPPVATELSQNARHLQGGEKQRVFTGIVTSLHDYFGVVDEEVFFQLSVVKGRLPQLGEKVLVKAAYNPGQAVPWNAVKVQTLSNQPLLKSPAPPLLHVAALGQKQGILGAQPQLIFQPHRIPPLFPQKPLSLFQTSHTLHLSHLNRFPARGPHGRLDQGRSDDYDSKKRKQRAGGEPWGAKKPRHDLPPYRVHLTPYTVDSPICDFLELQRRYRSLLVPSDFLSVHLSWLSAFPLSQPFSLHHPSRIQVSSEKEAAPDAGAEPITADSDPAYSSKVLLLSSPGLEELYRCCMLFVDDMAEPRETPEHPLKQIKFLLGRKEEEAVLVGGEWSPSLDGLDPQADPQVLVRTAIRCAQAQTGIDLSGCTKWWRFAEFQYLQPGPPRRLQTVVVYLPDVWTIMPTLEEWEALCQQKAAEAAPPTQEAQGETEPTEQAPDALEQAADTSRRNAETPEATTQQETDTDLPEAPPPPLEPAVIARPGCVNLSLHGIVEDRRPKERISFEVMVLAELFLEMLQRDFGYRVYKMLLSLPEKVVSPPEPEKEEAAKEEATKEEEAIKEEVVKEPKDEAQNEGPATESEAPLKEDGLLPKPLSSGGEEEEKPRGEASEDLCEMALDPELLLLRDDGEEEFAGAKLEDSEVRSVASNQSEMEFSSLQDMPKELDPSAVLPLDCLLAFVFFDANWCGYLHRRDLERILLTLGIRLSAEQAKQLVSRVVTQNICQYRSLQYSRQEGLDGGLPEEVLFGNLDLLPPPGKSTKPGAAPTEHKALVSHNGSLINVGSLLQRAEQQDSGRLYLENKIHTLELKLEESHNRFSATEVTNKTLAAEMQELRVRLAEAEETARTAERQKSQLQRLLQELRRRLTPLQLEIQRVVEKVRWGWTRRQHSSFP

SEQ ID NO: 888506 - protein, 853 aa, Homo sapiens
MTDHVAVIYTAGKQPISLIWVTLVLVKAAYNPGQAVPWNAVKVQTLSNQPLLKSPAPPLLHVAALGQKQGILGAQPQLIFQPHRIPPLFPQKPLSLFQTSHTLHLSHLNRFPARGPHGRLDQGRSDDYDSKKRKQRAGGEPWGAKKPRHDLPPYRVHLTPYTVDSPICDFLELQRRYRSLLVPSDFLSVHLSWLSAFPLSQPFSLHHPSRIQVSSEKEAAPDAGAEPITADSDPAYSSKVLLLSSPGLEELYRCCMLFVDDMAEPRETPEHPLKQIKFLLGRKEEEAVLVGGEWSPSLDGLDPQADPQVLVRTAIRCAQAQTGIDLSGCTKWWRFAEFQYLQPGPPRRLQTVVVYLPDVWTIMPTLEEWEALCQQKAAEAAPPTQEAQGETEPTEQAPDALEQAADTSRRNAETPEATTQQETDTDLPEAPPPPLEPAVIARPGCVNLSLHGIVEDRRPKERISFEVMVLAELFLEMLQRDFGYRVYKMLLSLPEKVVSPPEPEKEEAAKEEATKEEEAIKEEVVKEPKDEAQNEGPATESEAPLKEDGLLPKPLSSGGEEEEKPRGEASEDLCEMALDPELLLLRDDGEEEFAGAKLEDSEVRSVASNQSEMEFSSLQDMPKELDPSAVLPLDCLLAFVFFDANWCGYLHRRDLERILLTLGIRLSAEQAKQLVSRVVTQNICQYRSLQYSRQEGLDGGLPEEVLFGNLDLLPPPGKSTKPGAAPTEHKALVSHNGSLINVGSLLQRAEQQDSGRLYLENKIHTLELKLEESHNRFSATEVTNKTLAAEMQELRVRLAEAEETARTAERQKSQLQRLLQELRRRLTPLQLEIQRVVEKADSWVEKEEPAPSN

SEQ ID NO: 888507 - protein, 923 aa, Homo sapiens; identical to SEQ ID NO: 888503

SEQ ID NO: 888508 - protein, 241 aa, Homo sapiens
MEFSSLQDMPKELDPSAVLPLDCLLAFVFFDANWCGYLHRRDLERILLTLGIRLSAEQAKQLVSRVVTQNICQYRSLQYSRQEGLDGGLPEEVLFGNLDLLPPPGKSTKPGAAPTEHKALVSHNGSLINVGSLLQRAEQQDSGRLYLENKIHTLELKLEESHNRFSATEVTNKTLAAEMQELRVRLAEAEETARTAERQKSQLQRLLQELRRRLTPLQLEIQRVVEKADSWVEKEEPAPSN

SEQ ID NO: 888509 - protein, 254 aa, Homo sapiens
MLVPARGRDNQSEMEFSSLQDIPKELDPSAVLPLDCLLAFVFFDANWCGYLHRRDLERILLTLGIRLSAEQAKQLVSRVVTQNICQYRSLQYSRQEGLDGGLPEEVLFGNLDLLPPPGKSTKPGAAPTEHKALVSHNGSLINVGSLLQRAEQQDSGRLYLENKIHTLELKLEESHNRFSATEVTNKTLAAEMQELRVRLAEAEETARTAERQKSQLQRLLQELRRRLTPLQLEIQRVVEKADSWVEKEEPAPSN

SEQ ID NO: 888510 - protein, 686 aa, Homo sapiens
MSQFKRQRINPLPGGRNFSGTASTSLLGPPPGLLTPPVATELSQNARHLQGGEKQRVFTGIVTSLHDYFGVVDEEVFFQLSVVKGRLPQLGEKVLVKAAYNPGQAVPWNAVKVQTLSNQPLLKSPAPPLLHVAALGQKQGILGAQPQLIFQPHRIPPLFPQKPLSLFQTSHTLHLSHLNRFPARGPHGRLDQGRSDDYDSKKRKQRAGGEPWGAKKPRHDLPPYRVHLTPYTVDSPICDFLELQRRYRSLLVPSDFLSVHLSWLSAFPLSQPFSLHHPSRIQVSSEKEAAPDAGAEPITADSDPAYSSKVLLLSSPGLEELYRCCMLFVDDMAEPRETPEHPLKQIKFLLGRKEEEAVLVGGEWSPSLDGLDPQADPQVLVRTAIRCAQAQTGIDLSGCTKWWRFAEFQYLQPGPPRRLQTVVVYLPDVWTIMPTLEEWEALCQQKAAEAAPPTQEAQGETEPTEQAPDALEQAADTSRRNAETPEATTQQETDTDLPEAPPPPLEPAVIARPGCVNLSLHGIVEDRRPKERISFEVMVLAELFLEMLQRDFGYRVYKMLLSLPEKVVSPPEPEKEEAAKEEATKEEEAIKEEVVKEPKDEAQNEGPATESEAPLKEDGLLPKPLSSGGEEEEKPRGEASEDLCEMALDPELLLLRDDGEEEFAGAKLEDSEVRSVASNQSEMDPC

SEQ ID NO: 888511 - protein, 923 aa, Homo sapiens; identical to SEQ ID NO: 888503

SEQ ID NO: 888512 - protein, 923 aa, Homo sapiens; identical to SEQ ID NO: 888503

SEQ ID NO: 888513 - protein, 923 aa, Homo sapiens; identical to SEQ ID NO: 888503

SEQ ID NO: 888514 - protein, 124 aa, Homo sapiens
MSQFKRQRINPLPGGRNFSGTASTSLLGPPPGLLTPPVATELSQNARHLQGGEKQRVFTGIVTSLHDYFGVVDEEVFFQLSVVKGRLPQLGEKSTSFPWLLCSECGIGSGPAFSPVTHNSCLFP

SEQ ID NO: 888515 - protein, 704 aa, Homo sapiens [sequence omitted]

SEQ ID NO: 888516 - protein, 706 aa, Homo sapiens
MSQFKRQRINPLPGGRNFSGTASTSLLGPPPGLLTPPVATELSQNARHLQGGEKQRVFTGIVTSLHDYFGVVDEEVFFQLSVVKGRLPQLGEKVLVKAAYNPGQAVPWNAVKVQTLSNQPLLKSPAPPLLHVAALGQKQGILGAQPQLIFQPHRIPPLFPQKPLSLFQTSHTLHLSHLNRFPARGPHGRLDQGRSDDYDSKKRKQRAGGEPWGAKKPRHDLPPYRVHLTPYTVDSPICDFLELQRRYRSLLVPSDFLSVHLSWLSAFPLSQPFSLHHPSRIQVSSEKEAAPDAGAEPITADSDPAYSSKVLLLSSPGLEELYRCCMLFVDDMAEPRETPEHPLKQIKFLLGRKEEEAVLVGGEWSPSLDGLDPQADPQVLVRTAIRCAQAQTGIDLSGCTKWWRFAEFQYLQPGPPRRLQTVVVYLPDVWTIMPTLEEWEALCQQKAAEAAPPTQEAQGETEPTEQAPDALEQAADTSRRNAETPEATTQQETDTDLPEAPPPPLEPAVIARPGCVNLSLHGIVEDRRPKERISFEVMVLAELFLEMLQRDFGYRVYKMLLSLPEKVVSPPEPEKEEAAKEEATKEEEAIKEEVVKEPKDEAQNEGPATESEAPLKEDGLLPKPLSSGGEEEEKPRGEASEDLCEMALDPELLLLRDDGEEEFGMLSGERGACRLGMWLSTCGQAGFHFCTVELGGPCSPFILAFL

SEQ ID NO: 888517 - protein, 641 aa, Homo sapiens
MSQFKRQRINPLPGGRNFSGTASTSLLGPPPGLLTPPVATELSQNARHLQGGEKQRVFTGIVTSLHDYFGVVDEEVFFQLSVVKGRLPQLGEKVLVKAAYNPGQAVPWNAVKVQTLSNQPLLKSPAPPLLHVAALGQKQGILGAQPQLIFQPHRIPPLFPQKPLSLFQTSHTLHLSHLNRFPARGPHGRLDQGRSDDYDSKKRKQRAGGEPWGAKKPRHDLPPYRVHLTPYTVDSPICDFLELQRRYRSLLVPSDFLSVHLSWLSAFPLSQPFSLHHPSRIQVSSEKEAAPDAGAEPITADSDPAYSSKVLLLSSPGLEELYRCCMLFVDDMAEPRETPEHPLKQIKFLLGRKEEEAVLVGGEWSPSLDGLDPQADPQVLVRTAIRCAQAQTGIDLSGCTKWWRFAEFQYLQPGPPRRLQTVVVYLPDVWTIMPTLEEWEALCQQKAAEAAPPTQEAQGETEPTEQAPDALEQAADTSRRNAETPEATTQQETDTDLPEAPPPPLEPAVIARPGCVNLSLHGIVEDRRPKERISFEVMVLAELFLEMLQRDFGYRVYKMLLSLPEKVVSPPEPEKEEAAKEEATKEEEAIKEEVVKEPKDEAQNEGPATESEAPLVSTLPPRAVIVLIQCSLHSASTFTCT

SEQ ID NO: 888518 - protein, 377 aa, Homo sapiens [sequence omitted]

SEQ ID NO: 888519 - protein, 311 aa, Homo sapiens [sequence omitted]

SEQ ID NO: 888520 - protein, 215 aa, Homo sapiens
GGYRWPNPGTQRVSFQLLSQETEPTEQAPDALEQAADTSRRNAETPEATTQQETDTDLPEAPPPPLEPAVIARPGCVNLSLHGIVEDRRPKERISFEAGVKSLGEAVGWDFVGLKQSFFLMLMDPPTSPVMVLAELFLEMLQRDFGYRVYKMLLSLPEKVVSPPEPEKEEAAKEEATKEEEAIKEEVVKEPKDEAQNEGPATESEAPLVSTLPPR

SEQ ID NO: 888521 - protein, 85 aa, Homo sapiens
MCFLQAKQLVSRVVTQNICQYRSLQYSRQEGLDGGLPEEVLFGMFWGPAAFLGQRAGQAALSGDSILNSFSRFSLGNLDLLPPPG

SEQ ID NO: 888522 - protein, 923 aa, Homo sapiens; identical to SEQ ID NO: 888503

SEQ ID NO: 888523 - protein, 923 aa, Homo sapiens; identical to SEQ ID NO: 888503

SEQ ID NO: 888524 - protein, 598 aa, Homo sapiens
MLFVDDMAEPRETPEHPLKQIKFLLGRKEEEAVLVGGEWSPSLDGLDPQADPQVLVRTAIRCAQAQTGIDLSGCTKWWRFAEFQYLQPGPPRRLQTVVVYLPDVWTIMPTLEEWEALCQQKAAEAAPPTQEAQGETEPTEQAPDALEQAADTSRRNAETPEATTQQETDTDLPEAPPPPLEPAVIARPGCVNLSLHGIVEDRRPKERISFEVMVLAELFLEMLQRDFGYRVYKMLLSLPEKVVSPPEPEKEEAAKEEATKEEEAIKEEVVKEPKDEAQNEGPATESEAPLKEDGLLPKPLSSGGEEEEKPRGEASEDLCEMALDPELLLLRDDGEEEFAGAKLEDSEVRSVASNQSEMEFSSLQDMPKELDPSAVLPLDCLLAFVFFDANWCGYLHRRDLERILLTLGIRLSAEQAKQLVSRVVTQNICQYRSLQYSRQEGLDGGLPEEVLFGNLDLLPPPGKSTKPGAAPTEHKALVSHNGSLINVGSLLQRAEQQDSGRLYLENKIHTLELKLEESHNRFSATEVTNKTLAAEMQELRVRLAEAEETARTAERQKSQLQRLLQELRRRLTPLQLEIQRVVEKADSWVEKEEPAPSN

SEQ ID NO: 888525 - protein, 741 aa, Homo sapiens
MWFLTVGDGSTSSDDYDSKKRKQRAGGEPWGAKKPRHDLPPYRVHLTPYTVDSPICDFLELQRRYRSLLVPSDFLSVHLSWLSAFPLSQPFSLHHPSRIQVSSEKEAAPDAGAEPITADSDPAYSSKVLLLSSPGLEELYRCCMLFVDDMAEPRETPEHPLKQIKFLLGRKEEEAVLVGGEWSPSLDGLDPQADPQVLVRTAIRCAQAQTGIDLSGCTKWWRFAEFQYLQPGPPRRLQTVVVYLPDVWTIMPTLEEWEALCQQKAAEAAPPTQEAQGETEPTEQAPDALEQAADTSRRNAETPEATTQQETDTDLPEAPPPPLEPAVIARPGCVNLSLHGIVEDRRPKERISFEVMVLAELFLEMLQRDFGYRVYKMLLSLPEKVVSPPEPEKEEAAKEEATKEEEAIKEEVVKEPKDEAQNEGPATESEAPLKEDGLLPKPLSSGGEEEEKPRGEASEDLCEMALDPELLLLRDDGEEEFAGAKLEDSEVRSVASNQSEMEFSSLQDMPKELDPSAVLPLDCLLAFVFFDANWCGYLHRRDLERILLTLGIRLSAEQAKQLVSRVVTQNICQYRSLQYSRQEGLDGGLPEEVLFGNLDLLPPPGKSTKPGAAPTEHKALVSHNGSLINVGSLLQRAEQQDSGRLYLENKIHTLELKLEESHNRFSATEVTNKTLAAEMQELRVRLAEAEETARTAERQKSQLQRLLQELRRRLTPLQLEIQRVVEKADSWVEKEEPAPSN

SEQ ID NO: 888526 - protein, 386 aa, Homo sapiens [sequence omitted]

SEQ ID NO: 888527 - protein, 270 aa, Homo sapiens
MHHCMWPKPLDSGQAEILGDRATEGTICKSCSSLFSLQPKELDPSAVLPLDCLLAFVFFDANWCGYLHRRDLERILLTLGIRLSAEQAKQLVSRVVTQNICQYRSLQYSRQEGLDGGLPEEVLFGNLDLLPPPGKSTKPGAAPTEHKALVSHNGSLINVGSLLQRAEQQDSGRLYLENKIHTLELKLEESHNRFSATEVTNKTLAAEMQELRVRLAEAEETARTAERQKSQLQRLLQELRRRLTPLQLEIQRVVEKADSWVEKEEPAPSN

SEQ ID NO: 888528 - protein, 910 aa, Homo sapiens
MSQFKRQRINPLPGGRNFSGTASTSLLGPPPGLLTPPVATELSQNARHLQGGEKQRVFTGIVTSLHDYFGVVDEEVFFQLSVVKGRLPQLGEKVLVKAAYNPGQAVPWNAVKVQTLSNQPLLKSPAPPLLHVAALGQKQGILGAQPQLIFQPHRIPPLFPQKPLSLFQTSHTLHLSHLNRFPARGPHGRLDQGRSDDYDSKKRKQRAGGEPWGAKKPRHDLPPYRVHLTPYTVDSPICDFLELQRRYRSLLVPSDFLSVHLSWLSAFPLSQPFSLHHPSRIQVSSEKEAAPDAGAEPITADSDPAYSSKVLLLSSPGLEELYRCCMLFVDDMAEPRETPEHPLKQIKFLLGRKEEEAVLVGGEWSPSLDGLDPQADPQVLVRTAIRCAQAQTGIDLSGCTKWWRFAEFQYLQPGPPRRLQTVVVYLPDVWTIMPTLEEWEALCQQKAAEAAPPTQEAQGETEPTEQAPDALEQAADTSRRNAETPEATTQQETDTDLPEAPPPPLEPAVIARPGCVNLSLHGIVEDRRPKERISFEVMVLAELFLEMLQRDFGYRVYKMLLSLPEKVVSPPEPEKEEAAKEEATKEEEAIKEEVVKEPKDEAQNEGPATESEAPLKEDGLLPKPLSSGGEEEEKPRGEASEDLCEMALDPELLLLRDDGEEEFAGAKLEDSEVRSVASNQSEMEFSSLQDMPKELDPSAVLPLDCLLAFVFFDANWCGYLHRRDLERILLTLGIRLSAEQAKQLVSRVVTQNICQYRSLQYSRQEGLDGGLPEEVLFGNLDLLPPPGKSTKPGAAPTEHKALVSHNGSLINVGSLLQRAEQQDSGRLYLENKIHTLELKLEESHNRFSATEVTNKTLAAEMQELRVRLAEAEETARTAERQKSQLQRLLQELRRRLTPELNSAVVKGYTG

SEQ ID NO: 888529 - protein, 923 aa, Homo sapiens; identical to SEQ ID NO: 888503

SEQ ID NO: 888530 - protein, 706 aa, Homo sapiens; identical to SEQ ID NO: 888516

SEQ ID NO: 888531 - protein, 656 aa, Homo sapiens
MSQFKRQRINPLPGGRNFSGTASTSLLGPPPGLLTPPVATELSQNARHLQGGEKQRVFTGIVTSLHDYFGVVDEEVFFQLSVVKGRLPQLGEKVLVKAAYNPGQAVPWNAVKVQTLSNQPLLKSPAPPLLHVAALGQKQGILGAQPQLIFQPHRIPPLFPQKPLSLFQTSHTLHLSHLNRFPARGPHGRLDQGRSDDYDSKKRKQRAGGEPWGAKKPRHDLPPYRVHLTPYTVDSPICDFLELQRRYRSLLVPSDFLSVHLSWLSAFPLSQPFSLHHPSRIQVSSEKEAAPDAGAEPITADSDPAYSSKVLLLSSPGLEELYRCCMLFVDDMAEPRETPEHPLKQIKFLLGRKEEEAVLVGGEWSPSLDGLDPQADPQVLVRTAIRCAQAQTGIDLSGCTKWWRFAEFQYLQPGPPRRLQTVVVYLPDVWTIMPTLEEWEALCQQKAAEAAPPTQEAQGETEPTEQAPDALEQAADTSRRNAETPEATTQQETDTDLPEAPPPPLEPAVIARPGCVNLSLHGIVEDRRPKERISFEVMVLAELFLEMLQRDFGYRVYKMLLSLPEKVVSPPEPEKEEAAKEEATKEEEAIKEEVVKEPKDEAQNEGPATESEAPLVSTLPPRAVIVLTVTAHLYPGLCSERFLCPSSFPAPLLGMD

SEQ ID NO: 888532 - protein, 357 aa, Homo sapiens
MSQFKRQRINPLPGGRNFSGTASTSLLGPPPGLLTPPVATELSQNARHLQGGEKQRVFTGIVTSLHDYFGVVDEEVFFQLSVVKGRLPQLGEKVLVKAAYNPGQAVPWNAVKVQTLSNQPLLKSPAPPLLHVAALGQKQGILGAQPQLIFQPHRIPPLFPQKPLSLFQTSHTLHLSHLNRFPARGPHGRLDQGRSDDYDSKKRKQRAGGEPWGAKKPRHDLPPYRVHLTPYTVDSPICDFLELQRRYRSLLVPSDFLSVHLSWLSAFPLSQPFSLHHPSRIQVSSEKEAAPDAGAEPITADSDPAYSSKVLLLSSPGLEELYRCCMSTSFPWLLCSECGIGSGPAFSPVTHNSCLFP

SEQ ID NO: 888533 - protein, 178 aa, Homo sapiens
MSQFKRQRINPLPGGRNFSGTASTSLLGPPPGLLTPPVATELSQNARHLQGGEKQRVFTGIVTSLHDYFGVVDEEVFFQLSVVKGRLPQLGEKVLVKAAYNPGQAVPWNAVKVQTLSNQPLLKSPAPPLLHVAALGQKQGILGAQPQLIFQPHRIPPLFPQKLSLFQTSHGIRWYELI

SEQ ID NO: 888534 - protein, 100 aa, Homo sapiens
SADWKLKPLPVNVVSAVELSLKKLVPPFAMCRWRFAEFQYLQPGPPRRLQTVVVYLPDVWTIMPTLEEWEALCQQKAAEAAPPTQEAQGVRLCLSQQRGI

SEQ ID NO: 888535 - protein, 886 aa, Homo sapiens
MSDEKNLGVSQKLVSPSRSTSSCSSKQGSRQDSWEVVEGLRGEMNYTQEPPVQKGFLLKKRKWPLKGWHKRFFYLDKGILKYAKSQTDIEREKLHGCIDVGLSVMSVKKSSKCIDLDTEEHIYHLKVKSEEVFDEWVSKLRHHRMYRQNEIAMFPHEVNHFFSGSTITDSSSGVFDSISSRKRSSISKQNLFQTGSNVSFSCGGETRVPLWLQSSEDMEKCSKDLAHCHAYLVEMSQLLQSMDVLHRTYSAPAINAIQGGSFESPKKEKRSHRRWRSRAIGKDAKGTLQVPKPFSGPVRLHSSNPNLSTLDFGEEKNYSDGSETSSEFSKMQEDLCHIAHKVYFTLRSAFNIMSAEREKLKQLMEQDASSSPSAQVIGLKNALSSALAQNTDLKERLRRIHAESLLLDSPAVAKSGDNLAEENSRDENRALVHQLSNESRLSITDSLSEFFDAQEVLLSPSSSENEISDDDSYVSDISDNLSLDNLSNDLDNERQTLGPVLDSGREAKSRRRTCLPAPCPSSSNISLWNILRNNIGKDLSKVAMPVELNEPLNTLQRLCEELEYSELLDKAAQIPSPLERMVYVAAFAISAYASSYYRAGSKPFNPVLGETYECIREDKGFQFFSEQVSHHPPISACHAESRNFVFWQDVRWKNKFWGKSMEIVPIGTTHVTLPVFGDHFEWNKVTSCIHNILSGQRWIEHYGEIVIKNLHDDSCYCKVNFIKAKYWSTNAHEIEGTVFDRSGKAVHRLFGKWHESIYCGGGSSSACVWRANPMPKGYEQYYSFTQFALELNEMDPSSKSLLPPTDTRFRPDQRFLEEGNLEEAEIQKQRIEQLQRERRRVLEENHVEHQPRFFRKSDDDSWVSNGTYLELRKDLGFSKLDHPVLW

SEQ ID NO: 888536 - protein, 59 aa, Homo sapiens
MFQALAQNTDLKERLRRIHAESLLLDSPAVAKSGDNLAEENSRDENRALVHHIDCGPAH

SEQ ID NO: 888537 - protein, 1019 aa, Homo sapiens
MSDEKNLGVSQKLVSPSRSTSSCSSKQGSRQDSWEVVEGLRGEMNYTQEPPVQKGFLLKKRKWPLKGWHKRFFYLDKGILKYAKSQTDIEREKLHGCIDVGLSVMSVKKSSKCIDLDTEEHIYHLKVKSEEVFDEWVSKLRHHRMYRQNEIAMFPHEVNHFFSGSTITDSSSGVFDSISSRKRSSISKQNLFQTGSNVSFSCGGETRVPLWLQSSEDMEKCSKDLAHCHAYLVEMSQLLQSMDVLHRTYSAPAINAIQGGSFESPKKEKRSHRRWRSRAIGKDAKGTLQVPKPFSGPVRLHSSNPNLSTLDFGEEKNYSDGSETSSEFSKMQEDLCHIAHKVYFTLRSAFNIMSAEREKLKQLMEQDASSSPSAQVIGLKNALSSALAQNTDLKERLRRIHAESLLLDSPAVAKSGDNLAEENSRDENRALVHQLSNESRLSITDSLSEFFDAQEVLLSPSSSENEISDDDSYVSDISDNLSLDNLSNDLDNERQTLGPVLDSGREAKSRRRTCLPAPCPSSSNISLWNILRNNIGKDLSKVAMPVELNEPLNTLQRLCEELEYSELLDKAAQIPSPLERMVRSQPSLATVQPRSPSHEAIHGAHQRDSPCSLRFHFDCSVNRFIYSELSGFLRLAVSSHLVRIWRRGWGASPWHLVPGVVLFCGFVLPLSPEAFWLIVPMCPAGKHVFRAVCMFIFTSLGGQNLISRAVFLIQVYVAAFAISAYASSYYRAGSKPFNPVLGETYECIREDKGFQFFSEQVSHHPPISACHAESRNFVFWQDVRWKNKFWGKSMEIVPIGTTHVTLPVFGDHFEWNKVTSCIHNILSGQRWIEHYGEIVIKNLHDDSCYCKVNFIKAKYWSTNAHEIEGTVFDRSGKAVHRLFGKWHESIYCGGGSSSACVWRANPMPKGYEQYYSFTQFALELNEMDPSSKSLLPPTDTRFRPDQRFLEEGNLEEAEIQKQRIEQLQRERRRVLEENHVEHQPRFFRKSDDDSWVSNGTYLELRKDLGFSKLDHPVLW

SEQ ID NO: 888538 - protein, 637 aa, Homo sapiens
MFQALAQNTDLKERLRRIHAESLLLDSPAVAKSGDNLAEENSRDENRALVHQLSNESRLSITDSLSEFFDAQEVLLSPSSSENEISDDDSYVSDISDNLSLDNLSNDLDNERQTLGPVLDSGREAKSRRRTCLPAPCPSSSNISLWNILRNNIGKDLSKVAMPVELNEPLNTLQRLCEELEYSELLDKAAQIPSPLERMVRSQPSLATVQPRSPSHEAIHGAHQRDSPCSLRFHFDCSVNRFIDSELSGFLRLAVSSHLVRIWRRGWGASPWHLVPGVVLFCGFVLPLSPEAFWLIVPMCPAGKHVFRAVCMFIFTSLGGQNLISRAVFLIQVYVAAFAISAYASSYYRAGSKPFNPVLGETYECIREDKGFQFFSEQVSHHPPISACHAESRNFVFWQDVRWKNKFWGKSMEIVPIGTTHVTLPVFGDHFEWNKVTSCIHNILSGQRWIEHYGEIVIKNLHDDSCYCKVNFIKAKYWSTNAHEIEGTVFDRSGKAVHRLFGKWHESIYCGGGSSSACVWRANPMPKGYEQYYSFTQFALELNEMDPSSKSLLPPTDTRFRPDQRFLEEGNLEEAEIQKQRIEQLQRERRRVLEENHVEHQPRFFRKSDDDSWVSNGTYLELRKDLGFSKLDHPVLW

SEQ ID NO: 888539 - protein, 320 aa, Homo sapiens
IYERHSALLQYKKLHEMCWEEEILRLLLPDIRKENWTSLLRLNCCYIHGRKDKEAVLCFHQVSHHPPISACHAESRNFVFWQDVRWKNKFWGKSMEIVPIGTTHVTLPVFGDHFEWNKVTSCIHNILSGQRWIEHYGEIVIKNLHDDSCYCKVNFIKAKYWSTNAHEIEGTVFDRSGKAVHRLFGKWHESIYCGGGSSSACVWRANPMPKGYEQYYSFTQFALELNEMDPSSKSLLPPTDTRFRPDQRFLEEGNLEEAEIQKQRIEQLQRERRRVLEENHVEHQPRFFRKSDDDSWVSNGTYLELRKDLGFSKLDHPVLW

SEQ ID NO: 888540 - protein, 1012 aa, Homo sapiens
MSDEKNLGVSQKLVSPSRSTSSCSSKQGSRQDSWEVVEGLRGEMNYTQEPPVQKGFLLKKRKWPLKGWHKRFFYLDKGILKYAKSQTDIEREKLHGCIDVGLSVMSVKKSSKCIDLDTEEHIYHLKVKSEEVFDEWVSKLRHHRMYRQNEIAMFPHEVNHFFSGSTITDSSSGVFDSISSRKRSSISKQNLFQTGSNVSFSCGGETRVPLWLQSSEDMEKCSKDLAHCHAYLVEMSQLLQSMDVLHRTYSAPAINAIQGGSFESPKKEKRSHRRWRSRAIGKDAKGTLQVPKPFSGPVRLHSSNPNLSTLDFGEEKNYSDGSETSSEFSKMQEDLCHIAHKVYFTLRSAFNIMSAEREKLKQLMEQDASSSPSAQVIGLKNALSSALAQNTDLKERLRRIHAESLLLDSPAVAKSGDNLAEENSRDENRALVHQLSNESRLSITDSLSEFFDAQEVLLSPSSSENEISDDDSYVSDISDNLSLDNLSNDLDNERQTLGPVLDSGREAKSRRRTCLPAPCPSSSNISLWNILRNNIGKDLSKVAMPVELNEPLNTLQRLCEELEYSELLDKAAQIPSPLERMVRSQPSLATVQPRSPSHEAIHGAHQRDSPCSLRFHFDCSVNRFIYSELSGFLRLAVSSHLVRIWRRGWGASPWHLVPGVVLFCGFVLPLSPEAFWLIVPMCPAGKHVFRAVCMFIFTSLGGQNLISRAVFLIQVYVAAFAISAYASSYYRAGSKPFNPVLGETYECIREDKGFQFFSEQVSHHPPISACHAESRNFVFWQDVRWKNKFWGKSMEIVPIGTTHVTLPVFGDHFEWNKVTSCIHNILSGQRWIEHYGEIVIKNLHDDSCYCKVNFIKAKYWSTNAHEIEGTVFDRSGKAVHRLFGKWHESIYCGGGSSSACVWRANPMPKGYEQYYSFTQFALELNEMDPSSKSLLPPTDTRFRPDQRFLEEGNLEEAEIQKQRIEQLQRERRRVLEENHVEHQPRFFSRSPIEPSALGAGVLPRCVFQTRPK

SEQ ID NO: 888541 - protein, 641 aa, Homo sapiens
MSDEKNLGVSQKLVSPSRSTSSCSSKQGSRQDSWEVVEGLRGEMNYTQEPPVQKGFLLKKRKWPLKGWHKRFFYLDKGILKYAKSQTDIEREKLHGCIDVGLSVMSVKKSSKCIDLDTEEHIYHLKVKSEEVFDEWVSKLRHHRMYRQNEIAMFPHEVNHFFSGSTITDSSSGVFDSISSRKRSSISKQNLFQTGSNVSFSCGGETRVPLWLQSSEDMEKCSKDLAHCHAYLVEMSQLLQSMDVLHRTYSAPAINAIQGGSFESPKKEKRSHRRWRSRAIGKDAKGTLQVPKPFSGPVRLHSSNPNLSTLDFGEEKNYSDGSETSSEFSKMQEDLCHIAHKVYFTLRSAFNIMSAEREKLKQLMEQDASSSPSAQVIGLKNALSSALAQNTDLKERLRRIHAESLLLDSPAVAKSGDNLAEENSRDENRALVHQLSNESRLSITDSLSEFFDAQEVLLSPSSSENEISDDDSYVSDISDNLSLDNLSNDLDNERQTLGPVLDSGREAKSRRRTCLPAPCPSSSNISLWNILRNNIGKDLSKVAMPVELNEPLNTLQRLCEELEYSELLDKAAQIPSPLERMVRSQPSLATVQPRSPSHEAIHGAHQRDSPCSLRFHFDCSVNRFITQSCLASSAWLFPVTL

SEQ ID NO: 888542 - protein, 145 aa, Homo sapiens
MNGRVDYLVTEEEINLTRGPSGLGFNIVGGTDQQYVSNDSGIYVSRIKENGAAALDGRLQEGDKILSVNGQDLKNLLHQDAVDLFRNAGYAVSLRVQHRLQVQNGPIGHRGEGDPSGIPIFMVLVPVFALTMVAAWAFMRYRQQL

SEQ ID NO: 888543 - protein, 161 aa, Homo sapiens
MNGRVDYLVTEEEINLTRGPSGLGFNIVGGTDQQYVSNDSGIYVSRIKENGAAALDGRLQEGDKILSKETQMEGQDYTLNHWQVNGQDLKNLLHQDAVDLFRNAGYAVSLRVQHRLQVQNGPIGHRGEGDPSGIPIFMVLVPVFALTMVAAWAFMRYRQQL

SEQ ID NO: 888544 - protein, 145 aa, Homo sapiens; identical to SEQ ID NO: 888542

SEQ ID NO: 888545 - protein, 145 aa, Homo sapiens; identical to SEQ ID NO: 888542

SEQ ID NO: 888546 - protein, 182 aa, Homo sapiens
MNGRVDYLVTEEEINLTRGPSGLGFNIVGGTDQQYVSNDSGIYVSRIKENGAAALDGRLQEGDKILSVNGQDLKNLLHQDAVDLFRNAGYAVSLRVQHRLLIVGGSFGLREFSQIRYDAVKSKMDPELEKKLKENKISLESEYEKIKDSKFDDWKNIRGPRPWEDPDLLQGRNPESLKTKTT

SEQ ID NO: 888547 - protein, 145 aa, Homo sapiens; identical to SEQ ID NO: 888542

SEQ ID NO: 888548 - protein, 102 aa, Homo sapiens
MASLASNLWADIQAAQAMMVTILSVNGQDLKNLLHQDAVDLFRNAGYAVSLRVQHRLQVQNGPIGHRGEGDPSGIPIFMVLVPVFALTMVAAWAFMRYRQQL

SEQ ID NO: 888549 - protein, 120 aa, Homo sapiens
MNGRVDYLVTEEEINLTRGPSGLGFNIVGGTDQQYVSNDSGIYVSRIKENGAAALDGRLQEGDKILSVNGQDLKNLLHQDAVDLFRNAGYAVSLRVQHRAENERGESKVCCQCKSIINQQ

SEQ ID NO: 888550 - protein, 221 aa, Homo sapiens
MVVVGILLAYLAGWVLEWRWLAVLGCVPPSLMLLLMCFMPETPRFLLTQHRRQEAMAALRFLWGSEQGWEDPPIGAEQQLSGVNAVMFYAETIFEEAKFKDSSLASVVVGVIQVLFTAVAALIMDRAGRRLLLVLSGGSSRPLRGAFVGWPPGFLASSRLLFHLCSVFLKLRGHTSGQFTGHLEGRCTPSLAVDTPVSPVASQSLLPGRIHPGLLGAPCVP

SEQ ID NO: 888551 - protein, 727 aa, Homo sapiens
MTPEDPEETQPLLGPPGGSAPRGRRVFLAAFAAALGPLSFGFALGYSSPAIPSLQRAAPPAPRLDDAAASWFGAVVTLGAAAGGVLGGWLVDRAGRKLSLLLCSVPFVAGFAVITAAQDVWMLLGGRLLTGLACGVASLVAPVYISEIAYPAVRGLLGSCVQLMVVVGILLAYLAGWVLEWRWLAVLGCVPPSLMLLLMCFMPETPRFLLTQHRRQEAMAALRFLWGSEQGWEDPPIGAEQSFHLALLRQPGIYKPFIIGVSLMAFQQLSGVNAVMFYAETIFEEAKFKDSSLASVVVGVIQVLFTAVAALIMDRAGRRLLLVLSGEGSPLCSLPAMRGRAFAKATTLQEEEQGAFVMTNIMDYCGHDLKQLVTKHSLQACPCQWHSHTTPLTSVVNPPEGTLTAPAYDGKTEGQEGEVTQEFVGPFGQVTFLSEPQSPPLGSGGNGSASLSTIFEEWEVIHVRPSARAAAHGHLVPSSCCEDDRRGRGLLAAASVPVPPISSAQRVCSGNFLQFAEVQGGVAATQSGLLRPRCQNTKLAVLWEPGLPLSEASRPCCCALGRSPGAPPTAALPPAGVVMVFSTSAFGAYFKLTQGGPGNSSHVAISAPVSAQPVDASVGLAWLAVGSMCLFIAGFAVGWGPIPWLLMSEIFPLHVKGVATGICVLTNWLMAFLVTKEFSSLMEVLRPYGAFWLASAFCIFSVLFTLFCVPETKGKTLEQITAHFEGR

SEQ ID NO: 888552 - protein, 477 aa, Homo sapiens
MTPEDPEETQPLLGPPGGSAPRGRRVFLAAFAAALGPLSFGFALGYSSPAIPSLQRAAPPAPRLDDAAASWFGAVVTLGAAAGGVLGGWLVDRAGRKLSLLLCSVPFVAGFAVITAAQDVWMLLGGRLLTGLACGVASLVAPVYISEIAYPAVRGLLGSCVQLMVVVGILLAYLAGWVLEWRWLAVLGCVPPSLMLLLMCFMPETPRFLLTQHRRQEAMAALRFLWGSEQGWEDPPIGAEQSFHLALLRQPGIYKPFIIGVSLMAFQQLSGVNAVMFYAETIFEEAKFKDSSLASVVVGVIQVLFTAVAALIMDRAGRRLLLVLSGVVMVFSTSAFGAYFKLTQGGPGNSSHVAISAPVSAQPVDASVGLAWLAVGSMCLFIAGFAVGWGPIPWLLMSEIFPLHVKGVATGICVLTNWLMAFLVTKEFSSLMEVLRPYGAFWLASAFCIFSVLFTLFCVPETKGKTLEQITAHFEGR

SEQ ID NO: 888553 - protein, 314 aa, Homo sapiens
MVVVGILLAYLAGWVLEWRWLAVLGCVPPSLMLLLMCFMPETPRFLLTQHRRQEAMAALRFLWGSEQGWEDPPIGAEQSFHLALLRQPGIYKPFIIGVSLMAFQQLSGVNAVMFYAETIFEEAKFKDSSLASVVVGVIQVLFTAVAALIMDRAGRRLLLVLSGVVMVFSTSAFGAYFKLTQGGPGNSSHVAISAPVSAQPVDASVGLAWLAVGSMCLFIAGFAVGWGPIPWLLMSEIFPLHVKGVATGICVLTNWLMAFLVTKEFSSLMEVLRPYGAFWLASAFCIFSVLFTLFCVPETKGKTLEQITAHFEGR

SEQ ID NO: 888554 - protein, 342 aa, Homo sapiens
MTCSLGKVYISEIAYPAVRGLLGSCVQLMVVVGILLAYLAGWVLEWRWLAVLGCVPPSLMLLLMCFMPETPRFLLTQHRRQEAMAALRFLWGSEQGWEDPPIGAEQSFHLALLRQPGIYKPFIIGVSLMAFQQLSGVNAVMFYAETIFEEAKFKDSSLASVVVGVIQVLFTAVAALIMDRAGRRLLLVLSGVVMVFSTSAFGAYFKLTQGGPGNSSHVAISAPVSAQPVDASVGLAWLAVGSMCLFIAGFAVGWGPIPWLLMSEIFPLHVKGVATGICVLTNWLMAFLVTKEFSSLMEVLRPYGAFWLASAFCIFSVLFTLFCVPETKGKTLEQITAHFEGR

SEQ ID NO: 888555 - protein, 214 aa, Homo sapiens
MAFQQLSGVNAVMFYAETIFEEAKFKDSSLASVVVGVIQVLFTAVAALIMDRAGRRLLLVLSGVVMVFSTSAFGAYFKLTQGGPGNSSHVAISAPVSAQPVDASVGLAWLAVGSMCLFIAGFAVGWGPIPWLLMSEIFPLHVKGVATGICVLTNWLMAFLVTKEFSSLMEVLRPYGAFWLASAFCIFSVLFTLFCVPETKGKTLEQITAHFEGR

SEQ ID NO: 888556 - protein, 538 aa, Homo sapiens
MVVVGILLAYLAGWVLEWRWLAVLGCVPPSLMLLLMCFMPETPRFLLTQHRRQEAMAALRFLWGSEQGWEDPPIGAEQQLSGVNAVMFYAETIFEEAKFKDSSLASVVVGVIQVLFTAVAALIMDRAGRRLLLVLSGEGSPLCSLPAMRGRAFAKATTLQEEDREQFVMTNIMDYAAMIGQQLVTKHSLQACPCQWHSHTTPLTSVVNPPEGTLTAPAYDGKTEGQEGEVTQEFVGPFGQVTFLSEPQSPPLGSGGNGSASLSTIFEEWEVIHVRPSARAAAHGHLVPSSCCEDDRRGRGLLAAASVPVPPISSAQRVCSGNFLQFAEVQGGVAATQSGLLRPRCQNTKLAVLWEPGLPLSEASRPCCCALGRSPGAPPTAALPPAGVVMVFSTSAFGAYFKLTQGGPGNSSHVAISAPVSAQPVDASVGLAWLAVGSMCLFIAGFAVGWGPIPWLLMSEIFPLHVKGVATGICVLTNWLMAFLVTKEFSSLMEVLRPYGAFWLASAFCIFSVLFTLFCVPETKGKTLEQITAHFEGR

SEQ ID NO: 888557 - protein, 214 aa, Homo sapiens; identical to SEQ ID NO: 888555

SEQ ID NO: 888558 - protein, 316 aa, Homo sapiens
MTCSLGKVYISEIAYPAVRGLLGSCVQLMVVVGILLAYLAGWVLEWRWLAVLGCVPPSLMLLLMCFMPETPRFLLTQHRRQEAMAALRFLWGSEQGWEDPPIGAEQQLSGVNAVMFYAETIFEEAKFKDSSLASVVVGVIQVLFTAVAALIMDRAGRRLLLVLSGVVMVFSTSAFGAYFKLTQGGPGNSSHVAISAPVSAQPVDASVGLAWLAVGSMCLFIAGFAVGWGPIPWLLMSEIFPLHVKGVATGICVLTNWLMAFLVTKEFSSLMEVLRPYGAFWLASAFCIFSVLFTLFCVPETKGKTLEQITAHFEGR

SEQ ID NO: 888559 - protein, 477 aa, Homo sapiens; identical to SEQ ID NO: 888552

SEQ ID NO: 888560 - protein, 477 aa, Homo sapiens; identical to SEQ ID NO: 888552

SEQ ID NO: 888561 - protein, 356 aa, Homo sapiens
MLLGGRLLTGLACGVASLVAPVYISEIAYPAVRGLLGSCVQLMVVVGILLAYLAGWVLEWRWLAVLGCVPPSLMLLLMCFMPETPRFLLTQHRRQEAMAALRFLWGSEQGWEDPPIGAEQSFHLALLRQPGIYKPFIIGVSLMAFQQLSGVNAVMFYAETIFEEAKFKDSSLASVVVGVIQVLFTAVAALIMDRAGRRLLLVLSGVVMVFSTSAFGAYFKLTQGGPGNSSHVAISAPVSAQPVDASVGLAWLAVGSMCLFIAGFAVGWGPIPWLLMSEIFPLHVKGVATGICVLTNWLMAFLVTKEFSSLMEVLRPYGAFWLASAFCIFSVLFTLFCVPETKGKTLEQITAHFEGR

SEQ ID NO: 888562 - protein, 408 aa, Homo sapiens
MTPEDPEETQPLLGPPGGSAPRGRRVFLAAFAAALGPLSFGFALGYSSPAIPSLQRAAPPAPRLDDAAASWFGVYISEIAYPAVRGLLGSCVQLMVVVGILLAYLAGWVLEWRWLAVLGCVPPSLMLLLMCFMPETPRFLLTQHRRQEAMAALRFLWGSEQGWEDPPIGAEQSFHLALLRQPGIYKPFIIGVSLMAFQQLSGVNAVMFYAETIFEEAKFKDSSLASVVVGVIQVLFTAVAALIMDRAGRRLLLVLSGVVMVFSTSAFGAYFKLTQGGPGNSSHVAISAPVSAQPVDASVGLAWLAVGSMCLFIAGFAVGWGPIPWLLMSEIFPLHVKGVATGICVLTNWLMAFLVTKEFSSLMEVLRPYGAFWLASAFCIFSVLFTLFCVPETKGKTLEQITAHFEGR

SEQ ID NO: 888563 - protein, 214 aa, Homo sapiens; identical to SEQ ID NO: 888555

SEQ ID NO: 888564 - protein, 349 aa, Homo sapiens
MAMSVANMRADVQRQRGPISEAESLRLARPRLAHPGSDASLLHPPPAGWVLEWRWLAVLGCVPPSLMLLLMCFMPETPRFLLTQHRRQEAMAALRFLWGSEQGWEDPPIGAEQSFHLALLRQPGIYKPFIIGVSLMAFQQLSGVNAVMFYAETIFEEAKFKDSSLASVVVGVIQVLFTAVAALIMDRAGRRLLLVLSGVVMVFSTSAFGAYFKLTQGGPGNSSHVAISAPVSAQPVDASVGLAWLAVGSMCLFIAGFAVGWGPIPWLLMSEIFPLHVKGVATGICVLTNWLMAFLVTKEFSSLMEVLRPYGAFWLASAFCIFSVLFTLFCVPETKGKTLEQITAHFEGR

SEQ ID NO: 888565 - protein, 437 aa, Homo sapiens
MTPEDPEETQPLLGPPGGSAPRGRRVFLAAFAAALGPLSFGFALGYSSPAIPSLQRAAPPAPRLDDAAASWFGAVVTLGAAAGGVLGGWLVDRAGRKLSLLLCSVPFVAGFAVITAAQDVWMLLGGRLLTGLACGVASLVAPVYISEIAYPAVRGLLGSCVQLMVVVGILLAYLAGWVLEWRWLAVLGCVPPSLMLLLMCFMPETPRFLLTQHRRQEAMAALRFLWGSEQGWEDPPIGAEQSFHLALLRQPGIYKPFIIGVSLMAFQQLSGVNAVMFYAETIFEEAKFKDSSLASVVVGVIQVLFTAVAALIMDRAGRRLLLVLSGVVMVFSTSAFGAYFKLTQGGPGNSSHVAISAPVSAQPVDASVGLAWLAVGSMCLFIAGFAVGWGPIPWLLMSEIFPLHVKGVATGICVLTNWLMAFLVTKEFSSLMLLLLL

SEQ ID NO: 888566 - protein, 437 aa, Homo sapiens; identical to SEQ ID NO: 888565

SEQ ID NO: 888567 - protein, 938 aa, Homo sapiens
MNWNKGGPGTKRGFGFGGFAISAGKKEEPKLPQQSHSAFGATSSSSGFGKSAPPQLPSFYKIGSKRANFDEENAYFEDEEEDSSNVDLPYIPAENSPTRQQFHSKPVDSDSDDDPLEAFMAEVEDQAARDMKRLEEKDKERKNVKGIRDDIEEEDDQEAYFRYMAENPTAGVVQEEEEDNLEYDSDGNPIAPTKKIIDPLPPIDHSEIDYPPFEKNFYNEHEEITNLTPQQLIDLRHKLNLRVSGAAPPRPGSSFAHFGFDEQLMHQIRKSEYTQPTPIQCQGVPVALSGRDMIGIAKTGSGKTAAFIWPMLIHIMDQKELEPGDGPIAVIVCPTRELCQQIHAECKRFGKAYNLRSVAVYGGGSMWEQAKALQEGAEIVVCTPGRLIDHVKKKATNLQRVSYLVFDEADRMFDMGFEYQVRSIASHVRPDRQTLLFSATFRKKIEKLARDILIDPIRVVQGDIGEANEDVTQIVEILHSGPSKWNWLTRRLVEFTSSGSVLLFVTKKANAEELANNLKQEGHNLGLLHGDMDQSERNKVISDFKKKDIPVLVATDVAARGLDIPSIKTVINYDVARDIDTHTHRIGRTGRAGEKGVAYTLLTPKDSNFAGDLVRNLEGANQHVSKELLDLAMQNAWFRKSRFKGGKGKKLNIGGGGLGYRERPGLGSENMDRGNNNVMSNYEAYKPSTGAMGDRLTAMKAAFQSQYKSHFVAASLSNQKAGSSAAGASGWTSAGSLNSVPTNSAQQGHNSPDSPVTSAAKGIPGFGNTGNISGAPVTYPSAGAQGVNNTASGNNSREGTGGSNGKRERYTENRGSSRHSHGETGNRHSDSPRHGDGGRHGDGYRHPESSSRHTDGHRHGENRHGGSAGRHGENRGANDGRNGESRKEAFNRESKMEPKMEPKVDSSKMDKVDSKTDKTADGFAVPEPPKRKKSRWDS

SEQ ID NO: 888568 - protein, 1001 aa, Homo sapiens
RWRWWRWRRRWWWWRRRRRRGRRGRSAAGPGRDSAYFGLRDSLRARGCSSCRCSHSSRSVIGTMNWNKGGPGTKRGFGFGGFAISAGKKEEPKLPQQSHSAFGATSSSSGFGKSAPPQLPSFYKIGSKRANFDEENAYFEDEEEDSSNVDLPYIPAENSPTRQQFHSKPVDSDSDDDPLEAFMAEVEDQAARDMKRLEEKDKERKNVKGIRDDIEEEDDQEAYFRYMAENPTAGVVQEEEEDNLEYDSDGNPIAPTKKIIDPLPPIDHSEIDYPPFEKNFYNEHEEITNLTPQQLIDLRHKLNLRVSGAAPPRPGSSFAHFGFDEQLMHQIRKSEYTQPTPIQCQGVPVALSGRDMIGIAKTGSGKTAAFIWPMLIHIMDQKELEPGDGPIAVIVCPTRELCQQIHAECKRFGKAYNLRSVAVYGGGSMWEQAKALQEGAEIVVCTPGRLIDHVKKKATNLQRVSYLVFDEADRMFDMGFEYQVRSIASHVRPDRQTLLFSATFRKKIEKLARDILIDPIRVVQGDIGEANEDVTQIVEILHSGPSKWNWLTRRLVEFTSSGSVLLFVTKKANAEELANNLKQEGHNLGLLHGDMDQSERNKVISDFKKKDIPVLVATDVAARGLDIPSIKTVINYDVARDIDTHTHRIGRTGRAGEKGVAYTLLTPKDSNFAGDLVRNLEGANQHVSKELLDLAMQNAWFRKSRFKGGKGKKLNIGGGGLGYRERPGLGSENMDRGNNNVMSNYEAYKPSTGAMGDRLTAMKAAFQSQYKSHFVAASLSNQKAGSSAAGASGWTSAGSLNSVPTNSAQQGHNSPDSPVTSAAKGIPGFGNTGNISGAPVTYPSAGAQGVNNTASGNNSREGTGGSNGKRERYTENRGSSRHSHGETGNRHSDSPRHGDGGRHGDGYRHPESSSRHTDGHRHGENRHGGSAGRHGENRGANDGRNGESRKEAFNRESKMEPKMEPKVDSSKMDKVDSKTDKTADGFAVPEPPKRKKSRWDS

SEQ ID NO: 888569 - protein, 938 aa, Homo sapiens; identical to SEQ ID NO: 888567

SEQ ID NO: 888570 - protein, 674 aa, Homo sapiens
MHQIRKSEYTQPTPIQCQGVPVALSGRDMIGIAKTGSGKTAAFIWPMLIHIMDQKELEPGDGPIAVIVCPTRELCQQIHAECKRFGKAYNLRSVAVYGGGSMWEQAKALQEGAEIVVCTPGRLIDHVKKKATNLQRVSYLVFDEADRMFDMGFEYQVRSIASHVRPDRQTLLFSATFRKKIEKLARDILIDPIRVVQGDIGEANEDVTQIVEILHSGPSKWNWLTRRLVEFTSSGSVLLFVTKKANAEELANNLKQEGHNLGLLHGDMDQSERNKVISDFKKKDIPVLVATDVAARGLDIPSIKTVINYDVARDIDTHTHRIGRTGRAGEKGVAYTLLTPKDSNFAGDLVRNLEGANQHVSKELLDLAMQNAWFRKSRFKGGKGKKLNIGGGGLGYRERPGLGSENMDRGNNNVMSNYEAYKPSTGAMGDRLTAMKAAFQSQYKSHFVAASLSNQKAGSSAAGASGWTSAGSLNSVPTNSAQQGHNSPDSPVTSAAKGIPGFGNTGNISGAPVTYPSAGAQGVNNTASGNNSREGTGGSNGKRERYTENRGSSRHSHGETGNRHSDSPRHGDGGRHGDGYRHPESSSRHTDGHRHGENRHGGSAGRHGENRGANDGRNGESRKEAFNRESKMEPKMEPKVDSSKMDKVDSKTDKTADGFAVPEPPKRKKSRWDS

SEQ ID NO: 888571 - protein, 947 aa, Homo sapiens
MNWNKGGPGTKRGFGFGGFAISAGKKEEPKLPQQSHSAFGATSSSSGFGKSAPPQLPSFYKIGSKRANFDEENAYFEDEEEDSSNVDLPYIPAENSPTRQQFHSKPVDSDSDDDPLEAFMAEVEDQAARDMKRLEEKDKERKNVKGIRDDIEEEDDQEAYFRYMAENPTAGVVQEEEEDNLEYDSDGNPIAPTKKIIDPLPPIDHSETNFEELDLQIDYPPFEKNFYNEHEEITNLTPQQLIDLRHKLNLRVSGAAPPRPGSSFAHFGFDEQLMHQIRKSEYTQPTPIQCQGVPVALSGRDMIGIAKTGSGKTAAFIWPMLIHIMDQKELEPGDGPIAVIVCPTRELCQQIHAECKRFGKAYNLRSVAVYGGGSMWEQAKALQEGAEIVVCTPGRLIDHVKKKATNLQRVSYLVFDEADRMFDMGFEYQVRSIASHVRPDRQTLLFSATFRKKIEKLARDILIDPIRVVQGDIGEANEDVTQIVEILHSGPSKWNWLTRRLVEFTSSGSVLLFVTKKANAEELANNLKQEGHNLGLLHGDMDQSERNKVISDFKKKDIPVLVATDVAARGLDIPSIKTVINYDVARDIDTHTHRIGRTGRAGEKGVAYTLLTPKDSNFAGDLVRNLEGANQHVSKELLDLAMQNAWFRKSRFKGGKGKKLNIGGGGLGYRERPGLGSENMDRGNNNVMSNYEAYKPSTGAMGDRLTAMKAAFQSQYKSHFVAASLSNQKAGSSAAGASGWTSAGSLNSVPTNSAQQGHNSPDSPVTSAAKGIPGFGNTGNISGAPVTYPSAGAQGVNNTASGNNSREGTGGSNGKRERYTENRGSSRHSHGETGNRHSDSPRHGDGGRHGDGYRHPESSSRHTDGHRHGENRHGGSAGRHGENRGANDGRNGESRKEAFNRESKMEPKMEPKVDSSKMDKVDSKTDKTADGFAVPEPPKRKKSRWDS

SEQ ID NO: 888572 - protein, 484 aa, Homo sapiens [sequence omitted]

SEQ ID NO: 888573 - protein, 486 aa, Homo sapiens
MNWNKGGPGTKRGFGFGGFAISAGKKEEPKLPQQSHSAFGATSSSSGFGKSAPPQLPSFYKIGSKRANFDEENAYFEDEEEDSSNVDLPYIPAENSPTRQQFHSKPVDSDSDDDPLEAFMAEVEDQAARDMKRLEEKDKERKNVKGIRDDIEEEDDQEAYFRYMAENPTAGVVQEEEEDNLEYDSDGNPIAPTKKIIDPLPPIDHSEIDYPPFEKNFYNEHEEITNLTPQQLIDLRHKLNLRVSGAAPPRPGSSFAHFGFDEQLMHQIRKSEYTQPTPIQCQGVPVALSGRDMIGIAKTGSGKTAAFIWPMLIHIMDQKELEPGDGPIAVIVCPTRELCQQIHAECKRFGKAYNLRSVAVYGGGSMWEQAKALQEGAEIVVCTPGRLIDHVKRKLPSVKKANNFLWPPIVCSRAWMSEKEPQKQDRVRIRFRLIKFRLNKKKGALEFRRPVLPFERAKEYTTRVQVQNMALHTLGMPPIQIRMQVK

SEQ ID NO: 888574 - protein, 775 aa, Homo sapiens
MAENPTAGVVQEEEEDNLEYDSDGNPIAPTKKIIDPLPPIDHSEIDYPPFEKNFYNEHEEITNLTPQQLIDLRHKLNLRVSGAAPPRPGSSFAHFGFDEQLMHQIRKSEYTQPTPIQCQGVPVALSGRDMIGIAKTGSGKTAAFIWPMLIHIMDQKELEPGDGPIAVIVCPTRELCQQIHAECKRFGKAYNLRSVAVYGGGSMWEQAKALQEGAEIVVCTPGRLIDHVKKKATNLQRVSYLVFDEADRMFDMGFEYQVRSIASHVRPDRQTLLFSATFRKKIEKLARDILIDPIRVVQGDIGEANEDVTQIVEILHSGPSKWNWLTRRLVEFTSSGSVLLFVTKKANAEELANNLKQEGHNLGLLHGDMDQSERNKVISDFKKKDIPVLVATDVAARGLDIPSIKTVINYDVARDIDTHTHRIGRTGRAGEKGVAYTLLTPKDSNFAGDLVRNLEGANQHVSKELLDLAMQNAWFRKSRFKGGKGKKLNIGGGGLGYRERPGLGSENMDRGNNNVMSNYEAYKPSTGAMGDRLTAMKAAFQSQYKSHFVAASLSNQKAGSSAAGASGWTSAGSLNSVPTNSAQQGHNSPDSPVTSAAKGIPGFGNTGNISGAPVTYPSAGAQGVNNTASGNNSREGTGGSNGKRERYTENRGSSRHSHGETGNRHSDSPRHGDGGRHGDGYRHPESSSRHTDGHRHGENRHGGSAGRHGENRGANDGRNGESRKEAFNRESKMEPKMEPKVDSSKMDKVDSKTDKTADGFAVPEPPKRKKSRWDS

SEQ ID NO: 888575 - protein, 938 aa, Homo sapiens; identical to SEQ ID NO: 888567

SEQ ID NO: 888576 - protein, 402 aa, Homo sapiens
MYEARVNLAEEDIPVLVATDVAARGLDIPSIKTVINYDVARDIDTHTHRIGRTGRAGEKGVAYTLLTPKDSNFAGDLVRNLEGANQHVSKELLDLAMQNAWFRKSRFKGGKGKKLNIGGGGLGYRERPGLGSENMDRGNNNVMSNYEAYKPSTGAMGDRLTAMKAAFQSQYKSHFVAASLSNQKAGSSAAGASGWTSAGSLNSVPTNSAQQGHNSPDSPVTSAAKGIPGFGNTGNISGAPVTYPSAGAQGVNNTASGNNSREGTGGSNGKRERYTENRGSSRHSHGETGNRHSDSPRHGDGGRHGDGYRHPESSSRHTDGHRHGENRHGGSAGRHGENRGANDGRNGESRKEAFNRESKMEPKMEPKVDSSKMDKVDSKTDKTADGFAVPEPPKRKKSRWDS

SEQ ID NO: 888577 - protein, 565 aa, Homo sapiens
GDESFQSAEGPTAAGRVAGGAPRAGPPWSEVAVSPSRGPGPAPRMGEVEAPGRLWLESPPGGAPPIFLPSDGQALVLGRGPLTQVTDRKCSRTQVELVADPETRTVAVKQLGVNPSTTGTQELKPGLEGSLGVGDTLYLVNGLHPLTLRWEETRTPESQPDTPPGTPLVSQDEKRDAELPKKRMRKSNPGWENLEKLLVFTAAGVKPQGKVAGFDLDGTLITTRSGKVFPTGPSDWRILYPEIPRKLRELEAEGYKLVIFTNQMSIGRGKLPAEEFKAKVEAVVEKLGVPFQVLVATHAGLYRKPVTGMWDHLQEQANDGTPISIGDSIFVGDAAGRPANWAPGRKKKDFSCADRLFALNLGLPFATPEEFFLKWPAAGFELPAFDPRTVSRSGPLCLPESRALLSASPEVVVAVGFPGAGKSTFLKKHLVSAGYVHVNRDTLGSWQRCVTTCETALKQGKRVAIDNTNPDAASRARYVQCARAAGVPCRCFLFTATLEQARHNNRFREMTDSSHIPVSDMVMYGYRKQFEAPTLAEGFSAILEIPFRLWVEPRLGRLYCQFSEG

SEQ ID NO: 888578 - protein, 595 aa, Homo sapiens
MDGNRPSPGPISSHIFCQGGNQFCREKYLPVPCKDQCQAILVPLSGYCMSRSQSHVEINCLLLPGCYSLKQATLPRNEGPNHTRMQILTPPLQSSVELVADPETRTVAVKQLGVNPSTTGTQELKPGLEGSLGVGDTLYLVNGLHPLTLRWEETRTPESQPDTPPGTPLVSQDEKRDAELPKKRMRKSNPGWENLEKLLVFTAAGVKPQGKVAGFDLDGTLITTRSGKVFPTGPSDWRYKRQNKGVSEAWSPPLAPGHPCRFIPAVRILYPEIPRKLRELEAEGYKLVIFTNQMSIGRGKLPAEEFKAKVEAVVEKLGVPFQVLVATHAGLYRKPVTGMWDHLQEQANDGTPISIGDSIFVGDAAGRPANWAPGRKKKDFSCADRLFALNLGLPFATPEEFFLKWPAAGFELPAFDPRTVSRSGPLCLPESRALLSASPEVVVAVGFPGAGKSTFLKKHLVSAGYVHVNRDTLGSWQRCVTTCETALKQGKRVAIDNTNPDAASRARYVQCARAAGVPCRCFLFTATLEQARHNNRFREMTDSSHIPVSDMVMYGYRKQFEAPTLAEGFSAILEIPFRLWVEPRLGRLYCQFSEG

SEQ ID NO: 888579 - protein, 550 aa, Homo sapiens
MWEEAGLPAANWGCAPLKPVYLLPRPAPRMGEVEAPGRLWLESPPGGAPPIFLPSDGQALVLGRGPLTQVTDRKCSRTQVELVADPETRTVAVKQLGVNPSTTGTQELKPGLEGSLGVGDTLYLVNGLHPLTLRWEETRTPESQPDTPPGTPLVSQDEKRDAELPKKRMRKSNPGWENLEKLLVFTAAGVKPQGKVAGFDLDGTLITTRSGKVFPTGPSDWRILYPEIPRKLRELEAEGYKLVIFTNQMSIGRGKLPAEEFKAKVEAVVEKLGVPFQVLVATHAGLYRKPVTGMWDHLQEQANDGTPISIGDSIFVGDAAGRPANWAPGRKKKDFSCADRLFALNLGLPFATPEEFFLKWPAAGFELPAFDPRTVSRSGPLCLPESRALLSASPEVVVAVGFPGAGKSTFLKKHLVSAGYVHVNRDTLGSWQRCVTTCETALKQGKRVAIDNTNPDAASRARYVQCARAAGVPCRCFLFTATLEQARHNNRFREMTDSSHIPVSDMVMYGYRKQFEAPTLAEGFSAILEIPFRLWVEPRLGRLYCQFSEG

SEQ ID NO: 888580 - protein, 521 aa, Homo sapiens
MGEVEAPGRLWLESPPGGAPPIFLPSDGQALVLGRGPLTQVTDRKCSRTQVELVADPETRTVAVKQLGVNPSTTGTQELKPGLEGSLGVGDTLYLVNGLHPLTLRWEETRTPESQPDTPPGTPLVSQDEKRDAELPKKRMRKSNPGWENLEKLLVFTAAGVKPQGKVAGFDLDGTLITTRSGKVFPTGPSDWRILYPEIPRKLRELEAEGYKLVIFTNQMSIGRGKLPAEEFKAKVEAVVEKLGVPFQVLVATHAGLYRKPVTGMWDHLQEQANDGTPISIGDSIFVGDAAGRPANWAPGRKKKDFSCADRLFALNLGLPFATPEEFFLKWPAAGFELPAFDPRTVSRSGPLCLPESRALLSASPEVVVAVGFPGAGKSTFLKKHLVSAGYVHVNRDTLGSWQRCVTTCETALKQGKRVAIDNTNPDAASRARYVQCARAAGVPCRCFLFTATLEQARHNNRFREMTDSSHIPVSDMVMYGYRKQFEAPTLAEGFSAILEIPFRLWVEPRLGRLYCQFSEG

SEQ ID NO: 888581 - protein, 574 aa, Homo sapiens
GDESFQSAEGPTAAGRVAGGAPRAGPPWSEVAVSPSRGPGPAPRMGEVEAPGRLWLESPPGGAPPIFLPSDGQALVLGRGPLTQVTDRKCSRTQVELVADPETRTVAVKQLGVNPSTTGTQELKPGLEGSLGVGDTLYLVNGLHPLTLRWEETRTPESQPDTPPGTPLVSQDEKRDAELPKKRMRKSNPGWENLEKLLVFTAAGVKPQGKVAGFDLDGTLITTRSGKVFPTGPSDWRILYPEIPRKLRELEAEGYKLVIFTNQMSIGRGKLPAEEFKAKVEAVVEKLGVPFQVLVATHAGLYRKPVTGMWDHLQEQANDGTPISIGDSIFVGDAAGRPANWAPGRKKKDFSCADRLFALNLGLPFATPEEFFLKWPAAGFELPAFDPRTVSRSGPLCLPESRALLSASPEVVVAVGFPGAGKSTFLKKHLVSAGYVHVNRDTLGSWQRCVTTCETALKQGKRVAIDNTNPDAASRARYVQCARAAGVPCRCFLFTATLEQARHNNRVSPLSPDTPRAAPPDPPPPLTPGPAAPLMFPTVSRDDGLLSYPRVRHGHVWLQVLLGIAGGRGTGWAT

SEQ ID NO: 888582 - protein, 568 aa, Homo sapiens
GDESFQSAEGPTAAGRVAGGAPRAGPPWSEVAVSPSRGPGPAPRMGEVEAPGRLWLESPPGGAPPIFLPSDGQALVLGRGPLTQVTDRKCSRTQVELVADPETRTVAVKQLGVNPSTTGTQELKPGLEGSLGVGDTLYLVNGLHPLTLRWEETRTPESQPDTPPGTPLVSQDEKRDAELPKKRMRKSNPGWENLEKLLVFTAAGVKPQGKVAGFDLDGTLITTRSGKVFPTGPSDWRILYPEIPRKLRELEAEGYKLVIFTNQMSIGRGKLPAEEFKAKVEAVVEKLGVPFQVLVATHAGLYRKPVTGMWDHLQEQANDGTPISIGDSIFVGDAAGRPANWAPGRKKKDFSCADRLFALNLGLPFATPEEFFLKWPAAGFELPAFDPRTVSRSGPLCLPESRALLSASPEVVVAVGFPGAGKSTFLKKHLVSAGYVHVNRDTLGSWQRCVTTCETALKQGKRVAIDNTNPDAASRARYVQCARAAGVPCRCFLFTATLEQARHNNRVSPLSPDTPRAAPPDPPPPLTPGPAAPLMFPTVSRDDGLLSYPRVRHGHVWLQEAVRGPNAG

SEQ ID NO: 888583 - protein, 531 aa, Homo sapiens
GDESFQSAEGPTAAGRVAGGAPRAGPPWSEVAVSPSRGPGPAPRMGEVEAPGRLWLESPPGGAPPIFLPSDGQALVLGRGPLTQVTDRKCSRTQVELVADPETRTVAVKQLGVNPSTTGTQELKPGLEGSLGVGDTLYLVNGLHPLTLRWEETRTPESQPDTPPGTPLVSQDEKRDAELPKKRMRKSNPGWENLEKLLVFTAAGVKPQGKVAGFDLDGTLITTRSGKVFPTGPSDWRILYPEIPRKLRELEAEGYKLVIFTNQMSIGRGKLPAEEFKAKVEAVVEKLGVPFQVLVATHAGLYRKPVTGMWDHLQEQANDGTPISIGDSIFVGDAAGRPANWAPGRKKKDFSCADRLFALNLGLPFATPEEFFLKWPAAGFELPAFDPRTVSRSGPLCLPESRALLSASPEVVVAVGFPGAGKSTFLKKHLVSAGYVHVNRDTLGSWQRCVTTCETALKQGKRVAIDNTNPDAASRARYVQCARAAGVPCRCFLFTATLEQARHNNRFREMTDSSHIPVSDMVMYGYRYCWG

SEQ ID NO: 888584 - protein, 443 aa, Homo sapiens
GDESFQSAEGPTAAGRVAGGAPRAGPPWSEVAVSPSRGPGPAPRMGEVEAPGRLWLESPPGGAPPIFLPSDGQALVLGRGPLTQVTDRKCSRTQVELVADPETRTVAVKQLGVNPSTTGTQELKPGLEGSLGVGDTLYLVNGLHPLTLRWEETRTPESQPDTPPGTPLVSQDEKRDAELPKKRMRKSNPGWENLEKLLVFTAAGVKPQGKVAGFDLDGTLITTRSGKVFPTGPSDWRILYPEIPRKLRELEAEGYKLVIFTNQMSIGRGKLPAEEFKAKVEAVVEKLGVPFQVLVATHAGLYRKPVTGMWDHLQEQANDGTPISIGDSIFVGDAAGRPANWAPGRKKKDFSCADRLFALNLGLPFATPEEFFLKWPAAGFELPAFDPRTVSRSGPLCLPESRALLSASPEVVVAVGFPGAGKFTFLKKHHEKDGNIHVKQGTR

SEQ ID NO: 888585 - protein, 433 aa, Homo sapiens
MSVRLYLVNGLHPLTLRWEETRTPESQPDTPPGTPLVSQDEKRDAELPKKRMRKSNPGWENLEKLLVFTAAGVKPQGKVAGFDLDGTLITTRSGKVFPTGPSDWRILYPEIPRKLRELEAEGYKLVIFTNQMSIGRGKLPAEEFKAKVEAVVEKLGVPFQVLVATHAGLYRKPVTGMWDHLQEQANDGTPISIGDSIFVGDAAGRPANWAPGRKKKDFSCADRLFALNLGLPFATPEEFFLKWPAAGFELPAFDPRTVSRSGPLCLPESRALLSASPEVVVAVGFPGAGKSTFLKKHLVSAGYVHVNRDTLGSWQRCVTTCETALKQGKRVAIDNTNPDAASRARYVQCARAAGVPCRCFLFTATLEQARHNNRFREMTDSSHIPVSDMVMYGYRKQFEAPTLAEGFSAILEIPFRLWVEPRLGRLYCQFSEG

SEQ ID NO: 888586 - protein, 346 aa, Homo sapiens
  misc_feature (21)..(21): Xaa can be any naturally occurring amino acid
DLTDVITKVWKFSPAPVTGGXYQEIPRKSESWKRGYKLVIFTNQMSIGRGKLPAEEFKAKVEAVVEKLGVPFQVLVATHAGLYRKPVTGMWDHLQEQANDGTPISIGDSIFVGDAAGRPANWAPGRKKKDFSCADRLFALNLGLPFATPEEFFLKWPAAGFELPAFDPRTVSRSGPLCLPESRALLSASPEVVVAVGFPGAGKSTFLKKHLVSAGYVHVNRDTLGSWQRCVTTCETALKQGKRVAIDNTNPDAASRARYVQCARAAGVPCRCFLFTATLEQARHNNRFREMTDSSHIPVSDMVMYGYRKQFEAPTLAEGFSAILEIPFRLWVEPRLGRLYCQFSEG

SEQ ID NO: 888587 - protein, 499 aa, Homo sapiens
GDESFQSAEGPTAAGRVAGGAPRAGPPWSEVAVSPSRGPGPAPRMGEVEAPGRLWLESPPGGAPPIFLPSDGQALVLGRGPLTQVTDRKCSRTQVELVADPETRTVAVKQLGVNPSTTGTQELKPGLEGSLGVGDTLYLVNGLHPLTLRWEETRTPESQPDTPPGTPLVSQDEKRDAELPKKRMRKSNPGWENLEKLLVFTAAGVKPQGKVAGFDLDGTLITTRSGKVFPTGPSDWRILYPEIPRKLRELEAEGYKLVIFTNQMSIGRGKLPAEEFKAKVEAVVEKLGVPFQVLVATHAGLYRKPVTGMWDHLQEQANDGTPISIGDSIFVGDAAGRPANWAPGRKKKDFSCADRLFALNLGLPFATPEEFFLKWPAAGFELPAFDPRTVSRSGPLCLPESRALLSASPEVVVAVGFPGAGKSTFLKKHLVSAGYVHVNRVRPVCPSRGRPLPLLPLHRHSGAGAPQQPVSRDDGLLSYPRVRHGHVWLQEAVRGPNAG

SEQ ID NO: 888588 - protein, 592 aa, Homo sapiens
GRVISIGRGTDRRRPGCRRGTSGRTSLVGSGREPKPRSRAGTQDGRGGGPGPLVAREPPWGSAPHLPALGRASPGPGQGTPDPGYGPEVLQNSSLKQATLPRNEGPNHTRMQILTPPLQSSVELVADPETRTVAVKQLGVNPSTTGTQELKPGLEGSLGVGDTLYLVNGLHPLTLRWEETRTPESQPDTPPGTPLVSQDEKRDAELPKKRMRKSNPGWENLEKLLVFTAAGVKPQGKVAGFDLDGTLITTRSGKVFPTGPSDWRILYPEIPRKLRELEAEGYKLVIFTNQMSIGRGKLPAEEFKAKVEAVVEKLGVPFQVLVATHAGLYRKPVTGMWDHLQEQANDGTPISIGDSIFVGDAAGRPANWAPGRKKKDFSCADRLFALNLGLPFATPEEFFLKWPAAGFELPAFDPRTVSRSGPLCLPESRALLSASPEVVVAVGFPGAGKSTFLKKHLVSAGYVHVNRDTLGSWQRCVTTCETALKQGKRVAIDNTNPDAASRARYVQCARAAGVPCRCFLFTATLEQARHNNRFREMTDSSHIPVSDMVMYGYRKQFEAPTLAEGFSAILEIPFRLWVEPRLGRLYCQFSEG

SEQ ID NO: 888589 - protein, 477 aa, Homo sapiens
GDESFQSAEGPTAAGRVAGGAPRAGPPWSEVAVSPSRGPGPAPRMGEVEAPGRLWLESPPGGAPPIFLPSDGQALVLGRGPLTQVTDRKCSRTQVELVADPETRTVAVKQLGVNPSTTGTQELKPGLEGSLGVGDTLYLVNGLHPLTLRWEETRTPESQPDTPPGTPLVSQDEKRDAELPKKRMRKSNPGWENLEKLLVFTAAGVKPQGKVAGFDLDGTLITTRSGKVFPTGPSDWRILYPEIPRKLRELEAEGYKLVIFTNQMSIGRGKLPAEEFKAKVEAVVEKLGVPFQVLVATHAGLYRKPVTGMWDHLQEQANDGTPISIGDSIFVGDAAGRPANWAPGRKKKDFSCADRLFALNLGLPFATPEEFFLKWPAAGFELPAFDPRTVSRSGPLCLPESRALLSASPEVVVAVGFPGAGKSTFLKKHLVSAGYVHVNRDTLGSWQRCVTTCETALKQGKRVAIDNTNPDAASRAR

SEQ ID NO: 888590 - protein, 441 aa, Homo sapiens
GDESFQSAEGPTAAGRVAGGAPRAGPPWSEVAVSPSRGPGPAPRMGEVEAPGRLWLESPPGGAPPIFLPSDGQALVLGRGPLTQVTDRKCSRTQVELVADPETRTVAVKQLGVNPSTTGTQELKPGLEGSLGVGDTLYLVNGLHPLTLRWEETRTPESQPDTPPGTPLVSQDEKRDAELPKKRMRKSNPGWENLEKLLVFTAAGVKPQGKVAGFDLDGTLITTRSGKVFPTGPSDWRILYPEIPRKLRELEAEGYKLVIFTNQMSIGRGKLPAEEFKAKVEAVVEKLGVPFQVLVATHAGLYRKPVTGMWDHLQEQANDGTPISIGDSIFVGDAAGRPANWAPGRKKKDFSCADRLFALNLGLPFATPEEFFLKWPAAGFELPAFDPRTVSRSGPLCLPESRALLSASPEVVVAVGFPGAGKSTFLKKHLVSAGYVHVNRV

SEQ ID NO: 888591 - protein, 382 aa, Homo sapiens [sequence omitted]

SEQ ID NO: 888592 - protein, 334 aa, Homo sapiens
MAAAAPRRPTQQGTVTFEDVAVNFSQEEWCLLSEAQRCLYRDVMLENLALISSLGCWCGSKDEEAPCKQRISVQRESQSRTPRAGVSPKKAHPCEMCGLILEDVFHFADHQETHHKQKLNRSGACGKNLDDTAYLHQHQKQHIGEKFYRKSVREASFVKKRKLRVSQEPFVFREFGKDVLPSSGLCQEAAAVEKTDSETMHGPPFQEGKTNYSCGKRTKAFSTKHSVIPHQKLFTRDGCYVCSDCGKSFSRYVSFSNHQRDHTAKGPYDCGECGKSYSRKSSLIQHQRVHTGKTAYPCEECGKSFSQKGSLISHQRVHTGERPYECRECGKKVT

SEQ ID NO: 888593 - protein, 71 aa, Homo sapiens
VSVTRVFPQFVAPECWGGTAVTEPEKVERNRPRCPEAALQPRDGDHCSRAVLPQVVRWQRLRRGARLSRAL

SEQ ID NO: 888594 - protein, 114 aa, Homo sapiens
AVVQSWLTATWASQVQVILLPQPPKELRLRVHHTMPGQILGFQYHKSYELVIHFMWNHKCPQVTIRIDCWAVKQLRCHRSLLSIQHLSKITLLFLLFQVCISSEFSHMERIHTL

SEQ ID NO: 888595 - protein, 456 aa, Homo sapiens
MAAAAPRRPTQQGTVTFEDVAVNFSQEEWCLLSEAQRCLYRDVMLENLALISSLGCWCGSKDEEAPCKQRISVQRESQSRTPRAGVSPKKAHPCEMCGLILEDVFHFADHQETHHKQKLNRSGACGKNLDDTAYLHQHQKQHIGEKFYRKSVREASFVKKRKLRVSQEPFVFREFGKDVLPSSGLCQEAAAVEKTDSETMHGPPFQEGKTNYSCGKRTKAFSTKHSVIPHQKLFTRDGCYVCSDCGKSFSRYVSFSNHQRDHTAKGPYDCGECGKSYSRKSSLIQHQRVHTGKTAYPCEECGKSFSQKGSLISHQLFTLEKGLMSVENMGNLLVKRVTSFNISKVTLERELITVGNVGNLFVRSSALLTISVFTLEKGLTSVENVENLLVKRATSFNISEVILEKGPMSARNVGNHLGTDPTSLNTRDFTLGKDLTIVGNVGNYLTGSIIFSFMRE

SEQ ID NO: 888596 - protein, 175 aa, Homo sapiens
GECGKSFGQKGNLVQHQRGHTGERPYECKECGKSFRYRSHLTEHQRLHTGERPYNCRECGKLFNRKYHLLVHERVHTGERPYACEVCGKLFGNKNCVTIHQRIHTGERPYECNECGKSFLSSSALHVHKRVHSGQKPYKCSECGKSFAECSSLIKHRRIHTGERPYECTKCGKTF

SEQ ID NO: 888597 - protein, 132 aa, Homo sapiens
MGRTWCGMWRRRRPGRRSAVPRWPHLSSQSGVEPPDRWTGTPGWPSRDQEAPGSMMPPAAAQPSAHGALVPPATAHEPVDHPALHWLACCCCLSLPGQLPLAIRLGWDLDLEAGPSSGKLCPRARRWQPLPS

SEQ ID NO: 888598 - protein, 123 aa, Homo sapiens
VDVCACICVYPPGTSFFLSPSCEFLGPRCARSLYNVLTHQEAPGSMMPPAAAQPSAHGALVPPATAHEPVDHPALHWLACCCCLSLPGQLPLAIRLGWDLDLEAGPSSGKLCPRARRWQPLPS

SEQ ID NO: 888599 - protein, 105 aa, Homo sapiens
SPSCEFLGPRCARSLYNVLTHQEAPGSMMPPAAAQPSAHGALVPPATAHEPVDHPALHWLACCCCLSLPGQLPLAIRLGWDLDLEAGPSSGKLCPRARRWQPLPS

SEQ ID NO: 888600 - protein, 155 aa, Homo sapiens
MSCDSLSFEKVVGFNAFVGGTHGYFVAEPSWGHRGGLGPRSHSRGASRGRLCKPRICNYTEPCNYVWVGAALRPQYRQGFRGPLGQGGPEEGENVPGESIIQGPLRALPGVLTGGSARPSVLELLLLHLVRTSSRGRGPQDLQAWQPQRGCGKRA

SEQ ID NO: 888601 - protein, 67 aa, Homo sapiens
MLPDGVEKLGDWDKQKAANNPEAHPQKTGEMIEECMGTVALCSITNTSQKQRGMKKQDSSYSMMPFL

SEQ ID NO: 888602 - protein, 294 aa, Homo sapiens [sequence omitted]

SEQ ID NO: 888603 - protein, 382 aa, Homo sapiens
MDFGLALLLAGLLGLLLGQSLQVKPLQVEPPEPVVAVALGASRQLTCRLACADRGASVQWRGLDTSLGAVQSDTGRSVLTVRNASLSAAGTRVCVGSCGGRTFQHTVQLLVYAFPDQLTVSPAALVPGDPEVACTAHKVTPVDPNALSFSLLVGGQELEGAQALGPEVQEEEEEPQGDEDVLFRVTERWRLPPLGTPVPPALYCQATMRLPGLELSHRQAIPVLHSPTSPEPPDTTSPESPDTTSPESPDTTSQEPPDTTSPEPPDKTSPEPAPQQGSTHTPRSPGSTRTRRPEISQAGPTQGEVIPTGSSKPAGDQLPAALWTSSAVLGLLLLALPTYHLWKRCRHLAEDDTHPPASLRLLPQVSAWAGLRGTGQVGISPS

SEQ ID NO: 888604 - protein, 653 aa, Homo sapiens
MAAAAASHLNLDALREVLECPICMESFTEEQLRPKLLHCGHTICRQCLEKLLASSINGVRCPFCSKITRITSLTQLTDNLTVLKIIDTAGLSEAVGLLMCRSCGRRLPRQFCRSCGLVLCEPCREADHQPPGHCTLPVKEAAEERRRDFGEKLTRLRELMGELQRRKAALEGVSKDLQARYKAVLQEYGHEERRVQDELARSRKFFTGSLAEVEKSNSQVVEEQSYLLNIAEVQAVSRCDYFLAKIKQADVALLEETADEEEPELTASLPRELTLQDVELLKVGHVGPLQIGQAVKKPRTVNVEDSWAMEATASAASTSVTFREMDMSPEEVVASPRASPAKQRGPEAASNIQQCLFLKKMGAKGSTPGMFNLPVSLYVTSQGEVLVADRGNYRIQVFTRKGFLKEIRRSPSGIDSFVLSFLGADLPNLTPLSVAMNCQGLIGVTDSYDNSLKVYTLDGHCVACHRSQLSKPWGITALPSGQFVVTDVEGGKLWCFTVDRGSGVVKYSCLCSAVRPKFVTCDAEGTVYFTQGLGLNLENRQNEHHLEGGFSIGSVGPDGQLGRQISHFFSENEDFRCIAGMCVDARGDLIVADSSRKEILHFPKGGGYSVLIREGLTCPVGIALTPKGQLLVLDCWDHCIKIYSYHLRRYSTP

SEQ ID NO: 888605 - protein, 653 aa, Homo sapiens; identical to SEQ ID NO: 888604

SEQ ID NO: 888606 - protein, 653 aa, Homo sapiens; identical to SEQ ID NO: 888604

SEQ ID NO: 888607 - protein, 653 aa, Homo sapiens; identical to SEQ ID NO: 888604

SEQ ID NO: 888608 - protein, 653 aa, Homo sapiens; identical to SEQ ID NO: 888604

SEQ ID NO: 888609 - protein, 148 aa, Homo sapiens
TSIFIPAFESETKVRVNSNMRTEEVIKQLLQKFKIENSPQDFALHIIFATGEQRRLKKTDIPLLQRLLQGPSEKNARIFLMDKDAEEISSDVAQYINFHFSLLESILQRLNEEEKREIQRIVTKFNKEKAIILKCLQNKLVIKTETTV

SEQ ID NO: 888610 - protein, 524 aa, Homo sapiens
MKEPRIFPRERPTPWTRAPLPPRGRLDGSLGPQGGPVLNTGHPLGVNSDPFLMAAGSLGGNLTPFPRNPSPFPASSGSLASNPAPFPAGARDPSMASFPRGMNPTGTGAVSFPRPGGLLGPGPGPGPTLNPRTGALPGPGPLSNPRLGGLPGPGPMSNPRAGGLLGAGPDPRGGGPMGPGSGPNLRAGVLLTSGNGPPNPRPVGLGPGPNPNLRSGFLGTNPAPRSGVFPGPGLGPNPRPSGLGPGPNLDARAGGLLGTGSGLNLRMAGPQGLDLAPILRAAGLLGANSASFSQASGNMGTSPSSMARVPGPMGPNSGPSSRGIGLPGPNPSPMSRAPGPIGPNSAHFSRPVGPMGVNANPFPRGAGSSAFSQSSGTLASNPATFQRSAGLQGSNPTIFPRASGPLGPNPANFPRATGLQGPSPTTFPRSTGPLGPGQVTFPRPAAGHLGPSPAGPVGINPAPFTRPTGTLGLNPASFPRMNGPAGKSFVPFPRVGSLPGTNPAAFPRPGGPMAAMYPNGMLPP

SEQ ID NO: 888611 - protein, 524 aa, Homo sapiens; identical to SEQ ID NO: 888610

SEQ ID NO: 888612 - protein, 524 aa, Homo sapiens; identical to SEQ ID NO: 888610

SEQ ID NO: 888613 - protein, 524 aa, Homo sapiens; identical to SEQ ID NO: 888610

SEQ ID NO: 888614 - protein, 524 aa, Homo sapiens; identical to SEQ ID NO: 888610

SEQ ID NO: 888615 - protein, 524 aa, Homo sapiens; identical to SEQ ID NO: 888610

SEQ ID NO: 888616 - protein, 369 aa, Homo sapiens [sequence omitted]

SEQ ID NO: 888617 - protein, 167 aa, Homo sapiens
SEVRRQCSRRRRRRREVRLSPVGRAAPRSAAAIAACFHLLFKDRKLMVQIVISSARAGGLAEWVLMELQGEIEARYSTGLAGNLLGDLHYTTEGIPVLIVGHHILYGKIIHLEKPFAVLVKHTPGDQDCDELGRETGTRYLVTALIKDKILFKTRPKPIITSVPKKV

SEQ ID NO: 888618 - protein, 107 aa, Homo sapiens
MGSRVLEVLPGFLKSEHGKDSGGRLMAVPGAGSGTALPCFHLLFKDRKLMVQIVISSARAGGLAEWVLMELQGEIEARYSTGLAGNLLGDLHYTTEGYIGLQVPVHM

SEQ ID NO: 888619 - protein, 167 aa, Homo sapiens; identical to SEQ ID NO: 888617

SEQ ID NO: 888620 - protein, 167 aa, Homo sapiens; identical to SEQ ID NO: 888617

SEQ ID NO: 888621 - protein, 69 aa, Homo sapiens
KLWGLGYWRSCRVVLKSEHGKDSGGRLMAVPGAGSGTHCLVFTCFLKTESSWCKLLFPVRGLEAWQNGC

SEQ ID NO: 888622 - protein, 524 aa, Homo sapiens; identical to SEQ ID NO: 888610

SEQ ID NO: 888623 - protein, 524 aa, Homo sapiens; identical to SEQ ID NO: 888610

SEQ ID NO: 888624 - protein, 524 aa, Homo sapiens; identical to SEQ ID NO: 888610

SEQ ID NO: 888625 - protein, 524 aa, Homo sapiens; identical to SEQ ID NO: 888610

SEQ ID NO: 888626 - protein, 524 aa, Homo sapiens; identical to SEQ ID NO: 888610

SEQ ID NO: 888627 - protein, 524 aa, Homo sapiens; identical to SEQ ID NO: 888610

SEQ ID NO: 888628 - protein, 109 aa, Homo sapiens
SEVRRQCSRRRRRRREVRLSPVGRAAPRSAAAIAACFHLLFKDRKLMVQIVISSARAGGLAEWVLMELQGEIEARYSTGLAGNLLGDLHYTTEIRLIGFKSSTFPGWCS

SEQ ID NO: 888629 - protein, 133 aa, Homo sapiens
MGSRVLEVLPGFLKSEHGKDSGGRLMAVPGAGSGTALPCFHLLFKDRKLMVQIVISSARAGGLAEWVFRPTAFCPLFLTSFLNCSCGLFLSSSDLGSLDLVILYCHTFPWGLEHRTGRWTTTSKKDPPNAVSA

SEQ ID NO: 888630 - protein, 130 aa, Homo sapiens
ERGGAGEGRKGWPSAGGGRRRGRRGPESRACFHLLFKDRKLMVQIVISSARAGGLAEWVLMELQGEIEARYSTGLAGNLLGDLHYTTEGIPVLIVGHHILYGKIIHLEKPFAVLVKHTPGDQDCDELGQI

SEQ ID NO: 888631 - protein, 326 aa, Homo sapiens
MDYSHQTSLVPCGQDKYISKNELLLHLKTYNLYYEGQNLQLRHREEEDEFIVEGLLNISWGLRRPIRLQMQDDNERIRPPPSSSSWHSGCNLGAQGTTLKPLTVPKVQISEVDAPPEGDQMPSSTDSRGLKPLQEDTPQLMRTRSDVGVRRRGNVRTPSDQRRIRRHRFSINGHFYNHKTSVFTPAYGSVTNVRINSTMTTPQVLKLLLNKFKIENSAEEFALYVVHTSGEKQKLKATDYPLIARILQGPCEQISKVFLMEKDQVEEVTYDVAQYIKFEMPVLKSFIQKLQEEEDREVKKLMRKYTVLRLMIRQRLEEIAETPATI

SEQ ID NO: 888632 - protein, 326 aa, Homo sapiens; identical to SEQ ID NO: 888631

SEQ ID NO: 888633 - protein, 326 aa, Homo sapiens; identical to SEQ ID NO: 888631

SEQ ID NO: 888634 - protein, 157 aa, Homo sapiens
MSLNWNLTLQNEWPLLEFSKTTLKPLTVPKVQISEVDAPPEGDQMPSSTDSRGLKPLQEDTPQLMRTRSDVGVRRRGNVRTPSDQRRIRRHRFSINGHFYNHKTSVFTPAYGSVTNVRINSTMTTPQVLKLLLNKFKIENSAEEFALYVVHTSGGPM

SEQ ID NO: 888635 - protein, 326 aa, Homo sapiens; identical to SEQ ID NO: 888631

SEQ ID NO: 888636 - protein, 326 aa, Homo sapiens; identical to SEQ ID NO: 888631

SEQ ID NO: 888637 - protein, 91 aa, Homo sapiens
PGGAADHALFCAYSEGDWWEARSLSSGKTGCIPTYDVAQYIKFEMPVLKSFIQKLQEEEDREVKKLMRKYTVLRLMIRQRLEEIAETPATI

SEQ ID NO: 888638 - protein, 326 aa, Homo sapiens; identical to SEQ ID NO: 888631

SEQ ID NO: 888639 - protein, 326 aa, Homo sapiens; identical to SEQ ID NO: 888631

SEQ ID NO: 888640 - protein, 326 aa, Homo sapiens; identical to SEQ ID NO: 888631

SEQ ID NO: 888641 - protein, 702 aa, Homo sapiens [sequence omitted]

SEQ ID NO: 888642 - protein, 731 aa, Homo sapiens [sequence omitted]

SEQ ID NO: 888643 - protein, 731 aa, Homo sapiens [sequence omitted]

SEQ ID NO: 888644 - protein, 695 aa, Homo sapiens [sequence omitted]

SEQ ID NO: 888645 - protein, 743 aa, Homo sapiens
MASCPDSDNSWVLAGSESLPVETLGPASRMDPESERALQAPHSPSKTDGKELAGTMDGEGTLFQTESPQSGSILTEETEVKGTLEGDVCGVEPPGPGDTVVQGDLQETTVVTGLGPDTQDLEGQSPPQSLPSTPKAVTITALSLSFPLAWIREEGRCSSSDDDTDVDMEGLRRRRGREAGPPQPMVPLAVENQAGGEGAGGELGISLNMCLLGALVLLGLGVLLFSGEWYSEAGGPMEEVERQVLPDPEVLEAVGDRQDGLREQLQAPVPPDSVPSLQNMGLLLDKLAKENQDIRLLQAQLQAQKEELQSLMHQPKGLEEENAQLRGALQQGEAFQRALESELQQLRARLQGLEADCVRGPDGVCLSGDRGPQGDKAIREQGPREQEPELSFLKQKEQLEAEAQALRQELERQRRLLGSVQQDLERSLQDASRGDPAHAGLAELGHRLAQKLQGLENWGQDPGVSANASKAWHQKSHFQNSREWSGKEKWWDGQRDRKAEHWKHKKEESGRERKKNWGGQEDREPAGRWKEGRPRVEESGSKKEGKRQGPKEPPRKSGSFHSSGEKQKQPRWREGTKDSHDPLPSWAELLRPKYRAPQGCSGVDECARQEGLTFFGTELAPVRQQELASLLRTYLARLPWAGQLTKELPLSPAFFGEDGIFRHDRLRFRDFVDALEDSLEEVAVQQTGDDDEVDDFEDFIFSHFFGDKALKKRSGKKDKHSQSPRAAGPREGHSHSHHHHHRG

SEQ ID NO: 888646 - protein, 731 aa, Homo sapiens [sequence omitted]

SEQ ID NO: 888647 - protein, 171 aa, Homo sapiens
MTPTWTWRVCGDGGAGRPAHLSPWCPWLWRTRLGVRVQAGSWASPSTCASLGPWFCLAWGSSSSQVAISESETGPMEERGADRVLPEPEVLGRLWSGHAGCGYGNSCKAQIAPYQCAQDFNNHGSFMSGPRLGKEETRRLRLLPATSCQTQKRRSQKPYDQTHGLDGGNCQ

SEQ ID NO: 888648 - protein, 662 aa, Homo sapiens
MASCPDSDNSWVLAGSESLPVETLGPASRMDPESERALQAPHSPSKTDGKELAGTMDGEGTLFQTESPQSGSILTEETEVKGTLEGDVCGVEPPGPGDTVVQGDLQETTVVTGLGPDTQDLEGQSPPQSLPSTPKAAWIREEGRCSSSDDDTDVDMEGLRRRRGREAGPPQPMVPLAVENQAGGEGAGGELGISLNMCLLGALVLLGLGVLLFSGGLSESETGPMEEVERQVLPDPEVLEAVGDRQDGLREQLQAPVPPDSVPSLQNMGLLLDKLAKENQDIRLLQAQLQAQKEELQSLMHQPKGLEEENAQLRGALQQGEAFQRALESELQQLRARLQGLEADCVRGPDGVCLSGDRGPQGDKAIREQGPREQEPELSFLKQKEQLEAEAQALRQELERQRRLLGSVQQDLERSLQDASRGDPAHAGLAELGHRLAQKLQGLENWGQDPGVSANASKAWHQKSHFQNSREWSGKEKWWDGQRDRKAEHWKHKKEESGRERKKNWGGQEDREPAGRWKEGRPRVEESGSKKEGKRQGPKEPPRKSGSFHSSGEKQKQPRWREGTKELPLSPAFFGEDGIFRHDRLRFRDFVDALEDSLEEVAVQQTGDDDEVDDFEDFIFSHFFGDKALKKRSGKKDKHSQSPRAAGPREGHSHSHHHHHRG

SEQ ID NO: 888649 - protein, 731 aa, Homo sapiens [sequence omitted]

SEQ ID NO: 888650 - protein, 731 aa, Homo sapiens [sequence omitted]

SEQ ID NO: 888651 - protein, 731 aa, Homo sapiens [sequence omitted]

SEQ ID NO: 888652 - protein, 215 aa, Homo sapiens
MASCPDSDNSWVLAGSESLPVETLGPASRMDPESERALQAPHSPSKTDGKELAGTMDGEGTLFQTESPQSGSILTEETEVKGTLEGDVCGVEPPGPGDTVVQGDLQETTVVTGLGPDTQDLEGQSPPQSLPSTPKAAWIREEGRCSSSDDDTDVDMEGLRRRRGREAGPPQPMVPLAVENQAGGEGAGGELGISLNMCLLGALVLLGLGVLLFSG

SEQ ID NO: 888653 - protein, 110 aa, Homo sapiens
MQAALEVTARYCGRELEQYGQCVAAKPESWQRDCHYLKMSIAQCTSSHPIIRQIRQACAQPFEAFEECLRQNEAAVGNCAEHMRRFLQCAEQVQPPRSPATVEAQPLPAS

SEQ ID NO: 888654 - protein, 118 aa, Homo sapiens
MQAALEVTARYCGRELEQYGQCVAAKPESWQRDCHYLKMSIAQCTSSHPIIRQIRQACAQPFEAFEECLRQNEAAVGNCAEHMRRFLQCAEQVQPPRSPATVEAPLLPVCWCLLEVPS

SEQ ID NO: 888655 - protein, 145 aa, Homo sapiens
MARKKPGWAGRRHDNRYRKRRVVPPGQPYAGKGLEMQAALEVTARYCGRELEQYGQCVAAKPESWQRDCHYLKMSIAQCTSSHPIIRQIRQACAQPFEAFEECLRQNEAAVGNCAEHMRRFLQCAEQVQPPRSPATVEAQPLPAS

SEQ ID NO: 888656 - protein, 118 aa, Homo sapiens
DPQPILSHRQAALEVTARYCGRELEQYGQCVAAKPESWQRDCHYLKMSIAQCTSSHPIIRQIRQACAQPFEAFEECLRQNEAAVGNCAEHMRRFLQCAEQVQPPRSPATVEAQPLPAS

SEQ ID NO: 888657 - protein, 138 aa, Homo sapiens
MQAALEVTARYCGRELEQYGQCVAAKPESWQRDCHYLKMSIAQCTSSQWVRASMRQCGGGQWGGNLPGAELPYPHSPIIRQIRQACAQPFEAFEECLRQNEAAVGNCAEHMRRFLQCAEQVQPPRSPATVEAQPLPAS

SEQ ID NO: 888658 - protein, 110 aa, Homo sapiens; identical to SEQ ID NO: 888653

SEQ ID NO: 888659 - protein, 110 aa, Homo sapiens; identical to SEQ ID NO: 888653

SEQ ID NO: 888660 - protein, 111 aa, Homo sapiens
MSLSDPGLGYHPTCWTRRTHCLFPSRLGTLVSPRVAMDPNCSCAAAGVSCTCASSCKCKECKCTSCKKSCCSCCPVGCCQVCPGLHLQRGIGEVQLLRLMSGQPCSQVQIE

SEQ ID NO: 888661 - protein, 106 aa, Homo sapiens
SGRLLLLNSRPRRTHCLFPSRLGTLVSPRVAMDPNCSCAAAGVSCTCASSCKCKECKCTSCKKSCCSCCPVGCCQVCPGLHLQRGIGEVQLLRLMSGQPCSQVQIE

SEQ ID NO: 888662 - protein, 106 aa, Homo sapiens; identical to SEQ ID NO: 888661

SEQ ID NO: 888663 - protein, 90 aa, Homo sapiens
SGRLLLLNSRPRDVAMDPNCSCAAAGVSCTCASSCKCKECKCTSCKKSCCSCCPVGCCQVCPGLHLQRGIGEVQLLRLMSGQPCSQVQIE

SEQ ID NO: 888664 - protein, 111 aa, Homo sapiens; identical to SEQ ID NO: 888660

SEQ ID NO: 888665 - protein, 111 aa, Homo sapiens
MERTWGFSSSALSGKGALRAGSAQRRGKWTLIDPLLYLLHLTHRSLAFSLLAGVSCTCASSCKCKECKCTSCKKSECGAISRNLGLWLRLGGNPRLSLSACFWGTGLPLSL

SEQ ID NO: 888666 - protein, 111 aa, Homo sapiens; identical to SEQ ID NO: 888665

SEQ ID NO: 888667 - protein, 72 aa, Homo sapiens
RWLLGSTPPSSRTHCLFPSRLGTLVSPRVAMDPNCSCAAGKGRPGSVPWDAKFPDTIESVPGFEEVVFCYQR

SEQ ID NO: 888668 - protein, 366 aa, Homo sapiens
GADTKSGAERQLRGEPAAAAAAQGSGAPPARPAVRGQCPSSSSSSAAASSVAAASSVAAARAARALRAPLSPRRAAPAPSHAGGAGPGRGARSQPRSMHWGVGFASSRPCVVDLSWNQSISFFGWWAGSEEPFSFYGDIIAFPLQDYGGIMAGLGSDPWWKKTLYLTGGALLAAAAYLLHELLVIRKQQEIDSKDAIILHQFARPNNGVPSLSPFCLKMETYLRMADLPYQVMKKYIMGPKLSTLDATVFGHLAQAMWTLPGTRPERLIKGELINLAMYCERIRRKFWPEWHHDDDNTIYESEESSEGSKTHTPLLDFSFYSRTETFEDEGAENSFSRTPDTDFTGHSLFDSDVDMDDYTDHEQCK

SEQ ID NO: 888669 - protein, 376 aa, Homo sapiens
PRLVASPARSSAPPQDYGGIMAGLGSDPWWKKTLYLTGGALLAAAAYLLHELLVIRKQQEIDSKDAIILHQFARPNNGVPSLSPFCLKMETYLRMADLPYQNYFGGKLSAQGKMPWIEYNHEKVSGTEFIIDFLEEKLGVNLNKNLGPHERAISRAVTKMVEEHFYWTLAYCQWVDNLNETRKMLSLSGGGPFSNLLRWVVCHITKGIVKREMHGHGIGRFSEEEIYMLMEKDMRSLAGLLGDKKYIMGPKLSTLDATVFGHLAQAMWTLPGTRPERLIKGELINLAMYCERIRRKFWPEWHHDDDNTIYESEESSEGSKTHTPLLDFSFYSRTETFEDEGAENSFSRTPDTDFTGHSLFDSDVDMDDYTDHEQCK

SEQ ID NO: 888670 - protein, 336 aa, Homo sapiens
RRRPDRGDAGRGQGAGKQQEIDSKDAIILHQFARPNNGVPSLSPFCLKMETYLRMADLPYQNYFGGKLSAQGKMPWIEYNHEKVSGTEFIIDFLEEKLGVNLNKNLGPHERAISRAVTKMVEEHFYWTLAYCQWVDNLNETRKMLSLSGGGPFSNLLRWVVCHITKGIVKREMHGHGIGRFSEEEIYMLMEKDMRSLAGLLGDKKYIMGPKLSTLDATVFGHLAQAMWTLPGTRPERLIKGELINLAMYCERIRRKFWPEWHHDDDNTIYESEESSEGSKTHTPLLDFSFYSRTETFEDEGAENSFSRTPDTDFTGHSLFDSDVDMDDYTDHEQCK

SEQ ID NO: 888671 - protein, 88 aa, Homo sapiens
TLGVRISTLEFWGNTDHRSGRLLPLRTNPCFPYHTAGELINLAMYCERIRRKFWPEWHHDDDNTIYESEESSEGSKTHTPLLDFSFYS

SEQ ID NO: 888672 - protein, 506 aa, Homo sapiens
GADTKSGAERQLRGEPAAAAAAQGSGAPPARPAVRGQCPSSSSSSAAASSVAAASSVAAARAARALRAPLSPRRAAPAPSHAGGAGPGRGARSQPRSMHWGVGFASSRPCVVDLSWNQSISFFGWWAGSEEPFSFYGDIIAFPLQDYGGIMAGLGSDPWWKKTLYLTGGALLAAAAYLLHELLVIRKQQEIDSKDAIILHQFARPNNGVPSLSPFCLKMETYLRMADLPYQNYFGGKLSAQGKMPWIEYNHEKVSGTEFIIDFLEEKLGVNLNKNLGPHERAISRAVTKMVEEHFYWTLAYCQWVDNLNETRKMLSLSGGGPFSNLLRWVVCHITKGIVKREMHGHGIGRFSEEEIYMLMEKDMRSLAGLLGDKKYIMGPKLSTLDATVFGHLAQAMWTLPGTRPERLIKGELINLAMYCERIRRKFWPEWHHDDDNTIYESEESSEGSKTHTPLLDFSFYSRTETFEDEGAENSFSRTPDTDFTGHSLFDSDVDMDDYTDHEQCK

SEQ ID NO: 888673 - protein, 107 aa, Homo sapiens
MRTNEVNMNSTGELINLAMYCERIRRKFWPEWHHDDDNTIYESEESSEGSKTHTPLLDFSFYSRTETFEDEGAENSFSRTPDTDFTGHSLFDSDVDMDDYTDHEQCK

SEQ ID NO: 888674 - protein, 103 aa, Homo sapiens
MYVIFYKCELINLAMYCERIRRKFWPEWHHDDDNTIYESEESSEGSKTHTPLLDFSFYSRTETFEDEGAENSFSRTPDTDFTGHSLFDSDVDMDDYTDHEQCK

SEQ ID NO: 888675 - protein, 105 aa, Homo sapiens
GKGSGRKRIHGRTAKQQPPTRFVSLRRYRGLSGSGWHGVTGWAGAEVEAEGDGGVVRGALGSRGEALVGARQGEGEEEEPAARAAAALGFSVGPRLGAGGGGGGD

SEQ ID NO: 888676 - protein, 233 aa, Homo sapiens
MAASALYACTKCTQRYPFEELSQGQQLCKECRIAHPIVKCTYCRSEFQQESKTNTICKKCAQNVKQFGTPKPCQYCNIIAAFIGTKCQRCTNSEKKYGPPQTCEQCKQQCAFDRKEEGRRKVDGKLLCWLCTLSYKRVLQKTKEQRKSLGSSHSNSSSSSLTEKDQHHPKHHHHHHHHHHRHSSSHHKISNLSPEEEQGLWKQSHKSSATIQNETPKKKPKLESKPSNGDRCM

SEQ ID NO: 888677 - protein, 105 aa, Homo sapiens; identical to SEQ ID NO: 888675

SEQ ID NO: 888678 - protein, 67 aa, Homo sapiens
TEGRASSSKKRGRVVVSPVATEGSNGDKTKAKAKLKHSTSSLGLNAGESVNLPRGRLSRNVGLHILL

SEQ ID NO: 888679 - protein, 100 aa, Homo sapiens
RGSRPLGHLRPVNSANSNVLLIGRRKEEERLMESYYAGSVLYRTKEFYRRRKNKGRAWDLHIQIHLLHLLLRKTSIIQNIITTIITITIVTAVAITKSAI

SEQ ID NO: 888680 - protein, 105 aa, Homo sapiens; identical to SEQ ID NO: 888675

SEQ ID NO: 888681 - protein, 231 aa, Homo sapiens
MAASALYACTKCTQRYPFEELSQGQQLCKECRIAHPIVKCTYCRSEFQQESKTNTICKKCAQNVKQFGTPKPCQYCNIIAAFIGTKCQRCTNSEKKYGPPQTCEQCKQQCAFDRKEEGRRKVDGKLLCWLCTLSYKRVLQKTKEQRKSLGSSHSNSSSSSLTEKDQHHPKHHHHHHHHHHRHSSSHHKISNLSPEEEQGLWKQSHKSSATIQNETPKKKPKLESKPSNGDR

SEQ ID NO: 888682 - protein, 33 aa, Homo sapiens
MTHNLKWTSNPVQMTWHVELQRQLRLYAIQSTA

SEQ ID NO: 888683 - protein, 125 aa, Homo sapiens
SPPQTQSCAPRPQRQAVTLLLLPLAMSTSTSCPIPGGRDQLPDCYSTTPGGTLYATTPGGTRIIYDRKFLLECKNSPIARTPPCCLPQIPGVTTPPTAPLSKLEELKEQETEEEIPDDAQFEMDI

SEQ ID NO: 888684 - protein, 206 aa, Homo sapiens
MVRPVRHKKPVNYSQFDHSDSDDDFVSATVPLNKKSRTAPKELKQDKPKPNLNNLRKEEIPVQEKTPKKRMALDDKLYQRDLEVALALSVKELPTVTTNVQNSQDKSIEKHGSSKIETMNKSPHISNCSVASDYLDLDKITVEDDVGGVQGKRKAASKAAAQQRKILLEGSDGDSANDTEPDFAPGEDSEDDSDFVRVRIMTKTSL

SEQ ID NO: 888685 - protein, 206 aa, Homo sapiens; identical to SEQ ID NO: 888684

SEQ ID NO: 888686 - protein, 188 aa, Homo sapiens
MVRPVRHKKPVNYSQFDHSDSDDDFVSATVPLNKKSRTAPKELKQDKPKPNLNNLRKEEIPVQEKTPKKRMALDDKLYQRDLEVALALSVKELPTVTTNVQNSQDKSIEKHGSSKIETMNKSPHISNCSVASDYLDLDKITVEDDVGGVQGKSDGDSANDTEPDFAPGEDSEDDSDFVRVRIMTKTSL

SEQ ID NO: 888687 - protein, 223 aa, Homo sapiens
MVRPVRHKKPVNYSQFDHSDSDDDFVSATVPLNKKSRTAPKELKQDKPKPNLNNLRKEEIPVQEKTPKKRLPEGTFSIPASAVPCTKMALDDKLYQRDLEVALALSVKELPTVTTNVQNSQDKSIEKHGSSKIETMNKSPHISNCSVASDYLDLDKITVEDDVGGVQGKRKAASKAAAQQRKILLEGSDGDSANDTEPDFAPGEDSEDDSDFVRVRIMTKTSL

SEQ ID NO: 888688 - protein, 129 aa, Homo sapiens
MRKSKVKEIKKKEVKVKSPVEKKEKKSKSKCNALVTSVDSAPAAVKSESQSLPKKVSLSSDTTRKPLEIRSPSAESKKPKWVPPAASGGSRSSSSPLVVVSVKSPNQSLRLGLSRLARVKPLHPNATST

SEQ ID NO: 888689 - protein, 136 aa, Homo sapiens
MALDDKLYQRDLEVALALSVKELPTVTTNVQNSQDKSIEKHGSSKIETMNKSPHISNCSVASDYLDLDKITVEDDVGGVQGKRKAASKAAAQQRKILLEGSDGDSANDTEPDFAPGEDSEDDSDFVRVRIMTKTSL

SEQ ID NO: 888690 - protein, 206 aa, Homo sapiens; identical to SEQ ID NO: 888684

SEQ ID NO: 888691 - protein, 206 aa, Homo sapiens; identical to SEQ ID NO: 888684

SEQ ID NO: 888692 - protein, 79 aa, Homo sapiens
MVRPVRHKKPVNYSQFDHSDSDDDFVSATVPLNKKSRTAPKYTKQEPTRRSARLSAKPAPPKPEPKPRKTSAKKEPGAK

SEQ ID NO: 888693 - protein, 708 aa, Homo sapiens
MNPTETKAIPVSQQMEGPHLPNKKKHKKQAVKTEPEKKSQSTKLSVVHEKKSQEGKPKEHTEPKSLPKQASDTGSNDAHNKKAVSRSAEQQPSEKSTEPKTKPQDMISAGGESVAGITAISGKPGDKKKEKKSLTPAVPVESKPDKPSGKSGMDAALDDLIDTLGGPEETEEENTTYTGPEVSDPMSSTYIEELGKREVTIPPKYRELLAKKEGITGPPADSSKPIGPDDAIDALSSDFTCGSPTAAGKKTEKEESTEVLKAQSAGTVRSAAPPQEKKRKVEKDTMSDQALEALSASLGTRQAEPELDLRSIKEVDEAKAKEEKLEKCGEDDETIPSEYRLKPATDKDGKPLLPEPEEKPKPRSESELIDELSEDFDRSECKEKPSKPTEKTEESKAAAPAPVSEAVCRTSMCSIQSAPPEPATLKGTVPDDAVEALADSLGKKEADPEDGKPVMDKVKEKAKEEDREKLGEKEETIPPDYRLEEVKDKDGKPLLPKESKEQLPPMSEDFLLDALSEDFSGPQNASSLKFEDAKLAAAISEVVSQTPASTTQAGAPPRDTSQSDKDLDDALDKLSDSLGQRQPDPDENKPMEDKVKEKAKAEHRDKLGERDDTIPPEYRHLLDDNGQDKPVKPPTKKSEDSKKPADDQDPIDALSGDLDSCPSTTETSQNTAKDKCKKAASSSKAPKNGGKAKDSAKTTEETSKPKDD

SEQ ID NO: 888694 - protein, 178 aa, Homo sapiens
GARVPPRAGRGGPIGARGTPAQTWGGVGKAVSSPAPGPSAPPASLPLSLAGLPARPPRHSPRRIPGGSGRSGLAMSQPGQKPAASPRPRRAAAARRTHEHVSEKTSESPSKPGEKKGSDEKKAASLGSSQSSRTYAGGTASATKVSFLWCNSKSSSMNPTEPSCKTDLKEYSQQLSVV

SEQ ID NO: 888695 - protein, 148 aa, Homo sapiens
EPGSLRGQEGEGPSGLGEPRRRPGVGSEKLFHRPLPGPPLLLPPSLSPWQDSPPGLPATLRGAFREAAAAAASPCPSPARSPPPPRGPGEQPPPAAPMSMSVKKPVNRLPNQEKRKDQMRKKQQASAAVNPPEPMLVEQPRPPRSVIS

SEQ ID NO: 888696 - protein, 138 aa, Homo sapiens
EPGSLRGQEGEGPSGLGEPRRRPGVGSEKLFHRPLPGPPLLLPPSLSPWQDSPPGLPATLRGAFREAAAAAASPCPSPARSPPPPRGPGEQPPPAAPMSMSVKKPVNRLPNQEKRKDQMRCRGITGPKVAWTNKPKIK

SEQ ID NO: 888697 - protein, 461 aa, Homo sapiens
AVTSCSESSGKGSLPDFQQQSLSLGLPWPKMGQFLSSTFLEGSPATVWHDKLCDGERRGAREAVRIFQDQAKAKEEKLEKCGEDDETIPSEYRLKPATDKDGKPLLPEPEEKPKPRSESELIDELSEDFDRSECKEKPSKPTEKTEESKAAAPAPVSEAVCRTSMCSIQSAPPEPATLKGTVPDDAVEALADSLGKKEADPEDGKPVMDKVKEKAKEEDREKLGEKEETIPPDYRLEEVKDKDGKPLLPKESKEQLPPMSEDFLLDALSEDFSGPQNASSLKFEDAKLAAAISEVVSQTPASTTQAGAPPRDTSQSDKDLDDALDKLSDSLGQRQPDPDENKPMEDKVKEKAKAEHRDKLGERDDTIPPEYRHLLDDNGQDKPVKPPTKKSEDSKKPADDQDPIDALSGDLDSCPSTTETSQNTAKDKCKKAASSSKAPKNGGKAKDSAKTTEETSKPKDD

SEQ ID NO: 888698 - protein, 110 aa, Homo sapiens
YNFSQEKAKEEDREKLGEKEETIPPDYRLEEVKDKDGKPLLPKESKEQLPPMSEDFLLDALSEDFSGPQNASSLSLNFEGLLKLCWLAILLKVVSPKTPGTKKGTRVSEF

SEQ ID NO: 888699 - protein, 590 aa, Homo sapiens
MISAGGESVAGITAISGKPGDKKKEKKSLTPAVPVESKPDKPSGKSGMDAALDDLIDTLGGPEETEEENTTYTGPEVSDPMSSTYIEELGKREVTIPPKYRELLAKPIGPDDAIDALSSDFTCGSPTAAGKKTEKEESTEVLKAQSAGTVRSAAPPQEKKRKVEKDTMSDQALEALSASLGTRQAEPELDLRSIKEVDEAKAKEEKLEKCGEDDETIPSEYRLKPATDKDGKPLLPEPEEKPKPRSESELIDELSEDFDRSECKEKPSKPTEKTEESKAAAPAPVSEAVCRTSMCSIQSAPPEPATLKGTVPDDAVEALADSLGKKEADPEDGKPVMDKVKEKAKEEDREKLGEKEETIPPDYRLEEVKDKDGKPLLPKESKEQLPPMSEDFLLDALSEDFSGPQNASSLKFEDAKLAAAISEVVSQTPASTTQAGAPPRDTSQSDKDLDDALDKLSDSLGQRQPDPDENKPMEDKVKEKAKAEHRDKLGERDDTIPPEYRHLLDDNGQDKPVKPPTKKSEDSKKPADDQDPIDALSGDLDSCPSTTETSQNTAKDKCKKAASSSKAPKNGGKAKDSAKTTEETSKPKDD

SEQ ID NO: 888700 - protein, 824 aa, Homo sapiens
GARVPPRAGRGGPIGARGTPAQTWGGVGKAVSSPAPGPSAPPASLPLSLAGLPARPPRHSPRRIPGGSGRSGLAMSQPGQKPAASPRPRRAAAARRTHEHVSEKTSESPSKPGEKKGSDEKKAASLGSSQSSRTYAGGTASATKVSASSGATSKSSSMNPTETKAVKTEPEKKSQSTKPKSLPKQASDTGSNDAHNKKAVSRSAEQQPSEKSTEPKTKPQDMISAGGESVAGITAISGKPGDKKKEKKSLTPAVPVESKPDKPSGKSGMDAALDDLIDTLGGPEETEEENTTYTGPEVSDPMSSTYIEELGKREVTIPPKYRELLAKKEGITGPPADSSKPIGPDDAIDALSSDFTCGSPTAAGKKTEKEESTEVLKAQSAGTVRSAAPPQEKKRKVEKDTMSDQALEALSASLGTRQAEPELDLRSIKEVDEAKAKEEKLEKCGEDDETIPSEYRLKPATDKDGKPLLPEPEEKPKPRSESELIDELSEDFDRSECKEKPSKPTEKTEESKAAAPAPVSEAVCRTSMCSIQSAPPEPATLKGTVPDDAVEALADSLGKKEADPEDGKPVMDKVKEKAKEEDREKLGEKEETIPPDYRLEEVKDKDGKPLLPKESKEQLPPMSEDFLLDALSEDFSGPQNASSLKFEDAKLAAAISEVVSQTPASTTQAGAPPRDTSQSDKDLDDALDKLSDSLGQRQPDPDENKPMEDKVKEKAKAEHRDKLGERDDTIPPEYRHLLDDNGQDKPVKPPTKKSEDSKKPADDQDPIDALSGDLDSCPSTTETSQNTAKDKCKKAASSSKAPKNGGKAKDSAKTTEETSKPKDD

SEQ ID NO: 888701 - protein, 843 aa, Homo sapiens
GARVPPRAGRGGPIGARGTPAQTWGGVGKAVSSPAPGPSAPPASLPLSLAGLPARPPRHSPRRIPGGSGRSGLAMSQPGQKPAASPRPRRAAAARRTHEHVSEKTSESPSKPGEKKGSDEKKAASLGSSQSSRTYAGGTASATKVSASSGATSKSSSMNPTETKAVKTEPEKKSQSTKLSVVHEKKSQEGKPKEHTEPKSLPKQASDTGSNDAHNKKAVSRSAEQQPSEKSTEPKTKPQDMISAGGESVAGITAISGKPGDKKKEKKSLTPAVPVESKPDKPSGKSGMDAALDDLIDTLGGPEETEEENTTYTGPEVSDPMSSTYIEELGKREVTIPPKYRELLAKKEGITGPPADSSKPIGPDDAIDALSSDFTCGSPTAAGKKTEKEESTEVLKAQSAGTVRSAAPPQEKKRKVEKDTMSDQALEALSASLGTRQAEPELDLRSIKEVDEAKAKEEKLEKCGEDDETIPSEYRLKPATDKDGKPLLPEPEEKPKPRSESELIDELSEDFDRSECKEKPSKPTEKTEESKAAAPAPVSEAVCRTSMCSIQSAPPEPATLKGTVPDDAVEALADSLGKKEADPEDGKPVMDKVKEKAKEEDREKLGEKEETIPPDYRLEEVKDKDGKPLLPKESKEQLPPMSEDFLLDALSEDFSGPQNASSLKFEDAKLAAAISEVVSQTPASTTQAGAPPRDTSQSDKDLDDALDKLSDSLGQRQPDPDENKPMEDKVKEKAKAEHRDKLGERDDTIPPEYRHLLDDNGQDKPVKPPTKKSEDSKKPADDQDPIDALSGDLDSCPSTTETSQNTAKDKCKKAASSSKAPKNGGKAKDSAKTTEETSKPKDD

SEQ ID NO: 888702 - protein, 824 aa, Homo sapiens; identical to SEQ ID NO: 888700

SEQ ID NO: 888703 - protein, 830 aa, Homo sapiens
GARVPPRAGRGGPIGARGTPAQTWGGVGKAVSSPAPGPSAPPASLPLSLAGLPARPPRHSPRRIPGGSGRSGLAMSQPGQKPAASPRPRRAAAARRTHEHVSEKTSESPSKPGEKKGSDEKKAASLGSSQSSRTYAGGTASATKVSASSGATSKSSSMNPTETKAVKTEPEKKSQSTKLSVVHEKKSQEGKPKEHTEPKSLPKQASDTGSNDAHNKKAVSRSAEQQPSEKSTEPKTKPQDMISAGGESVAGITAISGKPGDKKKEKKSLTPAVPVESKPDKPSGKSGMDAALDDLIDTLGGPEETEEENTTYTGPEVSDPMSSTYIEELGKREVTIPPKYRELLAKPIGPDDAIDALSSDFTCGSPTAAGKKTEKEESTEVLKAQSAGTVRSAAPPQEKKRKVEKDTMSDQALEALSASLGTRQAEPELDLRSIKEVDEAKAKEEKLEKCGEDDETIPSEYRLKPATDKDGKPLLPEPEEKPKPRSESELIDELSEDFDRSECKEKPSKPTEKTEESKAAAPAPVSEAVCRTSMCSIQSAPPEPATLKGTVPDDAVEALADSLGKKEADPEDGKPVMDKVKEKAKEEDREKLGEKEETIPPDYRLEEVKDKDGKPLLPKESKEQLPPMSEDFLLDALSEDFSGPQNASSLKFEDAKLAAAISEVVSQTPASTTQAGAPPRDTSQSDKDLDDALDKLSDSLGQRQPDPDENKPMEDKVKEKAKAEHRDKLGERDDTIPPEYRHLLDDNGQDKPVKPPTKKSEDSKKPADDQDPIDALSGDLDSCPSTTETSQNTAKDKCKKAASSSKAPKNGGKAKDSAKTTEETSKPKDD

SEQ ID NO: 888704 - protein, 824 aa, Homo sapiens; identical to SEQ ID NO: 888700

SEQ ID NO: 888705 - protein, 865 aa, Homo sapiens
GARVPPRAGRGGPIGARGTPAQTWGGVGKAVSSPAPGPSAPPASLPLSLAGLPARPPRHSPRRIPGGSGRSGLAMSQPGQKPAASPRPRRAAAARRTHEHVSEKTSESPSKPGEKKGSDEKKAASLGSSQSSRTYAGGTASATKVSASSGATSKSSSMNPTETKAIPVSQQMEGPHLPNKKKHKKQAVKTEPEKKSQSTKLSVVHEKKSQEGKPKEHTEPKSLPKQASDTGSNDAHNKKAVSRSAEQQPSEKSTEPKTKPQDMISAGGESVAGITAISGKPGDKKKEKKSLTPAVPVESKPDKPSGKSGMDAALDDLIDTLGGPEETEEENTTYTGPEVSDPMSSTYIEELGKREVTIPPKYRELLAKKEGITGPPADSSKPIGPDDAIDALSSDFTCGSPTAAGKKTEKEESTEVLKAQSAGTVRSAAPPQEKKRKVEKDTMSDQALEALSASLGTRQAEPELDLRSIKEVDEAKAKEEKLEKCGEDDETIPSEYRLKPATDKDGKPLLPEPEEKPKPRSESELIDELSEDFDRSECKEKPSKPTEKTEESKAAAPAPVSEAVCRTSMCSIQSAPPEPATLKGTVPDDAVEALADSLGKKEADPEDGKPVMDKVKEKAKEEDREKLGEKEETIPPDYRLEEVKDKDGKPLLPKESKEQLPPMSEDFLLDALSEDFSGPQNASSLKFEDAKLAAAISEVVSQTPASTTQAGAPPRDTSQSDKDLDDALDKLSDSLGQRQPDPDENKPMEDKVKEKAKAEHRDKLGERDDTIPPEYRHLLDDNGQDKPVKPPTKKSEDSKKPADDQDPIDALSGDLDSCPSTTETSQNTAKDKCKKAASSSKAPKNGGKAKDSAKTTEETSKPKDD

SEQ ID NO: 888706 - protein, 740 aa, Homo sapiens
SDTARKFGMRGLRGPVSRRVSASSGATSKSSSMNPTETKAIPVSQQMEGPHLPNKKKHKKQAVKTEPEKKSQSTKLSVVHEKKSQEGKPKEHTEPKSLPKQASDTGSNDAHNKKAVSRSAEQQPSEKSTEPKTKPQDMISAGGESVAGITAISGKPGDKKKEKKSLTPAVPVESKPDKPSGKSGMDAALDDLIDTLGGPEETEEENTTYTGPEVSDPMSSTYIEELGKREVTIPPKYRELLAKKEGITGPPADSSKPIGPDDAIDALSSDFTCGSPTAAGKKTEKEESTEVLKAQSAGTVRSAAPPQEKKRKVEKDTMSDQALEALSASLGTRQAEPELDLRSIKEVDEAKAKEEKLEKCGEDDETIPSEYRLKPATDKDGKPLLPEPEEKPKPRSESELIDELSEDFDRSECKEKPSKPTEKTEESKAAAPAPVSEAVCRTSMCSIQSAPPEPATLKGTVPDDAVEALADSLGKKEADPEDGKPVMDKVKEKAKEEDREKLGEKEETIPPDYRLEEVKDKDGKPLLPKESKEQLPPMSEDFLLDALSEDFSGPQNASSLKFEDAKLAAAISEVVSQTPASTTQAGAPPRDTSQSDKDLDDALDKLSDSLGQRQPDPDENKPMEDKVKEKAKAEHRDKLGERDDTIPPEYRHLLDDNGQDKPVKPPTKKSEDSKKPADDQDPIDALSGDLDSCPSTTETSQNTAKDKCKKAASSSKAPKNGGKAKDSAKTTEETSKPKDD

SEQ ID NO: 888707 - protein, 708 aa, Homo sapiens; identical to SEQ ID NO: 888693

SEQ ID NO: 888708 - protein, 686 aa, Homo sapiens
MNPTETKAVKTEPEKKSQSTKLSVVHEKKSQEGKPKEHTEPKSLPKQASDTGSNDAHNKKAVSRSAEQQPSEKSTEPKTKPQDMISAGGESVAGITAISGKPGDKKKEKKSLTPAVPVESKPDKPSGKSGMDAALDDLIDTLGGPEETEEENTTYTGPEVSDPMSSTYIEELGKREVTIPPKYRELLAKKEGITGPPADSSKPIGPDDAIDALSSDFTCGSPTAAGKKTEKEESTEVLKAQSAGTVRSAAPPQEKKRKVEKDTMSDQALEALSASLGTRQAEPELDLRSIKEVDEAKAKEEKLEKCGEDDETIPSEYRLKPATDKDGKPLLPEPEEKPKPRSESELIDELSEDFDRSECKEKPSKPTEKTEESKAAAPAPVSEAVCRTSMCSIQSAPPEPATLKGTVPDDAVEALADSLGKKEADPEDGKPVMDKVKEKAKEEDREKLGEKEETIPPDYRLEEVKDKDGKPLLPKESKEQLPPMSEDFLLDALSEDFSGPQNASSLKFEDAKLAAAISEVVSQTPASTTQAGAPPRDTSQSDKDLDDALDKLSDSLGQRQPDPDENKPMEDKVKEKAKAEHRDKLGERDDTIPPEYRHLLDDNGQDKPVKPPTKKSEDSKKPADDQDPIDALSGDLDSCPSTTETSQNTAKDKCKKAASSSKAPKNGGKAKDSAKTTEETSKPKDD

SEQ ID NO: 888709 - protein, 667 aa, Homo sapiens
MNPTETKAVKTEPEKKSQSTKPKSLPKQASDTGSNDAHNKKAVSRSAEQQPSEKSTEPKTKPQDMISAGGESVAGITAISGKPGDKKKEKKSLTPAVPVESKPDKPSGKSGMDAALDDLIDTLGGPEETEEENTTYTGPEVSDPMSSTYIEELGKREVTIPPKYRELLAKKEGITGPPADSSKPIGPDDAIDALSSDFTCGSPTAAGKKTEKEESTEVLKAQSAGTVRSAAPPQEKKRKVEKDTMSDQALEALSASLGTRQAEPELDLRSIKEVDEAKAKEEKLEKCGEDDETIPSEYRLKPATDKDGKPLLPEPEEKPKPRSESELIDELSEDFDRSECKEKPSKPTEKTEESKAAAPAPVSEAVCRTSMCSIQSAPPEPATLKGTVPDDAVEALADSLGKKEADPEDGKPVMDKVKEKAKEEDREKLGEKEETIPPDYRLEEVKDKDGKPLLPKESKEQLPPMSEDFLLDALSEDFSGPQNASSLKFEDAKLAAAISEVVSQTPASTTQAGAPPRDTSQSDKDLDDALDKLSDSLGQRQPDPDENKPMEDKVKEKAKAEHRDKLGERDDTIPPEYRHLLDDNGQDKPVKPPTKKSEDSKKPADDQDPIDALSGDLDSCPSTTETSQNTAKDKCKKAASSSKAPKNGGKAKDSAKTTEETSKPKDD

SEQ ID NO: 888710 - protein, 846 aa, Homo sapiens
GARVPPRAGRGGPIGARGTPAQTWGGVGKAVSSPAPGPSAPPASLPLSLAGLPARPPRHSPRRIPGGSGRSGLAMSQPGQKPAASPRPRRAAAARRTHEHVSEKTSESPSKPGEKKGSDEKKAASLGSSQSSRTYAGGTASATKVSASSGATSKSSSMNPTETKAIPVSQQMEGPHLPNKKKHKKQAVKTEPEKKSQSTKPKSLPKQASDTGSNDAHNKKAVSRSAEQQPSEKSTEPKTKPQDMISAGGESVAGITAISGKPGDKKKEKKSLTPAVPVESKPDKPSGKSGMDAALDDLIDTLGGPEETEEENTTYTGPEVSDPMSSTYIEELGKREVTIPPKYRELLAKKEGITGPPADSSKPIGPDDAIDALSSDFTCGSPTAAGKKTEKEESTEVLKAQSAGTVRSAAPPQEKKRKVEKDTMSDQALEALSASLGTRQAEPELDLRSIKEVDEAKAKEEKLEKCGEDDETIPSEYRLKPATDKDGKPLLPEPEEKPKPRSESELIDELSEDFDRSECKEKPSKPTEKTEESKAAAPAPVSEAVCRTSMCSIQSAPPEPATLKGTVPDDAVEALADSLGKKEADPEDGKPVMDKVKEKAKEEDREKLGEKEETIPPDYRLEEVKDKDGKPLLPKESKEQLPPMSEDFLLDALSEDFSGPQNASSLKFEDAKLAAAISEVVSQTPASTTQAGAPPRDTSQSDKDLDDALDKLSDSLGQRQPDPDENKPMEDKVKEKAKAEHRDKLGERDDTIPPEYRHLLDDNGQDKPVKPPTKKSEDSKKPADDQDPIDALSGDLDSCPSTTETSQNTAKDKCKKAASSSKAPKNGGKAKDSAKTTEETSKPKDD

SEQ ID NO: 888711 - protein, 733 aa, Homo sapiens
  misc_feature (5)..(5): Xaa can be any naturally occurring amino acid
RLLAXASEHVSEKTSESPSKPGEKKGSDEKKAASLGSSQSSRTYAGGTASATKVSASSGATSKSSSMNPTETKAVKTEPEKKSQSTKPKSLPKQASDTGSNDAHNKKAVSRSAEQQPSEKSTEPKTKPQDMISAGGESVAGITAISGKPGDKKKEKKSLTPAVPVESKPDKPSGKSGMDAALDDLIDTLGGPEETEEENTTYTGPEVSDPMSSTYIEELGKREVTIPPKYRELLAKKEGITGPPADSSKPIGPDDAIDALSSDFTCGSPTAAGKKTEKEESTEVLKAQSAGTVRSAAPPQEKKRKVEKDTMSDQALEALSASLGTRQAEPELDLRSIKEVDEAKAKEEKLEKCGEDDETIPSEYRLKPATDKDGKPLLPEPEEKPKPRSESELIDELSEDFDRSECKEKPSKPTEKTEESKAAAPAPVSEAVCRTSMCSIQSAPPEPATLKGTVPDDAVEALADSLGKKEADPEDGKPVMDKVKEKAKEEDREKLGEKEETIPPDYRLEEVKDKDGKPLLPKESKEQLPPMSEDFLLDALSEDFSGPQNASSLKFEDAKLAAAISEVVSQTPASTTQAGAPPRDTSQSDKDLDDALDKLSDSLGQRQPDPDENKPMEDKVKEKAKAEHRDKLGERDDTIPPEYRHLLDDNGQDKPVKPPTKKSEDSKKPADDQDPIDALSGDLDSCPSTTETSQNTAKDKCKKAASSSKAPKNGGKAKDSAKTTEETSKPKDD

SEQ ID NO: 888712 - protein, 819 aa, Homo sapiens
GARVPPRAGRGGPIGARGTPAQTWGGVGKAVSSPAPGPSAPPASLPLSLAGLPARPPRHSPRRIPGGSGRSGLAMSQPGQKPAASPRPRRAAAARRTHEHVSEKTSESPSKPGEKKGSDEVSASSGATSKSSSMNPTETKAVKTEPEKKSQSTKLSVVHEKKSQEGKPKEHTEPKSLPKQASDTGSNDAHNKKAVSRSAEQQPSEKSTEPKTKPQDMISAGGESVAGITAISGKPGDKKKEKKSLTPAVPVESKPDKPSGKSGMDAALDDLIDTLGGPEETEEENTTYTGPEVSDPMSSTYIEELGKREVTIPPKYRELLAKKEGITGPPADSSKPIGPDDAIDALSSDFTCGSPTAAGKKTEKEESTEVLKAQSAGTVRSAAPPQEKKRKVEKDTMSDQALEALSASLGTRQAEPELDLRSIKEVDEAKAKEEKLEKCGEDDETIPSEYRLKPATDKDGKPLLPEPEEKPKPRSESELIDELSEDFDRSECKEKPSKPTEKTEESKAAAPAPVSEAVCRTSMCSIQSAPPEPATLKGTVPDDAVEALADSLGKKEADPEDGKPVMDKVKEKAKEEDREKLGEKEETIPPDYRLEEVKDKDGKPLLPKESKEQLPPMSEDFLLDALSEDFSGPQNASSLKFEDAKLAAAISEVVSQTPASTTQAGAPPRDTSQSDKDLDDALDKLSDSLGQRQPDPDENKPMEDKVKEKAKAEHRDKLGERDDTIPPEYRHLLDDNGQDKPVKPPTKKSEDSKKPADDQDPIDALSGDLDSCPSTTETSQNTAKDKCKKAASSSKAPKNGGKAKDSAKTTEETSKPKDD

SEQ ID NO: 888713 - protein, 706 aa, Homo sapiens
MATERPHHFLVGGRGIKSSSMNPTETKAVKTEPEKKSQSTKLSVVHEKKSQEGKPKEHTEPKSLPKQASDTGSNDAHNKKAVSRSAEQQPSEKSTEPKTKPQDMISAGGESVAGITAISGKPGDKKKEKKSLTPAVPVESKPDKPSGKSGMDAALDDLIDTLGGPEETEEENTTYTGPEVSDPMSSTYIEELGKREVTIPPKYRELLAKKEGITGPPADSSKPIGPDDAIDALSSDFTCGSPTAAGKKTEKEESTEVLKAQSAGTVRSAAPPQEKKRKVEKDTMSDQALEALSASLGTRQAEPELDLRSIKEVDEAKAKEEKLEKCGEDDETIPSEYRLKPATDKDGKPLLPEPEEKPKPRSESELIDELSEDFDRSECKEKPSKPTEKTEESKAAAPAPVSEAVCRTSMCSIQSAPPEPATLKGTVPDDAVEALADSLGKKEADPEDGKPVMDKVKEKAKEEDREKLGEKEETIPPDYRLEEVKDKDGKPLLPKESKEQLPPMSEDFLLDALSEDFSGPQNASSLKFEDAKLAAAISEVVSQTPASTTQAGAPPRDTSQSDKDLDDALDKLSDSLGQRQPDPDENKPMEDKVKEKAKAEHRDKLGERDDTIPPEYRHLLDDNGQDKPVKPPTKKSEDSKKPADDQDPIDALSGDLDSCPSTTETSQNTAKDKCKKAASSSKAPKNGGKAKDSAKTTEETSKPKDD

SEQ ID NO: 888714 - protein, 673 aa, Homo sapiens
MNPTETKAVKTEPEKKSQSTKLSVVHEKKSQEGKPKEHTEPKSLPKQASDTGSNDAHNKKAVSRSAEQQPSEKSTEPKTKPQDMISAGGESVAGITAISGKPGDKKKEKKSLTPAVPVESKPDKPSGKSGMDAALDDLIDTLGGPEETEEENTTYTGPEVSDPMSSTYIEELGKREVTIPPKYRELLAKPIGPDDAIDALSSDFTCGSPTAAGKKTEKEESTEVLKAQSAGTVRSAAPPQEKKRKVEKDTMSDQALEALSASLGTRQAEPELDLRSIKEVDEAKAKEEKLEKCGEDDETIPSEYRLKPATDKDGKPLLPEPEEKPKPRSESELIDELSEDFDRSECKEKPSKPTEKTEESKAAAPAPVSEAVCRTSMCSIQSAPPEPATLKGTVPDDAVEALADSLGKKEADPEDGKPVMDKVKEKAKEEDREKLGEKEETIPPDYRLEEVKDKDGKPLLPKESKEQLPPMSEDFLLDALSEDFSGPQNASSLKFEDAKLAAAISEVVSQTPASTTQAGAPPRDTSQSDKDLDDALDKLSDSLGQRQPDPDENKPMEDKVKEKAKAEHRDKLGERDDTIPPEYRHLLDDNGQDKPVKPPTKKSEDSKKPADDQDPIDALSGDLDSCPSTTETSQNTAKDKCKKAASSSKAPKNGGKAKDSAKTTEETSKPKDD

SEQ ID NO: 888715 - protein, 824 aa, Homo sapiens; identical to SEQ ID NO: 888700

SEQ ID NO: 888716 - protein, 824 aa, Homo sapiens; identical to SEQ ID NO: 888700

SEQ ID NO: 888717 - protein, 824 aa, Homo sapiens; identical to SEQ ID NO: 888700

SEQ ID NO: 888718 - protein, 824 aa, Homo sapiens; identical to SEQ ID NO: 888700

SEQ ID NO: 888719 - protein, 824 aa, Homo sapiens; identical to SEQ ID NO: 888700

SEQ ID NO: 888720 - protein, 796 aa, Homo sapiens
GARVPPRAGRGGPIGARGTPAQTWGGVGKAVSSPAPGPSAPPASLPLSLAGLPARPPRHSPRRIPGGSGRSGLAMSQPGQKPAASPRPRRAAAARRTHEHVSEKTSESPSKPGEKKGSDEKKAASLGSSQSSRTYAGGTASATKVSASSGATSKSSSMNPTETKAVKTEPEKKSQSTKLSVVHEKKSQEGKPKEHTEPKSLPKQASDTGSNDAHNKKAVSRSAEQQPSEKSTEPKTKPQDMISAGGESVAGITAISGKPGDKKKEKKSLTPAVPVESKPDKPSGKSGMDAALDDLIDTLGGPEETEEENTTYTGPEVSDPMSSTYIEELGKREVTIPPKYRELLAKKEGITGPPADSSKPIGPDDAIDALSSDFTCGSPTAAGKKTEKEESTEVLKAQSAGTVRSAAPPQEKKRKVEKDTMSDQALEALSASLGTRQAEPELDLRSIKEVDEAKAKEEKLEKCGEDDETIPSEYRLKPATDKDGKPLLPEPEEKPKPRSESELIDELSEDFDRSECKEKPSKPTEKTEESKAAAPAPVSEAVCRTSMCSIQSAPPEPATLKGTVPDDAVEALADSLGKKEADPEDGKPVMDKVKEKAKEEDREKLGEKEETIPPDYRLEEVKDKDGKPLLPKESKEQLPPMSEDFLLDALSEDFSGPQNASSLKFEDAKLAAAISEVVSQTPASTTQAGAPPRDTSQSDKDLDDALDKLSDSLGQRQPDPDENKPMEDKVKEKAKAEHRDKLGERDDTIPPEYRHLLDDNGQDKPVKPPTKKSEDSKKPADDLDPIDALTAEDQAG

SEQ ID NO: 888721 - protein, 693 aa, Homo sapiens
GARVPPRAGRGGPIGARGTPAQTWGGVGKAVSSPAPGPSAPPASLPLSLAGLPARPPRHSPRRIPGGSGRSGLAMSQPGQKPAASPRPRRAAAARRTHEHVSEKTSESPSKPGEKKGSDEKKAASLGSSQSSRTYAGGTASATKVSASSGATSKSSSMNPTETKAVKTEPEKKSQSTKLSVVHEKKSQEGKPKEHTEPKSLPKQASDTGSNDAHNKKAVSRSAEQQPSEKSTEPKTKPQDMISAGGESVAGITAISGKPGDKKKEKKSLTPAVPVESKPDKPSGKSGMDAALDDLIDTLGGPEETEEENTTYTGPEVSDPMSSTYIEELGKREVTIPPKYRELLAKKEGITGPPADSSKPIGPDDAIDALSSDFTCGSPTAAGKKTEKEESTEVLKAQSAGTVRSAAPPQEKKRKVEKDTMSDQALEALSASLGTRQAEPELDLRSIKEVDEAKAKEEKLEKCGEDDETIPSEYRLKPATDKDGKPLLPEPEEKPKPRSESELIDELSEDFDRSECKEKPSKPTEKTEESKAAAPAPVSEAVCRTSMCSIQSAPPEPATLKGTVPDDAVEALADSLGKKEADPEDGKPVMDKVKEKAKEEDREKLGEKEETIPPDYRLEEVKDKDGKPLLPKESKEQLPPMSEDFLLDALSEDFSGPQNASSLLQRPKLEPHPVIPRRVTKTSMMPWINSLTV

SEQ ID NO: 888722 - protein, 143 aa, Homo sapiens
LLPSLFSKKSGGGMVGSVDPYETNPVEDKVKEKAKAEHRDKLGERDDTIPPEYRHLLDDNGQDKPVKPPTKKSEDSKKPADDQDPIDALSGDLDSCPSTTETSQNTAKDKCKKAASSSKAPKNGGKAKDSAKTTEETSKPKDD

SEQ ID NO: 888723 - protein, 843 aa, Homo sapiens; identical to SEQ ID NO: 888701

SEQ ID NO: 888724 - protein, 121 aa, Homo sapiens
YKRNSAWGDRAYWIDPDGVLMSSLSYRILHHVRSIAETRISTLAAPPMKKSEDSKKPADDQDPIDALSGDLDSCPSTTETSQNTAKDKCKKAASSSKAPKNGGKAKDSAKTTEETSKPKDD

SEQ ID NO: 888725 - protein, 843 aa, Homo sapiens; identical to SEQ ID NO: 888701

SEQ ID NO: 888726 - protein, 843 aa, Homo sapiens; identical to SEQ ID NO: 888701

SEQ ID NO: 888727 - protein, 567 aa, Homo sapiens
GARVPPRAGRGGPIGARGTPAQTWGGVGKAVSSPAPGPSAPPASLPLSLAGLPARPPRHSPRRIPGGSGRSGLAMSQPGQKPAASPRPRRAAAARRTHEHVSEKTSESPSKPGEKKGSDEKKAASLGSSQSSRTYAGGTASATKVSASSGATSKSSSMNPTETKAVKTEPEKKSQSTKLSVVHEKKSQEGKPKEHTEPKSLPKQASDTGSNDAHNKKAVSRSAEQQPSEKSTEPKTKPQDMISAGGESVAGITAISGKPGDKKKEKKSLTPAVPVESKPDKPSGKSGMDAALDDLIDTLGGPEETEEENTTYTGPEVSDPMSSTYIEELGKREVTIPPKYRELLAKKEGITGPPADSSKPIGPDDAIDALSSDFTCGSPTAAGKKTEKEESTEVLKAQSAGTVRSAAPPQEKKRKVEKDTMSDQALEALSASLGTRQAEPELDLRSIKEVDEAKAKEEKLEKCGEDDETIPSEYRLKPATDKDGKPLLPEPEEKPKPRSESELIDELSEDFDRSECKEKPSKPTEKTEESKAAAPAPVSEAVCRTSMCSIQSAPPEPATLVSDSLGI

SEQ ID NO: 888728 - protein, 531 aa, Homo sapiens
GARVPPRAGRGGPIGARGTPAQTWGGVGKAVSSPAPGPSAPPASLPLSLAGLPARPPRHSPRRIPGGSGRSGLAMSQPGQKPAASPRPRRAAAARRTHEHVSEKTSESPSKPGEKKGSDEKKAASLGSSQSSRTYAGGTASATKVSASSGATSKSSSMNPTETKAVKTEPEKKSQSTKLSVVHEKKSQEGKPKEHTEPKSLPKQASDTGSNDAHNKKAVSRSAEQQPSEKSTEPKTKPQDMISAGGESVAGITAISGKPGDKKKEKKSLTPAVPVESKPDKPSGKSGMDAALDDLIDTLGGPEETEEENTTYTGPEVSDPMSSTYIEELGKREVTIPPKYRELLAKKEGITGPPADSSKPIGPDDAIDALSSDFTCGSPTAAGKKTEKEESTEVLKAQSAGTVRSAAPPQEKKRKVEKDTMSDQALEALSASLGTRQAEPELDLRSIKEVDEAKAKEEKLEKCGEDDETIPSEYRLKPATDKDGKPLLPEPEEKPKPRSESELIDELSEDFDRSECKEKPSKPTEKTEVCF

SEQ ID NO: 888729 - protein, 157 aa, Homo sapiens
EPGSLRGQEGEGPSGLGEPRRRPGVGSEKLFHRPLPGPPLLLPPSLSPWQDSPPGLPATLRGAFREAAAAAASPCPSPARSPPPPRGPGEQPPPAAPMSMSVKKPVNRLPNQEKRKDQMRKKQQASAAVNPPEPMLVEQPRPPRCQLPLVQPASLPV

SEQ ID NO: 888730 - protein, 824 aa, Homo sapiens; identical to SEQ ID NO: 888700

SEQ ID NO: 888731 - protein, 842 aa, Homo sapiens
GARVPPRAGRGGPIGARGTPAQTWGGVGKAVSSPAPGPSAPPASLPLSLAGLPARPPRHSPRRIPGGSGRSGLAMSQPGQKPAASPRPRRAAAARRTHEHVSEKTSESPSKPGEKKGSDEKKAASLGSSQSSRTYAGGTASATKVSASSGATSKSSSMNPTETKAVKTEPEKKSQSTKLSVVHEKKSQEGKPKEHTEPKSLPKQASDTGSNDAHNKKAVSRSAEQQPSEKSTEPKTKPQDMISAGGESVAGITAISGKPGDKKKEKKSLTPAVPVESKPDKPSGKSGMDAALDDLIDTLGGPEETEEENTTYTGPEVSDPMSSTYIEELGKREVTIPPKYRELLAKKEGITGPPADSSKPIGPDDAIDALSSDFTCGSPTAAGKKTEKEESTEVLKAQSAGTVRSAAPPQEKKRKVEKDTMSDQALEALSASLGTRQAEPELDLRSIKEVDEAKAKEEKLEKCGEDDETIPSEYRLKPATDKDGKPLLPEPEEKPKPRSESELIDELSEDFDRSECKEKPSKPTEKTEESKAAAPAPVSEAVCRTSMCSIQSAPPEPATLKGTVPDDAVEALADSLGKKEADPEDGKPVMDKVKEKAKEEDREKLGEKEETIPPDYRLEEVKDKDGKPLLPKESKEQLPPMSEDFLLDALSEDFSGPQNASSLKFEDAKLAAAISEVVSQTPASTTQAGAPPRDTSQSDKDLDDALDKLSDSLGQRQPDPDENKPMEDKVKEKAKAEHRDKLGERDDTIPPEYRHLLDDNGQDKPVKPPTKKSEDSKKPADDQDPIDALSGDLDSCPSTTETSQNTAKDKCKKAASSSKAPKNGGKAKDSAKGKWSSKYTTN

SEQ ID NO: 888732 - protein, 260 aa, Homo sapiens
GVLEDPVYICQEKAKEEDREKLGEKEETIPPDYRLEEVKDKDGKPLLPKESKEQLPPMSEDFLLDALSEDFSGPQNASSLKFEDAKLAAAISEVVSQTPASTTQAGAPPRDTSQSDKDLDDALDKLSDSLGQRQPDPDENKPMEDKVKEKAKAEHRDKLGERDDTIPPEYRHLLDDNGQDKPVKPPTKKSEDSKKPADDQDPIDALSGDLDSCPSTTETSQNTAKDKCKKAASSSKAPKNGGKAKDSAKTTEETSKPKDD

SEQ ID NO: 888733 - protein, 843 aa, Homo sapiens; identical to SEQ ID NO: 888701

SEQ ID NO: 888734 - protein, 830 aa, Homo sapiens; identical to SEQ ID NO: 888703

SEQ ID NO: 888735 - protein, 91 aa, Homo sapiens
REFIILLREFIILLREFIILLEDSKKPADDQDPIDALSGDLDSCPSTTETSQNTAKDKCKKAASSSKAPKNGGKAKDSAKTTEETSKPKDD

SEQ ID NO: 888736 - protein, 666 aa, Homo sapiens
GARVPPRAGRGGPIGARGTPAQTWGGVGKAVSSPAPGPSAPPASLPLSLAGLPARPPRHSPRRIPGGSGRSGLAMSQPGQKPAASPRPRRAAAARRTHEHVSEKTSESPSKPGEKKGSDEKKAASLGSSQSSRTYAGGTASATKVSASSGATSKSSSMNPTETKAVKTEPEKKSQSTKLSVVHEKKSQEGKPKEHTEPKSLPKQASDTGSNDAHNKKAVSRSAEQQPSEKSTEPKTKPQDMISAGGESVAGITAISGKPGDKKKEKKSLTPAVPVESKPDKPSGKSGMDAALDDLIDTLGGPEETEEENTTYTGPEVSDPMSSTYIEELGKREVTIPPKYRELLAKKEGITGPPADSSKPIGPDDAIDALSSDFTCGSPTAAGKKTEKEESTEVLKAQSAGTVRSAAPPQEKKRKVEKDTMSDQALEALSASLGTRQAEPELDLRSIKEVDEAKAKEEKLEKCGEDDETIPSEYRLKPATDKDGKPLLPEPEEKPKPRSESELIDELSEDFDRSECKEKPSKPTEKTEESKAAAPAPVSEAVCRTSMCSIQSAPPEPATLKGTVPDDAVEALADSLGKKEADPEDGKPVMDKVKEKAKEEDREKLGEKEETIPPDYRLEEVKVRWKATPAQKSLRNSVPPMSEDFPLDACRDDFSGPNASLLIEEC

SEQ ID NO: 888737 - protein, 157 aa, Homo sapiens; identical to SEQ ID NO: 888729

SEQ ID NO: 888738 - protein, 962 aa, Homo sapiens
MASNSTKSFLADAGYGEQELDANSALMELDKGLRSGKLGEQCEAVVRFPRLFQKYPFPILINSAFLKLADVFRVGNNFLRLCVLKVTQQSEKHLEKILNVDEFVKRIFSVIHSNDPVARAITLRMLGSLASIIPERKNAHHSIRQSLDSHDNVEVEAAVFAAANFSAQSKDFAVGICNKISEMIQGLATPVDLKLKLIPILQHMHHDAILASSARQLLQQLVTSYPSTKMVIVSLHTFTLLAASSLVDTPKQIQLLLQYLKNDPRKAVKRLAIQDLKLLANKTPHTWSRENIQALCECALQTPYDSLKLGMLSVLSTLSGTIAIKHYFSIVPGNVSSSPRSSDLVKLAQECCYHNNRGIAAHGVRVLTNITVSCQEKDLLALEQDAVFGLESLLVLCSQDDSPGAQATLKIALNCMVKLAKGRPHLSQSVVETLLTQLHSAQDAARILMCHCLAAIAMQLPVLGDGMLGDLMELYKVIGRSATDKQQELLVSLATVIFVASQKALSVESKAVIKQQLESVSNGWTVYRIARQASRMGNHDMAKELYQSLLTQVASEHFYFWLNSLKEFSHAEQCLTGLQEENYSSALSCIAESLKFYHKGIASLTAASTPLNPLSFQCEFVKLRIDLLQAFSQLICTCNSLKTSPPPAIATTIAMTLGNDLQRCGRISNQMKQSMEEFRSLASRYGDLYQASFDADSATLRNVELQQQSCLLISHAIEALILDPESASFQEYGSTGTAHADSEYERRMMSVYNHVLEEVESLNRKYTPVSYMHTACLCNAIIALLKVPLSFQRYFFQKLQSTSIKLALSPSPRNPAEPIAVQNNQQLALKVEGVVQHGSKPGLFRKIQSVCLNVSSTLQSKSGQDYKIPIDNMTNEMEQRVEPHNDYFSTQFLLNFAILGTHNITVESSVKDANGIVWKTGPRTTIFVKSLEDPYSQQIRLQQQQAQQPLQQQQQRNAYTRF

SEQ ID NO: 888739 - protein, 962 aa, Homo sapiens; identical to SEQ ID NO: 888738

SEQ ID NO: 888740 - protein, 942 aa, Homo sapiens
MASNSTKSFLADAGYGEQELDANSALMELDKGLRSGKLGEQCEAVVRFPRLFQKYPFPILINSAFLKLADVFRVGNNFLRLCVLKVTQQSEKHLEKILNVDEFVKRIFSVIHSNDPVARAITLRMLGSLASIIPERKNAHHSIRQSLDSHDNVEVEAAVFAAANFSAQSKDFAVGICNKISEMIQGLATPVDLKLKLIPILQHMHHDAILASSARQLLQQLVTSYPSTKMVIVSLHTFTLLAASSLVDTPKQIQLLLQYLKNDPRKAVKRLAIQDLKLLANKTPHTWSRENIQALCECALQTPYDSLKLGMLSVLSTLSGTIAIKHYFSIVPGNVSSSPRSSDLVKLAQECCYHNNRGIAAHGVRVLTNITVSCQEKDLLALEQDAVFGLESLLVLCSQDDSPGAQATLKIALNCMVKLAKGRPHLSQSVVETLLTQLHSAQDAARILMCHCLAAIAMQLPVLGDGMLGDLMELYKVIGRSATDKQQELLVSLATVIFVASQKALSVESKAVIKQQLESVSNGWTVYRIARQASRMGNHDMAKELYQSLLTQVASEHFYFWLNSLKEFSHAEQCLTGLQEENYSSALSCIAESLKFYHKGIASLTAASTPLNPLSFQCEFVKLRIDLLQAFSQLICTCNSLKTSPPPAIATTIAMTLGNDLQRCGRISNQMKQSMEEFRSLASRYGDLYQASFDADSATLRNVELQQQSCLLISHAIEALILDPESASFQEYGSTGTAHADSEYERRMMSVYNHVLEEVESLNRKYTPVSYMRYFFQKLQSTSIKLALSPSPRNPAEPIAVQNNQQLALKVEGVVQHGSKPGLFRKIQSVCLNVSSTLQSKSGQDYKIPIDNMTNEMEQRVEPHNDYFSTQFLLNFAILGTHNITVESSVKDANGIVWKTGPRTTIFVKSLEDPYSQQIRLQQQQAQQPLQQQQQRNAYTRF

SEQ ID NO: 888741 - protein, 502 aa, Homo sapiens
MASNSTKSFLADAGYGEQELDANSALMELDKGLRSGKLGEQCEAVVRFPRLFQKYPFPILINSAFLKLADVFRVGNNFLRLCVLKVTQQSEKHLEKILNVDEFVKRIFSVIHSNDPVARAITLRMLGSLASIIPERKNAHHSIRQSLDSHDNVEVEAAVFAAANFSAQSKDFAVGICNKISEMIQGLATPVDLKLKLIPILQHMHHDAILASSARQLLQQLVTSYPSTKMVIVSLHTFTLLAASSLVDTPKQIQLLLQYLKNDPRKAVKRLAIQDLKLLANKTPHTWSRENIQALCECALQTPYDSLKLGMLSVLSTLSGTIAIKHYFSIVPGNVSSSPRSSDLVKLAQECCYHNNRGIAAHGVRVLTNITVSCQEKDLLALEQDAVFGLESLLVLCSQDDSPGAQATLKIALNCMVKLAKGRPHLSQSVVETLLTQLHSAQDAARILMCHCLAAIAMQLPVLGDGMLGDLMELYKVIGRSATDKQQELLFPGIWIYWNSPC

SEQ ID NO: 888742 - protein, 308 aa, Homo sapiens [sequence omitted]

SEQ ID NO: 888743 - protein, 811 aa, Homo sapiens
MASNSTKSFLADAGYGEQELDANSALMELDKGLRSGKLGEQCEAVVRFPRLFQKYPFPILINSAFLKLADVFRVGNNFLRLCVLKVTQQSEKHLEKILNVDEFVKRIFSVIHSNDPVARAITLRMLGSLASIIPERKNAHHSIRQSLDSHDNVEVEAAVFAAANFSAQSKDFAVGICNKISEMIQGLATPVDLKLKLIPILQHMHHDAILASSARQLLQQLVTSYPSTKMVIVSLHTFTLLAASSLVDTPKQIQLLLQYLKNDPRKAVKRLAIQDLKLLANKTPHTWSRENIQALCECALQTPYDSLKLGMLSVLSTLSGTIAIKHYFSIVPGNVSSSPRSSDLVKLAQECCYHNNRGIAAHGVRVLTNITVSCQEKDLLALEQDAVFGLESLLVLCSQDDSPGAQATLKIALNCMVKLAKGRPHLSQSVVETLLTQLHSAQDAARILMCHCLAAIAMQLPVLGDGMLGDLMELYKVIGRSATDKQQELLVSLATVIFVASQKALSVESKAVIKQQLESVSNGWTVYRIARQASRMGNHDMAKELYQSLLTQVASEHFYFWLNSLKEFSHAEQCLTGLQEENYSSALSCIAESLKFYHKGIASLTAASTPLNPLSFQCEFVKLRIDLLQAFSQLICTCNSLKTSPPPAIATTIAMTLGNDLQRCGRISNQMKQSMEEFRSLASRYGDLYQASFDADSATLRNVELQQQSCLLISHAIEALILDPESASFQEYGSTGTAHADSEYERRMMSVYNHVLEEVESLNRKYTPVSYMASGICFIELLLYGCGFFIHLWHLLCEFNKLTFLCLFPYP

SEQ ID NO: 888744 - protein, 249 aa, Homo sapiens
SNPPKIAAVCPPRALFQEYGSTGTAHADSEYERRMMSVYNHVLEEVESLNRKYTPVSYMHTACLCNAIIALLKVPLSFQRYFFQKLQSTSIKLALSPSPRNPAEPIAVQNNQQLALKVEGVVQHGSKPGLFRKIQSVCLNVSSTLQSKSGQDYKIPIDNMTNEMEQRVEPHNDYFSTQFLLNFAILGTHNITVESSVKDANGIVWKTGPRTTIFVKSLEDPYSQQIRLQQQQAQQPLQQQQQRNAYTRF

SEQ ID NO: 888745 - protein, 640 aa, Homo sapiens
MASNSTKSFLADAGYGEQELDANSALMELDKGLRSGKLGEQCEAVVRFPRLFQKYPFPILINSAFLKLADVFRVGNNFLRLCVLKVTQQSEKHLEKILNVDEFVKRIFSVIHSNDPVARAITLRMLGSLASIIPERKNAHHSIRQSLDSHDNVEVEAAVFAAANFSAQSKDFAVGICNKISEMIQGLATPVDLKLKLIPILQHMHHDAILASSARQLLQQLVTSYPSTKMVIVSLHTFTLLAASSLVDTPKQIQLLLQYLKNDPRKAVKRLAIQDLKLLANKTPHTWSRENIQALCECALQTPYDSLKLGMLSVLSTLSGTIAIKHYFSIVPGNVSSSPRSSDLVKLAQECCYHNNRGIAAHGVRVLTNITVSCQEKDLLALEQDAVFGLESLLVLCSQDDSPGAQATLKIALNCMVKLAKGRPHLSQSVVETLLTQLHSAQDAARILMCHCLAAIAMQLPVLGDGMLGDLMELYKVIGRSATDKQQELLVSLATVIFVASQKALSVESKAVIKQQLESVSNGWTVYRIARQASRMGNHDMAKELYQSLLTQVASEHFYFWLNSLKEFSHAEQCLTGLQEENYSSALSCIAESLKFYHKGIASLTVSPLNSPLVVMIYVRVLSLLFLDCPISTNLRNLLI

SEQ ID NO: 888746 - protein, 838 aa, Homo sapiens
MLGSLASIIPERKNAHHSIRQSLDSHDNVEVEAAVFAAANFSAQSKDFAVGICNKISEMIQGLATPVDLKLKLIPILQHMHHDAILASSARQLLQQLVTSYPSTKMVIVSLHTFTLLAASSLVDTPKQIQLLLQYLKNDPRKAVKRLAIQDLKLLANKTPHTWSRENIQALCECALQTPYDSLKLGMLSVLSTLSGTIAIKHYFSIVPGNVSSSPRSSDLVKLAQECCYHNNRGIAAHGVRVLTNITVSCQEKDLLALEQDAVFGLESLLVLCSQDDSPGAQATLKIALNCMVKLAKGRPHLSQSVVETLLTQLHSAQDAARILMCHCLAAIAMQLPVLGDGMLGDLMELYKVIGRSATDKQQELLVSLATVIFVASQKALSVESKAVIKQQLESVSNGWTVYRIARQASRMGNHDMAKELYQSLLTQVASEHFYFWLNSLKEFSHAEQCLTGLQEENYSSALSCIAESLKFYHKGIASLTAASTPLNPLSFQCEFVKLRIDLLQAFSQLICTCNSLKTSPPPAIATTIAMTLGNDLQRCGRISNQMKQSMEEFRSLASRYGDLYQASFDADSATLRNVELQQQSCLLISHAIEALILDPESASFQEYGSTGTAHADSEYERRMMSVYNHVLEEVESLNRKYTPVSYMHTACLCNAIIALLKVPLSFQRYFFQKLQSTSIKLALSPSPRNPAEPIAVQNNQQLALKVEGVVQHGSKPGLFRKIQSVCLNVSSTLQSKSGQDYKIPIDNMTNEMEQRVEPHNDYFSTQFLLNFAILGTHNITVESSVKDANGIVWKTGPRTTIFVKSLEDPYSQQIRLQQQQAQQPLQQQQQRNAYTRF

SEQ ID NO: 888747 - protein, 962 aa, Homo sapiens; identical to SEQ ID NO: 888738

SEQ ID NO: 888748 - protein, 617 aa, Homo sapiens
MASNSTKSFLADAGYGEQELDANSALMELDKGLRSGKLGEQCEAVVRFPRLFQKYPFPILINSAFLKLADVFRVGNNFLRLCVLKVTQQSEKHLEKILNVDEFVKRIFSVIHSNDPVARAITLRMLGSLASIIPERKNAHHSIRQSLDSHDNVEVEAAVFAAANFSAQSKDFAVGICNKISEMIQGLATPVDLKLKLIPILQHMHHDAILASSARQLLQQLVTSYPSTKMVIVSLHTFTLLAASSLVDTPKQIQLLLQYLKNDPRKAVKRLAIQDLKLLANKTPHTWSRENIQALCECALQTPYDSLKLGMLSVLSTLSGTIAIKHYFSIVPGNVSSSPRSSDLVKLAQECCYHNNRGIAAHGVRVLTNITVSCQEKDLLALEQDAVFGLESLLVLCSQDDSPGAQATLKIALNCMVKLAKGRPHLSQSVVETLLTQLHSAQDAARILMCHCLAAIAMQLPVLGDGMLGDLMELYKVIGRSATDKQQELLVSLATVIFVASQKALSVESKAVIKQQLESVSNGWTVYRIARQASRMGNHDMAKELYQSLLTQVASEHFYFWLNSLKEFSHAEQCLTGLQEENYSSALSCIAESLKFYHKGIASLTFPGIWIYWNSPC

SEQ ID NO: 888749 - protein, 728 aa, Homo sapiens [sequence omitted]

SEQ ID NO: 888750 - protein, 736 aa, Homo sapiens [sequence omitted]

SEQ ID NO: 888751 - protein, 249 aa, Homo sapiens
MYVSSHTQKQLREPYFQEYGSTGTAHADSEYERRMMSVYNHVLEEVESLNRKYTPVSYMHTACLCNAIIALLKVPLSFQRYFFQKLQSTSIKLALSPSPRNPAEPIAVQNNQQLALKVEGVVQHGSKPGLFRKIQSVCLNVSSTLQSKSGQDYKIPIDNMTNEMEQRVEPHNDYFSTQFLLNFAILGTHNITVESSVKDANGIVWKTGPRTTIFVKSLEDPYSQQIRLQQQQAQQPLQQQQQRNAYTRF

SEQ ID NO: 888752 - protein, 107 aa, Homo sapiens [sequence omitted]

SEQ ID NO: 888753 - protein, 73 aa, Homo sapiens
GSAGSVGRPRNLIRDAAAQSEGGPKSRDSKRPVATRGAKEHSAFKRIGVRCSPLLPGVFCLLPEEEGSTGGFL

SEQ ID NO: 888754 - protein, 320 aa, Homo sapiens [sequence omitted]

SEQ ID NO: 888755 - protein, 70 aa, Homo sapiens
GSAGSVGRPRNLIRDAAAQSEGGPKSRDSKRPVATRGAKEHSAFKRIGVRCSPLLPGVFCLLPEEEGSTV

SEQ ID NO: 888756 - protein, 484 aa, Homo sapiens
MKTLETQPLAPDCCPSDQDPAPAHPSPHASPMNKNADSELMPPPPERGDPPRLSPDPVAGSAVSQELREGDPVSLSTPLETEFGSPSELSPRIEEQELSENTSLPAEEANGSLSEEEANGPELGSGKAMEDTSGEPAAEDEGDTAWNYSFSQLPRFLSGSWSEFSTQPENFLKGCKWAPDGSCILTNSADNILRIYNLPPELYHEGEQVEYAEMVPVLRMVEGDTIYDYCWYSLMSSAQPDTSYVASSSRENPIHIWDAFTGELRASFRAYNHLDELTAAHSLCFSPDGSQLFCGFNRTVRVFSTARPGRDCEVRATFAKKQGQSGIISCIAFSPAQPLYACGSYGRSLGLYAWDDGSPLALLGGHQGGITHLCFHPDGNRFFSGARKDAELLCWDLRQSGYPLWSLGREVTTNQRIYFDLDPTGQFLVSGSTSGAVSVWDTDGPGNDGKPEPVLSFLPQKDCTNGVRSSVQFQRCWGLGWGGR

SEQ ID NO: 888757 - protein, 111 aa, Homo sapiens
MLGNSYRHQTEGKLGAWTTGYRTCSSSQVLAQAQCKHSPSGLSVSVRFWNPFLCVRESDRIDDVPLELGNPCVYSRRELTITSLVFFACLGEIQSLRNGKGSSWISLEGRH

SEQ ID NO: 888758 - protein, 111 aa, Homo sapiens; identical to SEQ ID NO: 888757

SEQ ID NO: 888759 - protein, 111 aa, Homo sapiens; identical to SEQ ID NO: 888757

SEQ ID NO: 888760 - protein, 111 aa, Homo sapiens; identical to SEQ ID NO: 888757

SEQ ID NO: 888761 - protein, 111 aa, Homo sapiens; identical to SEQ ID NO: 888757

SEQ ID NO: 888762 - protein, 111 aa, Homo sapiens; identical to SEQ ID NO: 888757

SEQ ID NO: 888763 - protein, 491 aa, Homo sapiens
MAGQGLPLHVATLLTGLLECLGFAGVLFGWPSLVFVFKNEDYFKDLCGPDAGPIGNATGQADCKAQDERFSLIFTLGSFMNNFMTFPTGYIFDRFKTTVARLIAIFFYTTATLIIAFTSAGSAVLLFLAMPMLTIGGILFLITNLQIGNLFGQHRSTIITLYNGAFDSSSAVFLIIKLLYEKGISLRASFIFISVCSTWHVARTFLLMPRGHIPYPLPPNYSYGLCPGNGTTKEEKETAEHENRELQSKEFLSAKEETPGAGQKQELRSFWSYAFSRRFAWHLVWLSVIQLWHYLFIGTLNSLLTNMAGGDMARVSTYTNAFAFTQFGVLCAPWNGLLMDRLKQKYQKEARKTGSSTLAVALCSTVPSLALTSLLCLGFALCASVPILPLQYLTFILQVISRSFLYGSNAAFLTLAFPSEHFGKLFGLVMALSAVVSLLQFPIFTLIKGSLQNDPFYVNVMFMLAILLTFFHPFLVYRECRTWKESPSAIA

SEQ ID NO: 888764 - protein, 152 aa, Homo sapiens
DFFLLLLQLLYEKGISLRASFIFISVCSTWHVARTFLLMPRGHIPYPLPPNYSYGLCPGNGTTKEEKETAEHENRELQSKEFLSAKEETPGAGQKQELRSFWSYAFSRRFAWHLVWLSVIQLWHYLFIATRSLIRVAMSLRREGREVSRGRL

SEQ ID NO: 888765 - protein, 503 aa, Homo sapiens
MAGQGLPLHVATLLTGLLECLGFAGVLFGWPSLVFVFKNEDYFKDLCGPDAGPIGNATGQADCKAQDERFSLIFTLGSFMNNFMTFPTGYIFDRFKTTVARLIAIFFYTTATLIIAFTSAGSAVLLFLAMPMLTIGGILFLITNLQIGNLFGQHRSTIITLYNGAFDSSSAVFLIIKLLYEKGISLRASFIFISVCSTWHVARTFLLMPRGHIPYPLPPNYSYGPWPCWWGFCFHSLCPGNGTTKEEKETAEHENRELQSKEFLSAKEETPGAGQKQELRSFWSYAFSRRFAWHLVWLSVIQLWHYLFIGTLNSLLTNMAGGDMARVSTYTNAFAFTQFGVLCAPWNGLLMDRLKQKYQKEARKTGSSTLAVALCSTVPSLALTSLLCLGFALCASVPILPLQYLTFILQVISRSFLYGSNAAFLTLAFPSEHFGKLFGLVMALSAVVSLLQFPIFTLIKGSLQNDPFYVNVMFMLAILLTFFHPFLVYRECRTWKESPSAIA

SEQ ID NO: 888766 - protein, 491 aa, Homo sapiens; identical to SEQ ID NO: 888763

SEQ ID NO: 888767 - protein, 105 aa, Homo sapiens
YIQREREREREHTHTHTHTHTQNKDTQGRLRSKKRISVAKQIDITQTQSKGMWNFFISKQKCLLALSLGRPLTPGEMTWGRKCVNYFFRPVWLRSLYVPGSSATG

SEQ ID NO: 888768 - protein, 134 aa, Homo sapiens
MAGQGLPLHVATLLTGLLECLGFAGVLFGWPSLVFVFKNEDYFKDLCGPDAGPIGNATGQADCKAQDERFSLIFTLGSFMNNFMTFPTGYIFDRFKTTVARLIAIFFYTTATLIIAFTSAGAVAHSCNPSTLGG

SEQ ID NO: 888769 - protein, 491 aa, Homo sapiens; identical to SEQ ID NO: 888763

SEQ ID NO: 888770 - protein, 491 aa, Homo sapiens; identical to SEQ ID NO: 888763

SEQ ID NO: 888771 - protein, 491 aa, Homo sapiens; identical to SEQ ID NO: 888763

SEQ ID NO: 888772 - protein, 504 aa, Homo sapiens
MAGQGLPLHVATLLTGLLECLGFAGVLFGWPSLVFVFKNEDYFKDLCGPDAGPIGNATGQAGRLGCMGDLFSTPDCKAQDERFSLIFTLGSFMNNFMTFPTGYIFDRFKTTVARLIAIFFYTTATLIIAFTSAGSAVLLFLAMPMLTIGGILFLITNLQIGNLFGQHRSTIITLYNGAFDSSSAVFLIIKLLYEKGISLRASFIFISVCSTWHVARTFLLMPRGHIPYPLPPNYSYGLCPGNGTTKEEKETAEHENRELQSKEFLSAKEETPGAGQKQELRSFWSYAFSRRFAWHLVWLSVIQLWHYLFIGTLNSLLTNMAGGDMARVSTYTNAFAFTQFGVLCAPWNGLLMDRLKQKYQKEARKTGSSTLAVALCSTVPSLALTSLLCLGFALCASVPILPLQYLTFILQVISRSFLYGSNAAFLTLAFPSEHFGKLFGLVMALSAVVSLLQFPIFTLIKGSLQNDPFYVNVMFMLAILLTFFHPFLVYRECRTWKESPSAIA

SEQ ID NO: 888773 - protein, 491 aa, Homo sapiens; identical to SEQ ID NO: 888763

SEQ ID NO: 888774 - protein, 366 aa, Homo sapiens
MAGQGLPLHVATLLTGLLECLGFAGVLFGWPSLVFVFKNEDYFKDLCGPDAGPIGNATGQADCKAQDERFSLIFTLGSFMNNFMTFPTGYIFDRFKTTVARLIAIFFYTTATLIIAFTSAGSAVLLFLAMPMLTIGGILFLITNLQIGNLFGQHRSTIITLYNGAFDSSSAVFLIIKLLYEKGISLRASFIFISVCSTWHVARTFLLMPRGHIPYPLPPNYSYGLCPGNGTTKEEKETAEHENRELQSKEFLSAKEETPGAGQKQELRSFWSYAFSRRFAWHLVWLSVIQLWHYLFIGTLNSLLTNMAGGDMARVSTYTNAFAFTQFGVLCAPWNGLLMDRLKQKYQKEARKTVSLQSTLASSLGW

SEQ ID NO: 888775 - protein, 105 aa, Homo sapiens
MPYLERKSLCNCIVQKPSLFSPEDGFVHLPPPLRTSCPKRLCLSQQNTHTHTHTHKIKTHKDVCAARKESQLPSRLISHRLKAKACGTSLFQNRSVSLHLALADP

SEQ ID NO: 888776 - protein, 196 aa, Homo sapiens
SGGSRSEEPGAGNRESGSREPGLAAAAMSTVDLARVGACILKHAVTGEAVELRSLWREHACVVAGLRRFGCVVCRWIAQDLSSLAGLLDQHGVRLVGVGPEALGLQEFLDGDYFAGELYLDESKQLYKELGFKRYNSLSILPAALGKPVRDVAAKAKAVGIQGNLSGDLLQSGGLLVVSKGGSREGPRPLPQGGPC

SEQ ID NO: 888777 - protein, 195 aa, Homo sapiens
GQQLSRKARIEEAGGTEAGGPRIWRRDLEAWPGAVELRSLWREHACVVAGLRRFGCVVCRWIAQDLSSLAGLLDQHGVRLVGVGPEALGLQEFLDGDYFAGELYLDESKQLYKELGFKRYNSLSILPAALGKPVRDVAAKAKAVGIQGNLSGDLLQSGGLLVVSKEVPRRLRPQGAHPAGPGHLCGGLCQRPASV

SEQ ID NO: 888778 - protein, 210 aa, Homo sapiens
GQQLSRKARIEEAGGTEAGGPRIWRRDLEAWPGAVELRSLWREHACVVAGLRRFGCVVCRWIAQDLSSLAGLLDQHGVRLVGVGPEALGLQEFLDGDYFAGELYLDESKQLYKELGFKRYNSLSILPAALGKPVRDVAAKAKAVGIQGNLSGDLLQSGGLLVVSKGGDKVLLHFVQKSPGDYVPKEHILQVLGISAEVCASDPPQCDREV

SEQ ID NO: 888779 - protein, 249 aa, Homo sapiens
SGGSRSEEPGAGNRESGSREPGLAAAAMSTVDLARVGACILKHAVTGEAVELRSLWREHACVVAGLRRFGCVVCRWIAQDLSSLAGLLDQHGVRLVGVGPEALGLQEFLDGDYFAGELYLDESKQLYKELGFKRYNSLSILPAALGKPVRDVAAKAVPTPDRPRLLASRGTCLGTCCRAEGCWWSAKVVIKCSCISSRSPQATTSPRSTSCRSWASLRRSVPATRLSVTERCEGGEGPGLRGSGWRLLP

SEQ ID NO: 888780 - protein, 217 aa, Homo sapiens
SGGSRSEEPGAGNRESGSREPGLAAAAMSTVDLARVGACILKHAVTGEAVELRSLWREHACVVAGLRRFGCVVCRWIAQDLSSLAGLLDQHGVRLVGVGPEALGLQEFLDGDYFAGELYLDESKQLYKELGFKRYNSLSILPAALGKPVRDVAAKVVIKCSCISSRSPQATTSPRSTSCRSWASLRRSVPATRLSVTERCEGGEGPGLRGSGWRLLP

SEQ ID NO: 888781 - protein, 172 aa, Homo sapiens
QYEPVVIGRVGRTVPEALGRDAEPLLIRRQQRAIKTAVPDHALLRRLRALHPPQPPPCSLLGPQGGQGGCESQVSSSCSATFSGDLGPLACGALGMVTSLPRHSLQRRQTQAHVRRGAWGQLQQGRGQCLCLVGATQESWVFRAEMGLIPPGGVGGPWRLSGDGPACPKALY

SEQ ID NO: 888782 - protein, 225 aa, Homo sapiens
SGGSRSEEPGAGNRESGSREPGLAAAAMSTVDLARVGACILKHAVTGEAVELRSLWREHACVVAGLRRFGCVVCRWIAQDLSSLAGLLDQHGVRLVGVGPEALGLQEFLDGDYFAGELYLDESKQLYKELGFKRYNSLSILPAALGKPVRDVAAKAKAVGIQGNLSGDLLQSGGLLVVSKGGDKVLLHFVQKSPGDYVPKEHILQVLGISAEVCASDPPQCDREV

SEQ ID NO: 888783 - protein, 225 aa, Homo sapiens; identical to SEQ ID NO: 888782

SEQ ID NO: 888784 - protein, 225 aa, Homo sapiens; identical to SEQ ID NO: 888782

SEQ ID NO: 888785 - protein, 245 aa, Homo sapiens
GQQLSRKARIEEAGGTEAGGPRIWRRDLEAWPGAVELRSLWREHACVVAGLRRFGCVVCRWIAQDLSSLAGLLDQHGVRLVGVGPEALGLQEFLDGDYFAGELYLDESKQLYKELGFKRYNSLSILPAALGKPVRDVAAKVCAGQGCTGRGVVGAPRAFLLGLTQAVPTPDRPRLLASRGTCLGTCCRAEGCWWSAKVGRGRGLGHCLKEGLAELGGPAQALSLACQSHHSPSAAMWPGSACLLG

SEQ ID NO: 888786 - protein, 225 aa, Homo sapiens; identical to SEQ ID NO: 888782

SEQ ID NO: 888787 - protein, 217 aa, Homo sapiens
AGLGATGRAHDPAARQAVELRSLWREHACVVAGLRRFGCVVCRWIAQDLSSLAGLLDQHGVRLVGVGPEALGLQEFLDGDYFAGELYLDESKQLYKELGFKRYNSLSILPAALGKPVRDVAAKAVPTPDRPRLLASRGTCLGTCCRAEGCWWSAKVVIKCSCISSRSPQATTSPRSTSCRSWASLRRSVPATRLSVTERCEGGEGPGLRGSGWRLLP

SEQ ID NO: 888788 - protein, 195 aa, Homo sapiens; identical to SEQ ID NO: 888777

SEQ ID NO: 888789 - protein, 3703 aa, Homo sapiens
MEGCDSPVVSGKDNGCGIPQHQQWTELNSTHLPDKPSSMEQSTGESHGPLDSLRAPFNERLAESTASAGPPSEPASKEVTCNECSASFASLQTYMEHHCPSARPPPPLREESASDTGEEGDEESDVENLAGEIVYQPDGSAYIVESLSQLTQGGGACGSGSGSGPLPSLFLNSLPGAGGKQGDPSCAAPVYPQIINTFHIASSFGKWFEGPDQAFPNTSALAGLSPVLHSFRVFDVRHKSNKDYLNSDGSAKSSCVSKDVPNNVDLSKFDGFVLYGKRKPILMCFLCKLSFGYVRSFVTHAVHDHRMTLSEDERKILSNKNISAIIQGIGKDKEPLVSFLEPKNKNFQHPLVSTANLIGPGHSFYGKFSGIRMEGEEALPAGSAAGPEQPQAGLLTPSTLLNLGGLTSSVLKTPITSVPLGPLASSPTKSSEGKDSGAAEGEKQEVGDGDCFSEKVEPAEEEAEEEEEEEEAEEEEEEEEEEEEEEEDEGCKGLFPSELDEELEDRPHEEPGAAAGSSSKKDLALSNQSISNSPLMPNVLQTLSRGTASTSSNSASSFVVFDGANRRNRLSFNSEGVRANVAEGGRRLDFADESANKDNATAPEPNESTEGDDGGFVPHHQHAGSLCELGVGECPSGSGVECPKCDTVLGSSRSLGGHMTMMHSRNSCKTLKCPKCNWHYKYQQTLEAHMKEKHPEPGGSCVYCKSGQPHPRLARGESYTCGYKPFRCEVCNYSTTTKGNLSIHMQSDKHLNNMQNLQNGGGEQVFSHTAGAAAAAVAAAAAAANISSSCGAPSPTKPKTKPTWRCEVCDYETNVARNLRIHMTSEKHMHNMMLLQQNMTQIQHNRHLGLGSLPSPAEAELYQYYLAQNMNLPNLKMDSAASDAQFMMSGFQLDPAGPMAAMTPALVGGEIPLDMRLGGGQLVSEELMNLGESFIQTNDPSLKLFQCAVCNKFTTDNLDMLGLHMNVERSLSEDEWKAVMGDSYQCKLCRYNTQLKANFQLHCKTDKHVQKYQLVAHIKEGGKANEWRLKCVAIGNPVHLKCNACDYYTNSLEKLRLHTVNSRHEASLKLYKHLQQHESGVEGESCYYHCVLCNYSTKAKLNLIQHVRSMKHQRSESLRKLQRLQKGLPEEDEDLGQIFTIRRCPSTDPEEAIEDVEGPSETAADPEELAKDQEGGASSSQAEKELTDSPATSKRISFPGSSESPLSSKRPKTAEEIKPEQMYQCPYCKYSNADVNRLRVHAMTQHSVQPMLRCPLCQDMLNNKIHLQLHLTHLHSVAPDCVEKLIMTVTTPEMVMPSSMFLPAAVPDRDGNSNLEEAGKQPETSEDLGKNILPSASTEQSGDLKPSPADPGSVREDSGFICWKKGCNQVFKTSAALQTHFNEVHAKRPQLPVSDRHVYKYRCNQCSLAFKTIEKLQLHSQYHVIRAATMCCLCQRSFRTFQALKKHLETSHLELSEADIQQLYGGLLANGDLLAMGDPTLAEDHTIIVEEDKEEESDLEDKQSPTGSDSGSVQEDSGSEPKRALPFRKGPNFTMEKFLDPSRPYKCTVCKESFTQKNILLVHYNSVSHLHKLKRALQESATGQPEPTSSPDNKPFKCNTCNVAYSQSSTLEIHMRSVLHQTKARAAKLEAASGSSNGTGNSSSISLSSSTPSPVSTSGSNTFTTSNPSSAGIAPSSNLLSQVPTESVGMPPLGNPIGANIASPSEPKEANRKKLADMIASRQQQQQQQQQQQQQQQQQQQAQTLAQAQAQVQAHLQQELQQQAALIQSQLFNPTLLPHFPMTTETLLQLQQQQHLLFPFYIPSAEFQLNPEVSLPVTSGALTLTGTGPGLLEDLKAQVQVPQQSHQQILPQQQQNQLSIAQSHSALLQPSQHPEKKNKLVIKEKEKESQRERDSAEGGEGNTGPKETLPDALKAKEKKELAPGGGSEPSMLPPRIASDARGNATKALLENFGFELVIQYNENKQKVQKKNGKTDQGENLEKLECDSCGKLFSNILILKSHQEHVHQNYFPFKQLERFAKQYRDHYDKLYPLRPQTPEPPPPPPPPPPPPLPAAPPQPASTPAIPASAPPITSPTIAPAQPSVPLTQLSMPMELPIFSPLMMQTMPLQTLPAQLPPQLGPVEPLPADLAQLYQHQLNPTLLQQQNKRPRTRITDDQLRVLRQYFDINNSPSEEQIKEMADKSGLPQKVIKHWFRNTLFKERQRNKDSPYNFSNPPITSLEELKIDSRPPSPEPPKQEYWGSKRSSRTRFTDYQLRVLQDFFDANAYPKDDEFEQLSNLLNLPTRVIVVWFQNARQKARKNYENQGEGKDGERRELTNDRYIRTSNLNYQCKKCSLVFQRIFDLIKHQKKLCYKDEDEEGQDDSQNEDSMDAMEILTPTSSSCSTPMPSQAYSAPAPSANNTASSAFLQLTAEAEELATFNSKTEAGDEKPKLAEAPSAQPNQTQEKQGQPKPELQQQEQPEQKTNTPQQKLPQLVSLPSLPQPPPQAPPPQCPLPQSSPSPSQLSHLPLKPLHTSTPQQLANLPPQLIPYQCDQCKLAFPSFEHWQEHQQLHFLSAQNQFIHPQFLDRSLDMPFMLFDPSNPLLASQLLSGAIPQIPASSATSPSTPTSTMNTLKRKLEEKASASPGENDSGTGGEEPQRDKRLRTTITPEQLEILYQKYLLDSNPTRKMLDHIAHEVGLKKRVVQVWFQNTRARERKGQFRAVGPAQAHRRCPFCRALFKAKTALEAHIRSRHWHEAKRAGYNLTLSAMLLDCDGGLQMKGDIFDGTSFSHLPPSSSDGQGVPLSPVSKTMELSPRTLLSPSSIKVEGIEDFESPSMSSVNLNFDQTKLDNDDCSSVNTAITDTTTGDEGNADNDSATGIATETKSSSAPNEGLTKAAMMAMSEYEDRLSSGLVSPAPSFYSKEYDNEGTVDYSETSSLADPCSPSPGASGSAGKSGDSGDRPGQKRFRTQMTNLQLKVLKSCFNDYRTPTMLECEVLGNDIGLPKRVVQVWFQNARAKEKKSKLSMAKHFGINQTSYEGPKTECTLCGIKYSARLSVRDHIFSQQHISKVKDTIGSQLDKEKEYFDPATVRQLMAQQELDRIKKANEVLGLAAQQQGMFDNTPLQALNLPTAYPALQGIPPVLLPGLNSPSLPGFTPSNTALTSPKPNLMGLPSTTVPSPGLPTSGLPNKPSSASLSSPTPAQATMAMGPQQPPQQQQQQQQPQVQQPPPPPAAQPPPTPQLPLQQQQQRKDKDSEKVKEKEKAHKGKGEPLPVPKKEKGEAPTATAATISAPLPTMEYAVDPAQLQALQAALTSDPTALLTSQFLPYFVPGFSPYYAPQIPGALQSGYLQPMYGMEGLFPYSPALSQALMGLSPGSLLQQYQQYQQSLQEAIQQQQQRQLQQQQQQKVQQQQPKASQTPVPPGAPSPDKDPAKESPKPEEQKNTPREVSPLLPKLPEEPEAESKSADSLYDPFIVPKVQYKLVCRKCQAGFSDEEAARSHLKSLCFFGQSVVNLQEMVLHVPTGGGGGGSGGGGGGGGGGGGGGSYHCLACESALCGEEALSQHLESALHKHRTITRAARNAKEHPSLLPHSACFPDPSTASTSQSAAHSNDSPPPPSAAAPSSASPHASRKSWPQVVSRASAAKPPSFPPLSSSSTVTSSSCSTSGVQPSMPTDDYSEESDTDLSQKSDGPASPVEGPKDPSCPKDSGLTSVGTDTFRL

SEQ ID NO: 888790 - protein, 3703 aa, Homo sapiens; identical to SEQ ID NO: 888789

SEQ ID NO: 888791 - protein, 552 aa, Homo sapiens [sequence omitted]

SEQ ID NO: 888792 - protein, 1232 aa, Homo sapiens
MEGCDSPVVSGKDNGCGIPQHQQWTELNSTHLPDKPSSMEQSTGESHGPLDSLRAPFNERLAESTASAGPPSEPASKEVTCNECSASFASLQTYMEHHCPSARPPPPLREESASDTGEEGDEESDVENLAGEIVYQPDGSAYIVESLSQLTQGGGACGSGSGSGPLPSLFLNSLPGAGGKQGDPSCAAPVYPQIINTFHIASSFGKWFEGPDQAFPNTSALAGLSPVLHSFRVFDVRHKSNKDYLNSDGSAKSSCVSKDVPNNVDLSKFDGFVLYGKRKPILMCFLCKLSFGYVRSFVTHAVHDHRMTLSEDERKILSNKNISAIIQGIGKDKEPLVSFLEPKNKNFQHPLVSTANLIGPGHSFYGKFSGIRMEGEEALPAGSAAGPEQPQAGLLTPSTLLNLGGLTSSVLKTPITSVPLGPLASSPTKSSEGKDSGAAEGEKQEVGDGDCFSEKVEPAEEEAEEEEEEEEAEEEEEEEEEEEEEEEDEGCKGLFPSELDEELEDRPHEEPGAAAGSSSKKDLALSNQSISNSPLMPNVLQTLSRGTASTSSNSASSFVVFDGANRRNRLSFNSEGVRANVAEGGRRLDFADESANKDNATAPEPNESTEGDDGGFVPHHQHAGSLCELGVGECPSGSGVECPKCDTVLGSSRSLGGHMTMMHSRNSCKTLKCPKCNWHYKYQQTLEAHMKEKHPEPGGSCVYCKSGQPHPRLARGESYTCGYKPFRCEVCNYSTTTKGNLSIHMQSDKHLNNMQNLQNGGGEQVFSHTAGAAAAAVAAAAAAANISSSCGAPSPTKPKTKPTWRCEVCDYETNVARNLRIHMTSEKHMHNMMLLQQNMTQIQHNRHLGLGSLPSPAEAELYQYYLAQNMNLPNLKMDSAASDAQFMMSGFQLDPAGPMAAMTPALVGGEIPLDMRLGGGQLVSEELMNLGESFIQTNDPSLKLFQCAVCNKFTTDNLDMLGLHMNVERSLSEDEWKAVMGDSYQCKLCRYNTQLKANFQLHCKTDKHVQKYQLVAHIKEGGKANEWRLKCVAIGNPVHLKCNACDYYTNSLEKLRLHTVNSRHEASLKLYKHLQQHESGVEGESCYYHCVLCNYSTKAKLNLIQHVRSMKHQRSESLRKLQRLQKGLPEEDEDLGQIFTIRRCPSTDPEEAIEDVEGPSETAADPEELAKDQEGGASSSQAEKELTDSPATSKRISFPGSSESPLSSKRPKTAEEIKPEQVRLEGTLLVGR

SEQ ID NO: 888793 - protein, 2781 aa, Homo sapiens
MRLGGGQLVSEELMNLGESFIQTNDPSLKLFQCAVCNKFTTDNLDMLGLHMNVERSLSEDEWKAVMGDSYQCKLCRYNTQLKANFQLHCKTDKHVQKYQLVAHIKEGGKANEWRLKCVAIGNPVHLKCNACDYYTNSLEKLRLHTVNSRHEASLKLYKHLQQHESGVEGESCYYHCVLCNYSTKAKLNLIQHVRSMKHQRSESLRKLQRLQKGLPEEDEDLGQIFTIRRCPSTDPEEAIEDVEGPSETAADPEELAKDQEGGASSSQAEKELTDSPATSKRISFPGSSESPLSSKRPKTAEEIKPEQMYQCPYCKYSNADVNRLRVHAMTQHSVQPMLRCPLCQDMLNNKIHLQLHLTHLHSVAPDCVEKLIMTVTTPEMVMPSSMFLPAAVPDRDGNSNLEEAGKQPETSEDLGKNILPSASTEQSGDLKPSPADPGSVREDSGFICWKKGCNQVFKTSAALQTHFNEVHAKRPQLPVSDRHVYKYRCNQCSLAFKTIEKLQLHSQYHVIRAATMCCLCQRSFRTFQALKKHLETSHLELSEADIQQLYGGLLANGDLLAMGDPTLAEDHTIIVEEDKEEESDLEDKQSPTGSDSGSVQEDSGSEPKRALPFRKGPNFTMEKFLDPSRPYKCTVCKESFTQKNILLVHYNSVSHLHKLKRALQESATGQPEPTSSPDNKPFKCNTCNVAYSQSSTLEIHMRSVLHQTKARAAKLEAASGSSNGTGNSSSISLSSSTPSPVSTSGSNTFTTSNPSSAGIAPSSNLLSQVPTESVGMPPLGNPIGANIASPSEPKEANRKKLADMIASRQQQQQQQQQQQQQQQQQQQAQTLAQAQAQVQAHLQQELQQQAALIQSQLFNPTLLPHFPMTTETLLQLQQQQHLLFPFYIPSAEFQLNPEVSLPVTSGALTLTGTGPGLLEDLKAQVQVPQQSHQQILPQQQQNQLSIAQSHSALLQPSQHPEKKNKLVIKEKEKESQRERDSAEGGEGNTGPKETLPDALKAKEKKELAPGGGSEPSMLPPRIASDARGNATKALLENFGFELVIQYNENKQKVQKKNGKTDQGENLEKLECDSCGKLFSNILILKSHQEHVHQNYFPFKQLERFAKQYRDHYDKLYPLRPQTPEPPPPPPPPPPPPLPAAPPQPASTPAIPASAPPITSPTIAPAQPSVPLTQLSMPMELPIFSPLMMQTMPLQTLPAQLPPQLGPVEPLPADLAQLYQHQLNPTLLQQQNKRPRTRITDDQLRVLRQYFDINNSPSEEQIKEMADKSGLPQKVIKHWFRNTLFKERQRNKDSPYNFSNPPITSLEELKIDSRPPSPEPPKQEYWGSKRSSRTRFTDYQLRVLQDFFDANAYPKDDEFEQLSNLLNLPTRVIVVWFQNARQKARKNYENQGEGKDGERRELTNDRYIRTSNLNYQCKKCSLVFQRIFDLIKHQKKLCYKDEDEEGQDDSQNEDSMDAMEILTPTSSSCSTPMPSQAYSAPAPSANNTASSAFLQLTAEAEELATFNSKTEAGDEKPKLAEAPSAQPNQTQEKQGQPKPELQQQEQPEQKTNTPQQKLPQLVSLPSLPQPPPQAPPPQCPLPQSSPSPSQLSHLPLKPLHTSTPQQLANLPPQLIPYQCDQCKLAFPSFEHWQEHQQLHFLSAQNQFIHPQFLDRSLDMPFMLFDPSNPLLASQLLSGAIPQIPASSATSPSTPTSTMNTLKRKLEEKASASPGENDSGTGGEEPQRDKRLRTTITPEQLEILYQKYLLDSNPTRKMLDHIAHEVGLKKRVVQVWFQNTRARERKGQFRAVGPAQAHRRCPFCRALFKAKTALEAHIRSRHWHEAKRAGYNLTLSAMLLDCDGGLQMKGDIFDGTSFSHLPPSSSDGQGVPLSPVSKTMELSPRTLLSPSSIKVEGIEDFESPSMSSVNLNFDQTKLDNDDCSSVNTAITDTTTGDEGNADNDSATGIATETKSSSAPNEGLTKAAMMAMSEYEDRLSSGLVSPAPSFYSKEYDNEGTVDYSETSSLADPCSPSPGASGSAGKSGDSGDRPGQKRFRTQMTNLQLKVLKSCFNDYRTPTMLECEVLGNDIGLPKRVVQVWFQNARAKEKKSKLSMAKHFGINQTSYEGPKTECTLCGIKYSARLSVRDHIFSQQHISKVKDTIGSQLDKEKEYFDPATVRQLMAQQELDRIKKANEVLGLAAQQQGMFDNTPLQALNLPTAYPALQGIPPVLLPGLNSPSLPGFTPSNTALTSPKPNLMGLPSTTVPSPGLPTSGLPNKPSSASLSSPTPAQATMAMGPQQPPQQQQQQQQPQVQQPPPPPAAQPPPTPQLPLQQQQQRKDKDSEKVKEKEKAHKGKGEPLPVPKKEKGEAPTATAATISAPLPTMEYAVDPAQLQALQAALTSDPTALLTSQFLPYFVPGFSPYYAPQIPGALQSGYLQPMYGMEGLFPYSPALSQALMGLSPGSLLQQYQQYQQSLQEAIHSSSSKKCSSSSPKQAKPQSPPGLLPQTKTLPKNPPNQKNRKTPPVRCPPSCRNSLKSQKQKAKVLDSLYDPFIVPKVQYKLVCRKCQAGFSDEEAARSHLKSLCFFGQSVVNLQEMVLHVPTGGGGGGSGGGGGGGGGGGGGGSYHCLACESALCGEEALSQHLESALHKHRTITRAARNAKEHPSLLPHSACFPDPSTASTSQSAAHSNDSPPPPSAAAPSSASPHASRKSWPQVVSRASAAKPPSFPPLSSSSTVTSSSCSTSGVQPSMPTDDYSEESDTDLSQKSDGPASPVEGPKDPSCPKDSGLTSVGTDTFRL

SEQ ID NO: 888794 - protein, 3681 aa, Homo sapiens
MEGCDSPVVSGKDNGCGIPQHQQWTELNSTHLPDKPSSMEQSTGESHGPLDSLRAPFNERLAESTASAGPPSEPASKEVTCNECSASFASLQTYMEHHCPSARPPPPLREESASDTGEEGDEESDVENLAGEIVYQPDGSAYIVESLSQLTQGGGACGSGSGSGPLPSLFLNSLPGAGGKQGDPSCAAPVYPQIINTFHIASSFGKWFEGPDQAFPNTSALAGLSPVLHSFRVFDVRHKSNKDYLNSDGSAKSSCVSKDVPNNVDLSKFDGFVLYGKRKPILMCFLCKLSFGYVRSFVTHAVHDHRMTLSEDERKILSNKNISAIIQGIGKDKEPLVSFLEPKNKNFQHPLVSTANLIGPGHSFYGKFSGIRMEGEEALPAGSAAGPEQPQAGLLTPSTLLNLGGLTSSVLKTPITSVPLGPLASSPTKSSEGKDSGAAEGEKQEVGDGDCFSEKVEPAEEEAEEEEEEEEAEEEEEEEEEEEEEEEDEGCKGLFPSELDEELEDRPHEEPGAAAGSSSKKDLALSNQSISNSPLMPNVLQTLSRGTASTSSNSASSFVVFDGANRRNRLSFNSEGVRANVAEGGRRLDFADESANKDNATAPEPNESTEGDDGGFVPHHQHAGSLCELGVGECPSGSGVECPKCDTVLGSSRSLGGHMTMMHSRNSCKTLKCPKCNWHYKYQQTLEAHMKEKHPEPGGSCVYCKSGQPHPRLARGESYTCGYKPFRCEVCNYSTTTKGNLSIHMQSDKHLNNMQNLQNGGGEQVFSHTAGAAAAAVAAAAAAANISSSCGAPSPTKPKTKPTWRCEVCDYETNVARNLRIHMTSEKHMHNMMLLQQNMTQIQHNRHLGLGSLPSPAEAELYQYYLAQNMNLPNLKMDSAASDAQFMMSGFQLDPAGPMAAMTPALVGGEIPLDMRLGGGQLVSEELMNLGESFIQTNDPSLKLFQCAVCNKFTTDNLDMLGLHMNVERSLSEDEWKAVMGDSYQCKLCRYNTQLKANFQLHCKTDKHVQKYQLVAHIKEGGKANEWRLKCVAIGNPVHLKCNACDYYTNSLEKLRLHTVNSRHEASLKLYKHLQQHESGVEGESCYYHCVLCNYSTKAKLNLIQHVRSMKHQRSESLRKLQRLQKGLPEEDEDLGQIFTIRRCPSTDPEEAIEDVEGPSETAADPEELAKDQEGGASSSQAEKELTDSPATSKRISFPGSSESPLSSKRPKTAEEIKPEQMYQCPYCKYSNADVNRLRVHAMTQHSVQPMLRCPLCQDMLNNKIHLQLHLTHLHSVAPDCVEKLIMTVTTPEMVMPSSMFLPAAVPDRDGNSNLEEAGKQPETSEDLGKNILPSASTEQSGDLKPSPADPGSVREDSGFICWKKGCNQVFKTSAALQTHFNEVHAKRPQLPVSDRHVYKYRCNQCSLAFKTIEKLQLHSQYHVIRAATMCCLCQRSFRTFQALKKHLETSHLELSEADIQQLYGGLLANGDLLAMGDPTLAEDHTIIVEEDKEEESDLEDKQSPTGSDSGSVQEDSGSEPKRALPFRKGPNFTMEKFLDPSRPYKCTVCKESFTQKNILLVHYNSVSHLHKLKRALQESATGQPEPTSSPDNKPFKCNTCNVAYSQSSTLEIHMRSVLHQTKARAAKLEAASGSSNGTGNSSSISLSSSTPSPVSTSGSNTFTTSNPSSAGIAPSSNLLSQVPTESVGMPPLGNPIGANIASPSEPKEANRKKLADMIASRQQQQQQQQQQQQQQQQQQQAQTLAQAQAQVQAHLQQELQQQAALIQSQLFNPTLLPHFPSAEFQLNPEVSLPVTSGALTLTGTGPGLLEDLKAQVQVPQQSHQQILPQQQQNQLSIAQSHSALLQPSQHPEKKNKLVIKEKEKESQRERDSAEGGEGNTGPKETLPDALKAKEKKELAPGGGSEPSMLPPRIASDARGNATKALLENFGFELVIQYNENKQKVQKKNGKTDQGENLEKLECDSCGKLFSNILILKSHQEHVHQNYFPFKQLERFAKQYRDHYDKLYPLRPQTPEPPPPPPPPPPPPLPAAPPQPASTPAIPASAPPITSPTIAPAQPSVPLTQLSMPMELPIFSPLMMQTMPLQTLPAQLPPQLGPVEPLPADLAQLYQHQLNPTLLQQQNKRPRTRITDDQLRVLRQYFDINNSPSEEQIKEMADKSGLPQKVIKHWFRNTLFKERQRNKDSPYNFSNPPITSLEELKIDSRPPSPEPPKQEYWGSKRSSRTRFTDYQLRVLQDFFDANAYPKDDEFEQLSNLLNLPTRVIVVWFQNARQKARKNYENQGEGKDGERRELTNDRYIRTSNLNYQCKKCSLVFQRIFDLIKHQKKLCYKDEDEEGQDDSQNEDSMDAMEILTPTSSSCSTPMPSQAYSAPAPSANNTASSAFLQLTAEAEELATFNSKTEAGDEKPKLAEAPSAQPNQTQEKQGQPKPELQQQEQPEQKTNTPQQKLPQLVSLPSLPQPPPQAPPPQCPLPQSSPSPSQLSHLPLKPLHTSTPQQLANLPPQLIPYQCDQCKLAFPSFEHWQEHQQLHFLSAQNQFIHPQFLDRSLDMPFMLFDPSNPLLASQLLSGAIPQIPASSATSPSTPTSTMNTLKRKLEEKASASPGENDSGTGGEEPQRDKRLRTTITPEQLEILYQKYLLDSNPTRKMLDHIAHEVGLKKRVVQVWFQNTRARERKGQFRAVGPAQAHRRCPFCRALFKAKTALEAHIRSRHWHEAKRAGYNLTLSAMLLDCDGGLQMKGDIFDGTSFSHLPPSSSDGQGVPLSPVSKTMELSPRTLLSPSSIKVEGIEDFESPSMSSVNLNFDQTKLDNDDCSSVNTAITDTTTGDEGNADNDSATGIATETKSSSAPNEGLTKAAMMAMSEYEDRLSSGLVSPAPSFYSKEYDNEGTVDYSETSSLADPCSPSPGASGSAGKSGDSGDRPGQKRFRTQMTNLQLKVLKSCFNDYRTPTMLECEVLGNDIGLPKRVVQVWFQNARAKEKKSKLSMAKHFGINQTSYEGPKTECTLCGIKYSARLSVRDHIFSQQHISKVKDTIGSQLDKEKEYFDPATVRQLMAQQELDRIKKANEVLGLAAQQQGMFDNTPLQALNLPTAYPALQGIPPVLLPGLNSPSLPGFTPSNTALTSPKPNLMGLPSTTVPSPGLPTSGLPNKPSSASLSSPTPAQATMAMGPQQPPQQQQQQQQPQVQQPPPPPAAQPPPTPQLPLQQQQQRKDKDSEKVKEKEKAHKGKGEPLPVPKKEKGEAPTATAATISAPLPTMEYAVDPAQLQALQAALTSDPTALLTSQFLPYFVPGFSPYYAPQIPGALQSGYLQPMYGMEGLFPYSPALSQALMGLSPGSLLQQYQQYQQSLQEAIQQQQQRQLQQQQQQKVQQQQPKASQTPVPPGAPSPDKDPAKESPKPEEQKNTPREVSPLLPKLPEEPEAESKSADSLYDPFIVPKVQYKLVCRKCQAGFSDEEAARSHLKSLCFFGQSVVNLQEMVLHVPTGGGGGGSGGGGGGGGGGGGGGSYHCLACESALCGEEALSQHLESALHKHRTITRAARNAKEHPSLLPHSACFPDPSTASTSQSAAHSNDSPPPPSAAAPSSASPHASRKSWPQVVSRASAAKPPSFPPLSSSSTVTSSSCSTSGVQPSMPTDDYSEESDTDLSQKSDGPASPVEGPKDPSCPKDSGLTSVGTDTFRL

SEQ ID NO: 888795 - protein, 3651 aa, Homo sapiens
MEGCDSPVVSGKDNGCGIPQHQQWTELNSTHLPDKPSSMEQSTGESHGPLDSLRAPFNERLAESTASAGPPSEPASKEVTCNECSASFASLQTYMEHHCPSARPPPPLREESASDTGEEGDEESDVENLAGEIVYQPDGSAYIVESLSQLTQGGGACGSGSGSGPLPSLFLNSLPGAGGKQGDPSCAAPVYPQIINTFHIASSFGKWFEGPDQAFPNTSALAGLSPVLHSFRVFDVRHKSNKDYLNSDGSAKSSCVSKDVPNNVDLSKFDGFVLYGKRKPILMCFLCKLSFGYVRSFVTHAVHDHRMTLSEDERKILSNKNISAIIQGIGKDKEPLVSFLEPKNKNFQHPLVSTANLIGPGHSFYGKFSGIRMEGEEALPAGSAAGPEQPQAGLLTPSTLLNLGGLTSSVLKTPITSVPLGPLASSPTKSSEGKDSGAAEGEKQEVGDGDCFSEKVEPAEEEAEEEEEEEEAEEEEEEEEEEEEEEEDEGCKGLFPSELDEELEDRPHEEPGAAAGSSSKKDLALSNQSISNSPLMPNVLQTLSRGTASTSSNSASSFVVFDGANRRNRLSFNSEGVRANVAEGGRRLDFADESANKDNATAPEPNESTEGDDGGFVPHHQHAGSLCELGVGECPSGSGVECPKCDTVLGSSRSLGGHMTMMHSRNSCKTLKCPKCNWHYKYQQTLEAHMKEKHPEPGGSCVYCKSGQPHPRLARGESYTCGYKPFRCEVCNYSTTTKGNLSIHMQSDKHLNNMQNLQNGGGEQVFSHTAGAAAAAVAAAAAAANISSSCGAPSPTKPKTKPTWRCEVCDYETNVARNLRIHMTSEKHMHNMMLLQQNMTQIQHNRHLGLGSLPSPAEAELYQYYLAQNMNLPNLKMDSAASDAQFMMSGFQLDPAGPMAAMTPALVGGEIPLDMRLGGGQLVSEELMNLGESFIQTNDPSLKLFQCAVCNKFTTDNLDMLGLHMNVERSLSEDEWKAVMGDSYQCKLCRYNTQLKANFQLHCKTDKHVQKYQLVAHIKEGGKANEWRLKCVAIGNPVHLKCNACDYYTNSLEKLRLHTVNSRHEASLKLYKHLQQHESGVEGESCYYHCVLCNYSTKAKLNLIQHVRSMKHQRSESLRKLQRLQKGLPEEDEDLGQIFTIRRCPSTDPEEAIEDVEGPSETAADPEELAKDQEGGASSSQAEKELTDSPATSKRISFPGSSESPLSSKRPKTAEEIKPEQMYQCPYCKYSNADVNRLRVHAMTQHSVQPMLRCPLCQDMLNNKIHLQLHLTHLHSVAPDCVEKLIMTVTTPEMVMPSSMFLPAAVPDRDGNSNLEEAGKQPETSEDLGKNILPSASTEQSGDLKPSPADPGSVREDSGFICWKKGCNQVFKTSAALQTHFNEVHAKRPQLPVSDRHVYKYRCNQCSLAFKTIEKLQLHSQYHVIRAATMCCLCQRSFRTFQALKKHLETSHLELSEADIQQLYGGLLANGDLLAMGDPTLAEDHTIIVEEDKEEESDLEDKQSPTGSDSGSVQEDSGSEPKRALPFRKGPNFTMEKFLDPSRPYKCTVCKESFTQKNILLVHYNSVSHLHKLKRALQESATGQPEPTSSPDNKPFKCNTCNVAYSQSSTLEIHMRSVLHQTKARAAKLEAASGSSNGTGNSSSISLSSSTPSPVSTSGSNTFTTSNPSSAGIAPSSNLLSQVPTESVGMPPLGNPIGANIASPSEPKEANRKKLADMIASRQQQQQQQQQQQQQQQQQQQAQTLAQAQAQVQAHLQQELQQQAALIQSQLFNPTLLPHFPMTTETLLQLQQQQHLLFPFYIPSAEFQLNPEVSLPVTSGALTLTGTGPGLLEDLKAQVQVPQQSHQQILPQQQQNQLSIAQSHSALLQPSQHPEKKNKLVIKEKEKESQRERDSAEGGEGNTGPKETLPDALKAKEKKELAPGGGSEPSMLPPRIASDARGNATKALLENFGFELVIQYNENKQKVQKKNGKTDQGENLEKLECDSCGKLFSNILILKSHQEHVHQNYFPFKQLERFAKQYRDHYDKLYPLRPQTPEPPPPPPPPPPPPLPAAPPQPASTPAIPASAPPITSPTIAPAQPSVPLTQLSMPMELPIFSPLMMQTMPLQTLPAQLPPQLGPVEPLPADLAQLYQHQLNPTLLQQQNKRPRTRITDDQLRVLRQYFDINNSPSEEQIKEMADKSGLPQKVIKHWFRNTLFKERQRNKDSPYNFSNPPITSLEELKIDSRPPSPEPPKQEYWGSKRSSRTRFTDYQLRVLQDFFDANAYPKDDEFEQLSNLLNLPTRVIVVWFQNARQKARKNYENQGEGKDGERRELTNDRYIRTSNLNYQCKKCSLVFQRIFDLIKHQKKLCYKDEDEEGQDDSQNEDSMDAMEILTPTSSSCSTPMPSQAYSAPAPSANNTASSAFLQLTAEAEELATFNSKTEAGDEKPKLAEAPSAQPNQTQEKQGQPKPELQQQEQPEQKTNTPQQKLPQLVSLPSLPQPPPQAPPPQCPLPQSSPSPSQLSHLPLKPLHTSTPQQLANLPPQLIPYQCDQCKLAFPSFEHWQEHQQLHFLSAQNQFIHPQFLDRSLDMPFMLFDPSNPLLASQLLSGAIPQIPASSATSPSTPTSTMNTLKRKLEEKASASPGENDSGTGGEEPQRDKRLRTTITPEQLEILYQKYLLDSNPTRKMLDHIAHEVGLKKRVVQVWFQNTRARERKGQFRAVGPAQAHRRCPFCRALFKAKTALEAHIRSRHWHEAKRAGYNLTLSAMLLDCDGGLQMKGDIFDGTSFSHLPPSSSDGQGVPLSPVSKTMELSPRTLLSPSSIKVEGIEDFESPSMSSVNLNFDQTKLDNDDCSSVNTAITDTTTGDEGNADNDSATGIATETKSSSAPNEGLTKAAMMAMSEYEDRLSSGLVSPAPSFYSKEYDNEGTVDYSETSSLADPCSPSPGASGSAGKSGDSGDRPGQKRFRTQMTNLQLKVLKSCFNDYRTPTMLECEVLGNDIGLPKRVVQVWFQNARAKEKKSKLSMAKHFGINQTSYEGPKTECTLCGIKYSARLSVRDHIFSQQHISKVKDTIGSQLDKEKEYFDPATVRQLMAQQELDRIKKANEVLGLAAQQQGMFDNTPLQALNLPTAYPALQGIPPVLLPGLNSPSLPGFTPSNTALTSPKPNLMGLPSTTVPSPGLPTSGLPNKPSSASLSSPTPAQATMAMGPQQPPQQQQQQQQPQVQQPPPPPAAQPPPTPQLPLQQQQQRKDKDSEKVKEKEKAHKGKGEPLPVPKKEKGEAPTATAATISAPLPTMEYAVDPAQLQALQAALTSDPTALLTSQFLPYFVPGFSPYYAPQIPGALQSGYLQPMYGMEGLFPYSPALSQALMGLSPGSLLQQYQQYQQSLQEAIQQQQQRQLQQQQQQKVQQQQPKASQTPVPPGAPSPDKDPAKESPKPEEQKNTPREVSPLLPKLPEEPEAESKSADSLYDPFIVPKVQYKLVCRKCQAGFSDEEAARSHLKSLCFFGQSVVNLQEMVLHVPTGGGGGGSGGGGGGGGGGGGGGSYHCLACESALCGEEALSQHLESALHKHRTITRAARNAKEHPSLLPHSACFPDPSTASTSQSAAHSNDSPPRLQEVLAASGLPGFGSEAPFFSSSLLIFNGYLKFMQHLRGSALDANRRLFGGV

SEQ ID NO: 888796 - protein, 161 aa, Homo sapiens
HSSAPTSSASLRPLQPPPPPPPPPPPPGGGGGGGGGGSYHCLACESALCGEEALSQHLESALHKHRTITRAARNAKEHPSLLPHSACFPDPSTASTSQSAAHSNDSPPRLQEVLAASGLPGFGSEAPFFSSSLLIFNGYLKFMQHLRGSALDANRRLFGGV

SEQ ID NO: 888797 - protein, 743 aa, Homo sapiens
MEAVAVAAAVGVLLLAGAGGAAGDEAREAAAVRALVARLLGPGPAADFSVSVERALAAKPGLDTYSLGGGGAARVRVRGSTGVAAAAGLHRYLRDFCGCHVAWSGSQLRLPRPLPAVPGELTEATPNRYRYYQNVCTQSYSFVWWDWARWEREIDWMALNGINLALAWSGQEAIWQRVYLALGLTQAEINEFFTGPAFLAWGRMGNLHTWDGPLPPSWHIKQLYLQHRVLDQMRSFGMTPVLPAFAGHVPEAVTRVFPQVNVTKMGSWGHFNCSYSCSFLLAPEDPIFPIIGSLFLRELIKEFGTDHIYGADTFNEMQPPSSEPSYLAAATTAVYEAMTAVDTEAVWLLQGWLFQHQPQFWGPAQIRAVLGAVPRGRLLVLDLFAESQPVYTRTASFQGQPFIWCMLHNFGGNHGLFGALEAVNGGPEAARLFPNSTMVGTGMAPEGISQNEVVYSLMAELGWRKDPVPDLAAWVTSFAARRYGVSHPDAGAAWRLLLRSVYNCSGEACRGHNRSPLVRRPSLQMNTSIWYNRSDVFEAWRLLLTSAPSLATSPAFRYDLLDLTRQAVQELVSLYYEEARSAYLSKELASLLRAGGVLAYELLPALDEVLASDSRFLLGSWLEQARAAAVSEAEADFYEQNSRYQLTLWGPEGNILDYANKQLAGLVANYYTPRWRLFLEALVDSVAQGIPFQQHQFDKNVFQLEQAFVLSKQRYPSQPRGDTVDLAKKIFLKYYPGWVAGSW

SEQ ID NO: 888798 - protein, 255 aa, Homo sapiens
MEAVAVAAAVGVLLLAGAGGAAGDEAREAAAVRALVARLLGPGPAADFSVSVERALAAKPGLDTYSLGGGGAARVRVRGSTGVAAAAGLHRYLRDFCGCHVAWSGSQLRLPRPLPAVPGELTEATPNRYRYYQNVCTQSYSFVWWDWARWEREIDWMALNGINLALAWSGQEAIWQRVYLALGLTQAEINEFFTGPAFLAWGRMGNLHTWDGPLPPSWHIKQLYLQHRVLDQMRSFGMTPVLPAFAGHVPEAVTR

SEQ ID NO: 888799 - protein, 540 aa, Homo sapiens
MGNLHTWDGPLPPSWHIKQLYLQHRVLDQMRSFGMTPVLPAFAGHVPEAVTRVFPQVNVTKMGSWGHFNCSYSCSFLLAPEDPIFPIIGSLFLRELIKEFGTDHIYGADTFNEMQPPSSEPSYLAAATTAVYEAMTAVDTEAVWLLQGWLFQHQPQFWGPAQIRAVLGAVPRGRLLVLDLFAESQPVYTRTASFQGQPFIWCMLHNFGGNHGLFGALEAVNGGPEAARLFPNSTMVGTGMAPEGISQNEVVYSLMAELGWRKDPVPDLAAWVTSFAARRYGVSHPDAGAAWRLLLRSVYNCSGEACRGHNRSPLVRRPSLQMNTSIWYNRSDVFEAWRLLLTSAPSLATSPAFRYDLLDLTRQAVQELVSLYYEEARSAYLSKELASLLRAGGVLAYELLPALDEVLASDSRFLLGSWLEQARAAAVSEAEADFYEQNSRYQLTLWGPEGNILDYANKQLAGLVANYYTPRWRLFLEALVDSVAQGIPFQQHQFDKNVFQLEQAFVLSKQRYPSQPRGDTVDLAKKIFLKYYPGWVAGSW

SEQ ID NO: 888800 - protein, 309 aa, Homo sapiens
MEAVAVAAAVGVLLLAGAGGAAGDEAREAAAVRALVARLLGPGPAADFSVSVERALAAKPGLDTYSLGGGGAARVRVRGSTGVAAAAGLHRYLRDFCGCHVAWSGSQLRLPRPLPAVPGELTEATPNRYRYYQNVCTQSYSFVWWDWARWEREIDWMALNGINLALAWSGQEAIWQRVYLALGLTQAEINEFFTGPAFLAWGRMGNLHTWDGPLPPSWHIKQLYLQHRVLDQMRSFGMTPVLPAFAGHVPEAVTRRLRQENCLNLGGRRCSESRSRHCTPAWVTSETLSQTNKQALDVGLGLISDSATN

SEQ ID NO: 888801 - protein, 243 aa, Homo sapiens
MEAVAVAAAVGVLLLAGAGGAAGDEAREAAAVRALVARLLGPGPAADFSVSVERALAAKPGLDTYSLGGGGAARVRVRGSTGVAAAAGLHRYLRDFCGCHVAWSGSQLRLPRPLPAVPGELTEATPNRYRYYQNVCTQSYSFVWWDWARWEREIDWMALNGINLALAWSGQEAIWQRVRAHCPFPTLLYGGSHRRCFHPPPSMGAVSLSRSAFSVHSGLGLLKTEASGRARWLTPVIPALREA

SEQ ID NO: 888802 - protein, 743 aa, Homo sapiens; identical to SEQ ID NO: 888797

SEQ ID NO: 888803 - protein, 230 aa, Homo sapiens [sequence omitted]

SEQ ID NO: 888804 - protein, 90 aa, Homo sapiens
PFLLFLQHRVLDQMRSFGMTPVLPAFAGHVPEAVTRRLRQENCLNLGGRRCSESRSRHCTPAWVTSETLSQTNKQALDVGLGLISDSATN

SEQ ID NO: 888805 - protein, 338 aa, Homo sapiens
MAASQVLGEKINILSGETVKAGDRDPLGNDCPEQDRLPQRSWRQKCASYVLALRPWSFSASLTPVALGSALAYRSHGVLDPRLLVGCAVAVLAVHGAGNLVNTYYDFSKGIDHKKSDDRTLVDRILEPQDVVRFGVFLYTLGCVCAACLYYLSPLKLEHLALIYFGGLSGSFLYTGGIGFKYVALGDLIILITFGPLAVMFAYAIQVGSLAIFPLVYAIPLALSTEAILHSNNTRDMESDREAGIVTLAILIGPTFSYILYNTLLFLPYLVFSILATHCTISLALPLLTIPMAFSLERQFRSQAFNKLPQRTAKLNLLLGLFYVFGIILAPAGSLPKI

SEQ ID NO: 888806 - protein, 338 aa, Homo sapiens; identical to SEQ ID NO: 888805

SEQ ID NO: 888807 - protein, 179 aa, Homo sapiens
MAASQVLGEKINILSGETVKAGDRDPLGNDCPEQDRLPQRSWRQKCASYVLALRPWSFSASLTPVALGSALAYRSHGVLDPRLLVGCAVAVLAVHGAGNLVNTYYDFSKGIDHKKSDDRTLVDRILEPQDVVRFGVFLYTLGCVCAACLYYLSPLKLEHLALIYFGGLSGSFLYTGVLI

SEQ ID NO: 888808 - protein, 211 aa, Homo sapiens
MAASQVLGEKINILSGETVKAGDRDPLGNDCPEQDRLPQRSWRQKCASYVLALRPWSFSASLTPVALGSALAYRSHGVLDPRLLVGCAVAVLAVHGAGNLVNTYYDFSKGIDHKKSDDRTLVDRILEPQDVVRFGVFLYTLGCVCAACLYYLSPLKLEHLALIYFGGLSGSFLYTGGIGFKYVALGDLIILITFGPLAVMFAYAIQSSSSH

SEQ ID NO: 888809 - protein, 237 aa, Homo sapiens
MAASQVLGEKINILSGETVKAGDRDPLGNDCPEQDRLPQRSWRQKCASYVLALRPWSFSASLTPVALGSALAYRSHGVLDPRLLVGCAVAVLAVHGAGNLVNTYYDFSKGIDHKKSDDRTLVDRILEPQDVVRFGVFLYTLGCVCAACLYYLSPLKLEHLALIYFGGLSGSFLYTGGIGFKYVALGDLIILITFGPLAVMFAYAIQAGVQWCNLSSLQPLPPGFKRFSCLSLLSSWD

SEQ ID NO: 888810 - protein, 2250 aa, Homo sapiens
MDEEEDGAGAEESGQPRSFMRLNDLSGAGGRPGPGSAEKDPGSADSEAEGLPYPALAPVVFFYLSQDSRPRSWCLRTVCNPWFERISMLVILLNCVTLGMFRPCEDIACDSQRCRILQAFDDFIFAFFAVEMVVKMVALGIFGKKCYLGDTWNRLDFFIVIAGMLEYSLDLQNVSFSAVRTVRVLRPLRAINRVPSMRILVTLLLDTLPMLGNVLLLCFFVFFIFGIVGVQLWAGLLRNRCFLPENFSLPLSVDLERYYQTENEDESPFICSQPRENGMRSCRSVPTLRGDGGGGPPCGLDYEAYNSSSNTTCVNWNQYYTNCSAGEHNPFKGAINFDNIGYAWIAIFQVITLEGWVDIMYFVMDAHSFYNFIYFILLIIVGSFFMINLCLVVIATQFSETKQRESQLMREQRVRFLSNASTLASFSEPGSCYEELLKYLVYILRKAARRLAQVSRAAGVRVGLLSSPAPLGGQETQPSSSCSRSHRRLSVHHLVHHHHHHHHHYHLGNGTLRAPRASPEIQDRDANGSRRLMLPPPSTPALSGAPPGGAESVHSFYHADCHLEPVRCQAPPPRSPSEASGRTVGSGKVYPTVHTSPPPETLKEKALVEVAASSGPPTLTSLNIPPGPYSSMHKLLETQSTGACQSSCKISSPCLKADSGACGPDSCPYCARAGAGEVELADREMPDSDSEAVYEFTQDAQHSDLRDPHSRRQRSLGPDAEPSSVLAFWRLICDTFRKIVDSKYFGRGIMIAILVNTLSMGIEYHEQPEELTNALEISNIVFTSLFALEMLLKLLVYGPFGYIKNPYNIFDGVIVVISVWEIVGQQGGGLSVLRTFRLMRVLKLVRFLPALQRQLVVLMKTMDNVATFCMLLMLFIFIFSILGMHLFGCKFASERDGDTLPDRKNFDSLLWAIVTVFQILTQEDWNKVLYNGMASTSSWAALYFIALMTFGNYVLFNLLVAILVEGFQAEGDANKSESEPDFFSPSLDGDGDRKKCLALVSLGEHPELRKSLLPPLIIHTAATPMSLPKSTSTGLGEALGPASRRTSSSGSAEPGAAHEMKSPPSARSSPHSPWSAASSWTSRRSSRNSLGRAPSLKRRSPSGERRSLLSGEGQESQDEEESSEEERASPAGSDHRHRGSLEREAKSSFDLPDTLQVPGLHRTASGRGSASEHQDCNGKSASGRLARALRPDDPPLDGDDADDEGNLSKGERVRAWIRARLPACCLERDSWSAYIFPPQSRFRLLCHRIITHKMFDHVVLVIIFLNCITIAMERPKIDPHSAERIFLTLSNYIFTAVFLAEMTVKVVALGWCFGEQAYLRSSWNVLDGLLVLISVIDILVSMVSDSGTKILGMLRVLRLLRTLRPLRVISRAQGLKLVVETLMSSLKPIGNIVVICCAFFIIFGILGVQLFKGKFFVCQGEDTRNITNKSDCAEASYRWVRHKYNFDNLGQALMSLFVLASKDGWVDIMYDGLDAVGVDQQPIMNHNPWMLLYFISFLLIVAFFVLNMFVGVVVENFHKCRQHQEEEEARRREEKRLRRLEKKRRSKEKQMAEAQCKPYYSDYSRFRLLVHHLCTSHYLDLFITGVIGLNVVTMAMEHYQQPQILDEALKICNYIFTVIFVLESVFKLVAFGFRRFFQDRWNQLDLAIVLLSIMGITLEEIEVNASLPINPTIIRIMRVLRIARVLKLLKMAVGMRALLDTVMQALPQVGNLGLLFMLLFFIFAALGVELFGDLECDETHPCEGLGRHATFRNFGMAFLTLFRVSTGDNWNGIMKDTLRDCDQESTCYNTVISPIYFVSFVLTAQFVLVNVVIAVLMKHLEESNKEAKEEAELEAELELEMKTLSPQPHSPLGSPFLWPGVEGPDSPDSPKPGALHPAAHARSASHFSLEHPTMQPHPTELPGPDLLTVRKSGVSRTHSLPNDSYMCRHGSTAEGPLGHRGWGLPKAQSGSVLSVHSQPADTSYILQLPKDAPHLLQPHSAPTWGTIPKLPPPGRSPLAQRPLRRQAAIRTDSLDVQGLGSREDLLAEVSGPSPPLARAYSFWGQSSTQAQQHSRSHSKISKHMTPPAPCPGPEPNWGKGPPETRSSLELDTELSWISGDLLPPGGQEEPPSPRDLKKCYSVEAQSCQRRPTSWLDEQRRHSIAVSCLDSGSQPHLGTDPSNLGGQPLGGPGSRPKKKLSPPSITIDPPESQGPRTPPSPGICLRRRAPSSDSKDPLASGPPDSMAASPSPKKDVLSLSGLSSDPADLDP

SEQ ID NO: 888811 - protein, 2250 aa, Homo sapiens; identical to SEQ ID NO: 888810

SEQ ID NO: 888812 - protein, 2377 aa, Homo sapiens
MDEEEDGAGAEESGQPRSFMRLNDLSGAGGRPGPGSAEKDPGSADSEAEGLPYPALAPVVFFYLSQDSRPRSWCLRTVCNPWFERISMLVILLNCVTLGMFRPCEDIACDSQRCRILQAFDDFIFAFFAVEMVVKMVALGIFGKKCYLGDTWNRLDFFIVIAGMLEYSLDLQNVSFSAVRTVRVLRPLRAINRVPSMRILVTLLLDTLPMLGNVLLLCFFVFFIFGIVGVQLWAGLLRNRCFLPENFSLPLSVDLERYYQTENEDESPFICSQPRENGMRSCRSVPTLRGDGGGGPPCGLDYEAYNSSSNTTCVNWNQYYTNCSAGEHNPFKGAINFDNIGYAWIAIFQVITLEGWVDIMYFVMDAHSFYNFIYFILLIIVGSFFMINLCLVVIATQFSETKQRESQLMREQRVRFLSNASTLASFSEPGSCYEELLKYLVYILRKAARRLAQVSRAAGVRVGLLSSPAPLGGQETQPSSSCSRSHRRLSVHHLVHHHHHHHHHYHLGNGTLRAPRASPEIQDRDANGSRRLMLPPPSTPALSGAPPGGAESVHSFYHADCHLEPVRCQAPPPRSPSEASGRTVGSGKVYPTVHTSPPPETLKEKALVEVAASSGPPTLTSLNIPPGPYSSMHKLLETQSTGACQSSCKISSPCLKADSGACGPDSCPYCARAGAGEVELADREMPDSDSEAVYEFTQDAQHSDLRDPHSRRQRSLGPDAEPSSVLAFWRLICDTFRKIVDSKYFGRGIMIAILVNTLSMGIEYHEQPEELTNALEISNIVFTSLFALEMLLKLLVYGPFGYIKNPYNIFDGVIVVISVWEIVGQQGGGLSVLRTFRLMRVLKLVRFLPALQRQLVVLMKTMDNVATFCMLLMLFIFIFSILGMHLFGCKFASERDGDTLPDRKNFDSLLWAIVTVFQILTQEDWNKVLYNGMASTSSWAALYFIALMTFGNYVLFNLLVAILVEGFQAEEISKREDASGQLSCIQLPVDSQGGDANKSESEPDFFSPSLDGDGDRKKCLALVSLGEHPELRKSLLPPLIIHTAATPMSLPKSTSTGLGEALGPASRRTSSSGSAEPGAAHEMKSPPSARSSPHSPWSAASSWTSRRSSRNSLGRAPSLKRRSPSGERRSLLSGEGQESQDEEESSEEERASPAGSDHRHRGSLEREAKSSFDLPDTLQVPGLHRTASGRGSASEHQDCNGKSASGRLARALRPDDPPLDGDDADDEGNLSKGERVRAWIRARLPACCLERDSWSAYIFPPQSRFRLLCHRIITHKMFDHVVLVIIFLNCITIAMERPKIDPHSAERIFLTLSNYIFTAVFLAEMTVKVVALGWCFGEQAYLRSSWNVLDGLLVLISVIDILVSMVSDSGTKILGMLRVLRLLRTLRPLRVISRAQGLKLVVETLMSSLKPIGNIVVICCAFFIIFGILGVQLFKGKFFVCQGEDTRNITNKSDCAEASYRWVRHKYNFDNLGQALMSLFVLASKDGWVDIMYDGLDAVGVDQQPIMNHNPWMLLYFISFLLIVAFFVLNMFVGVVVENFHKCRQHQEEEEARRREEKRLRRLEKKRRNLMLDDVIASGSSASAASEAQCKPYYSDYSRFRLLVHHLCTSHYLDLFITGVIGLNVVTMAMEHYQQPQILDEALKICNYIFTVIFVLESVFKLVAFGFRRFFQDRWNQLDLAIVLLSIMGITLEEIEVNASLPINPTIIRIMRVLRIARVLKLLKMAVGMRALLDTVMQALPQVGNLGLLFMLLFFIFAALGVELFGDLECDETHPCEGLGRHATFRNFGMAFLTLFRVSTGDNWNGIMKDTLRDCDQESTCYNTVISPIYFVSFVLTAQFVLVNVVIAVLMKHLEESNKEAKEEAELEAELELEMKTLSPQPHSPLGSPFLWPGVEGPDSPDSPKPGALHPAAHARSASHFSLEHPTDRQLFDTISLLIQGSLEWELKLMDELAGPGGQPSAFPSAPSLGGSDPQIPLAEMEALSLTSEIVSEPSCSLALTDDSLPDDMHTLLLSALESNMQPHPTELPGPDLLTVRKSGVSRTHSLPNDSYMCRHGSTAEGPLGHRGWGLPKAQSGSVLSVHSQPADTSYILQLPKDAPHLLQPHSAPTWGTIPKLPPPGRSPLAQRPLRRQAAIRTDSLDVQGLGSREDLLAEVSGPSPPLARAYSFWGQSSTQAQQHSRSHSKISKHMTPPAPCPGPEPNWGKGPPETRSSLELDTELSWISGDLLPPGGQEEPPSPRDLKKCYSVEAQSCQRRPTSWLDEQRRHSIAVSCLDSGSQPHLGTDPSNLGGQPLGGPGSRPKKKLSPPSITIDPPESQGPRTPPSPGICLRRRAPSSDSKDPLASGPPDSMAASPSPKKDVLSLSGLSSDPADLDP

SEQ ID NO: 888813 - protein, 2261 aa, Homo sapiens
MDEEEDGAGAEESGQPRSFMRLNDLSGAGGRPGPGSAEKDPGSADSEAEGLPYPALAPVVFFYLSQDSRPRSWCLRTVCNPWFERISMLVILLNCVTLGMFRPCEDIACDSQRCRILQAFDDFIFAFFAVEMVVKMVALGIFGKKCYLGDTWNRLDFFIVIAGMLEYSLDLQNVSFSAVRTVRVLRPLRAINRVPSMRILVTLLLDTLPMLGNVLLLCFFVFFIFGIVGVQLWAGLLRNRCFLPENFSLPLSVDLERYYQTENEDESPFICSQPRENGMRSCRSVPTLRGDGGGGPPCGLDYEAYNSSSNTTCVNWNQYYTNCSAGEHNPFKGAINFDNIGYAWIAIFQVITLEGWVDIMYFVMDAHSFYNFIYFILLIIVGSFFMINLCLVVIATQFSETKQRESQLMREQRVRFLSNASTLASFSEPGSCYEELLKYLVYILRKAARRLAQVSRAAGVRVGLLSSPAPLGGQETQPSSSCSRSHRRLSVHHLVHHHHHHHHHYHLGNGTLRAPRASPEIQDRDANGSRRLMLPPPSTPALSGAPPGGAESVHSFYHADCHLEPVRCQAPPPRSPSEASGRTVGSGKVYPTVHTSPPPETLKEKALVEVAASSGPPTLTSLNIPPGPYSSMHKLLETQSTGACQSSCKISSPCLKADSGACGPDSCPYCARAGAGEVELADREMPDSDSEAVYEFTQDAQHSDLRDPHSRRQRSLGPDAEPSSVLAFWRLICDTFRKIVDSKYFGRGIMIAILVNTLSMGIEYHEQPEELTNALEISNIVFTSLFALEMLLKLLVYGPFGYIKNPYNIFDGVIVVISVWEIVGQQGGGLSVLRTFRLMRVLKLVRFLPALQRQLVVLMKTMDNVATFCMLLMLFIFIFSILGMHLFGCKFASERDGDTLPDRKNFDSLLWAIVTVFQILTQEDWNKVLYNGMASTSSWAALYFIALMTFGNYVLFNLLVAILVEGFQAEGDANKSESEPDFFSPSLDGDGDRKKCLALVSLGEHPELRKSLLPPLIIHTAATPMSLPKSTSTGLGEALGPASRRTSSSGSAEPGAAHEMKSPPSARSSPHSPWSAASSWTSRRSSRNSLGRAPSLKRRSPSGERRSLLSGEGQESQDEEESSEEERASPAGSDHRHRGSLEREAKSSFDLPDTLQVPGLHRTASGRGSASEHQDCNGKSASGRLARALRPDDPPLDGDDADDEGNLSKGERVRAWIRARLPACCLERDSWSAYIFPPQSRFRLLCHRIITHKMFDHVVLVIIFLNCITIAMERPKIDPHSAERIFLTLSNYIFTAVFLAEMTVKVVALGWCFGEQAYLRSSWNVLDGLLVLISVIDILVSMVSDSGTKILGMLRVLRLLRTLRPLRVISRAQGLKLVVETLMSSLKPIGNIVVICCAFFIIFGILGVQLFKGKFFVCQGEDTRNITNKSDCAEASYRWVRHKYNFDNLGQALMSLFVLASKDGWVDIMYDGLDAVGVDQQPIMNHNPWMLLYFISFLLIVAFFVLNMFVGVVVENFHKCRQHQEEEEARRREEKRLRRLEKKRRNLMLDDVIASGSSASAASEAQCKPYYSDYSRFRLLVHHLCTSHYLDLFITGVIGLNVVTMAMEHYQQPQILDEALKICNYIFTVIFVLESVFKLVAFGFRRFFQDRWNQLDLAIVLLSIMGITLEEIEVNASLPINPTIIRIMRVLRIARVLKLLKMAVGMRALLDTVMQALPQVGNLGLLFMLLFFIFAALGVELFGDLECDETHPCEGLGRHATFRNFGMAFLTLFRVSTGDNWNGIMKDTLRDCDQESTCYNTVISPIYFVSFVLTAQFVLVNVVIAVLMKHLEESNKEAKEEAELEAELELEMKTLSPQPHSPLGSPFLWPGVEGPDSPDSPKPGALHPAAHARSASHFSLEHPTMQPHPTELPGPDLLTVRKSGVSRTHSLPNDSYMCRHGSTAEGPLGHRGWGLPKAQSGSVLSVHSQPADTSYILQLPKDAPHLLQPHSAPTWGTIPKLPPPGRSPLAQRPLRRQAAIRTDSLDVQGLGSREDLLAEVSGPSPPLARAYSFWGQSSTQAQQHSRSHSKISKHMTPPAPCPGPEPNWGKGPPETRSSLELDTELSWISGDLLPPGGQEEPPSPRDLKKCYSVEAQSCQRRPTSWLDEQRRHSIAVSCLDSGSQPHLGTDPSNLGGQPLGGPGSRPKKKLSPPSITIDPPESQGPRTPPSPGICLRRRAPSSDSKDPLASGPPDSMAASPSPKKDVLSLSGLSSDPADLDP

SEQ ID NO: 888814 - protein, 2298 aa, Homo sapiens
MDEEEDGAGAEESGQPRSFMRLNDLSGAGGRPGPGSAEKDPGSADSEAEGLPYPALAPVVFFYLSQDSRPRSWCLRTVCNPWFERISMLVILLNCVTLGMFRPCEDIACDSQRCRILQAFDDFIFAFFAVEMVVKMVALGIFGKKCYLGDTWNRLDFFIVIAGMLEYSLDLQNVSFSAVRTVRVLRPLRAINRVPSMRILVTLLLDTLPMLGNVLLLCFFVFFIFGIVGVQLWAGLLRNRCFLPENFSLPLSVDLERYYQTENEDESPFICSQPRENGMRSCRSVPTLRGDGGGGPPCGLDYEAYNSSSNTTCVNWNQYYTNCSAGEHNPFKGAINFDNIGYAWIAIFQVITLEGWVDIMYFVMDAHSFYNFIYFILLIIVGSFFMINLCLVVIATQFSETKQRESQLMREQRVRFLSNASTLASFSEPGSCYEELLKYLVYILRKAARRLAQVSRAAGVRVGLLSSPAPLGGQETQPSSSCSRSHRRLSVHHLVHHHHHHHHHYHLGNGTLRAPRASPEIQDRDANGSRRLMLPPPSTPALSGAPPGGAESVHSFYHADCHLEPVRCQAPPPRSPSEASGRTVGSGKVYPTVHTSPPPETLKEKALVEVAASSGPPTLTSLNIPPGPYSSMHKLLETQSTGACQSSCKISSPCLKADSGACGPDSCPYCARAGAGEVELADREMPDSDSEAVYEFTQDAQHSDLRDPHSRRQRSLGPDAEPSSVLAFWRLICDTFRKIVDSKYFGRGIMIAILVNTLSMGIEYHEQPEELTNALEISNIVFTSLFALEMLLKLLVYGPFGYIKNPYNIFDGVIVVISVWEIVGQQGGGLSVLRTFRLMRVLKLVRFLPALQRQLVVLMKTMDNVATFCMLLMLFIFIFSILGMHLFGCKFASERDGDTLPDRKNFDSLLWAIVTVFQILTQEDWNKVLYNGMASTSSWAALYFIALMTFGNYVLFNLLVAILVEGFQAEGDANKSESEPDFFSPSLDGDGDRKKCLALVSLGEHPELRKSLLPPLIIHTAATPMSLPKSTSTGLGEALGPASRRTSSSGSAEPGAAHEMKSPPSARSSPHSPWSAASSWTSRRSSRNSLGRAPSLKRRSPSGERRSLLSGEGQESQDEEESSEEERASPAGSDHRHRGSLEREAKSSFDLPDTLQVPGLHRTASGRGSASEHQDCNGKSASGRLARALRPDDPPLDGDDADDEGNLSKGERVRAWIRARLPACCLERDSWSAYIFPPQSRFRLLCHRIITHKMFDHVVLVIIFLNCITIAMERPKIDPHSAERIFLTLSNYIFTAVFLAEMTVKVVALGWCFGEQAYLRSSWNVLDGLLVLISVIDILVSMVSDSGTKILGMLRVLRLLRTLRPLRVISRAQGLKLVVETLMSSLKPIGNIVVICCAFFIIFGILGVQLFKGKFFVCQGEDTRNITNKSDCAEASYRWVRHKYNFDNLGQALMSLFVLASKDGWVDIMYDGLDAVGVDQQPIMNHNPWMLLYFISFLLIVAFFVLNMFVGVVVENFHKCRQHQEEEEARRREEKRLRRLEKKRRSKEKQMAEAQCKPYYSDYSRFRLLVHHLCTSHYLDLFITGVIGLNVVTMAMEHYQQPQILDEALKICNYIFTVIFVLESVFKLVAFGFRRFFQDRWNQLDLAIVLLSIMGITLEEIEVNASLPINPTIIRIMRVLRIARVLKLLKMAVGMRALLDTVMQALPQVGNLGLLFMLLFFIFAALGVELFGDLECDETHPCEGLGRHATFRNFGMAFLTLFRVSTGDNWNGIMKDTLRDCDQESTCYNTVISPIYFVSFVLTAQFVLVNVVIAVLMKHLEESNKEAKEEAELEAELELEMKTLSPQPHSPLGSPFLWPGVEGPDSPDSPKPGALHPAAHARSASHFSLEHPTDRQLFDTISLLIQGSLEWELKLMDELAGPGGQPSAFPSAPSLGGSDPQMQPHPTELPGPDLLTVRKSGVSRTHSLPNDSYMCRHGSTAEGPLGHRGWGLPKAQSGSVLSVHSQPADTSYILQLPKDAPHLLQPHSAPTWGTIPKLPPPGRSPLAQRPLRRQAAIRTDSLDVQGLGSREDLLAEVSGPSPPLARAYSFWGQSSTQAQQHSRSHSKISKHMTPPAPCPGPEPNWGKGPPETRSSLELDTELSWISGDLLPPGGQEEPPSPRDLKKCYSVEAQSCQRRPTSWLDEQRRHSIAVSCLDSGSQPHLGTDPSNLGGQPLGGPGSRPKKKLSPPSITIDPPESQGPRTPPSPGICLRRRAPSSDSKDPLASGPPDSMAASPSPKKDVLSLSGLSSDPADLDP

SEQ ID NO: 888815 - protein, 2284 aa, Homo sapiens
MDEEEDGAGAEESGQPRSFMRLNDLSGAGGRPGPGSAEKDPGSADSEAEGLPYPALAPVVFFYLSQDSRPRSWCLRTVCNPWFERISMLVILLNCVTLGMFRPCEDIACDSQRCRILQAFDDFIFAFFAVEMVVKMVALGIFGKKCYLGDTWNRLDFFIVIAGMLEYSLDLQNVSFSAVRTVRVLRPLRAINRVPSMRILVTLLLDTLPMLGNVLLLCFFVFFIFGIVGVQLWAGLLRNRCFLPENFSLPLSVDLERYYQTENEDESPFICSQPRENGMRSCRSVPTLRGDGGGGPPCGLDYEAYNSSSNTTCVNWNQYYTNCSAGEHNPFKGAINFDNIGYAWIAIFQVITLEGWVDIMYFVMDAHSFYNFIYFILLIIVGSFFMINLCLVVIATQFSETKQRESQLMREQRVRFLSNASTLASFSEPGSCYEELLKYLVYILRKAARRLAQVSRAAGVRVGLLSSPAPLGGQETQPSSSCSRSHRRLSVHHLVHHHHHHHHHYHLGNGTLRAPRASPEIQDRDANGSRRLMLPPPSTPALSGAPPGGAESVHSFYHADCHLEPVRCQAPPPRSPSEASGRTVGSGKVYPTVHTSPPPETLKEKALVEVAASSGPPTLTSLNIPPGPYSSMHKLLETQSTGACQSSCKISSPCLKADSGACGPDSCPYCARAGAGEVELADREMPDSDSEAVYEFTQDAQHSDLRDPHSRRQRSLGPDAEPSSVLAFWRLICDTFRKIVDSKYFGRGIMIAILVNTLSMGIEYHEQPEELTNALEISNIVFTSLFALEMLLKLLVYGPFGYIKNPYNIFDGVIVVISVWEIVGQQGGGLSVLRTFRLMRVLKLVRFLPALQRQLVVLMKTMDNVATFCMLLMLFIFIFSILGMHLFGCKFASERDGDTLPDRKNFDSLLWAIVTVFQILTQEDWNKVLYNGMASTSSWAALYFIALMTFGNYVLFNLLVAILVEGFQAEEISKREDASGQLSCIQLPVDSQGGDANKSESEPDFFSPSLDGDGDRKKCLALVSLGEHPELRKSLLPPLIIHTAATPMSLPKSTSTGLGEALGPASRRTSSSGSAEPGAAHEMKSPPSARSSPHSPWSAASSWTSRRSSRNSLGRAPSLKRRSPSGERRSLLSGEGQESQDEEESSEEERASPAGSDHRHRGSLEREAKSSFDLPDTLQVPGLHRTASGRGSASEHQDCNGKSASGRLARALRPDDPPLDGDDADDEGNLSKGERVRAWIRARLPACCLERDSWSAYIFPPQSRFRLLCHRIITHKMFDHVVLVIIFLNCITIAMERPKIDPHSAERIFLTLSNYIFTAVFLAEMTVKVVALGWCFGEQAYLRSSWNVLDGLLVLISVIDILVSMVSDSGTKILGMLRVLRLLRTLRPLRVISRAQGLKLVVETLMSSLKPIGNIVVICCAFFIIFGILGVQLFKGKFFVCQGEDTRNITNKSDCAEASYRWVRHKYNFDNLGQALMSLFVLASKDGWVDIMYDGLDAVGVDQQPIMNHNPWMLLYFISFLLIVAFFVLNMFVGVVVENFHKCRQHQEEEEARRREEKRLRRLEKKRRNLMLDDVIASGSSASAASEAQCKPYYSDYSRFRLLVHHLCTSHYLDLFITGVIGLNVVTMAMEHYQQPQILDEALKICNYIFTVIFVLESVFKLVAFGFRRFFQDRWNQLDLAIVLLSIMGITLEEIEVNASLPINPTIIRIMRVLRIARVLKLLKMAVGMRALLDTVMQALPQVGNLGLLFMLLFFIFAALGVELFGDLECDETHPCEGLGRHATFRNFGMAFLTLFRVSTGDNWNGIMKDTLRDCDQESTCYNTVISPIYFVSFVLTAQFVLVNVVIAVLMKHLEESNKEAKEEAELEAELELEMKTLSPQPHSPLGSPFLWPGVEGPDSPDSPKPGALHPAAHARSASHFSLEHPTMQPHPTELPGPDLLTVRKSGVSRTHSLPNDSYMCRHGSTAEGPLGHRGWGLPKAQSGSVLSVHSQPADTSYILQLPKDAPHLLQPHSAPTWGTIPKLPPPGRSPLAQRPLRRQAAIRTDSLDVQGLGSREDLLAEVSGPSPPLARAYSFWGQSSTQAQQHSRSHSKISKHMTPPAPCPGPEPNWGKGPPETRSSLELDTELSWISGDLLPPGGQEEPPSPRDLKKCYSVEAQSCQRRPTSWLDEQRRHSIAVSCLDSGSQPHLGTDPSNLGGQPLGGPGSRPKKKLSPPSITIDPPESQGPRTPPSPGICLRRRAPSSDSKDPLASGPPDSMAASPSPKKDVLSLSGLSSDPADLDP

SEQ ID NO: 888816 - protein, 2273 aa, Homo sapiens
MDEEEDGAGAEESGQPRSFMRLNDLSGAGGRPGPGSAEKDPGSADSEAEGLPYPALAPVVFFYLSQDSRPRSWCLRTVCNPWFERISMLVILLNCVTLGMFRPCEDIACDSQRCRILQAFDDFIFAFFAVEMVVKMVALGIFGKKCYLGDTWNRLDFFIVIAGMLEYSLDLQNVSFSAVRTVRVLRPLRAINRVPSMRILVTLLLDTLPMLGNVLLLCFFVFFIFGIVGVQLWAGLLRNRCFLPENFSLPLSVDLERYYQTENEDESPFICSQPRENGMRSCRSVPTLRGDGGGGPPCGLDYEAYNSSSNTTCVNWNQYYTNCSAGEHNPFKGAINFDNIGYAWIAIFQVITLEGWVDIMYFVMDAHSFYNFIYFILLIIVGSFFMINLCLVVIATQFSETKQRESQLMREQRVRFLSNASTLASFSEPGSCYEELLKYLVYILRKAARRLAQVSRAAGVRVGLLSSPAPLGGQETQPSSSCSRSHRRLSVHHLVHHHHHHHHHYHLGNGTLRAPRASPEIQDRDANGSRRLMLPPPSTPALSGAPPGGAESVHSFYHADCHLEPVRCQAPPPRSPSEASGRTVGSGKVYPTVHTSPPPETLKEKALVEVAASSGPPTLTSLNIPPGPYSSMHKLLETQSTGACQSSCKISSPCLKADSGACGPDSCPYCARAGAGEVELADREMPDSDSEAVYEFTQDAQHSDLRDPHSRRQRSLGPDAEPSSVLAFWRLICDTFRKIVDSKYFGRGIMIAILVNTLSMGIEYHEQPEELTNALEISNIVFTSLFALEMLLKLLVYGPFGYIKNPYNIFDGVIVVISVWEIVGQQGGGLSVLRTFRLMRVLKLVRFLPALQRQLVVLMKTMDNVATFCMLLMLFIFIFSILGMHLFGCKFASERDGDTLPDRKNFDSLLWAIVTVFQILTQEDWNKVLYNGMASTSSWAALYFIALMTFGNYVLFNLLVAILVEGFQAEEISKREDASGQLSCIQLPVDSQGGDANKSESEPDFFSPSLDGDGDRKKCLALVSLGEHPELRKSLLPPLIIHTAATPMSLPKSTSTGLGEALGPASRRTSSSGSAEPGAAHEMKSPPSARSSPHSPWSAASSWTSRRSSRNSLGRAPSLKRRSPSGERRSLLSGEGQESQDEEESSEEERASPAGSDHRHRGSLEREAKSSFDLPDTLQVPGLHRTASGRGSASEHQDCNGKSASGRLARALRPDDPPLDGDDADDEGNLSKGERVRAWIRARLPACCLERDSWSAYIFPPQSRFRLLCHRIITHKMFDHVVLVIIFLNCITIAMERPKIDPHSAERIFLTLSNYIFTAVFLAEMTVKVVALGWCFGEQAYLRSSWNVLDGLLVLISVIDILVSMVSDSGTKILGMLRVLRLLRTLRPLRVISRAQGLKLVVETLMSSLKPIGNIVVICCAFFIIFGILGVQLFKGKFFVCQGEDTRNITNKSDCAEASYRWVRHKYNFDNLGQALMSLFVLASKDGWVDIMYDGLDAVGVDQQPIMNHNPWMLLYFISFLLIVAFFVLNMFVGVVVENFHKCRQHQEEEEARRREEKRLRRLEKKRRSKEKQMAEAQCKPYYSDYSRFRLLVHHLCTSHYLDLFITGVIGLNVVTMAMEHYQQPQILDEALKICNYIFTVIFVLESVFKLVAFGFRRFFQDRWNQLDLAIVLLSIMGITLEEIEVNASLPINPTIIRIMRVLRIARVLKLLKMAVGMRALLDTVMQALPQVGNLGLLFMLLFFIFAALGVELFGDLECDETHPCEGLGRHATFRNFGMAFLTLFRVSTGDNWNGIMKDTLRDCDQESTCYNTVISPIYFVSFVLTAQFVLVNVVIAVLMKHLEESNKEAKEEAELEAELELEMKTLSPQPHSPLGSPFLWPGVEGPDSPDSPKPGALHPAAHARSASHFSLEHPTMQPHPTELPGPDLLTVRKSGVSRTHSLPNDSYMCRHGSTAEGPLGHRGWGLPKAQSGSVLSVHSQPADTSYILQLPKDAPHLLQPHSAPTWGTIPKLPPPGRSPLAQRPLRRQAAIRTDSLDVQGLGSREDLLAEVSGPSPPLARAYSFWGQSSTQAQQHSRSHSKISKHMTPPAPCPGPEPNWGKGPPETRSSLELDTELSWISGDLLPPGGQEEPPSPRDLKKCYSVEAQSCQRRPTSWLDEQRRHSIAVSCLDSGSQPHLGTDPSNLGGQPLGGPGSRPKKKLSPPSITIDPPESQGPRTPPSPGICLRRRAPSSDSKDPLASGPPDSMAASPSPKKDVLSLSGLSSDPADLDP

SEQ ID NO: 888817 - protein, 2266 aa, Homo sapiens
MDEEEDGAGAEESGQPRSFMRLNDLSGAGGRPGPGSAEKDPGSADSEAEGLPYPALAPVVFFYLSQDSRPRSWCLRTVCNPWFERISMLVILLNCVTLGMFRPCEDIACDSQRCRILQAFDDFIFAFFAVEMVVKMVALGIFGKKCYLGDTWNRLDFFIVIAGMLEYSLDLQNVSFSAVRTVRVLRPLRAINRVPSMRILVTLLLDTLPMLGNVLLLCFFVFFIFGIVGVQLWAGLLRNRCFLPENFSLPLSVDLERYYQTENEDESPFICSQPRENGMRSCRSVPTLRGDGGGGPPCGLDYEAYNSSSNTTCVNWNQYYTNCSAGEHNPFKGAINFDNIGYAWIAIFQVITLEGWVDIMYFVMDAHSFYNFIYFILLIIVGSFFMINLCLVVIATQFSETKQRESQLMREQRVRFLSNASTLASFSEPGSCYEELLKYLVYILRKAARRLAQVSRAAGVRVGLLSSPAPLGGQETQPSSSCSRSHRRLSVHHLVHHHHHHHHHYHLGNGTLRAPRASPEIQDRDANGSRRLMLPPPSTPALSGAPPGGAESVHSFYHADCHLEPVRCQAPPPRSPSEASGRTVGSGKVYPTVHTSPPPETLKEKALVEVAASSGPPTLTSLNIPPGPYSSMHKLLETQSTGACQSSCKISSPCLKADSGACGPDSCPYCARAGAGEVELADREMPDSDSEAVYEFTQDAQHSDLRDPHSRRQRSLGPDAEPSSVLAFWRLICDTFRKIVDSKYFGRGIMIAILVNTLSMGIEYHEQPEELTNALEISNIVFTSLFALEMLLKLLVYGPFGYIKNPYNIFDGVIVVISVWEIVGQQGGGLSVLRTFRLMRVLKLVRFLPALQRQLVVLMKTMDNVATFCMLLMLFIFIFSILGMHLFGCKFASERDGDTLPDRKNFDSLLWAIVTVFQILTQEDWNKVLYNGMASTSSWAALYFIALMTFGNYVLFNLLVAILVEGFQAEEISKREDASGQLSCIQLPVDSQGGDANKSESEPDFFSPSLDGDGDRKKCLALVSLGEHPELRKSLLPPLIIHTAATPMSLPKSTSTGLGEALGPASRRTSSSGSAEPGAAHEMKSPPSARSSPHSPWSAASSWTSRRSSRNSLGRAPSLKRRSPSGERRSLLSGEGQESQDEEESSEEERASPAGSDHRHRGSLEREAKSSFDLPDTLQVPGLHRTASGRGSASEHQDCNGKSASGRLARALRPDDPPLDGDDADDEGNLSKGERVRAWIRARLPACCLERDSWSAYIFPPQSRFRLLCHRIITHKMFDHVVLVIIFLNCITIAMERPKIDPHSAERIFLTLSNYIFTAVFLAEMTVKVVALGWCFGEQAYLRSSWNVLDGLLVLISVIDILVSMVSDSGTKILGMLRVLRLLRTLRPLRVISRAQGLKLVVETLMSSLKPIGNIVVICCAFFIIFGILGVQLFKGKFFVCQGEDTRNITNKSDCAEASYRWVRHKYNFDNLGQALMSLFVLASKDGWVDIMYDGLDAVGVDQQPIMNHNPWMLLYFISFLLIVAFFVLNMFVGVVVENFHKCRQHQEEEEARRREEKRLRRLEKKRRKAQCKPYYSDYSRFRLLVHHLCTSHYLDLFITGVIGLNVVTMAMEHYQQPQILDEALKICNYIFTVIFVLESVFKLVAFGFRRFFQDRWNQLDLAIVLLSIMGITLEEIEVNASLPINPTIIRIMRVLRIARVLKLLKMAVGMRALLDTVMQALPQVGNLGLLFMLLFFIFAALGVELFGDLECDETHPCEGLGRHATFRNFGMAFLTLFRVSTGDNWNGIMKDTLRDCDQESTCYNTVISPIYFVSFVLTAQFVLVNVVIAVLMKHLEESNKEAKEEAELEAELELEMKTLSPQPHSPLGSPFLWPGVEGPDSPDSPKPGALHPAAHARSASHFSLEHPTMQPHPTELPGPDLLTVRKSGVSRTHSLPNDSYMCRHGSTAEGPLGHRGWGLPKAQSGSVLSVHSQPADTSYILQLPKDAPHLLQPHSAPTWGTIPKLPPPGRSPLAQRPLRRQAAIRTDSLDVQGLGSREDLLAEVSGPSPPLARAYSFWGQSSTQAQQHSRSHSKISKHMTPPAPCPGPEPNWGKGPPETRSSLELDTELSWISGDLLPPGGQEEPPSPRDLKKCYSVEAQSCQRRPTSWLDEQRRHSIAVSCLDSGSQPHLGTDPSNLGGQPLGGPGSRPKKKLSPPSITIDPPESQGPRTPPSPGICLRRRAPSSDSKDPLASGPPDSMAASPSPKKDVLSLSGLSSDPADLDP

SEQ ID NO: 888818 - protein, 2321 aa, Homo sapiens
MDEEEDGAGAEESGQPRSFMRLNDLSGAGGRPGPGSAEKDPGSADSEAEGLPYPALAPVVFFYLSQDSRPRSWCLRTVCNPWFERISMLVILLNCVTLGMFRPCEDIACDSQRCRILQAFDDFIFAFFAVEMVVKMVALGIFGKKCYLGDTWNRLDFFIVIAGMLEYSLDLQNVSFSAVRTVRVLRPLRAINRVPSMRILVTLLLDTLPMLGNVLLLCFFVFFIFGIVGVQLWAGLLRNRCFLPENFSLPLSVDLERYYQTENEDESPFICSQPRENGMRSCRSVPTLRGDGGGGPPCGLDYEAYNSSSNTTCVNWNQYYTNCSAGEHNPFKGAINFDNIGYAWIAIFQVITLEGWVDIMYFVMDAHSFYNFIYFILLIIVGSFFMINLCLVVIATQFSETKQRESQLMREQRVRFLSNASTLASFSEPGSCYEELLKYLVYILRKAARRLAQVSRAAGVRVGLLSSPAPLGGQETQPSSSCSRSHRRLSVHHLVHHHHHHHHHYHLGNGTLRAPRASPEIQDRDANGSRRLMLPPPSTPALSGAPPGGAESVHSFYHADCHLEPVRCQAPPPRSPSEASGRTVGSGKVYPTVHTSPPPETLKEKALVEVAASSGPPTLTSLNIPPGPYSSMHKLLETQSTGACQSSCKISSPCLKADSGACGPDSCPYCARAGAGEVELADREMPDSDSEAVYEFTQDAQHSDLRDPHSRRQRSLGPDAEPSSVLAFWRLICDTFRKIVDSKYFGRGIMIAILVNTLSMGIEYHEQPEELTNALEISNIVFTSLFALEMLLKLLVYGPFGYIKNPYNIFDGVIVVISVWEIVGQQGGGLSVLRTFRLMRVLKLVRFLPALQRQLVVLMKTMDNVATFCMLLMLFIFIFSILGMHLFGCKFASERDGDTLPDRKNFDSLLWAIVTVFQILTQEDWNKVLYNGMASTSSWAALYFIALMTFGNYVLFNLLVAILVEGFQAEEISKREDASGQLSCIQLPVDSQGGDANKSESEPDFFSPSLDGDGDRKKCLALVSLGEHPELRKSLLPPLIIHTAATPMSLPKSTSTGLGEALGPASRRTSSSGSAEPGAAHEMKSPPSARSSPHSPWSAASSWTSRRSSRNSLGRAPSLKRRSPSGERRSLLSGEGQESQDEEESSEEERASPAGSDHRHRGSLEREAKSSFDLPDTLQVPGLHRTASGRGSASEHQDCNGKSASGRLARALRPDDPPLDGDDADDEGNLSKGERVRAWIRARLPACCLERDSWSAYIFPPQSRFRLLCHRIITHKMFDHVVLVIIFLNCITIAMERPKIDPHSAERIFLTLSNYIFTAVFLAEMTVKVVALGWCFGEQAYLRSSWNVLDGLLVLISVIDILVSMVSDSGTKILGMLRVLRLLRTLRPLRVISRAQGLKLVVETLMSSLKPIGNIVVICCAFFIIFGILGVQLFKGKFFVCQGEDTRNITNKSDCAEASYRWVRHKYNFDNLGQALMSLFVLASKDGWVDIMYDGLDAVGVDQQPIMNHNPWMLLYFISFLLIVAFFVLNMFVGVVVENFHKCRQHQEEEEARRREEKRLRRLEKKRRSKEKQMAEAQCKPYYSDYSRFRLLVHHLCTSHYLDLFITGVIGLNVVTMAMEHYQQPQILDEALKICNYIFTVIFVLESVFKLVAFGFRRFFQDRWNQLDLAIVLLSIMGITLEEIEVNASLPINPTIIRIMRVLRIARVLKLLKMAVGMRALLDTVMQALPQVGNLGLLFMLLFFIFAALGVELFGDLECDETHPCEGLGRHATFRNFGMAFLTLFRVSTGDNWNGIMKDTLRDCDQESTCYNTVISPIYFVSFVLTAQFVLVNVVIAVLMKHLEESNKEAKEEAELEAELELEMKTLSPQPHSPLGSPFLWPGVEGPDSPDSPKPGALHPAAHARSASHFSLEHPTDRQLFDTISLLIQGSLEWELKLMDELAGPGGQPSAFPSAPSLGGSDPQMQPHPTELPGPDLLTVRKSGVSRTHSLPNDSYMCRHGSTAEGPLGHRGWGLPKAQSGSVLSVHSQPADTSYILQLPKDAPHLLQPHSAPTWGTIPKLPPPGRSPLAQRPLRRQAAIRTDSLDVQGLGSREDLLAEVSGPSPPLARAYSFWGQSSTQAQQHSRSHSKISKHMTPPAPCPGPEPNWGKGPPETRSSLELDTELSWISGDLLPPGGQEEPPSPRDLKKCYSVEAQSCQRRPTSWLDEQRRHSIAVSCLDSGSQPHLGTDPSNLGGQPLGGPGSRPKKKLSPPSITIDPPESQGPRTPPSPGICLRRRAPSSDSKDPLASGPPDSMAASPSPKKDVLSLSGLSSDPADLDP

SEQ ID NO: 888819 - protein, 2171 aa, Homo sapiens
MDEEEDGAGAEESGQPRSFMRLNDLSGAGGRPGPGSAEKDPGSADSEAEGLPYPALAPVVFFYLSQDSRPRSWCLRTVCNPWFERISMLVILLNCVTLGMFRPCEDIACDSQRCRILQAFDDFIFAFFAVEMVVKMVALGIFGKKCYLGDTWNRLDFFIVIAGMLEYSLDLQNVSFSAVRTVRVLRPLRAINRVPSMRILVTLLLDTLPMLGNVLLLCFFVFFIFGIVGVQLWAGLLRNRCFLPENFSLPLSVDLERYYQTENEDESPFICSQPRENGMRSCRSVPTLRGDGGGGPPCGLDYEAYNSSSNTTCVNWNQYYTNCSAGEHNPFKGAINFDNIGYAWIAIFQVITLEGWVDIMYFVMDAHSFYNFIYFILLIIVGSFFMINLCLVVIATQFSETKQRESQLMREQRVRFLSNASTLASFSEPGSCYEELLKYLVYILRKAARRLAQVSRAAGVRVGLLSSPAPLGGQETQPSSSCSRSHRRLSVHHLVHHHHHHHHHYHLGNGTLRAPRASPEIQDRDANGSRRLMLPPPSTPALSGAPPGGAESVHSFYHADCHLEPVRCQAPPPRSPSEASGRTVGSGKVYPTVHTSPPPETLKEKALVEVAASSGPPTLTSLNIPPGPYSSMHKLLETQSTGACQSSCKISSPCLKADSGACGPDSCPYCARAGAGEVELADREMPDSDSEAVYEFTQDAQHSDLRDPHSRRQRSLGPDAEPSSVLAFWRLICDTFRKIVDSKYFGRGIMIAILVNTLSMGIEYHEQPEELTNALEISNIVFTSLFALEMLLKLLVYGPFGYIKNPYNIFDGVIVVISVWEIVGQQGGGLSVLRTFRLMRVLKLVRFLPALQRQLVVLMKTMDNVATFCMLLMLFIFIFSILGMHLFGCKFASERDGDTLPDRKNFDSLLWAIVTVFQILTQEDWNKVLYNGMASTSSWAALYFIALMTFGNYVLFNLLVAILVEGFQAEGDANKSESEPDFFSPSLDGDGDRKKCLALVSLGEHPELRKSLLPPLIIHTAATPMSLPKSTSTGLGEALGPASRRTSSSGSAEPGAAHEMKSPPSARSSPHSPWSAASSWTSRRSSRNSLGRAPSLKRRSPSGERRSLLSGEGQESQDEEESSEEERASPAGSDHRHRGSLEREAKSSFDLPDTLQVPGLHRTASGRGSASEHQDCNGKSASGRLARALRPDDPPLDGDDADDEGNLSKGERVRAWIRARLPACCLERDSWSAYIFPPQSRFRLLCHRIITHKMFDHVVLVIIFLNCITIAMERPKIDPHSAERIFLTLSNYIFTAVFLAEMTVKVVALGWCFGEQAYLRSSWNVLDGLLVLISVIDILVSMVSDSGTKILGMLRVLRLLRTLRPLRVISRAQGLKLVVETLMSSLKPIGNIVVICCAFFIIFGILGVQLFKGKFFVCQGEDTRNITNKSDCAEASYRWVRHKYNFDNLGQALMSLFVLASKDGWVDIMYDGLDAVGVDQQPIMNHNPWMLLYFISFLLIVAFFVLNMFVGVVVENFHKCRQHQEEEEARRREEKRLRRLEKKRRSKEKQMAEAQCKPYYSDYSRFRLLVHHLCTSHYLDLFITGVIGLNVVTMAMEHYQQPQILDEALKICNYIFTVIFVLESVFKLVAFGFRRFFQDRWNQLDLAIVLLSIMGITLEEIEVNASLPINPTIIRIMRVLRIARVLKLLKMAVGMRALLDTVMQALPQVGNLGLLFMLLFFIFAALGVELFGDLECDETHPCEGLGRHATFRNFGMAFLTLFRVSTGDNWNGIMKDTLRDCDQESTCYNTVISPIYFVSFVLTAQFVLVNVVIAVLMKHLEESNKEAKEEAELEAELELEMKTLSPQPHSPLGSPFLWPGVEGPDSPDSPKPGALHPAAHARSASHFSLEHPTMQPHPTELPGPDLLTVRKSGVSRTHSLPNDSYMCRHGSTAEGPLGHRGWGLPKAQSGSVLSVHSQPADTSYILQLPKDAPHLLQPHSAPTWGTIPKLPPPGRSPLAQRPLRRQAAIRTDSLDVQGLGSREDLLAEEEPPSPRDLKKCYSVEAQSCQRRPTSWLDEQRRHSIAVSCLDSGSQPHLGTDPSNLGGQPLGGPGSRPKKKLSPPSITIDPPESQGPRTPPSPGICLRRRAPSSDSKDPLASGPPDSMAASPSPKKDVLSLSGLSSDPADLDP

SEQ ID NO: 888820 - protein, 2243 aa, Homo sapiens
MDEEEDGAGAEESGQPRSFMRLNDLSGAGGRPGPGSAEKDPGSADSEAEGLPYPALAPVVFFYLSQDSRPRSWCLRTVCNPWFERISMLVILLNCVTLGMFRPCEDIACDSQRCRILQAFDDFIFAFFAVEMVVKMVALGIFGKKCYLGDTWNRLDFFIVIAGMLEYSLDLQNVSFSAVRTVRVLRPLRAINRVPSMRILVTLLLDTLPMLGNVLLLCFFVFFIFGIVGVQLWAGLLRNRCFLPENFSLPLSVDLERYYQTENEDESPFICSQPRENGMRSCRSVPTLRGDGGGGPPCGLDYEAYNSSSNTTCVNWNQYYTNCSAGEHNPFKGAINFDNIGYAWIAIFQVITLEGWVDIMYFVMDAHSFYNFIYFILLIIVGSFFMINLCLVVIATQFSETKQRESQLMREQRVRFLSNASTLASFSEPGSCYEELLKYLVYILRKAARRLAQVSRAAGVRVGLLSSPAPLGGQETQPSSSCSRSHRRLSVHHLVHHHHHHHHHYHLGNGTLRAPRASPEIQDRDANGSRRLMLPPPSTPALSGAPPGGAESVHSFYHADCHLEPVRCQAPPPRSPSEASGRTVGSGKVYPTVHTSPPPETLKEKALVEVAASSGPPTLTSLNIPPGPYSSMHKLLETQSTGACQSSCKISSPCLKADSGACGPDSCPYCARAGAGEVELADREMPDSDSEAVYEFTQDAQHSDLRDPHSRRQRSLGPDAEPSSVLAFWRLICDTFRKIVDSKYFGRGIMIAILVNTLSMGIEYHEQPEELTNALEISNIVFTSLFALEMLLKLLVYGPFGYIKNPYNIFDGVIVVISVWEIVGQQGGGLSVLRTFRLMRVLKLVRFLPALQRQLVVLMKTMDNVATFCMLLMLFIFIFSILGMHLFGCKFASERDGDTLPDRKNFDSLLWAIVTVFQILTQEDWNKVLYNGMASTSSWAALYFIALMTFGNYVLFNLLVAILVEGFQAEGDANKSESEPDFFSPSLDGDGDRKKCLALVSLGEHPELRKSLLPPLIIHTAATPMSLPKSTSTGLGEALGPASRRTSSSGSAEPGAAHEMKSPPSARSSPHSPWSAASSWTSRRSSRNSLGRAPSLKRRSPSGERRSLLSGEGQESQDEEESSEEERASPAGSDHRHRGSLEREAKSSFDLPDTLQVPGLHRTASGRGSASEHQDCNGKSASGRLARALRPDDPPLDGDDADDEGNLSKGERVRAWIRARLPACCLERDSWSAYIFPPQSRFRLLCHRIITHKMFDHVVLVIIFLNCITIAMERPKIDPHSAERIFLTLSNYIFTAVFLAEMTVKVVALGWCFGEQAYLRSSWNVLDGLLVLISVIDILVSMVSDSGTKILGMLRVLRLLRTLRPLRVISRAQGLKLVVETLMSSLKPIGNIVVICCAFFIIFGILGVQLFKGKFFVCQGEDTRNITNKSDCAEASYRWVRHKYNFDNLGQALMSLFVLASKDGWVDIMYDGLDAVGVDQQPIMNHNPWMLLYFISFLLIVAFFVLNMFVGVVVENFHKCRQHQEEEEARRREEKRLRRLEKKRRKAQCKPYYSDYSRFRLLVHHLCTSHYLDLFITGVIGLNVVTMAMEHYQQPQILDEALKICNYIFTVIFVLESVFKLVAFGFRRFFQDRWNQLDLAIVLLSIMGITLEEIEVNASLPINPTIIRIMRVLRIARVLKLLKMAVGMRALLDTVMQALPQVGNLGLLFMLLFFIFAALGVELFGDLECDETHPCEGLGRHATFRNFGMAFLTLFRVSTGDNWNGIMKDTLRDCDQESTCYNTVISPIYFVSFVLTAQFVLVNVVIAVLMKHLEESNKEAKEEAELEAELELEMKTLSPQPHSPLGSPFLWPGVEGPDSPDSPKPGALHPAAHARSASHFSLEHPTMQPHPTELPGPDLLTVRKSGVSRTHSLPNDSYMCRHGSTAEGPLGHRGWGLPKAQSGSVLSVHSQPADTSYILQLPKDAPHLLQPHSAPTWGTIPKLPPPGRSPLAQRPLRRQAAIRTDSLDVQGLGSREDLLAEVSGPSPPLARAYSFWGQSSTQAQQHSRSHSKISKHMTPPAPCPGPEPNWGKGPPETRSSLELDTELSWISGDLLPPGGQEEPPSPRDLKKCYSVEAQSCQRRPTSWLDEQRRHSIAVSCLDSGSQPHLGTDPSNLGGQPLGGPGSRPKKKLSPPSITIDPPESQGPRTPPSPGICLRRRAPSSDSKDPLASGPPDSMAASPSPKKDVLSLSGLSSDPADLDP

SEQ ID NO: 888821 - protein, 1555 aa, Homo sapiens
MDEEEDGAGAEESGQPRSFMRLNDLSGAGGRPGPGSAEKDPGSADSEAEGLPYPALAPVVFFYLSQDSRPRSWCLRTVCNPWFERISMLVILLNCVTLGMFRPCEDIACDSQRCRILQAFDDFIFAFFAVEMVVKMVALGIFGKKCYLGDTWNRLDFFIVIAGMLEYSLDLQNVSFSAVRTVRVLRPLRAINRVPSMRILVTLLLDTLPMLGNVLLLCFFVFFIFGIVGVQLWAGLLRNRCFLPENFSLPLSVDLERYYQTENEDESPFICSQPRENGMRSCRSVPTLRGDGGGGPPCGLDYEAYNSSSNTTCVNWNQYYTNCSAGEHNPFKGAINFDNIGYAWIAIFQVITLEGWVDIMYFVMDAHSFYNFIYFILLIIVGSFFMINLCLVVIATQFSETKQRESQLMREQRVRFLSNASTLASFSEPGSCYEELLKYLVYILRKAARRLAQVSRAAGVRVGLLSSPAPLGGQETQPSSSCSRSHRRLSVHHLVHHHHHHHHHYHLGNGTLRAPRASPEIQDRDANGSRRLMLPPPSTPALSGAPPGGAESVHSFYHADCHLEPVRCQAPPPRSPSEASGRTVGSGKVYPTVHTSPPPETLKEKALVEVAASSGPPTLTSLNIPPGPYSSMHKLLETQSTGACQSSCKISSPCLKADSGACGPDSCPYCARAGAGEVELADREMPDSDSEAVYEFTQDAQHSDLRDPHSRRQRSLGPDAEPSSVLAFWRLICDTFRKIVDSKYFGRGIMIAILVNTLSMGIEYHEQPEELTNALEISNIVFTSLFALEMLLKLLVYGPFGYIKNPYNIFDGVIVVISVWEIVGQQGGGLSVLRTFRLMRVLKLVRFLPALQRQLVVLMKTMDNVATFCMLLMLFIFIFSILGMHLFGCKFASERDGDTLPDRKNFDSLLWAIVTVFQILTQEDWNKVLYNGMASTSSWAALYFIALMTFGNYVLFNLLVAILVEGFQAEEISKREDASGQLSCIQLPVDSQGGDANKSESEPDFFSPSLDGDGDRKKCLALVSLGEHPELRKSLLPPLIIHTAATPMSLPKSTSTGLGEALGPASRRTSSSGSAEPGAAHEMKSPPSARSSPHSPWSAASSWTSRRSSRNSLGRAPSLKRRSPSGERRSLLSGEGQESQDEEESSEEERASPAGSDHRHRGSLEREAKSSFDLPDTLQVPGLHRTASGRGSASEHQDCNGKSASGRLARALRPDDPPLDGDDADDEGNLSKGERVRAWIRARLPACCLERDSWSAYIFPPQSRFRLLCHRIITHKMFDHVVLVIIFLNCITIAMERPKIDPHSAERIFLTLSNYIFTAVFLAEMTVKVVALGWCFGEQAYLRSSWNVLDGLLVLISVIDILVSMVSDSGTKILGMLRVLRLLRTLRPLRVISRAQGLKLVVETLMSSLKPIGNIVVICCAFFIIFGILGVQLFKGKFFVCQGEDTRNITNKSDCAEASYRWVRHKYNFDNLGQVSPRLRGGAVVKEAGGGTGPCLVIPADSGGGGLHEEISPSHPLLSNHQHVAKPSPSHSAPKSGPMGSLAVLKDEETEAQRG

SEQ ID NO: 888822 - protein, 2306 aa, Homo sapiens
MDEEEDGAGAEESGQPRSFMRLNDLSGAGGRPGPGSAEKDPGSADSEAEGLPYPALAPVVFFYLSQDSRPRSWCLRTVCNPWFERISMLVILLNCVTLGMFRPCEDIACDSQRCRILQAFDDFIFAFFAVEMVVKMVALGIFGKKCYLGDTWNRLDFFIVIAGMLEYSLDLQNVSFSAVRTVRVLRPLRAINRVPSMRILVTLLLDTLPMLGNVLLLCFFVFFIFGIVGVQLWAGLLRNRCFLPENFSLPLSVDLERYYQTENEDESPFICSQPRENGMRSCRSVPTLRGDGGGGPPCGLDYEAYNSSSNTTCVNWNQYYTNCSAGEHNPFKGAINFDNIGYAWIAIFQVITLEGWVDIMYFVMDAHSFYNFIYFILLIIVGSFFMINLCLVVIATQFSETKQRESQLMREQRVRFLSNASTLASFSEPGSCYEELLKYLVYILRKAARRLAQVSRAAGVRVGLLSSPAPLGGQETQPSSSCSRSHRRLSVHHLVHHHHHHHHHYHLGNGTLRAPRASPEIQDRDANGSRRLMLPPPSTPALSGAPPGGAESVHSFYHADCHLEPVRCQAPPPRSPSEASGRTVGSGKVYPTVHTSPPPETLKEKALVEVAASSGPPTLTSLNIPPGPYSSMHKLLETQSTGACQSSCKISSPCLKADSGACGPDSCPYCARAGAGEVELADREMPDSDSEAVYEFTQDAQHSDLRDPHSRRQRSLGPDAEPSSVLAFWRLICDTFRKIVDSKYFGRGIMIAILVNTLSMGIEYHEQPEELTNALEISNIVFTSLFALEMLLKLLVYGPFGYIKNPYNIFDGVIVVISVWEIVGQQGGGLSVLRTFRLMRVLKLVRFLPALQRQLVVLMKTMDNVATFCMLLMLFIFIFSILGMHLFGCKFASERDGDTLPDRKNFDSLLWAIVTVFQILTQEDWNKVLYNGMASTSSWAALYFIALMTFGNYVLFNLLVAILVEGFQAEGDANKSESEPDFFSPSLDGDGDRKKCLALVSLGEHPELRKSLLPPLIIHTAATPMSLPKSTSTGLGEALGPASRRTSSSGSAEPGAAHEMKSPPSARSSPHSPWSAASSWTSRRSSRNSLGRAPSLKRRSPSGERRSLLSGEGQESQDEEESSEEERASPAGSDHRHRGSLEREAKSSFDLPDTLQVPGLHRTASGRGSASEHQDCNGKSASGRLARALRPDDPPLDGDDADDEGNLSKGERVRAWIRARLPACCLERDSWSAYIFPPQSRFRLLCHRIITHKMFDHVVLVIIFLNCITIAMERPKIDPHSAERIFLTLSNYIFTAVFLAEMTVKVVALGWCFGEQAYLRSSWNVLDGLLVLISVIDILVSMVSDSGTKILGMLRVLRLLRTLRPLRVISRAQGLKLVVETLMSSLKPIGNIVVICCAFFIIFGILGVQLFKGKFFVCQGEDTRNITNKSDCAEASYRWVRHKYNFDNLGQALMSLFVLASKDGWVDIMYDGLDAVGVDQQPIMNHNPWMLLYFISFLLIVAFFVLNMFVGVVVENFHKCRQHQEEEEARRREEKRLRRLEKKRRNLMLDDVIASGSSASAASEAQCKPYYSDYSRFRLLVHHLCTSHYLDLFITGVIGLNVVTMAMEHYQQPQILDEALKICNYIFTVIFVLESVFKLVAFGFRRFFQDRWNQLDLAIVLLSIMGITLEEIEVNASLPINPTIIRIMRVLRIARVLKLLKMAVGMRALLDTVMQALPQVGNLGLLFMLLFFIFAALGVELFGDLECDETHPCEGLGRHATFRNFGMAFLTLFRVSTGDNWNGIMKDTLRDCDQESTCYNTVISPIYFVSFVLTAQFVLVNVVIAVLMKHLEESNKEAKEEAELEAELELEMKTLSPQPHSPLGSPFLWPGVEGPDSPDSPKPGALHPAAHARSASHFSLEHPTIPLAEMEALSLTSEIVSEPSCSLALTDDSLPDDMHTLLLSALESNMQPHPTELPGPDLLTVRKSGVSRTHSLPNDSYMCRHGSTAEGPLGHRGWGLPKAQSGSVLSVHSQPADTSYILQLPKDAPHLLQPHSAPTWGTIPKLPPPGRSPLAQRPLRRQAAIRTDSLDVQGLGSREDLLAEVSGPSPPLARAYSFWGQSSTQAQQHSRSHSKISKHMTPPAPCPGPEPNWGKGPPETRSSLELDTELSWISGDLLPPGGQEEPPSPRDLKKCYSVEAQSCQRRPTSWLDEQRRHSIAVSCLDSGSQPHLGTDPSNLGGQPLGGPGSRPKKKLSPPSITIDPPESQGPRTPPSPGICLRRRAPSSDSKDPLASGPPDSMAASPSPKKDVLSLSGLSSDPADLDP

SEQ ID NO: 888823 - protein, 2343 aa, Homo sapiens
MDEEEDGAGAEESGQPRSFMRLNDLSGAGGRPGPGSAEKDPGSADSEAEGLPYPALAPVVFFYLSQDSRPRSWCLRTVCNPWFERISMLVILLNCVTLGMFRPCEDIACDSQRCRILQAFDDFIFAFFAVEMVVKMVALGIFGKKCYLGDTWNRLDFFIVIAGMLEYSLDLQNVSFSAVRTVRVLRPLRAINRVPSMRILVTLLLDTLPMLGNVLLLCFFVFFIFGIVGVQLWAGLLRNRCFLPENFSLPLSVDLERYYQTENEDESPFICSQPRENGMRSCRSVPTLRGDGGGGPPCGLDYEAYNSSSNTTCVNWNQYYTNCSAGEHNPFKGAINFDNIGYAWIAIFQVITLEGWVDIMYFVMDAHSFYNFIYFILLIIVGSFFMINLCLVVIATQFSETKQRESQLMREQRVRFLSNASTLASFSEPGSCYEELLKYLVYILRKAARRLAQVSRAAGVRVGLLSSPAPLGGQETQPSSSCSRSHRRLSVHHLVHHHHHHHHHYHLGNGTLRAPRASPEIQDRDANGSRRLMLPPPSTPALSGAPPGGAESVHSFYHADCHLEPVRCQAPPPRSPSEASGRTVGSGKVYPTVHTSPPPETLKEKALVEVAASSGPPTLTSLNIPPGPYSSMHKLLETQSTGACQSSCKISSPCLKADSGACGPDSCPYCARAGAGEVELADREMPDSDSEAVYEFTQDAQHSDLRDPHSRRQRSLGPDAEPSSVLAFWRLICDTFRKIVDSKYFGRGIMIAILVNTLSMGIEYHEQPEELTNALEISNIVFTSLFALEMLLKLLVYGPFGYIKNPYNIFDGVIVVISVWEIVGQQGGGLSVLRTFRLMRVLKLVRFLPALQRQLVVLMKTMDNVATFCMLLMLFIFIFSILGMHLFGCKFASERDGDTLPDRKNFDSLLWAIVTVFQILTQEDWNKVLYNGMASTSSWAALYFIALMTFGNYVLFNLLVAILVEGFQAEGDANKSESEPDFFSPSLDGDGDRKKCLALVSLGEHPELRKSLLPPLIIHTAATPMSLPKSTSTGLGEALGPASRRTSSSGSAEPGAAHEMKSPPSARSSPHSPWSAASSWTSRRSSRNSLGRAPSLKRRSPSGERRSLLSGEGQESQDEEESSEEERASPAGSDHRHRGSLEREAKSSFDLPDTLQVPGLHRTASGRGSASEHQDCNGKSASGRLARALRPDDPPLDGDDADDEGNLSKGERVRAWIRARLPACCLERDSWSAYIFPPQSRFRLLCHRIITHKMFDHVVLVIIFLNCITIAMERPKIDPHSAERIFLTLSNYIFTAVFLAEMTVKVVALGWCFGEQAYLRSSWNVLDGLLVLISVIDILVSMVSDSGTKILGMLRVLRLLRTLRPLRVISRAQGLKLVVETLMSSLKPIGNIVVICCAFFIIFGILGVQLFKGKFFVCQGEDTRNITNKSDCAEASYRWVRHKYNFDNLGQALMSLFVLASKDGWVDIMYDGLDAVGVDQQPIMNHNPWMLLYFISFLLIVAFFVLNMFVGVVVENFHKCRQHQEEEEARRREEKRLRRLEKKRRSKEKQMAEAQCKPYYSDYSRFRLLVHHLCTSHYLDLFITGVIGLNVVTMAMEHYQQPQILDEALKICNYIFTVIFVLESVFKLVAFGFRRFFQDRWNQLDLAIVLLSIMGITLEEIEVNASLPINPTIIRIMRVLRIARVLKLLKMAVGMRALLDTVMQALPQVGNLGLLFMLLFFIFAALGVELFGDLECDETHPCEGLGRHATFRNFGMAFLTLFRVSTGDNWNGIMKDTLRDCDQESTCYNTVISPIYFVSFVLTAQFVLVNVVIAVLMKHLEESNKEAKEEAELEAELELEMKTLSPQPHSPLGSPFLWPGVEGPDSPDSPKPGALHPAAHARSASHFSLEHPTDRQLFDTISLLIQGSLEWELKLMDELAGPGGQPSAFPSAPSLGGSDPQIPLAEMEALSLTSEIVSEPSCSLALTDDSLPDDMHTLLLSALESNMQPHPTELPGPDLLTVRKSGVSRTHSLPNDSYMCRHGSTAEGPLGHRGWGLPKAQSGSVLSVHSQPADTSYILQLPKDAPHLLQPHSAPTWGTIPKLPPPGRSPLAQRPLRRQAAIRTDSLDVQGLGSREDLLAEVSGPSPPLARAYSFWGQSSTQAQQHSRSHSKISKHMTPPAPCPGPEPNWGKGPPETRSSLELDTELSWISGDLLPPGGQEEPPSPRDLKKCYSVEAQSCQRRPTSWLDEQRRHSIAVSCLDSGSQPHLGTDPSNLGGQPLGGPGSRPKKKLSPPSITIDPPESQGPRTPPSPGICLRRRAPSSDSKDPLASGPPDSMAASPSPKKDVLSLSGLSSDPADLDP

SEQ ID NO: 888824 - protein, 2332 aa, Homo sapiens
MDEEEDGAGAEESGQPRSFMRLNDLSGAGGRPGPGSAEKDPGSADSEAEGLPYPALAPVVFFYLSQDSRPRSWCLRTVCNPWFERISMLVILLNCVTLGMFRPCEDIACDSQRCRILQAFDDFIFAFFAVEMVVKMVALGIFGKKCYLGDTWNRLDFFIVIAGMLEYSLDLQNVSFSAVRTVRVLRPLRAINRVPSMRILVTLLLDTLPMLGNVLLLCFFVFFIFGIVGVQLWAGLLRNRCFLPENFSLPLSVDLERYYQTENEDESPFICSQPRENGMRSCRSVPTLRGDGGGGPPCGLDYEAYNSSSNTTCVNWNQYYTNCSAGEHNPFKGAINFDNIGYAWIAIFQVITLEGWVDIMYFVMDAHSFYNFIYFILLIIVGSFFMINLCLVVIATQFSETKQRESQLMREQRVRFLSNASTLASFSEPGSCYEELLKYLVYILRKAARRLAQVSRAAGVRVGLLSSPAPLGGQETQPSSSCSRSHRRLSVHHLVHHHHHHHHHYHLGNGTLRAPRASPEIQDRDANGSRRLMLPPPSTPALSGAPPGGAESVHSFYHADCHLEPVRCQAPPPRSPSEASGRTVGSGKVYPTVHTSPPPETLKEKALVEVAASSGPPTLTSLNIPPGPYSSMHKLLETQSTGACQSSCKISSPCLKADSGACGPDSCPYCARAGAGEVELADREMPDSDSEAVYEFTQDAQHSDLRDPHSRRQRSLGPDAEPSSVLAFWRLICDTFRKIVDSKYFGRGIMIAILVNTLSMGIEYHEQPEELTNALEISNIVFTSLFALEMLLKLLVYGPFGYIKNPYNIFDGVIVVISVWEIVGQQGGGLSVLRTFRLMRVLKLVRFLPALQRQLVVLMKTMDNVATFCMLLMLFIFIFSILGMHLFGCKFASERDGDTLPDRKNFDSLLWAIVTVFQILTQEDWNKVLYNGMASTSSWAALYFIALMTFGNYVLFNLLVAILVEGFQAEEISKREDASGQLSCIQLPVDSQGGDANKSESEPDFFSPSLDGDGDRKKCLALVSLGEHPELRKSLLPPLIIHTAATPMSLPKSTSTGLGEALGPASRRTSSSGSAEPGAAHEMKSPPSARSSPHSPWSAASSWTSRRSSRNSLGRAPSLKRRSPSGERRSLLSGEGQESQDEEESSEEERASPAGSDHRHRGSLEREAKSSFDLPDTLQVPGLHRTASGRGSASEHQDCNGKSASGRLARALRPDDPPLDGDDADDEGNLSKGERVRAWIRARLPACCLERDSWSAYIFPPQSRFRLLCHRIITHKMFDHVVLVIIFLNCITIAMERPKIDPHSAERIFLTLSNYIFTAVFLAEMTVKVVALGWCFGEQAYLRSSWNVLDGLLVLISVIDILVSMVSDSGTKILGMLRVLRLLRTLRPLRVISRAQGLKLVVETLMSSLKPIGNIVVICCAFFIIFGILGVQLFKGKFFVCQGEDTRNITNKSDCAEASYRWVRHKYNFDNLGQALMSLFVLASKDGWVDIMYDGLDAVGVDQQPIMNHNPWMLLYFISFLLIVAFFVLNMFVGVVVENFHKCRQHQEEEEARRREEKRLRRLEKKRRNLMLDDVIASGSSASAASEAQCKPYYSDYSRFRLLVHHLCTSHYLDLFITGVIGLNVVTMAMEHYQQPQILDEALKICNYIFTVIFVLESVFKLVAFGFRRFFQDRWNQLDLAIVLLSIMGITLEEIEVNASLPINPTIIRIMRVLRIARVLKLLKMAVGMRALLDTVMQALPQVGNLGLLFMLLFFIFAALGVELFGDLECDETHPCEGLGRHATFRNFGMAFLTLFRVSTGDNWNGIMKDTLRDCDQESTCYNTVISPIYFVSFVLTAQFVLVNVVIAVLMKHLEESNKEAKEEAELEAELELEMKTLSPQPHSPLGSPFLWPGVEGPDSPDSPKPGALHPAAHARSASHFSLEHPTDRQLFDTISLLIQGSLEWELKLMDELAGPGGQPSAFPSAPSLGGSDPQMQPHPTELPGPDLLTVRKSGVSRTHSLPNDSYMCRHGSTAEGPLGHRGWGLPKAQSGSVLSVHSQPADTSYILQLPKDAPHLLQPHSAPTWGTIPKLPPPGRSPLAQRPLRRQAAIRTDSLDVQGLGSREDLLAEVSGPSPPLARAYSFWGQSSTQAQQHSRSHSKISKHMTPPAPCPGPEPNWGKGPPETRSSLELDTELSWISGDLLPPGGQEEPPSPRDLKKCYSVEAQSCQRRPTSWLDEQRRHSIAVSCLDSGSQPHLGTDPSNLGGQPLGGPGSRPKKKLSPPSITIDPPESQGPRTPPSPGICLRRRAPSSDSKDPLASGPPDSMAASPSPKKDVLSLSGLSSDPADLDP

SEQ ID NO: 888825 - protein, 1546 aa, Homo sapiens
MDEEEDGAGAEESGQPRSFMRLNDLSGAGGRPGPGSAEKDPGSADSEAEGLPYPALAPVVFFYLSQDSRPRSWCLRTVCNPWFERISMLVILLNCVTLGMFRPCEDIACDSQRCRILQAFDDFIFAFFAVEMVVKMVALGIFGKKCYLGDTWNRLDFFIVIAGMLEYSLDLQNVSFSAVRTVRVLRPLRAINRVPSMRILVTLLLDTLPMLGNVLLLCFFVFFIFGIVGVQLWAGLLRNRCFLPENFSLPLSVDLERYYQTENEDESPFICSQPRENGMRSCRSVPTLRGDGGGGPPCGLDYEAYNSSSNTTCVNWNQYYTNCSAGEHNPFKGAINFDNIGYAWIAIFQVITLEGWVDIMYFVMDAHSFYNFIYFILLIIVGSFFMINLCLVVIATQFSETKQRESQLMREQRVRFLSNASTLASFSEPGSCYEELLKYLVYILRKAARRLAQVSRAAGVRVGLLSSPAPLGGQETQPSSSCSRSHRRLSVHHLVHHHHHHHHHYHLGNGTLRAPRASPEIQDRDANGSRRLMLPPPSTPALSGAPPGGAESVHSFYHADCHLEPVRCQAPPPRSPSEASGRTVGSGKVYPTVHTSPPPETLKEKALVEVAASSGPPTLTSLNIPPGPYSSMHKLLETQSTGACQSSCKISSPCLKADSGACGPDSCPYCARAGAGEVELADREMPDSDSEAVYEFTQDAQHSDLRDPHSRRQRSLGPDAEPSSVLAFWRLICDTFRKIVDSKYFGRGIMIAILVNTLSMGIEYHEQPEELTNALEISNIVFTSLFALEMLLKLLVYGPFGYIKNPYNIFDGVIVVISVWEIVGQQGGGLSVLRTFRLMRVLKLVRFLPALQRQLVVLMKTMDNVATFCMLLMLFIFIFSILGMHLFGCKFASERDGDTLPDRKNFDSLLWAIVTVFQILTQEDWNKVLYNGMASTSSWAALYFIALMTFGNYVLFNLLVAILVEGFQAEGDANKSESEPDFFSPSLDGDGDRKKCLALVSLGEHPELRKSLLPPLIIHTAATPMSLPKSTSTGLGEALGPASRRTSSSGSAEPGAAHEMKSPPSARSSPHSPWSAASSWTSRRSSRNSLGRAPSLKRRSPSGERRSLLSGEGQESQDEEESSEEERASPAGSDHRHRGSLEREAKSSFDLPDTLQVPGLHRTASGRGSASEHQDCNGKSASGRLARALRPDDPPLDGDDADDEGNLSKGERVRAWIRARLPACCLERDSWSAYIFPPQSRFRLLCHRIITHKMFDHVVLVIIFLNCITIAMERPKIDPHSAERIFLTLSNYIFTAVFLAEMTVKVVALGWCFGEQAYLRSSWNVLDGLLVLISVIDILVSMVSDSGTKILGMLRVLRLLRTLRPLRVISRAQGLKLVVETLMSSLKPIGNIVVICCAFFIIFGILGVQLFKGKFFVCQGEDTRNITNKSDCAEASYRWVRHKYNFDNLGQALMSLFVLASKDGWVDIMYDGLDAVGVDQQVGLRWAGSICGLRSLSMGCFQDRKSKAGWQNAMKEASYFTAEAVAGSLWAKSGHVLLVYNMFNMF

SEQ ID NO: 888826 - protein, 739 aa, Homo sapiens
MAPQKHGGGGGGGSGPSAGSGGGGFGGSAAVAAATASGGKSGGGSCGGGGSYSASSSSSAAAAAGAAVLPVKKPKMEHVQADHELFLQAFEKPTQIYRFLRTRNLIAPIFLHRTLTYMSHRNSRTNIKRKTFKVDDMLSKVEKMKGEQESHSLSAHLQLTFTGFFHKNDKPSPNSENEQNSVTLEVLLVKVCHKKRKDVSCPIRQVPTGKKQVPLNPDLNQTKPGNFPSLAVSSNEFEPSNSHMVKSYSLLFRVTRPGRREFNGMINGETNENIDVNEELPARRKRNREDGEKTFVAQMTVFDKNRRLQLLDGEYEVAMQEMEECPISKKRATWETILDGKRLPPFETFSQGPTLQFTLRWTGETNDKSTAPIAKPLATRNSESLHQENKPGSVKPTQTIAVKESLTTDLQTRKEKDTPNENRQKLRIFYQFLYNNNTRQQTEARDDLHCPWCTLNCRKLYSLLKHLKLCHSRFIFNYVYHPKGARIDVSINECYDGSYAGNPQDIHRQPGFAFSRNGPVKRTPITHILVCRPKRTKASMSEFLESEDGEVEQQRTYSSGHNRLYFHSDTCLPLRPQEMEVDSEDEKDPEWLREKTITQIEEFSDVNEGEKEVMKLWNLHVMKHGFIADNQMNHACMLFVENYGQKIIKKNLCRNFMLHLVSMHDFNLISIMSIDKAVTKLREMQQKLEKGESASPANEEITEEQNGTANGFSEINSKEKALETDSVSGVSKQSKKQKL

SEQ ID NO: 888827 - protein, 807 aa, Homo sapiens
MAPQKHGGGGGGGSGPSAGSGGGGFGGSAAVAAATASGGKSGGGSCGGGGSYSASSSSSAAAAAGAAVLPVKKPKMEHVQADHELFLQAFEKPTQIYRFLRTRNLIAPIFLHRTLTYMSHRNSRTNIKRKTFKVDDMLSKVEKMKGEQESHSLSAHLQLTFTGFFHKNDKPSPNSENEQNSVTLEVLLVKVCHKKRKDVSCPIRQVPTGKKQVPLNPDLNQTKPGNFPSLAVSSNEFEPSNSHMVKSYSLLFRVTRPGRREFNGMINGETNENIDVNEELPARRKRNREDGEKTFVAQMTVFDKNRRLQLLDGEYEVAMQEMEECPISKKRATWETILDGKRLPPFETFSQGPTLQFTLRWTGETNDKSTAPIAKPLATRNSESLHQENKPGSVKPTQTIAVKESLTTDLQTRKEKDTPNENRQKLRIFYQFLYNNNTRQQTEARDDLHCPWCTLNCRKLYSLLKHLKLCHSRFIFNYVYHPKGARIDVSINECYDGSYAGNPQDIHRQPGFAFSRNGPVKRTPITHILVCRPKRTKASMSEFLESEDGEVEQQRTYSSGHNRLYFHSDTCLPLRPQEMEVDSEDEKDPEWLREKTITQIEEFSDVNEGEKEVMKLWNLHVMKHGFIADNQMNHACMLFVENYGQKIIKKNLCRNFMLHLVSMHDFNLISIMSIDKAVTKLREMQQKLEKGESASPANEEITEEQNGTANGFSEINSKEKALETDSVSGVSKQSKKQKGIHPLRIMFLFLIICSKQALLDEVNDFNKDICIRVLLHFIMQHYMYITFIDVIKTFCTLSMKSNISKYF

SEQ ID NO: 888828 - protein, 739 aa, Homo sapiens; identical to SEQ ID NO: 888826

SEQ ID NO: 888829 - protein, 620 aa, Homo sapiens
MAPQKHGGGGGGGSGPSAGSGGGGFGGSAAVAAATASGGKSGGGSCGGGGSYSASSSSSAAAAAGAAVLPVKKPKMEHVQADHELFLQAFEKPTQIYRFLRTRNLIAPIFLHRTLTYMSHRNSRTNIKRKTFKVDDMLSKVEKMKGEQESHSLSAHLQLTFTGFFHKNDKPSPNSENEQNSVTLEVLLVKVCHKKRKDVSCPIRQVPTGKKQVPLNPDLNQTKPGNFPSLAVSSNEFEPSNSHMVKSYSLLFRVTRPGRREFNGMINGETNENIDVNEELPARRKRNREDGEKTFVAQMTVFDKNRRLQLLDGEYEVAMQEMEECPISKKRATWETILDGKRLPPFETFSQGPTLQFTLRWTGETNDKSTAPIAKPLATRNSESLHQENKPGSVKPTQTIAVKESLTTDLQTRKEKDTPNENRQKLRIFYQFLYNNNTRQQTEARDDLHCPWCTLNCRKLYSLLKHLKLCHSRFIFNYVYHPKGARIDVSINECYDGSYAGNPQDIHRQPGFAFSRNGPVKRTPITHILVCRPKRTKASMSEFLESEDGEVEQQRTYSSGHNRLYFHSDTCLPLRPQEMEVDSEDEKDPEWLREKTITVIIIIFIGNYLGILFCFENCLL

SEQ ID NO: 888830 - protein, 475 aa, Homo sapiens
SSEEREYDDDENMKYDVMRAQQKKRIVEDGKDIVPMTVLKNRRLQLLDGEYEVAMQEMEECPISKKRATWETILDGKRLPPFETFSQGPTLQFTLRWTGETNDKSTAPIAKPLATRNSESLHQENKPGSVKPTQTIAVKESLTTDLQTRKEKDTPNENRQKLRIFYQFLYNNNTRQQTEARDDLHCPWCTLNCRKLYSLLKHLKLCHSRFIFNYVYHPKGARIDVSINECYDGSYAGNPQDIHRQPGFAFSRNGPVKRTPITHILVCRPKRTKASMSEFLESEDGEVEQQRTYSSGHNRLYFHSDTCLPLRPQEMEVDSEDEKDPEWLREKTITQIEEFSDVNEGEKEVMKLWNLHVMKHGFIADNQMNHACMLFVENYGQKIIKKNLCRNFMLHLVSMHDFNLISIMSIDKAVTKLREMQQKLEKGESASPANEEITEEQNGTANGFSEINSKEKALETDSVSGVSKQSKKQKL

SEQ ID NO: 888831 - protein, 739 aa, Homo sapiens; identical to SEQ ID NO: 888826

SEQ ID NO: 888832 - protein, 127 aa, Homo sapiens
SGDWPPSLRLPPEFHPHLGWNLVFGALACFPQPPSLCVFHRRNGKVQHCRIHSRQDAGTPKFFLTDNLVFDSLYDLITHYQQVPLRCNEFEMRLSEPVPQTNAHESKEWYHASLTRATDGMRAKDGS

SEQ ID NO: 888833 - protein, 1291 aa, Homo sapiens
MAGAASPCANGCGPGAPSDAEVLHLCRSLEVGTVMTLFYSKKSQRPERKTFQVKLETRQITWSRGADKIEGAIDIREIKEIRPGKTSRDFDRYQEDPAFRPDQSHCFVILYGMEFRLKTLSLQATSEDEVNMWIKGLTWLMEDTLQAPTPLQIERWLRKQFYSVDRNREDRISAKDLKNMLSQVNYRVPNMRFLRERLTDLEQRSGDITYGQFAQLYRSLMYSAQKTMDLPFLEASTLRAGERPELCRVSLPEFQQFLLDYQGELWAVDRLQVQEFMLSFLRDPLREIEEPYFFLDEFVTFLFSKENSVWNSQLDAVCPDTMNNPLSHYWISSSHNTYLTGDQFSSESSLEAYARCLRMGCRCIELDCWDGPDGMPVIYHGHTLTTKIKFSDVLHTIKEHAFVASEYPVILSIEDHCSIAQQRNMAQYFKKVLGDTLLTKPVEISADGLPSPNQLKRKILIKHKKLAEGSAYEEVPTSMMYSENDISNSIKNGILYLEDPVNHEWYPHYFVLTSSKIYYSEETSSDQGNEDEEEPKEVSSSTELHSNEKWFHGKLGAGRDGRHIAERLLTEYCIETGAPDGSFLVRESETFVGDYTLSFWRNGKVQHCRIHSRQDAGTPKFFLTDNLVFDSLYDLITHYQQVPLRCNEFEMRLSEPVPQTNAHESKEWYHASLTRAQAEHMLMRVPRDGAFLVRKRNEPNSYAISFRAEGKIKHCRVQQEGQTVMLGNSEFDSLVDLISYYEKHPLYRKMKLRYPINEEALEKIGTAEPDYGALYEGRNPGFYVEANPMPTFKCAVKALFDYKAQREDELTFIKSAIIQNVEKQEGGWWRGDYGGKKQLWFPSNYVEEMVNPVALEPEREHLDENSPLGDLLRGVLDVPACQIAIRPEGKNNRLFVFSISMASVAHWSLDVAADSQEELQDWVKKIREVAQTADARLTEGKIMERRKKIALELSELVVYCRPVPFDEEKIGTERACYRDMSSFPETKAEKYVNKAKGKKFLQYNRLQLSRIYPKGQRLDSSNYDPLPMWICGSQLVALNFQTPDKPMQMNQALFMTGRHCGYVLQPSTMRDEAFDPFDKSSLRGLEPCAISIEVLGARHLPKNGRGIVCPFVEIEVAGAEYDSTKQKTEFVVDNGLNPVWPAKPFHFQISNPEFAFLRFVVYEEDMFSDQNFLAQATFPVKGLKTGYRAVPLKNNYSEDLELASLLIKIDIFPAKQENGDLSPFSGTSLRERGSDASGQLFHGRAREGSFESRYQQPFEDFRISQEHLADHFDSRERRAPRRTRVNGDNRL

SEQ ID NO: 888834 - protein, 1344 aa, Homo sapiens
MAGAASPCANGCGPGAPSDAEVLHLCRSLEVGTVMTLFYSKKSQRPERKTFQVKLETRQITWSRGADKIEGAIDIREIKEIRPGKTSRDFDRYQEDPAFRPDQSHCFVILYGMEFRLKTLSLQATSEDEVNMWIKGLTWLMEDTLQAPTPLQIERWLRKQFYSVDRNREDRISAKDLKNMLSQVNYRVPNMRFLRERLTDLEQRSGDITYGQFAQLYRSLMYSAQKTMDLPFLEASTLRAGERPELCRVSLPEFQQFLLDYQGELWAVDRLQVQEFMLSFLRDPLREIEEPYFFLDEFVTFLFSKENSVWNSQLDAVCPDTMNNPLSHYWISSSHNTYLTGDQFSSESSLEAYARCLRMGCRCIELDCWDGPDGMPVIYHGHTLTTKIKFSDVLHTIKEHAFVASEYPVILSIEDHCSIAQQRNMAQYFKKVLGDTLLTKPVEISADGLPSPNQLKRKILIKHKKLAEGSAYEEVPTSMMYSENDISNSIKNGILYLEDPVNHEWYPHYFVLTSSKIYYSEETSSDQGNEDEEEPKEVSSSTELHSNEKWFHGKLGAGRDGRHIAERLLTEYCIETGAPDGSFLVRESETFVGDYTLSFWRNGKVQHCRIHSRQDAGTPKFFLTDNLVFDSLYDLITHYQQVPLRCNEFEMRLSEPVPQTNAHESKEWYHASLTRAQAEHMLMRVPRDGAFLVRKRNEPNSYAISFRAEGKIKHCRVQQEGQTVMLGNSEFDSLVDLISYYEKHPLYRKMKLRYPINEEALEKIGTAEPDYGALYEGRNPGFYVEANPMPTFKCAVKALFDYKAQREDELTFIKSAIIQNVEKQEGGWWRGDYGGKKQLWFPSNYVEEMVNPVALEPEREHLDENSPLGDLLRGVLDVPACQIAIRPEGKNNRLFVFSISMASVAHWSLDVAADSQEELQDWVKKIREVAQTADARLTEGKIMERRKKIALELSELVVYCRPVPFDEEKIGTERACYRDMSSFPETKAEKYVNKAKGKKFLQYNRLQLSRIYPKGQRLDSSNYDPLPMWICGSQLVALNFQTPDKPMQMNQALFMTGRHCGYVLQPSTMRDEAFDPFDKSSLRGLEPCAISIEVLGARHLPKNGRGIVCPFVEIEVAGAEYDSTKQKTEFVVDNGLNPVWPAKPFHFQISNPEFAFLRFVVYEEDMFSDQNFLAQATFPVKGLKTGYRAVPLKNNYSEDLELASLLIKIDIFPAKQENGDLSPFSGTSLRERGSDASGQLFHGRAREGSFESRYQQPFEDFRISQEHLADHFDSRERSKDTLPFCPGPQEGLGSMETTASSCTPASLESSRCCAPCRMPRTGFFGSSPLWRPSGSRSLKPGFQQ

SEQ ID NO: 888835 - protein, 1078 aa, Homo sapiens
SLPLKEHPGVFAQLSPRPLAEILLPYFFLDEFVTFLFSKENSVWNSQLDAVCPDTMNNPLSHYWISSSHNTYLTGDQFSSESSLEAYARCLRMGCRCIELDCWDGPDGMPVIYHGHTLTTKIKFSDVLHTIKEHAFVASEYPVILSIEDHCSIAQQRNMAQYFKKVLGDTLLTKPVEISADGLPSPNQLKRKILIKHKKLAEGSAYEEVPTSMMYSENDISNSIKNGILYLEDPVNHEWYPHYFVLTSSKIYYSEETSSDQGNEDEEEPKEVSSSTELHSNEKWFHGKLGAGRDGRHIAERLLTEYCIETGAPDGSFLVRESETFVGDYTLSFWRNGKVQHCRIHSRQDAGTPKFFLTDNLVFDSLYDLITHYQQVPLRCNEFEMRLSEPVPQTNAHESKEWYHASLTRAQAEHMLMRVPRDGAFLVRKRNEPNSYAISFRAEGKIKHCRVQQEGQTVMLGNSEFDSLVDLISYYEKHPLYRKMKLRYPINEEALEKIGTAEPDYGALYEGRNPGFYVEANPMPTFKCAVKALFDYKAQREDELTFIKSAIIQNVEKQEGGWWRGDYGGKKQLWFPSNYVEEMVNPVALEPEREHLDENSPLGDLLRGVLDVPACQIAIRPEGKNNRLFVFSISMASVAHWSLDVAADSQEELQDWVKKIREVAQTADARLTEGKIMERRKKIALELSELVVYCRPVPFDEEKIGTERACYRDMSSFPETKAEKYVNKAKGKKFLQYNRLQLSRIYPKGQRLDSSNYDPLPMWICGSQLVALNFQTPDKPMQMNQALFMTGRHCGYVLQPSTMRDEAFDPFDKSSLRGLEPCAISIEVLGARHLPKNGRGIVCPFVEIEVAGAEYDSTKQKTEFVVDNGLNPVWPAKPFHFQISNPEFAFLRFVVYEEDMFSDQNFLAQATFPVKGLKTGYRAVPLKNNYSEDLELASLLIKIDIFPAKQENGDLSPFSGTSLRERGSDASGQLFHGRAREGSFESRYQQPFEDFRISQEHLADHFDSRERSKDTLPFCPGPQEGLGSMETTASSCTPASLESSRCCAPCRMPRTGFFGSSPLWRPSGSRSLKPGFQQ

SEQ ID NO: 888836 - protein, 906 aa, Homo sapiens
MAGAASPCANGCGPGAPSDAEVLHLCRSLEVGTVMTLFYSKKSQRPERKTFQVKLETRQITWSRGADKIEGAIDIREIKEIRPGKTSRDFDRYQEDPAFRPDQSHCFVILYGMEFRLKTLSLQATSEDEVNMWIKGLTWLMEDTLQAPTPLQIERWLRKQFYSVDRNREDRISAKDLKNMLSQVNYRVPNMRFLRERLTDLEQRSGDITYGQFAQLYRSLMYSAQKTMDLPFLEASTLRAGERPELCRVSLPEFQQFLLDYQGELWAVDRLQVQEFMLSFLRDPLREIEEPYFFLDEFVTFLFSKENSVWNSQLDAVCPDTMNNPLSHYWISSSHNTYLTGDQFSSESSLEAYARCLRMGCRCIELDCWDGPDGMPVIYHGHTLTTKIKFSDVLHTIKEHAFVASEYPVILSIEDHCSIAQQRNMAQYFKKVLGDTLLTKPVEISADGLPSPNQLKRKILIKHKKLAEGSAYEEVPTSMMYSENDISNSIKNGILYLEDPVNHEWYPHYFVLTSSKIYYSEETSSDQGNEDEEEPKEVSSSTELHSNEKWFHGKLGAGRDGRHIAERLLTEYCIETGAPDGSFLVRESETFVGDYTLSFWRNGKVQHCRIHSRQDAGTPKFFLTDNLVFDSLYDLITHYQQVPLRCNEFEMRLSEPVPQTNAHESKEWYHASLTRAQAEHMLMRVPRDGAFLVRKRNEPNSYAISFRAEGKIKHCRVQQEGQTVMLGNSEFDSLVDLISYYEKHPLYRKMKLRYPINEEALEKIGTAEPDYGALYEGRNPGFYVEANPMPTFKCAVKALFDYKAQREDELTFIKSAIIQNVEKQEGGWWRGDYGGKKQLWFPSNYVEEMVNPVALEPEREHLDENSPLGDLLRGVLDVPACQIAWRRWPTGPWMLLPTHRRSCRTG

SEQ ID NO: 888837 - protein, 1291 aa, Homo sapiens; identical to SEQ ID NO: 888833

SEQ ID NO: 888838 - protein, 974 aa, Homo sapiens
MAGAASPCANGCGPGAPSDAEVLHLCRSLEVGTVMTLFYSKKSQRPERKTFQVKLETRQITWSRGADKIEGAIDIREIKEIRPGKTSRDFDRYQEDPAFRPDQSHCFVILYGMEFRLKTLSLQATSEDEVNMWIKGLTWLMEDTLQAPTPLQIERWLRKQFYSVDRNREDRISAKDLKNMLSQVNYRVPNMRFLRERLTDLEQRSGDITYGQFAQLYRSLMYSAQKTMDLPFLEASTLRAGERPELCRVSLPEFQQFLLDYQGELWAVDRLQVQEFMLSFLRDPLREIEEPYFFLDEFVTFLFSKENSVWNSQLDAVCPDTMNNPLSHYWISSSHNTYLTGDQFSSESSLEAYARCLRMGCRCIELDCWDGPDGMPVIYHGHTLTTKIKFSDVLHTIKEHAFVASEYPVILSIEDHCSIAQQRNMAQYFKKVLGDTLLTKPVEISADGLPSPNQLKRKILIKHKKLAEGSAYEEVPTSMMYSENDISNSIKNGILYLEDPVNHEWYPHYFVLTSSKIYYSEETSSDQGNEDEEEPKEVSSSTELHSNEKWFHGKLGAGRDGRHIAERLLTEYCIETGAPDGSFLVRESETFVGDYTLSFWRNGKVQHCRIHSRQDAGTPKFFLTDNLVFDSLYDLITHYQQVPLRCNEFEMRLSEPVPQTNAHESKEWYHASLTRAQAEHMLMRVPRDGAFLVRKRNEPNSYAISFRAEGKIKHCRVQQEGQTVMLGNSEFDSLVDLISYYEKHPLYRKMKLRYPINEEALEKIGTAEPDYGALYEGRNPGFYVEANPMPTFKCAVKALFDYKAQREDELTFIKSAIIQNVEKQEGGWWRGDYGGKKQLWFPSNYVEEMVNPVALEPEREHLDENSPLGDLLRGVLDVPACQIAIRPEGKNNRLFVFSISMASVAHWSLDVAADSQEELQDWVKKIREVAQTADARVRFCWNLLGGSVWARQAAEASSSQHRPPQSSGAADGLC

SEQ ID NO: 888839 - protein, 848 aa, Homo sapiens
MAGAASPCANGCGPGAPSDAEVLHLCRSLEVGTVMTLFYSKKSQRPERKTFQVKLETRQITWSRGADKIEGAIDIREIKEIRPGKTSRDFDRYQEDPAFRPDQSHCFVILYGMEFRLKTLSLQATSEDEVNMWIKGLTWLMEDTLQAPTPLQIERWLRKQFYSVDRNREDRISAKDLKNMLSQVNYRVPNMRFLRERLTDLEQRSGDITYGQFAQLYRSLMYSAQKTMDLPFLEASTLRAGERPELCRVSLPEFQQFLLDYQGELWAVDRLQVQEFMLSFLRDPLREIEEPYFFLDEFVTFLFSKENSVWNSQLDAVCPDTMNNPLSHYWISSSHNTYLTGDQFSSESSLEAYARCLRMGCRCIELDCWDGPDGMPVIYHGHTLTTKIKFSDVLHTIKEHAFVASEYPVILSIEDHCSIAQQRNMAQYFKKVLGDTLLTKPVEISADGLPSPNQLKRKILIKHKKLAEGSAYEEVPTSMMYSENDISNSIKNGILYLEDPVNHEWYPHYFVLTSSKIYYSEETSSDQGNEDEEEPKEVSSSTELHSNEKWFHGKLGAGRDGRHIAERLLTEYCIETGAPDGSFLVRESETFVGDYTLSFWRNGKVQHCRIHSRQDAGTPKFFLTDNLVFDSLYDLITHYQQVPLRCNEFEMRLSEPVPQTNAHESKEWYHASLTRAQAEHMLMRVPRDGAFLVRKRNEPNSYAISFRAEGKIKHCRVQQEGQTVMLGNSEFDSLVDLISYYEKHPLYRKMKLRYPINEEALEKIGTAEPDYGALYEGRNPGFYVEANPMPTFKCAVKALFDYKAQREDELTFIKSAIIQNVEKQEGGCRRSTRFLFFLTVIKIFIGHL

SEQ ID NO: 888840 - protein, 711 aa, Homo sapiens
MAGAASPCANGCGPGAPSDAEVLHLCRSLEVGTVMTLFYSKKSQRPERKTFQVKLETRQITWSRGADKIEGAIDIREIKEIRPGKTSRDFDRYQEDPAFRPDQSHCFVILYGMEFRLKTLSLQATSEDEVNMWIKGLTWLMEDTLQAPTPLQIERWLRKQFYSVDRNREDRISAKDLKNMLSQVNYRVPNMRFLRERLTDLEQRSGDITYGQFAQLYRSLMYSAQKTMDLPFLEASTLRAGERPELCRVSLPEFQQFLLDYQGELWAVDRLQVQEFMLSFLRDPLREIEEPYFFLDEFVTFLFSKENSVWNSQLDAVCPDTMNNPLSHYWISSSHNTYLTGDQFSSESSLEAYARCLRMGCRCIELDCWDGPDGMPVIYHGHTLTTKIKFSDVLHTIKEHAFVASEYPVILSIEDHCSIAQQRNMAQYFKKVLGDTLLTKPVEISADGLPSPNQLKRKILIKHKKLAEGSAYEEVPTSMMYSENDISNSIKNGILYLEDPVNHEWYPHYFVLTSSKIYYSEETSSDQGNEDEEEPKEVSSSTELHSNEKWFHGKLGAGRDGRHIAERLLTEYCIETGAPDGSFLVRESETFVGDYTLSFWRNGKVQHCRIHSRQDAGTPKFFLTDNLVFDSLYDLITHYQQVPLRCNEFEMRLSEPVPQTNAHESKEWYHASLTRAQAEHMLMRVPRDGAFLVTKGDGHTKGDGHTKGDGH

SEQ ID NO: 888841 - protein, 1291 aa, Homo sapiens; identical to SEQ ID NO: 888833

SEQ ID NO: 888842 - protein, 1291 aa, Homo sapiens; identical to SEQ ID NO: 888833

SEQ ID NO: 888843 - protein, 1414 aa, Homo sapiens
MAGAASPCANGCGPGAPSDAEVLHLCRSLEVGTVMTLFYSKKSQRPERKTFQVKLETRQITWSRGADKIEGAIDIREIKEIRPGKTSRDFDRYQEDPAFRPDQSHCFVILYGMEFRLKTLSLQATSEDEVNMWIKGLTWLMEDTLQAPTPLQIERWLRKQFYSVDRNREDRISAKDLKNMLSQVNYRVPNMRFLRERLTDLEQRSGDITYGQFAQLYRSLMYSAQKTMDLPFLEASTLRFGLEWGGGVFPGPPSSLHWAILDPGGRQWEEGTMLDHSGKLCWLGVGFCLPWGTLLSVDHTSYLTFSPCRAGERPELCRVSLPEFQQFLLDYQGELWAVDRLQVQEFMLSFLRDPLREIEEPYFFLDEFVTFLFSKENSVWNSQLDAVCPDTMNNPLSHYWISSSHNTYLTGDQFSSESSLEAYARCLRMGCRCIELDCWDGPDGMPVIYHGHTLTTKIKFSDVLHTIKEHAFVASEYPVILSIEDHCSIAQQRNMAQYFKKVLGDTLLTKPVEISADGLPSPNQLKRKILIKHKKLAEGSAYEEVPTSMMYSENDISNSIKNGILYLEDPVNHEWYPHYFVLTSSKIYYSEETSSDQGNEDEEEPKEVSSSTELHSNEKWFHGKLGAGRDGRHIAERLLTEYCIETGAPDGSFLVRESETFVGDYTLSFWRNGKVQHCRIHSRQDAGTPKFFLTDNLVFDSLYDLITHYQQVPLRCNEFEMRLSEPVPQTNAHESKEWYHASLTRAQAEHMLMRVPRDGAFLVRKRNEPNSYAISFRAEGKIKHCRVQQEGQTVMLGNSEFDSLVDLISYYEKHPLYRKMKLRYPINEEALEKIGTAEPDYGALYEGRNPGFYVEANPMPTFKCAVKALFDYKAQREDELTFIKSAIIQNVEKQEGGWWRGDYGGKKQLWFPSNYVEEMVNPVALEPEREHLDENSPLGDLLRGVLDVPACQIAIRPEGKNNRLFVFSISMASVAHWSLDVAADSQEELQDWVKKIREVAQTADARLTEGKIMERRKKIALELSELVVYCRPVPFDEEKIGTERACYRDMSSFPETKAEKYVNKAKGKKFLQYNRLQLSRIYPKGQRLDSSNYDPLPMWICGSQLVALNFQTPDKPMQMNQALFMTGRHCGYVLQPSTMRDEAFDPFDKSSLRGLEPCAISIEVLGARHLPKNGRGIVCPFVEIEVAGAEYDSTKQKTEFVVDNGLNPVWPAKPFHFQISNPEFAFLRFVVYEEDMFSDQNFLAQATFPVKGLKTGYRAVPLKNNYSEDLELASLLIKIDIFPAKQENGDLSPFSGTSLRERGSDASGQLFHGRAREGSFESRYQQPFEDFRISQEHLADHFDSRERSKDTLPFCPGPQEGLGSMETTASSCTPASLESSRCCAPCRMPRTGFFGSSPLWRPSGSRSLKPGFQQ

SEQ ID NO: 888844 - protein, 568 aa, Homo sapiens
PTRPLISYYEKHPLYRKELGKKGAPFEGLRYPINEEALEKIGTAEPDYGALYEGRNPGFYVEANPMPTFKCAVKALFDYKAQREDELTFIKSAIIQNVEKQEGGWWRGDYGGKKQLWFPSNYVEEMVNPVALEPEREHLDENSPLGDLLRGVLDVPACQIAIRPEGKNNRLFVFSISMASVAHWSLDVAADSQEELQDWVKKIREVAQTADARLTEGKIMERRKKIALELSELVVYCRPVPFDEEKIGTERACYRDMSSFPETKAEKYVNKAKGKKFLQYNRLQLSRIYPKGQRLDSSNYDPLPMWICGSQLVALNFQTPDKPMQMNQALFMTGRHCGYVLQPSTMRDEAFDPFDKSSLRGLEPCAISIEVLGARHLPKNGRGIVCPFVEIEVAGAEYDSTKQKTEFVVDNGLNPVWPAKPFHFQISNPEFAFLRFVVYEEDMFSDQNFLAQATFPVKGLKTGYRAVPLKNNYSEDLELASLLIKIDIFPAKQENGDLSPFSGTSLRERGSDASGQLFHGRAREGSFESRYQQPFEDFRISQEHLADHFDSRERRAPRRTRVNGDNRL

SEQ ID NO: 888845 - protein, 133 aa, Homo sapiens
VSSPYLQVGMSQPWAMCLVLCLLLRQAEPFSMQAYIPLPWSRPNCRGSSFSPCPALDEGKNCTVFRIKHTHLALTSGDGSFHLVGPGPWPKPLGERGCLSQWHRRLQGATDIPKSGGGGGALLGQGNKVYIVL

SEQ ID NO: 888846 - protein, 949 aa, Homo sapiens
MAGAASPCANGCGPGAPSDAEVLHLCRSLEVGTVMTLFYSKKSQRPERKTFQVKLETRQITWSRGADKIEGAIDIREIKEIRPGKTSRDFDRYQEDPAFRPDQSHCFVILYGMEFRLKTLSLQATSEDEVNMWIKGLTWLMEDTLQAPTPLQIERWLRKQFYSVDRNREDRISAKDLKNMLSQVNYRVPNMRFLRERLTDLEQRSGDITYGQFAQLYRSLMYSAQKTMDLPFLEASTLRAGERPELCRVSLPEFQQFLLDYQGELWAVDRLQVQEFMLSFLRDPLREIEEPYFFLDEFVTFLFSKENSVWNSQLDAVCPDTMNNPLSHYWISSSHNTYLTGDQFSSESSLEAYARCLRMGCRCIELDCWDGPDGMPVIYHGHTLTTKIKFSDVLHTIKEHAFVASEYPVILSIEDHCSIAQQRNMAQYFKKVLGDTLLTKPVEISADGLPSPNQLKRKILIKHKKLAEGSAYEEVPTSMMYSENDISNSIKNGILYLEDPVNHEWYPHYFVLTSSKIYYSEETSSDQGNEDEEEPKEVSSSTELHSNEKWFHGKLGAGRDGRHIAERLLTEYCIETGAPDGSFLVRESETFVGDYTLSFWRNGKVQHCRIHSRQDAGTPKFFLTDNLVFDSLYDLITHYQQVPLRCNEFEMRLSEPVPQTNAHESKEWYHASLTRAQAEHMLMRVPRDGAFLVRKRNEPNSYAISFRAEGKIKHCRVQQEGQTVMLGNSEFDSLVDLISYYEKHPLYRKMKLRYPINEEALEKIGTAEPDYGALYEGRNPGFYVEANPMPTFKCAVKALFDYKAQREDELTFIKSAIIQNVEKQEGGWWRGDYGGKKQLWFPSNYVEEMVNPVALEPEREHLDENSPLGDLLRGVLDVPACQIAIRPEGKNNRLFVFSISMASVAHWSLDVAADSQEELQDWVKKIREVAQTADARDLAAEISGPFQHS

SEQ ID NO: 888847 - protein, 600 aa, Homo sapiens
MAGAASPCANGCGPGAPSDAEVLHLCRSLEVGTVMTLFYSKKSQRPERKTFQVKLETRQITWSRGADKIEGAIDIREIKEIRPGKTSRDFDRYQEDPAFRPDQSHCFVILYGMEFRLKTLSLQATSEDEVNMWIKGLTWLMEDTLQAPTPLQIERWLRKQFYSVDRNREDRISAKDLKNMLSQVNYRVPNMRFLRERLTDLEQRSGDITYGQFAQLYRSLMYSAQKTMDLPFLEASTLRAGERPELCRVSLPEFQQFLLDYQGELWAVDRLQVQEFMLSFLRDPLREIEEPYFFLDEFVTFLFSKENSVWNSQLDAVCPDTMNNPLSHYWISSSHNTYLTGDQFSSESSLEAYARCLRMGCRCIELDCWDGPDGMPVIYHGHTLTTKIKFSDVLHTIKEHAFVASEYPVILSIEDHCSIAQQRNMAQYFKKVLGDTLLTKPVEISADGLPSPNQLKRKILIKHKKLAEGSAYEEVPTSMMYSENDISNSIKNGILYLEDPVNHEWYPHYFVLTSSKIYYSEETSSDQGNEDEEEPKEVSSSTELHSNEKWFHGKLGAGRDGRHIAERLLTEYCIETGAPDGSFLVRESETFVGDYTLSFW

SEQ ID NO: 888848 - protein, 107 aa, Homo sapiens
  misc_feature (9)..(9): Xaa can be any naturally occurring amino acid
TIRATEDAXLLGSWSQANTARGVYYNQYRSTIRLSTAGAIDRRGVRDRASSLPCFASGRENASPRIPGTHFSSTAFPRRVWDRGGHGSAEVPPIGSKGEHRTEETSD

SEQ ID NO: 888849 - protein, 673 aa, Homo sapiens
MDPQRSPLLEVKGNIELKRPLIKAPSQLPLSGSRLKRRPDQMEDGLEPEKKRTRGLGATTKITTSHPRVPSLTTVPQTQGQTTAQKVSKKTGPRCSTAIATGLKNQKPVPAVPVQKSGTSGVPPMAGGKKPSKRPAWDLKGQLCDLNAELKRCRERTQTLDQENQQLQDQLRDAQQQVKALGTERTTLEGHLAKVQAQAEQGQQELKNLRACVLELEERLSTQEGLVQELQKKQVELQEERRGLMSQLEEKERRLQTSEAALSSSQAEVASLRQETVAQAALLTEREERLHGLEMERRRLHNQLQELKGNIRVFCRVRPVLPGEPTPPPGLLLFPSGPGGPSDPPTRLSLSRSDERRGTLSGAPAPPTRHDFSFDRVFPPGSGQDEVFEEIAMLVQSALDGYPVCIFAYGQTGSGKTFTMEGGPGGDPQLEGLIPRALRHLFSVAQELSGQGWTYSFVASYVEIYNETVRDLLATGTRKGQGGECEIRRAGPGSEELTVTNARYVPVSCEKEVDALLHLARQNRAVARTAQNERSSRSHSVFQLQISGEHSSRGLQCGAPLSLVDLAGSERLDPGLALGPGERERLRETQAINSSLSTLGLVIMALSNKESHVPYRNSKLTYLLQNSLGGSAKMLMFVNISPLEENVSESLNSLRFASKVNQCVIGTAQANRK

SEQ ID NO: 888850 - protein, 673 aa, Homo sapiens; identical to SEQ ID NO: 888849

SEQ ID NO: 888851 - protein, 673 aa, Homo sapiens; identical to SEQ ID NO: 888849

SEQ ID NO: 888852 - protein, 687 aa, Homo sapiens
MLTISSKVIFPLCLMFFCFFLSLGGFLRALMIGAEAEGTTSIWACLFSMVSFTVILRPFQSPVALAMSSPTFFGDRPRGPILGARQKWHRLHLWCTSAQKVSKKTGPRCSTAIATGLKNQKPVPAVPVQKSGTSGVPPMAGGKKPSKRPAWDLKGQLCDLNAELKRCRERTQTLDQENQQLQDQLRDAQQQVKALGTERTTLEGHLAKVQAQAEQGQQELKNLRACVLELEERLSTQEGLVQELQKKQVELQEERRGLMSQLEEKERRLQTSEAALSSSQAEVASLRQETVAQAALLTEREERLHGLEMERRRLHNQLQELKGNIRVFCRVRPVLPGEPTPPPGLLLFPSGPGGPSDPPTRLSLSRSDERRGTLSGAPAPPTRHDFSFDRVFPPGSGQDEVFEEIAMLVQSALDGYPVCIFAYGQTGSGKTFTMEGGPGGDPQLEGLIPRALRHLFSVAQELSGQGWTYSFVASYVEIYNETVRDLLATGTRKGQGGECEIRRAGPGSEELTVTNARYVPVSCEKEVDALLHLARQNRAVARTAQNERSSRSHSVFQLQISGEHSSRGLQCGAPLSLVDLAGSERLDPGLALGPGERERLRETQAINSSLSTLGLVIMALSNKESHVPYRNSKLTYLLQNSLGGSAKMLMFVNISPLEENVSESLNSLRFASKVNQCVIGTAQANRK

SEQ ID NO: 888853 - protein, 133 aa, Homo sapiens
MDPQRSPLLEVKGNIELKRPLIKAPSQLPLSGSRLKRRPDQMEDGLEPEKKRTRGLGATTKITTSHPRVPSLTTVPQTQGQTTAQKVSKKTGPRCSTAIATVSQGYQIKNSLVFFLNKGFISICPRRQILSYL

SEQ ID NO: 888854 - protein, 673 aa, Homo sapiens; identical to SEQ ID NO: 888849

SEQ ID NO: 888855 - protein, 674 aa, Homo sapiens
MDPQRSPLLEVKGNIELKRPLIKAPSQLPLSGSRLKRRPDQMEDGLEPEKKRTRGLGATTKITTSHPRVPSLTTVPQTQGQTTAQKVSKKTGPRCSTAIATGLKNQKPVPAVPVQKSGTSGVPPMAGGKKPSKRPAWDLKGQLCDLNAELKRCRERTQTLDQENQQLQDQLRDAQQQVKALGTERTTLEGHLAKVQAQAEQGQQELKNLRACVLELEERLSTQEGLVQELQKKQVELQEERRGLMSQLEEKERRLQTSEAALSSSQAEVASLRQETVAQAALLTEREERLHGLEMERRRLHNQLQELKGNIRVFCRVRPVLPGEPTPPPGLLLFPSGPGGPSDPPTRLSLSRSDERRGTLSGAPAPPTRHDFSFDRVFPPGSGQDEVFEEIAMLVQSALDGYPVCIFAYGQTGSGKTFTMEGGPGGDPQLEGLIPRALRHLFSVAQELSGQGWTYSFVASYVEIYNETVRDLLATGTRKGQGGECEIRRAGPGSEELTVTNARYVPVSCEKEVDALLHLARQNRAVARTAQNERSSRSHSVFQLQISGEHSSRGLQCGAPLSLVDLAGSERLDPGLALGPGERERLRETQAINSSLSTLGLVIMALSNKESHVPYRNSKLTYLLQNSLGGSAKMLMFVNISPLEENVSESLNSLRFASKVRLPPVSLVRTRGWL

SEQ ID NO: 888856 - protein, 249 aa, Homo sapiens
MDPQRSPLLEVKGNIELKRPLIKAPSQLPLSGSRLKRRPDQMEDGLEPEKKRTRGLGATTKITTSHPRVPSLTTVPQTQGQTTAQKVSKKTGPRCSTAIATGLKNQKPVPAVPVQKSGTSGVPPMAGGKKPSKRPAWDLKGQLCDLNAELKRCRERTQTLDQENQQLQDQLRDAQQQVKALGTERTTLEGHLAKVQAQAEQGQQELKNLRACVLELEERLSTQEGLVQELQKKQVELQEAGRSRKQGSW

SEQ ID NO: 888857 - protein, 549 aa, Homo sapiens [sequence omitted]

SEQ ID NO: 888858 - protein, 120 aa, Homo sapiens
ENQQLQDQLRDAQQQVKALGTERTTLEGHLAKVQAQAEQGQQELKNLRACVLELEERLSTQEGLVQELQKKQVELQEERRGLMSQLEEKEVRARFSPDVSPAFLAEVMPPLPSRYPSSLG

SEQ ID NO: 888859 - protein, 216 aa, Homo sapiens
WWRIRHEALPAVYARKMAASQQQASAASSAAGVSGPSSAGGPGPQQQPQPPAQLVGPAQSGLLQQQQQDFDPVQRYKMLIPQLKESLQTLMKVAAQNLIQNTNIDNGQKSSDGPIQRFDKCLEEFYALCDQLELCLRLAHECLSQSCDSAKHSPTLVPTATKPDAVQPDSLPYPQYLAVIKAQISCAKDIHTALLDCANKVTGKTPAPPAGPGGTL

SEQ ID NO: 888860 - protein, 200 aa, Homo sapiens
MAASQQQASAASSAAGVSGPSSAGGPGPQQQPQPPAQLVGPAQSGLLQQQQQDFDPVQRYKMLIPQLKESLQTLMKVAAQNLIQNTNIDNGQKSSDGPIQRFDKCLEEFYALCDQLELCLRLAHECLSQSCDSAKHSPTLVPTATKPDAVQPDSLPYPQYLAVIKAQISCAKDIHTALLDCANKVTGKTPAPPAGPGGTL

SEQ ID NO: 888861 - protein, 233 aa, Homo sapiens
AGLTSKRGLEIGMLKSNGERRSRNALPAVYARKMAASQQQASAASSAAGVSGPSSAGGPGPQQQPQPPAQLVGPAQSGLLQQQQQDFDPVQRYKMLIPQLKESLQTLMKVAAQNLIQNTNIDNGQKSSDGPIQRFDKCLEEFYALCDQLELCLRLAHECLSQSCDSAKHSPTLVPTATKPDAVQPDSLPYPQYLAVIKAQISCAKDIHTALLDCANKVTGKTPAPPAGPGGTL

SEQ ID NO: 888862 - protein, 233 aa, Homo sapiens; identical to SEQ ID NO: 888861

SEQ ID NO: 888863 - protein, 216 aa, Homo sapiens; identical to SEQ ID NO: 888859

SEQ ID NO: 888864 - protein, 121 aa, Homo sapiens
MRRSLKTSHFSEEPSTCLFLNHRNGSTDPTIILHISEPMFNGGKREMHGKRTPPFLLSLKFKDVCFGMPSLLPIHRLLKSLIYSRHMCLLCPKCITFLLVMADFGCVCVRHAVNNEMKAIA

SEQ ID NO: 888865 - protein, 298 aa, Homo sapiens
TGKPEVKSWQPPRPPQCSPPFYVSYSFIWVTNLFLLVQREEKQLEASLDALLSQVADLKNSLGSFICKLENEYGRLTCFALLSGQLNTLNKVLKHEKTPLFRNQVIIPLVLSPDRDEDLMRQTEGRVPVFSHEVVPDHLRTKPDPEVEEQEKQLTTDAARIGADAAQKQIQSLNKMCSNLLEKISKEERESESGGLRPNKQTFNPTDTNALVAAVAFGKGLSNWRPSGSSGPGQAGQPGAGTILAGTSGLQQVQMAGAPSQQQPMLSGVQMAQAGQPGKMPSGIKTNIKSASMHPYQR

SEQ ID NO: 888866 - protein, 225 aa, Homo sapiens
TGKPEVKSWQPPRPPQCSPPFYVSYSFIWVTNLFLLVQREEKQLEASLDALLSQVADLKNSLGSFICKLENEYGRLTWPSVLDSFALLSGQLNTLNKVLKHEKTPLFRNQVIIPLVLSPDRDEDLMRQTEGRVPVFSHEVVPDHLRTKPDPEVEEQEKQLTTDAARIGADAAQKQIQSLNKMCSNLLEKISKEERESESGVSGSFPTNHTFNPSDNFGFVGLFAL

SEQ ID NO: 888867 - protein, 304 aa, Homo sapiens
TGKPEVKSWQPPRPPQCSPPFYVSYSFIWVTNLFLLVQREEKQLEASLDALLSQVADLKNSLGSFICKLENEYGRLTWPSVLDSFALLSGQLNTLNKVLKHEKTPLFRNQVIIPLVLSPDRDEDLMRQTEGRVPVFSHEVVPDHLRTKPDPEVEEQEKQLTTDAARIGADAAQKQIQSLNKMCSNLLEKISKEERESESGGLRPNKQTFNPTDTNALVAAVAFGKGLSNWRPSGSSGPGQAGQPGAGTILAGTSGLQQVQMAGAPSQQQPMLSGVQMAQAGQPGKMPSGIKTNIKSASMHPYQR

SEQ ID NO: 888868 - protein, 179 aa, Homo sapiens
MRQTEGRVPVFSHEVVPDHLRTKPDPEVEEQEKQLTTDAARIGADAAQKQIQSLNKMCSNLLEKISKEERESESGGLRPNKQTFNPTDTNALVAAVAFGKGLSNWRPSGSSGPGQAGQPGAGTILAGTSGLQQVQMAGAPSQQQPMLSGVQMAQAGQPGKMPSGIKTNIKSASMHPYQR

SEQ ID NO: 888869 - protein, 284 aa, Homo sapiens
DWKTGSEIVAAASAAAMQREEKQLEASLDALLSQVADLKNSLGSFICKLENEYGRLTWPSVLDSFALLSGQLNTLNKVLKHEKTPLFRNQVIIPLVLSPDRDEDLMRQTEGRVPVFSHEVVPDHLRTKPDPEVEEQEKQLTTDAARIGADAAQKQIQSLNKMCSNLLEKISKEERESESGGLRPNKQTFNPTDTNALVAAVAFGKGLSNWRPSGSSGPGQAGQPGAGTILAGTSGLQQVQMAGAPSQQQPMLSGVQMAQAGQPGKMPSGIKTNIKSASMHPYQR

SEQ ID NO: 888870 - protein, 298 aa, Homo sapiens; identical to SEQ ID NO: 888865

SEQ ID NO: 888871 - protein, 265 aa, Homo sapiens
MDAQTLASHSLTRHVIVSAAAFSLYDTRYAENEYGRLTWPSVLDSFALLSGQLNTLNKVLKHEKTPLFRNQVIIPLVLSPDRDEDLMRQTEGRVPVFSHEVVPDHLRTKPDPEVEEQEKQLTTDAARIGADAAQKQIQSLNKMCSNLLEKISKEERESESGGLRPNKQTFNPTDTNALVAAVAFGKGLSNWRPSGSSGPGQAGQPGAGTILAGTSGLQQVQMAGAPSQQQPMLSGVQMAQAGQPGKMPSGIKTNIKSASMHPYQR

SEQ ID NO: 888872 - protein, 187 aa, Homo sapiens
DWKTGSEIVAAASAAAMQREEKQLEASLDALLSQVADLKNSLGSFICKLENEYGRLTWPSVLDSFALLSGQLNTLNKVLKHEKTPLFRNQVIIPLVLSPDRDEDLMRQTEGRVPVFSHEVVPDHLRTKPDPEVEEQEKQLTTDAARIGADAAQKQIQSLNKMCSNLLEKISKEERESESGGYDGTGG

SEQ ID NO: 888873 - protein, 317 aa, Homo sapiens
DWKTGSEIVAAASAAAMQREEKQLEASLDALLSQVADLKNSLGSFICKLENEYGRLTWPSVLDSFALLSGQLNTLNKVLKHEKTPLFRNQVIIPLVLSPDRDEDLMRQTEGRVPVFSHEVVPDHLRTKPDPEVEEQEKQLTTDAARIGADAAQKQIQSLNKMCSNLLEKISKEERESESGGLRPNKQTFNPTDTNALVAAVAFGKGLSNWRPSGSSGPGQAGQPGAGTILAGTSGLQQVQMAGAPSQQQPMLSGVQMAQAGQPGKMPSGIKTNIKSASMHPYQRPSCLGFILAIPLRRKVKKLLGQEGKKNAHLQLW

SEQ ID NO: 888874 - protein, 257 aa, Homo sapiens
DWKTGSEIVAAASAAAMQREEKQLEASLDALLSQVADLKNSLGSFICKLENEYGRLTWPSVLDSFALLSGQLNTLNKVLKHEKTPLFRNQVIIPLVLSPDRDEDLMRQTEGRVPVFSHEVVPDHLRTKPDPEVEEQEKQLTTDAARIGADAAQKQIQSLNKMCSNLLEVSGRTSRPLTLQTLMPWWQLLPLGKDYLIGDLQAAVVLARQASQELGRSLQEPQDYSRCRWQELQASSSQCSVGYKWLRQVNQGKCQVE

SEQ ID NO: 888875 - protein, 143 aa, Homo sapiens
GRGTTFLHLVTTTRPSVLDSFALLSGQLNTLNKVLKHEKTPLFRNQVIIPLVLSPDRDEDLMRQTEGRVPVFSHEVVPDHLRTKPDPEVEEQEKQLTTDAARIGADAAQKQIQSLNKMCSNLLEKISKEERESESGGYDGTGG

SEQ ID NO: 888876 - protein, 337 aa, Homo sapiens
TGKPEVKSWQPPRPPQCSPPFYVSYSFIWVTNLFLLVQREEKQLEASLDALLSQVADLKNSLGSFICKLENEYGRLTWPSVLDSFALLSGQLNTLNKVLKHEKTPLFRNQVIIPLVLSPDRDEDLMRQTEGRVPVFSHEVVPDHLRTKPDPEVEEQEKQLTTDAARIGADAAQKQIQSLNKMCSNLLEKISKEERESESGGLRPNKQTFNPTDTNALVAAVAFGKGLSNWRPSGSSGPGQAGQPGAGTILAGTSGLQQVQMAGAPSQQQPMLSGVQMAQAGQPGKMPSGIKTNIKSASMHPYQRPSCLGFILAIPLRRKVKKLLGQEGKKNAHLQLW

SEQ ID NO: 888877 - protein, 255 aa, Homo sapiens
DWKTGSEIVAAASAAAMQREEKQLEASLDALLSQVADLKNSLGSFICKLENEYGRLTWPSVLDSFALLSGQLNTLNKVLKHEKTPLFRNQVIIPLVLSPDRDEDLMRQTEGRVPVFSHEVVPDHLRTKPDPEVEEQEKQLTTDAARIGADAAQKQIQSLNKMCSNLLEKISKEERESESGGLRPNKQTFNPTDTNAQWGTNGSGRSTRENAKWNKNQHQVGFHASLPAVSVAGNLDSLVLFAELGSEITFCSRLT

SEQ ID NO: 888878 - protein, 366 aa, Homo sapiens
DWKTGSEIVAAASAAAMQREEKQLEASLDALLSQVADLKNSLGSFICKLENEYGRLTWPSVLDSFALLSGQLNTLNKVLKHEKTPLFRNQVIIPLVLSPDRDEDLMRQTEGRVPVFSHEVVPDHLRTKPDPEVEEQEKQLTTDAARIGADAAQKQIQSLNKMCSNLLEKISKEERESESGGLRPNKQTFNPTDTNALVAAVAFGKGLSNWRPSGSSGPGQAGQPGAGTILAGTSGLQQVQMAGAPSQQQPMLSGVQMAQAGQPGKMPSGIKTNIKSASMHPYQRVLSQDGGCCELVPRGDEARRSPDPGYPLMGSPLLMTSILLTYVYFVLSLGPRIMANRKPFQLRGFMIVYNFSLVALSLYIVY

SEQ ID NO: 888879 - protein, 284 aa, Homo sapiens; identical to SEQ ID NO: 888869

SEQ ID NO: 888880 - protein, 179 aa, Homo sapiens; identical to SEQ ID NO: 888868

SEQ ID NO: 888881 - protein, 179 aa, Homo sapiens; identical to SEQ ID NO: 888868

SEQ ID NO: 888882 - protein, 240 aa, Homo sapiens
GRGTTFLHLVTTTRPSVLDSFALLSGQLNTLNKVLKHEKTPLFRNQVIIPLVLSPDRDEDLMRQTEGRVPVFSHEVVPDHLRTKPDPEVEEQEKQLTTDAARIGADAAQKQIQSLNKMCSNLLEKISKEERESESGGLRPNKQTFNPTDTNALVAAVAFGKGLSNWRPSGSSGPGQAGQPGAGTILAGTSGLQQVQMAGAPSQQQPMLSGVQMAQAGQPGKMPSGIKTNIKSASMHPYQR

SEQ ID NO: 888883 - protein, 119 aa, Homo sapiens
TGKPEVKSWQPPRPPQCSPPFYVSYSFIWVTNLFLLVQREEKQLEASLDALLSQVADLKNSLGSFICKLENEYGRLTWPSVLDSFALLSGQLNTLNKVLKHEKTPLGRLKDGCLFSAMR

SEQ ID NO: 888884 - protein, 277 aa, Homo sapiens
TGKPEVKSWQPPRPPQCSPPFYVSYSFIWVTNLFLLVQREEKQLEASLDALLSQVADLKNSLGSFICKLENEYGRLTWPSVLDSFALLSGQLNTLNKVLKHEKTPLFRNQVIIPLVLSPDRDEDLMRQTEGRVPVFSHEVVPDHLRTKPDPEVEEQEKQLTTDAARIGADAAQKQIQSLNKMCSNLLEVSGRTSRPLTLQTLMPWWQLLPLGKDYLIGDLQAAVVLARQASQELGRSLQEPQDYSRCRWQELQASSSQCSVGYKWLRQVNQGKCQVE

SEQ ID NO: 888885 - protein, 284 aa, Homo sapiens; identical to SEQ ID NO: 888869

SEQ ID NO: 888886 - protein, 284 aa, Homo sapiens; identical to SEQ ID NO: 888869

SEQ ID NO: 888887 - protein, 257 aa, Homo sapiens
MPERDSEPFSNPLAPDGHDVDDPHSFHQSKLTNEDFRKLLMTPRAAPTSAPPSKSRHHEMPREYNEDEDPAARRRKKKSYYAKLRQQEIERERELAEKYRDRAKERRDGVNKDYEETELISTTANYRAVGPTAEADKSAAEKRRQLIQESKFLGGDMEHTHLVKGLDFALLQKVRAEIASKEKEEEELMEKPQKETKKDEDPENKIEFKTRLGEYSFYTSDYAFWMNCTEFNALGRICFSFPPTSFLLSFFLRQCLT

SEQ ID NO: 888888 - protein, 557 aa, Homo sapiens
MPERDSEPFSNPLAPDGHDVDDPHSFHQSKLTNEDFRKLLMTPRAAPTSAPPSKSRHHEMPREYNEDEDPAARRRKKKSYYAKLRQQEIERERELAEKYRDRAKERRDGVNKDYEETELISTTANYRAVGPTAEADKSAAEKRRQLIQESKFLGGDMEHTHLVKGLDFALLQKVRAEIASKEKEEEELMEKPQKETKKDEDPENKIEFKTRLGRNVYRMLFKSKAYERNELFLPGRMAYVVDLDDEYADTDIPTTLIRSKADCPTMEAQTTLTTNDIVISKLTQILSYLRQGTRNKKLKKKDKGKLEEKKPPEADMNIFEDIGDYVPSTTKTPRDKERERYRERERDRERDRDRDRERERERDRERERERDREREEEKKRHSYFEKPKVDDEPMDVDKGPGSTKELIKSINEKFAGSAGWEGTESLKKPEDKKQLGDFFGMSNSYAECYPATMDDMAVDSDEEVDYSKMDQGNKKGPLGRWDFDTQEEYSEYMNNKEALPKAAFQYGIKMSEGRKTRRFKETNDKAELDRQWKKISAIIEKRKKMEADGVEVKRPKY

SEQ ID NO: 888889 - protein, 557 aa, Homo sapiens; identical to SEQ ID NO: 888888

SEQ ID NO: 888890 - protein, 474 aa, Homo sapiens
MPERDSEPFSNPLAPDGHDVDDPHSFHQSKLTNEDFRKLLMTPRAAPTSAPPSKSRHHEMPREYNEDEDPAARRRKKKSYYAKLRQQEIERERELAEKYRDRAKERRDGVNKDYEETELISTTANYRAVGPTAEADKSAAEKRRQLIQESKFLGGDMEHTHLVKGLDFALLQKVRAEIASKEKEEEELMEKPQKETKKDEDPENKIEFKTRLGRNVYRMLFKSKAYERNELFLPGRMAYVVDLDDEYADTDIPTTLIRSKADCPTMEAQTTLTTNDIVISKLTQILSYLRQGTRNKKLKKKDKGKLEEKKPPEADMNIFEDIGDYVPSTTKTPRDKERERYRERERDRERDRDRDRERERERDRERERERDREREEEKKRHSYFEKPKVDDEPMDVDKGPGSTKELIKSINEKFAGSAGWEGTESLKKPEDKKQLGDFFGMSNSYAECYPATMDDMAVDSDEEVDYSKMDQVCS

SEQ ID NO: 888891 - protein, 474 aa, Homo sapiens; identical to SEQ ID NO: 888890

SEQ ID NO: 888892 - protein, 549 aa, Homo sapiens [sequence omitted]

SEQ ID NO: 888893 - protein, 551 aa, Homo sapiens
MPERDSEPFSNPLAPDGHDVDDPHSFHQSKLTNEDFRKLLMTPRAAPTSAPPSKSRHHEMPREYNEDEDPAARRRKKKSYYAKLRQQEIERERELAEKYRDRAKERRDGVNKDYEETELISTTANYRAVGPTAEADKSAAEKRRQLIQESKFLGGDMEHTHLVKGLDFALLQKVRAEIASKEKEEEELMEKPQKETKKDEDPENKIEFKTRLGRNVYRMLFKSKAYERNELFLPGRMAYVVDLDDEYADTDIPTTLIRSKADCPTMEAQTTLTTNDIVISKLTQILSYLRQGTRNKKLKKKDKGKLEEKKPPEADMNIFEDIGDYVPSTTKTPRDKERERYRERERDRERDRDRDRERERERDRERERERDREREEEKKRHSYFEKPKVDDEPMDVDKGPGSTKELIKSINEKFAGSAGWEGTESLKKPEDKKQLGDFFGMSNSYAECYPATMDDMAVDSDEEVDYSKMDQGNKKGPLGRWDFDTQEEYSEYMNNKEALPKAAFQYGIKMSEGRKTRRFKETNDKAELDRQWKKISALIAEEGEGWKLMGV

SEQ ID NO: 888894 - protein, 546 aa, Homo sapiens
MPERDSEPFSNPLAPDGHDVDDPHSFHQSKLTNEDFRKLLMTPRAAPTSAPPSKSRHHEMPREYNEDEDPAARRRKKKSYYAKLRQQEIERERELAEKYRDRAKERRDGVNKDYEETELISTTANYRAVGPTAEADKSAAEKRRQLIQESKFLGGDMEHTHLVKGLDFALLQKVRAEIASKEKEEEELMEKPQKETKKDEDPENKIEFKTRLGRNVYRMLFKSKAYERNELFLPGRMAYVVDLDDEYADTDIPTTLIRSKADCPTMEAQTTLTTNDIVISKLTQILSYLRQGTRNKKLKKKDKGKLEEKKPPEADMNIFEDIGDYVPSTTKTPRDKERERYRERERDRERDRDRDRERERERDRERERERDREREEEKKRHSYFEKPKVDDEPMDVDKGPGSTKELIKSINEKFAGSAGWEGTESLKKPEDKKQLGDFFGMSNSYAECYPATMDDMAVDSDEEVDYSKMDQGNKKGPLGRWDFDTQEEYSEYMNNKEALPKAAFQYGTAGGGNQGPGNPGNKPDARDRLRDPGDQRTEGEARTPTS

SEQ ID NO: 888895 - protein, 466 aa, Homo sapiens
MPERDSEPFSNPLAPDGHDVDDPHSFHQSKLTNEDFRKLLMTPRAAPTSAPPSKSRHHEMPREYNEDEDPAARRRKKKSYYAKLRQQEIERERELAEKYRDRAKERRDGVNKDYEETELISTTANYRAVGPTAEADKSAAEKRRQLIQESKFLGGDMEHTHLVKGLDFALLQKVRAEIASKEKEEEELMEKPQKETKKDEDPENKIEFKTRLGRNVYRMLFKSKAYERNELFLPGRMAYVVDLDDEYADTDIPTTLIRSKADCPTMEAQTTLTTNDIVISKLTQILSYLRQGTRNKKLKKKDKGKLEEKKPPEADMNIFEDIGDYVPSTTKTPRDKERERYRERERDRERDRDRDRERERERDRERERERDREREEEKKRHSYFEKPKVDDEPMDVDKGPGSTKELIKSINEKFAGSAGWEGTESLKKPEDKKQLGDFFGMSNSYAECYPATMDDMAVCGGSTLYV

SEQ ID NO: 888896 - protein, 474 aa, Homo sapiens
MPERDSEPFSNPLAPDGHDVDDPHSFHQSKLTNEDFRKLLMTPRAAPTSAPPSKSRHHEMPREYNEDEDPAARRRKKKSYYAKLRQQEIERERELAEKYRDRAKERRDGVNKDYEETELISTTANYRAVGPTAEADKSAAEKRRQLIQESKFLGGDMEHTHLVKGLDFALLQKVRAEIASKEKEEEELMEKPQKETKKDEDPENKIEFKTRLGRNVYRMLFKSKAYERNELFLPGRMAYVVDLDDEYADTDIPTTLIRSKADCPTMEAQTTLTTNDIVISKLTQILSYLRQGTRNKKLKKKDKGKLEEKKPPEADMNIFEDIGDYVPSTTKTPRDKERERYRERERDRERDRDRDRERERERDRERERERDREREEEKKRHSYFEKPKVDDEPMDVDKGPGSTKELIKSINEKFAGSAGWEGTESLKKPEDKKQLGDFFFLSLTTDSSSLSTEGVVLGMMAEAVSDPLSLFFPL

SEQ ID NO: 888897 - protein, 517 aa, Homo sapiens [sequence omitted]

SEQ ID NO: 888898 - protein, 652 aa, Homo sapiens
  misc_feature (135)..(135): Xaa can be any naturally occurring amino acid
MPERDSEPFSNPLAPDGHDVDDPHSFHQSKLTNEDFRKLLMTPRAAPTSAPPSKSRHHEMPREYNEDEDPAARRRKKKSFLKSSLVSYDGSEIGSRSTIALVAGWNGMWMEASLLATEIQKVIEGEDCSENLLEXRQCLELTIFTGLLSHDHHEMPREYKEDEDPAAQKEERRNYYAKLRQQEIERERELAEKYRDRAKERRDGVNKDYEETELISTTANYRAVGPTAEADKSAAEKRRQLIQESKFLGGDMEHTHLVKGLDFALLQKVRAEIASKEKEEEELMEKPQKETKKDEDPENKIEFKTRLGRNVYRMLFKSKAYERNELFLPGRMAYVVDLDDEYADTDIPTTLIRSKADCPTMEAQTTLTTNDIVISKLTQILSYLRQGTRNKKLKKKDKGKLEEKKPPEADMNIFEDIGDYVPSTTKTPRDKERERYRERERDRERDRDRDRERERERDRERERERDREREEEKKRHSYFEKPKVDDEPMDVDKGPGSTKELIKSINEKFAGSAGWEGTESLKKPEDKKQLGDFFGMSNSYAECYPATMDDMAVDSDEEVDYSKMDQGNKKGPLGRWDFDTQEEYSEYMNNKEALPKAAFQYGIKMSEGRKTRRFKETNDKAELDRQWKKISAIIEKRKKMEADGVEVKRPKY

SEQ ID NO: 888899 - protein, 493 aa, Homo sapiens
LDTPTRSTLTLGVTFQHEIEDKYPDYIHLLEGTGTSAPGNSDPGIGLGILLLHLMPTPQPHRSPFVPPAEADKSAAEKRRQLIQESKFLGGDMEHTHLVKGLDFALLQKVRAEIASKEKEEEELMEKPQKETKKDEDPENKIEFKTRLGRNVYRMLFKSKAYERNELFLPGRMAYVVDLDDEYADTDIPTTLIRSKADCPTMEAQTTLTTNDIVISKLTQILSYLRQGTRNKKLKKKDKGKLEEKKPPEADMNIFEDIGDYVPSTTKTPRDKERERYRERERDRERDRDRDRERERERDRERERERDREREEEKKRHSYFEKPKVDDEPMDVDKGPGSTKELIKSINEKFAGSAGWEGTESLKKPEDKKQLGDFFGMSNSYAECYPATMDDMAVDSDEEVDYSKMDQGNKKGPLGRWDFDTQEEYSEYMNNKEALPKAAFQYGIKMSEGRKTRRFKETNDKAELDRQWKKISAIIEKRKKMEADGVEVKRPKY

SEQ ID NO: 888900 - protein, 339 aa, Homo sapiens [sequence omitted]

SEQ ID NO: 888901 - protein, 304 aa, Homo sapiens
VSKYHVSSGGSSLPAPFIFLFKLLVTGSLTQILSYLRQGTRNKKLKKKDKGKLEEKKPPEADMNIFEDIGDYVPSTTKTPRDKERERYRERERDRERDRDRDRERERERDRERERERDREREEEKKRHSYFEKPKVDDEPMDVDKGPGSTKELIKSINEKFAGSAGWEGTESLKKPEDKKQLGDFFGMSNSYAECYPATMDDMAVDSDEEVDYSKMDQGNKKGPLGRWDFDTQEEYSEYMNNKEALPKAAFQYGIKMSEGRKTRRFKETNDKAELDRQWKKISAIIEKRKKMEADGVEVKRPKY

SEQ ID NO: 888902 - protein, 242 aa, Homo sapiens
MNIFEDIGDYVPSTTKTPRDKERERYRERERDRERDRDRDRERERERDRERERERDREREEEKKRHSYFEKPKVDDEPMDVDKGPGSTKELIKSINEKFAGSAGWEGTESLKKPEDKKQLGDFFGMSNSYAECYPATMDDMAVDSDEEVDYSKMDQGNKKGPLGRWDFDTQEEYSEYMNNKEALPKAAFQYGIKMSEGRKTRRFKETNDKAELDRQWKKISAIIEKRKKMEADGVEVKRPKY

SEQ ID NO: 888903 - protein, 279 aa, Homo sapiens
MSAQEVLLFQLPLSFFLSFLLRVPCLRYERIWVSLLMTCIFEDIGDYVPSTTKTPRDKERERYRERERDRERDRDRDRERERERDRERERERDREREEEKKRHSYFEKPKVDDEPMDVDKGPGSTKELIKSINEKFAGSAGWEGTESLKKPEDKKQLGDFFGMSNSYAECYPATMDDMAVDSDEEVDYSKMDQGNKKGPLGRWDFDTQEEYSEYMNNKEALPKAAFQYGIKMSEGRKTRRFKETNDKAELDRQWKKISAIIEKRKKMEADGVEVKRPKY

SEQ ID NO: 888904 - protein, 251 aa, Homo sapiens
QYTEMETSSPLLLEQGKHNRGGNTGQSRDKERERYRERERDRERDRDRDRERERERDRERERERDREREEEKKRHSYFEKPKVDDEPMDVDKGPGSTKELIKSINEKFAGSAGWEGTESLKKPEDKKQLGDFFGMSNSYAECYPATMDDMAVDSDEEVDYSKMDQGNKKGPLGRWDFDTQEEYSEYMNNKEALPKAAFQYGIKMSEGRKTRRFKETNDKAELDRQWKKISAIIEKRKKMEADGVEVKRPKY

SEQ ID NO: 888905 - protein, 117 aa, Homo sapiens
MSNSYAECYPATMDDMAVDSDEEVDYSKMDQGNKKGPLGRWDFDTQEEYSEYMNNKEALPKAAFQYGIKMSEGRKTRRFKETNDKAELDRQWKKISAIIEKRKKMEADGVEVKRPKY

SEQ ID NO: 888906 - protein, 133 aa, Homo sapiens
MLKKPEDKKQLGDFFGMSNSYAECYPATMDDMAVDSDEEVDYSKMDQGNKKGPLGRWDFDTQEEYSEYMNNKEALPKAAFQYGIKMSEGRKTRRFKETNDKAELDRQWKKISAIIEKRKKMEADGVEVKRPKY

SEQ ID NO: 888907 - protein, 135 aa, Homo sapiens
MPERDSEPFSNPLAPDGHDVDDPHSFHQSKLTNEDFRKLLMTPRAAPTSAPPSKSRHHEMPREYNEDEDPAARRRKKKSYYAKLRQQEIERERELAEKYRDRAKERRDGVNKDYEETELISTTANYRAVGPTAEA

SEQ ID NO: 888908 - protein, 156 aa, Homo sapiens
MDVDKGPGSTKELIKSINEKFAGSAGWEGTESLKKPEDKKQLGDFFGMSNSYAECYPATMDDMAVDSDEEVDYSKMDQGNKKGPLGRWDFDTQEEYSEYMNNKEALPKAAFQYGIKMSEGRKTRRFKETNDKAELDRQWKKISAIIEKRKKMEADG

SEQ ID NO: 888909 - protein, 557 aa, Homo sapiens; identical to SEQ ID NO: 888888

SEQ ID NO: 888910 - protein, 557 aa, Homo sapiens; identical to SEQ ID NO: 888888

SEQ ID NO: 888911 - protein, 963 aa, Homo sapiens
RPGRGGKMAAAVGVRGRYELPPCSGPGWLLSLSALLSVAARGAFATTHWVVTEDGKIQQQVDSPMNLKHPHDLVILMRQEATVNYLKELEKQLVAQKIHIEENEDRDTGLEQRHNKEDPDCIKAKVPLGDLDLYDGTYITLESKDISPEDYIDTESPVPPDPEQPDCTKILELPYSIHAFQHLRGVQERVNLSAPLLPKEDPIFTYLSKRLGRSIDDIGHLIHEGLQKNTSSWVLYNMASFYWRIKNEPYQVVECAMRALHFSSRHNKDIALVNLANVLHRAHFSADAAVVVHAALDDSDFFTSYYTLGNIYAMLGEYNHSVLCYDHALQARPGFEQAIKRKHAVLCQQKLEQKLEAQHRSLQRTLNELKEYQKQHDHYLRQQEILEKHKLIQEEQILRNIIHETQMAKEAQLGNHQICRLVNQQHSLHCQWDQPVRYHRGDIFENVDYVQFGEDSSTSSMMSVNFDVQSNQSDINDSVKSSPVAHSILWIWGRDSDAYRDKQHILWPKRADCTESYPRVPVGGELPTYFLPPENKGLRIHELSSDDYSTEEEAQTPDCSITDFRKSHTLSYLVKELEVRMDLKAKMPDDHARKILLSRINNYTIPEEEIGSFLFHAINKPNAPIWLILNEAGLYWRAVGNSTFAIACLQRALNLAPLQYQDVPLVNLANLLIHYGLHLDATKLLLQALAINSSEPLTFLSLGNAYLALKNISGALEAFRQALKLTTKCPECENSLKLIRCMQFYPFLYNITSSVCSGNCHEKTLDNSHDKQKYFDNSQSLDAAEEEPSERGTEEDPVFSVENSGRDSDALRLESTVVEESNGSDEMENSDETKMSEEILALVDEFQQAWPLEGFGGALEMKGRRLDLQGIRVLKKGPQDGVARSSCYGDCRSEDDEATEWITFQVKRVKKPKGDHKKTPGKKVETGQIENGHRYQANLEITGPKVASPGPQGLLDWKTRKVP

SEQ ID NO: 888912 - protein, 1205 aa, Homo sapiens
RPGRGGKMAAAVGVRGRYELPPCSGPGWLLSLSALLSVAARGAFATTHWVVTEDGKIQQQVDSPMNLKHPHDLVILMRQEATVNYLKELEKQLVAQKIHIEENEDRDTGLEQRHNKEDPDCIKAKVPLGDLDLYDGTYITLESKDISPEDYIDTESPVPPDPEQPDCTKILELPYSIHAFQHLRGVQERVNLSAPLLPKEDPIFTYLSKRLGRSIDDIGHLIHEGLQKNTSSWVLYNMASFYWRIKNEPYQVVECAMRALHFSSRHNKDIALVNLANVLHRAHFSADAAVVVHAALDDSDFFTSYYTLGNIYAMLGEYNHSVLCYDHALQARPGFEQAIKRKHAVLCQQKLEQKLEAQHRSLQRTLNELKEYQKQHDHYLRQQEILEKHKLIQEEQILRNIIHETQMAKEAQLGNHQICRLVNQQHSLHCQWDQPVRYHRGDIFENVDYVQFGEDSSTSSMMSVNFDVQSNQSDINDSVKSSPVAHSILWIWGRDSDAYRDKQHILWPKRADCTESYPRVPVGGELPTYFLPPENKGLRIHELSSDDYSTEEEAQTPDCSITDFRKSHTLSYLVKELEVRMDLKAKMPDDHARKILLSRINNYTIPEEEIGSFLFHAINKPNAPIWLILNEAGLYWRAVGNSTFAIACLQRALNLAPLQYQDVPLVNLANLLIHYGLHLDATKLLLQALAINSSEPLTFLSLGNAYLALKNISGALEAFRQALKLTTKCPECENSLKLIRCMQFYPFLYNITSSVCSGNCHEKTLDNSHDKQKYFDNSQSLDAAEEEPSERGTEEDPVFSVENSGRDSDALRLESTVVEESNGSDEMENSDETKMSEEILALVDEFQQAWPLEGFGGALEMKGRRLDLQGIRVLKKGPQDGVARSSCYGDCRSEDDEATEWITFQVKRVKKPKGDHKKTPGKKVETGQIENGHRYQANLEITGPKVASPGPQGKKRDYQRLGWPSPDECLKLRWVELTAIVSTWLAVSSKNIDITEHIDFATPIQQPAMEPLCNGNLPTSMHTLDHLHGVSNRASLHYTGESQLTEVLQNLGKDQYPQQSLEQIGTRIAKVLEKNQTSWVLSSMAALYWRVKGQGKKAIDCLRQALHYAPHQMKDVPLISLANILHNAKLWNDAVIVATMAVEIAPHFAVNHFTLGNVYVAMEEFEKALVWYESTLKLQPEFVPAKNRIQTIQCHLMLKKGRRSP

SEQ ID NO: 888913 - protein, 1188 aa, Homo sapiens
RPGRGGKMAAAVGVRGRYELPPCSGPGWLLSLSALLSVAARGAFATTHWVVTEDGKIQQQVDSPMNLKHPHDLVILMRQEATVNYLKELEKQLVAQKIHIEENEDRDTGLEQRHNKEDPDCIKAKVPLGDLDLYDGTYITLESKDISPEDYIDTESPVPPDPEQPDCTKILELPYSIHAFQHLRGVQERVNLSAPLLPKEDPIFTYLSKRLGRSIDDIGHLIHEGLQKNTSSWVLYNMASFYWRIKNEPYQVVECAMRALHFSSRHNKDIALVNLANVLHRAHFSADAAVVVHAALDDSDFFTSYYTLGNIYAMLGEYNHSVLCYDHALQARPGFEQAIKRKHAVLCQQKLEQKLEAQHRSLQRTLNELKEYQKQHDHYLRQQEILEKHKLIQEEQILRNIIHETQMAKEAQLGNHQICRLVNQQHSLHCQWDQPVRYHRGDIFENVDYVQFGEDSSTSSMMSVNFDVQSNQSDINDSVKSSPVAHSILWIWGRDSDAYRDKQHILWPKRADCTESYPRVPVGGELPTYFLPPENKGLRIHELSSDDYSTEEEAQTPDCSITDFRKSHTLSYLVKELEVRMDLKAKMPDDHARKSFLFHAINKPNAPIWLILNEAGLYWRAVGNSTFAIACLQRALNLAPLQYQDVPLVNLANLLIHYGLHLDATKLLLQALAINSSEPLTFLSLGNAYLALKNISGALEAFRQALKLTTKCPECENSLKLIRCMQFYPFLYNITSSVCSGNCHEKTLDNSHDKQKYFDNSQSLDAAEEEPSERGTEEDPVFSVENSGRDSDALRLESTVVEESNGSDEMENSDETKMSEEILALVDEFQQAWPLEGFGGALEMKGRRLDLQGIRVLKKGPQDGVARSSCYGDCRSEDDEATEWITFQVKRVKKPKGDHKKTPGKKVETGQIENGHRYQANLEITGPKVASPGPQGKKRDYQRLGWPSPDECLKLRWVELTAIVSTWLAVSSKNIDITEHIDFATPIQQPAMEPLCNGNLPTSMHTLDHLHGVSNRASLHYTGESQLTEVLQNLGKDQYPQQSLEQIGTRIAKVLEKNQTSWVLSSMAALYWRVKGQGKKAIDCLRQALHYAPHQMKDVPLISLANILHNAKLWNDAVIVATMAVEIAPHFAVNHFTLGNVYVAMEEFEKALVWYESTLKLQPEFVPAKNRIQTIQCHLMLKKGRRSP

SEQ ID NO: 888914 - protein, 1257 aa, Homo sapiens
RPGRGGKMAAAVGVRGRYELPPCSGPGWLLSLSALLSVAARGAFATTHWVVTEDGKIQQQVDSPMNLKHPHDLVILMRQEATVNYLKELEKQLVAQKIHIEENEDRDTGLEQRHNKEDPDCIKAKVPLGDLDLYDGTYITLESKDISPEDYIDTESPVPPDPEQPDCTKILELPYSIHAFQHLRGVQERVNLSAPLLPKEDPIFTYLSKRLGRSIDDIGHLIHEGLQKNTSSWVLYNMASFYWRIKNEPYQVVECAMRALHFSSRHNKDIALVNLANVLHRAHFSADAAVVVHAALDDSDFFTSYYTLGNIYAMLGEYNHSVLCYDHALQARPGFEQAIKRKHAVLCQQKLEQKLEAQHRSLQRTLNELKEYQKQHDHYLRQQEILEKHKLIQEEQILRNIIHETQMAKEAQLGNHQICRLVNQQHSLHCQWDQPVRYHRGDIFENVDYVQFGEDSSTSSMMSVNFDVQSNQSDINDSVKSSPVAHSILWIWGRDSDAYRDKQHILWPKRADCTESYPRVPVGGELPTYFLPPENKGLRQVVMDLAKHLILHDCHQRFFESTSLGLEKLSLYLEVTQNFENMNLVPFSCARIHELSSDDYSTEEEAQTPDCSITDFRKSHTLSYLVKELEVRMDLKAKMPDDHARKILLSRINNYTIPEEEIGSFLFHAINKPNAPIWLILNEAGLYWRAVGNSTFAIACLQRALNLAPLQYQDVPLVNLANLLIHYGLHLDATKLLLQALAINSSEPLTFLSLGNAYLALKNISGALEAFRQALKLTTKCPECENSLKLIRCMQFYPFLYNITSSVCSGNCHEKTLDNSHDKQKYFDNSQSLDAAEEEPSERGTEEDPVFSVENSGRDSDALRLESTVVEESNGSDEMENSDETKMSEEILALVDEFQQAWPLEGFGGALEMKGRRLDLQGIRVLKKGPQDGVARSSCYGDCRSEDDEATEWITFQVKRVKKPKGDHKKTPGKKVETGQIENGHRYQANLEITGPKVASPGPQGKKRDYQRLGWPSPDECLKLRWVELTAIVSTWLAVSSKNIDITEHIDFATPIQQPAMEPLCNGNLPTSMHTLDHLHGVSNRASLHYTGESQLTEVLQNLGKDQYPQQSLEQIGTRIAKVLEKNQTSWVLSSMAALYWRVKGQGKKAIDCLRQALHYAPHQMKDVPLISLANILHNAKLWNDAVIVATMAVEIAPHFAVNHFTLGNVYVAMEEFEKALVWYESTLKLQPEFVPAKNRIQTIQCHLMLKKGRRSP

SEQ ID NO: 888915 - protein, 1141 aa, Homo sapiens
MNLKHPHDLVILMRQEATVNYLKELEKQLVAQKIHIEENEDRDTGLEQRHNKEDPDCIKAKVPLGDLDLYDGTYITLESKDISPEDYIDTESPVPPDPEQPDCTKILELPYSIHAFQHLRGVQERVNLSAPLLPKEDPIFTYLSKRLGRSIDDIGHLIHEGLQKNTSSWVLYNMASFYWRIKNEPYQVVECAMRALHFSSRHNKDIALVNLANVLHRAHFSADAAVVVHAALDDSDFFTSYYTLGNIYAMLGEYNHSVLCYDHALQARPGFEQAIKRKHAVLCQQKLEQKLEAQHRSLQRTLNELKEYQKQHDHYLRQQEILEKHKLIQEEQILRNIIHETQMAKEAQLGNHQICRLVNQQHSLHCQWDQPVRYHRGDIFENVDYVQFGEDSSTSSMMSVNFDVQSNQSDINDSVKSSPVAHSILWIWGRDSDAYRDKQHILWPKRADCTESYPRVPVGGELPTYFLPPENKGLRIHELSSDDYSTEEEAQTPDCSITDFRKSHTLSYLVKELEVRMDLKAKMPDDHARKILLSRINNYTIPEEEIGSFLFHAINKPNAPIWLILNEAGLYWRAVGNSTFAIACLQRALNLAPLQYQDVPLVNLANLLIHYGLHLDATKLLLQALAINSSEPLTFLSLGNAYLALKNISGALEAFRQALKLTTKCPECENSLKLIRCMQFYPFLYNITSSVCSGNCHEKTLDNSHDKQKYFDNSQSLDAAEEEPSERGTEEDPVFSVENSGRDSDALRLESTVVEESNGSDEMENSDETKMSEEILALVDEFQQAWPLEGFGGALEMKGRRLDLQGIRVLKKGPQDGVARSSCYGDCRSEDDEATEWITFQVKRVKKPKGDHKKTPGKKVETGQIENGHRYQANLEITGPKVASPGPQGKKRDYQRLGWPSPDECLKLRWVELTAIVSTWLAVSSKNIDITEHIDFATPIQQPAMEPLCNGNLPTSMHTLDHLHGVSNRASLHYTGESQLTEVLQNLGKDQYPQQSLEQIGTRIAKVLEKNQTSWVLSSMAALYWRVKGQGKKAIDCLRQALHYAPHQMKDVPLISLANILHNAKLWNDAVIVATMAVEIAPHFAVNHFTLGNVYVAMEEFEKALVWYESTLKLQPEFVPAKNRIQTIQCHLMLKKGRRSP

SEQ ID NO: 888916 - protein, 968 aa, Homo sapiens
MASFYWRIKNEPYQVVECAMRALHFSSRHNKDIALVNLANVLHRAHFSADAAVVVHAALDDSDFFTSYYTLGNIYAMLGEYNHSVLCYDHALQARPGFEQAIKRKHAVLCQQKLEQKLEAQHRSLQRTLNELKEYQKQHDHYLRQQEILEKHKLIQEEQILRNIIHETQMAKEAQLGNHQICRLVNQQHSLHCQWDQPVRYHRGDIFENVDYVQFGEDSSTSSMMSVNFDVQSNQSDINDSVKSSPVAHSILWIWGRDSDAYRDKQHILWPKRADCTESYPRVPVGGELPTYFLPPENKGLRIHELSSDDYSTEEEAQTPDCSITDFRKSHTLSYLVKELEVRMDLKAKMPDDHARKILLSRINNYTIPEEEIGSFLFHAINKPNAPIWLILNEAGLYWRAVGNSTFAIACLQRALNLAPLQYQDVPLVNLANLLIHYGLHLDATKLLLQALAINSSEPLTFLSLGNAYLALKNISGALEAFRQALKLTTKCPECENSLKLIRCMQFYPFLYNITSSVCSGNCHEKTLDNSHDKQKYFDNSQSLDAAEEEPSERGTEEDPVFSVENSGRDSDALRLESTVVEESNGSDEMENSDETKMSEEILALVDEFQQAWPLEGFGGALEMKGRRLDLQGIRVLKKGPQDGVARSSCYGDCRSEDDEATEWITFQVKRVKKPKGDHKKTPGKKVETGQIENGHRYQANLEITGPKVASPGPQGKKRDYQRLGWPSPDECLKLRWVELTAIVSTWLAVSSKNIDITEHIDFATPIQQPAMEPLCNGNLPTSMHTLDHLHGVSNRASLHYTGESQLTEVLQNLGKDQYPQQSLEQIGTRIAKVLEKNQTSWVLSSMAALYWRVKGQGKKAIDCLRQALHYAPHQMKDVPLISLANILHNAKLWNDAVIVATMAVEIAPHFAVNHFTLGNVYVAMEEFEKALVWYESTLKLQPEFVPAKNRIQTIQCHLMLKKGRRSP

SEQ ID NO: 888917 - protein, 1166 aa, Homo sapiens
VNGERSDLIMSLLNKPKSEMTPEELQKREEEVNLTPVHSLCSHSQSRTIPNVLINCRNNKKLLGRCEGLSDRHCNMVLENVKEMWTEVPKSGKAKKKSKPVNKDRYISKMFLQLGTLCHLWSCGTRSSPASRGRLSVDEHLGIVLGVQERVNLSAPLLPKEDPIFTYLSKRLGRSIDDIGHLIHEGLQKNTSSWVLYNMASFYWRIKNEPYQVVECAMRALHFSSRHNKDIALVNLANVLHRAHFSADAAVVVHAALDDSDFFTSYYTLGNIYAMLGEYNHSVLCYDHALQARPGFEQAIKRKHAVLCQQKLEQKLEAQHRSLQRTLNELKEYQKQHDHYLRQQEILEKHKLIQEEQILRNIIHETQMAKEAQLGNHQICRLVNQQHSLHCQWDQPVRYHRGDIFENVDYVQFGEDSSTSSMMSVNFDVQSNQSDINDSVKSSPVAHSILWIWGRDSDAYRDKQHILWPKRADCTESYPRVPVGGELPTYFLPPENKGLRIHELSSDDYSTEEEAQTPDCSITDFRKSHTLSYLVKELEVRMDLKAKMPDDHARKILLSRINNYTIPEEEIGSFLFHAINKPNAPIWLILNEAGLYWRAVGNSTFAIACLQRALNLAPLQYQDVPLVNLANLLIHYGLHLDATKLLLQALAINSSEPLTFLSLGNAYLALKNISGALEAFRQALKLTTKCPECENSLKLIRCMQFYPFLYNITSSVCSGNCHEKTLDNSHDKQKYFDNSQSLDAAEEEPSERGTEEDPVFSVENSGRDSDALRLESTVVEESNGSDEMENSDETKMSEEILALVDEFQQAWPLEGFGGALEMKGRRLDLQGIRVLKKGPQDGVARSSCYGDCRSEDDEATEWITFQVKRVKKPKGDHKKTPGKKVETGQIENGHRYQANLEITGPKVASPGPQGKKRDYQRLGWPSPDECLKLRWVELTAIVSTWLAVSSKNIDITEHIDFATPIQQPAMEPLCNGNLPTSMHTLDHLHGVSNRASLHYTGESQLTEVLQNLGKDQYPQQSLEQIGTRIAKVLEKNQTSWVLSSMAALYWRVKGQGKKAIDCLRQALHYAPHQMKDVPLISLANILHNAKLWNDAVIVATMAVEIAPHFAVNHFTLGNVYVAMEEFEKALVWYESTLKLQPEFVPAKNRIQTIQCHLMLKKGRRSP

SEQ ID NO: 888918 - protein, 197 aa, Homo sapiens
MEPLCNGNLPTSMHTLDHLHGVSNRASLHYTGESQLTEVLQNLGKDQYPQQSLEQIGTRIAKVLEKNQTSWVLSSMAALYWRVKGQGKKAIDCLRQALHYAPHQMKDVPLISLANILHNAKLWNDAVIVATMAVEIAPHFAVNHFTLGNVYVAMEEFEKALVWYESTLKLQPEFVPAKNRIQTIQCHLMLKKGRRSP

SEQ ID NO: 888919 - protein, 122 aa, Homo sapiens
MAALYWRVKGQGKKAIDCLRQALHYAPHQMKDVPLISLANILHNAKLWNDAVIVATMAVEIAPHFAVNHFTLGNVYVAMEEFEKALVWYESTLKLQPEFVPAKNRIQTIQCHLMLKKGRRSP

SEQ ID NO: 888920 - protein, 963 aa, Homo sapiens; identical to SEQ ID NO: 888911

SEQ ID NO: 888921 - protein, 115 aa, Homo sapiens
MITKNKNESSKPNFPFSPFSFFSQDVPLISLANILHNAKLWNDAVIVATMAVEIAPHFAVNHFTLGNVYVAMEEFEKALVWYESTLKLQPEFVPAKNRIQTIQCHLMLKKGRRSP

SEQ ID NO: 888922 - protein, 950 aa, Homo sapiens
RPGRGGKMAAAVGVRGRYELPPCSGPGWLLSLSALLSVAARGAFATTHWVVTEDGKIQQQVDSPMNLKHPHDLVILMRQEATVNYLKELEKQLVAQKIHIEENEDRDTGLEQRHNKEDPDCIKAKVPLGDLDLYDGTYITLESKDISPEDYIDTESPVPPDPEQPDCTKILELPYSIHAFQHLRGVQERVNLSAPLLPKEDPIFTYLSKRLGRSIDDIGHLIHEGLQKNTSSWVLYNMASFYWRIKNEPYQVVECAMRALHFSSRHNKDIALVNLANVLHRAHFSADAAVVVHAALDDSDFFTSYYTLGNIYAMLGEYNHSVLCYDHALQARPGFEQAIKRKHAVLCQQKLEQKLEAQHRSLQRTLNELKEYQKQHDHYLRQQEILEKHKLIQEEQILRNIIHETQMAKEAQLGNHQICRLVNQQHSLHCQWDQPVRYHRGDIFENVDYVQFGEDSSTSSMMSVNFDVQSNQSDINDSVKSSPVAHSILWIWGRDSDAYRDKQHILWPKRADCTESYPRVPVGGELPTYFLPPENKGLRIHELSSDDYSTEEEAQTPDCSITDFRKSHTLSYLVKELEVRMDLKAKMPDDHARKILLSRINNYTIPEEEIGSFLFHAINKPNAPIWLILNEAGLYWRAVGNSTFAIACLQRALNLAPLQYQDVPLVNLANLLIHYGLHLDATKLLLQALAINSSEPLTFLSLGNAYLALKNISGALEAFRQALKLTTKCPECENSLKLIRCMQFYPFLYNITSSVCSGNCHEKTLDNSHDKQKYFDNSQSLDAAEEEPSERGTEEDPVFSVENSGRDSDALRLESTVVEESNGSDEMENSDETKMSEEILALVDEFQQAWPLEGFGGALEMKGRRLDLQGIRVLKKGPQDGVARSSCYGDCRSEDDEATEWITFQVKRVKKPKGDHKKTPGKKVETGQIENGHRYQATRLEDQESAIDIM

SEQ ID NO: 888923 - protein, 963 aa, Homo sapiens; identical to SEQ ID NO: 888911

SEQ ID NO: 888924 - protein, 1138 aa, Homo sapiens
RPGRGGKMAAAVGVRGRYELPPCSGPGWLLSLSALLSVAARGAFATTHWVVTEDGKIQQQVDSPMNLKHPHDLVILMRQEATVNYLKELEKQLVAQKIHIEENEDRDTGLEQRHNKEDPDCIKAKVPLGDLDLYDGTYITLESKDISPEDYIDTESPVPPDPEQPDCTKILELPYSIHAFQHLRGVQERVNLSAPLLPKEDPIFTYLSKRLGRSIDDIGHLIHEGLQKNTSSWVLYNMASFYWRIKNEPYQVVECAMRALHFSSRHNKDIALVNLANVLHRAHFSADAAVVVHAALDDSDFFTSYYTLGNIYAMLGEYNHSVLCYDHALQARPGFEQAIKRKHAVLCQQKLEQKLEAQHRSLQRTLNELKEYQKQHDHYLRQQEILEKHKLIQEEQILRNIIHETQMAKEAQLGNHQICRLVNQQHSLHCQWDQPVRYHRGDIFENVDYVQFGEDSSTSSMMSVNFDVQSNQSDINDSVKSSPVAHSILWIWGRDSDAYRDKQHILWPKRADCTESYPRVPVGGELPTYFLPPENKGLRIHELSSDDYSTEEEAQTPDCSITDFRKSHTLSYLVKELEVRMDLKAKMPDDHARKILLSRINNYTIPEEEIGSFLFHAINKPNAPIWLILNEAGLYWRAVGNSTFAIACLQRALNLAPLQYQDVPLVNLANLLIHYGLHLDATKLLLQALAINSSEPLTFLSLGNAYLALKNISGALEAFRQALKLTTKCPECENSLKLIRCMQFYPFLYNITSSVCSGNCHEKTLDNSHDKQKYFDNSQSLDAAEEEPSERGTEEDPVFSVENSGRDSDALRLESTVVEESNGSDEMENSDETKMSEEILALVDEFQQAWPLEGFGGALEMKGRRLDLQGIRVLKKGPQDGVARSSCYGDCRSEDDEATEWITFQVKRVKKPKGDHKKTPGKKVETGQIENGHRYQANLEITGPKVASPGPQGKKRDYQRLGWPSPDECLKLRWVELTAIVSTWLAVSSKNIDITEHIDFATPIQQPAMEPLCNGNLPTSMHTLDHLHGVSNRASLHYTGESQLTEVLQNLGKDQYPQQSLEQIGTRIAKVLEKNQTSWVLSSMAALYWRVKGQGKKAIDCLRQALHYAPHQMKVSGTQKVGTSAPLSFPFPMVYSAL

SEQ ID NO: 888925 - protein, 950 aa, Homo sapiens; identical to SEQ ID NO: 888922

SEQ ID NO: 888926 - protein, 963 aa, Homo sapiens; identical to SEQ ID NO: 888911

SEQ ID NO: 888927 - protein, 933 aa, Homo sapiens
RPGRGGKMAAAVGVRGRYELPPCSGPGWLLSLSALLSVAARGAFATTHWVVTEDGKIQQQVDSPMNLKHPHDLVILMRQEATVNYLKELEKQLVAQKIHIEENEDRDTGLEQRHNKEDPDCIKAKVPLGDLDLYDGTYITLESKDISPEDYIDTESPVPPDPEQPDCTKILELPYSIHAFQHLRGVQERVNLSAPLLPKEDPIFTYLSKRLGRSIDDIGHLIHEGLQKNTSSWVLYNMASFYWRIKNEPYQVVECAMRALHFSSRHNKDIALVNLANVLHRAHFSADAAVVVHAALDDSDFFTSYYTLGNIYAMLGEYNHSVLCYDHALQARPGFEQAIKRKHAVLCQQKLEQKLEAQHRSLQRTLNELKEYQKQHDHYLRQQEILEKHKLIQEEQILRNIIHETQMAKEAQLGNHQICRLVNQQHSLHCQWDQPVRYHRGDIFENVDYVQFGEDSSTSSMMSVNFDVQSNQSDINDSVKSSPVAHSILWIWGRDSDAYRDKQHILWPKRADCTESYPRVPVGGELPTYFLPPENKGLRIHELSSDDYSTEEEAQTPDCSITDFRKSHTLSYLVKELEVRMDLKAKMPDDHARKILLSRINNYTIPEEEIGSFLFHAINKPNAPIWLILNEAGLYWRAVGNSTFAIACLQRALNLAPLQYQDVPLVNLANLLIHYGLHLDATKLLLQALAINSSEPLTFLSLGNAYLALKNISGALEAFRQALKLTTKCPECENSLKLIRCMQFYPFLYNITSSVCSGNCHEKTLDNSHDKQKYFDNSQSLDAAEEEPSERGTEEDPVFSVENSGRDSDALRLESTVVEESNGSDEMENSDETKMSEEILALVDEFQQAWPLEGFGGALEMKGRRLDLQGIRVLKKGPQDGVARSSCYGDCRSEDDEATEWPVPPLPSAVLKYHSSLNFKIKCHLFLVTFRQN

SEQ ID NO: 888928 - protein, 979 aa, Homo sapiens
RPGRGGKMAAAVGVRGRYELPPCSGPGWLLSLSALLSVAARGAFATTHWVVTEDGKIQQQVDSPMNLKHPHDLVILMRQEATVNYLKELEKQLVAQKIHIEENEDRDTGLEQRHNKEDPDCIKAKVPLGDLDLYDGTYITLESKDISPEDYIDTESPVPPDPEQPDCTKILELPYSIHAFQHLRGVQERVNLSAPLLPKEDPIFTYLSKRLGRSIDDIGHLIHEGLQKNTSSWVLYNMASFYWRIKNEPYQVVECAMRALHFSSRHNKDIALVNLANVLHRAHFSADAAVVVHAALDDSDFFTSYYTLGNIYAMLGEYNHSVLCYDHALQARPGFEQAIKRKHAVLCQQKLEQKLEAQHRSLQRTLNELKEYQKQHDHYLRQQEILEKHKLIQEEQILRNIIHETQMAKEAQLGNHQICRLVNQQHSLHCQWDQPVRYHRGDIFENVDYVQFGEDSSTSSMMSVNFDVQSNQSDINDSVKSSPVAHSILWIWGRDSDAYRDKQHILWPKRADCTESYPRVPVGGELPTYFLPPENKGLRIHELSSDDYSTEEEAQTPDCSITDFRKSHTLSYLVKELEVRMDLKAKMPDDHARKILLSRINNYTIPEEEIGSFLFHAINKPNAPIWLILNEAGLYWRAVGNSTFAIACLQRALNLAPLQYQDVPLVNLANLLIHYGLHLDATKLLLQALAINSSEPLTFLSLGNAYLALKNISGALEAFRQALKLTTKCPECENSLKLIRCMQFYPFLYNITSSVCSGNCHEKTLDNSHDKQKYFDNSQSLDAAEEEPSERGTEEDPVFSVENSGRDSDALRLESTVVEESNGSDEMENSDETKMSEEILALVDEFQQAWPLEGFGGALEMKGRRLDLQGIRVLKKGPQDGVARSSCYGDCRSEDDEATEWITFQVKRVKKPKGDHKKTPGKKVETGQIENGHRYQANLEITGPKVASPGPQGKFECLICQFLVLDVTISFLTKVVFVT

SEQ ID NO: 888929 - protein, 732 aa, Homo sapiens
RPGRGGKMAAAVGVRGRYELPPCSGPGWLLSLSALLSVAARGAFATTHWVVTEDGKIQQQVDSPMNLKHPHDLVILMRQEATVNYLKELEKQLVAQKIHIEENEDRDTGLEQRHNKEDPDCIKAKVPLGDLDLYDGTYITLESKDISPEDYIDTESPVPPDPEQPDCTKILELPYSIHAFQHLRGVQERVNLSAPLLPKEDPIFTYLSKRLGRSIDDIGHLIHEGLQKNTSSWVLYNMASFYWRIKNEPYQVVECAMRALHFSSRHNKDIALVNLANVLHRAHFSADAAVVVHAALDDSDFFTSYYTLGNIYAMLGEYNHSVLCYDHALQARPGFEQAIKRKHAVLCQQKLEQKLEAQHRSLQRTLNELKEYQKQHDHYLRQQEILEKHKLIQEEQILRNIIHETQMAKEAQLGNHQICRLVNQQHSLHCQWDQPVRYHRGDIFENVDYVQFGEDSSTSSMMSVNFDVQSNQSDINDSVKSSPVAHSILWIWGRDSDAYRDKQHILWPKRADCTESYPRVPVGGELPTYFLPPENKGLRIHELSSDDYSTEEEAQTPDCSITDFRKSHTLSYLVKELEVRMDLKAKMPDDHARKILLSRINNYTIPEEEIGSFLFHAINKPNAPIWLILNEAGLYWRAVGNSTFAIACLQRALNLAPLQYQDVPLVNLANLLIHYGLHLDATKLLLQALAINSSEPLTFLSLGNAYLALKNISGALEAFRQALKLTTKCPEC

SEQ ID NO: 888930 - protein, 732 aa, Homo sapiens; identical to SEQ ID NO: 888929

SEQ ID NO: 888931 - protein, 484 aa, Homo sapiens
RPGRGGKMAAAVGVRGRYELPPCSGPGWLLSLSALLSVAARGAFATTHWVVTEDGKIQQQVDSPMNLKHPHDLVILMRQEATVNYLKELEKQLVAQKIHIEENEDRDTGLEQRHNKEDPDCIKAKVPLGDLDLYDGTYITLESKDISPEDYIDTESPVPPDPEQPDCTKILELPYSIHAFQHLRGVQERVNLSAPLLPKEDPIFTYLSKRLGRSIDDIGHLIHEGLQKNTSSWVLYNMASFYWRIKNEPYQVVECAMRALHFSSRHNKDIALVNLANVLHRAHFSADAAVVVHAALDDSDFFTSYYTLGNIYAMLGEYNHSVLCYDHALQARPGFEQAIKRKHAVLCQQKLEQKLEAQHRSLQRTLNELKEYQKQHDHYLRQQEILEKHKLIQEEQILRNIIHETQMAKEAQLGNHQICRLVNQQHSLHCQWDQPVRYHRGDIFENVDYVQVFFLVQSNSYKRLLYKDFLKLLFFLLILCIFDP

SEQ ID NO: 888932 - protein, 475 aa, Homo sapiens
RPGRGGKMAAAVGVRGRYELPPCSGPGWLLSLSALLSVAARGAFATTHWVVTEDGKIQQQVDSPMNLKHPHDLVILMRQEATVNYLKELEKQLVAQKIHIEENEDRDTGLEQRHNKEDPDCIKAKVPLGDLDLYDGTYITLESKDISPEDYIDTESPVPPDPEQPDCTKILELPYSIHAFQHLRGVQERVNLSAPLLPKEDPIFTYLSKRLGRSIDDIGHLIHEGLQKNTSSWVLYNMASFYWRIKNEPYQVVECAMRALHFSSRHNKDIALVNLANVLHRAHFSADAAVVVHAAYYTLGNIYAMLGEYNHSVLCYDHALQARPGFEQAIKRKHAVLCQQKLEQKLEAQHRSLQRTLNELKEYQKQHDHYLRQQEILEKHKLIQEEQILRNIIHETQMAKEAQLGNHQICRLVNQQHSLHCQWDQPVRYHRGDIFENVDYVQVFFLVQSNSYKRLLYKDFLKLLFFLLILCIFDP

SEQ ID NO: 888933 - protein, 239 aa, Homo sapiens
RPGRGGKMAAAVGVRGRYELPPCSGPGWLLSLSALLSVAARGAFATTHWVVTEDGKIQQQVDSPMNLKHPHDLVILMRQEATVNYLKELEKQLVAQKIHIEENEDRDTGLEQRHNKEDPDCIKAKVPLGDLDLYDGTYITLESKDISPEDYIDTESPVPPDPEQPDCTKILELPYSIHAFQHLRGVQERVNLSAPLLPKEDPIFTYLSKRLGRSIDDIGHLIHEGLQKVSHQSLKEPAG

SEQ ID NO: 888934 - protein, 265 aa, Homo sapiens
RPGRGGKMAAAVGVRGRYELPPCSGPGWLLSLSALLSVAARGAFATTHWVVTEDGKIQQQVDSPMNLKHPHDLVILMRQEATVNYLKELEKQLVAQKIHIEENEDRDTGLEQRHNKEDPDCIKAKVPLGDLDLYDGTYITLESKDISPEDYIDTESPVPPDPEQPDCTKILELPYSIHAFQHLRGVQERVNLSAPLLPKEDPIFTYLSKRLGRSIDDIGHLIHEGLQKNTSSWVLYNMASFYWRIKNEPYQVVECAMRALHFSSR

SEQ ID NO: 888935 - protein, 233 aa, Homo sapiens
RPGRGGKMAAAVGVRGRYELPPCSGPGWLLSLSALLSVAARGAFATTHWVVTEDGKIQQQVDSPMNLKHPHDLVILMRQEATVNYLKELEKQLVAQKIHIEENEDRDTGLEQRHNKEDPDCIKAKVPLGDLDLYDGTYITLESKDISPEDYIDTESPVPPDPEQPDCTKILELPYSIHAFQHLRGVQERVNLSAPLLPKEDPIFTYLSKRPACTSNSFLLFVNSYNIKSAIQN

SEQ ID NO: 888936 - protein, 100 aa, Homo sapiens
RPGRGGKMAAAVGVRGRYELPPCSGPGWLLSLSALLSVAARGAFATTHWVVTEDGKIQQQFSQEPMRISLKSGSWAAIFANLYFSKPQRRCKPMMVRLES

SEQ ID NO: 888937 - protein, 1867 aa, Homo sapiens
GSLKNAGDTLTSLVLPTSEFYTSGMYCEDPNMSLCTNCFNFVFDLGWYRGYTLRKKSKKGIFPASYIHLKEAIVEGKGQHETVIPGDLPLIQEVTTTLREWSTIWRQLYVQDNREMFRSVRHMIYDLIEWRSQILSGTLPQDELKELKKKVTAKIDYGNRILDLDLVVRDEDGNILDPELTSTISLFRAHEIASKQVEERLQEEKSQKQNIDINRQAKFAATPSLALFVNLKNVVCKIGEDAEVLMSLYDPVESKFISENYLVRWSSSGLPKDIDRLHNLRAVFTDLGSKDLKREKISFVCQIVRVGRMELRDNNTRKLTSGLRRPFGVAVMDVTDIINGKVDDEDKQHFIPFQPVAGENDFLQTVINKVIAAKEVNHKGQGLWVTLKLLPGDIHQIRKEFPHLVDRTTAVARKTGFPEIIMPGDVRNDIYVTLVQGDFDKGSKTTAKNVEVTVSVYDEDGKRLEHVIFPGAGDEAISEYKSVIYYQVKQPRWFETVKVAIPIEDVNRSHLRFTFRHRSSQDSKDKSEKIFALAFVKLMRYDGTTLRDGEHDLIVYKAEAKKLEDAATYLSLPSTKAELEEKGHSATGKSMQSLGSCTISKDSFQISTLVCSTKLTQNVDLLGLLKWRSNTSLLQQNLRQLMKVDGGEVVKFLQDTLDALFNIMMENSESETFDTLVFDALVFIIGLIADRKFQHFNPVLETYIKKHFSATLAYTKLTKVLKNYVDGAEKPGVNEQLYKAMKALESIFKFIVRSRILFNQLYENKGEADFVESLLQLFRSINDMMSSMSDQTVRVKGAALKYLPTIVNDVKLVFDPKELSKMFTEFILNVPMGLLTIQKLYCLIEIVHSDLFTQHDCREILLPMMTDQLKYHLERQEDLEACCQLLSHILEVLYRKDVGPTQRHVQIIMEKLLRTVNRTVISMGRDSELIGNFVACMTAILRQMEDYHYAHLIKTFGKMRTDVVDFLMETFIMFKNLIGKNVYPFDWVIMNMVQNKVFLRAINQYADMLNKKFLDQANFELQLWNNYFHLAVAFLTQESLQLENFSSAKRAKILNKYGDMRRQIGFEIRDMWYNLGQHKIKFIPEMVGPILEMTLIPETELRKATIPIFFDMMQCEFHSTRSFQMFENEIITKLDHEVEGGRGDEQYKVLFDKILLEHCRKHKYLAKTGETFVKLVVRLMERLLDYRTIMHDENKENRMSCTVNVLNFYKEIEREEMYIRYLYKLCDLHKECDNYTEAAYTLLLHAKLLKWSEDVCVAHLTQRDGYQATTQGQLKEQLYQEIIHYFDKGKMWEEAIALGKELAEQYENEMFDYEQLSELLKKQAQFYENIVKVIRPKPDYFAVGYYGQGFPTFLRGKVFIYRGKEYERREDFEARLLTQFPNAEKMKTTSPPGDDIKNSPGQYIQCFTVKPKLDLPPKFHRPVSEQIVSFYRVNEVQRFEYSRPIRKGEKNPDNEFANMWIERTIYTTAYKLPGILRWFEVKSVFMVEISPLENAIETMQLTNDKINSMVQQHLDDPSLPINPLSMLLNGIVDPAVMGGFANYEKAFFTDRYLQEHPEAHEKIEKLKDLIAWQIPFLAEGIRIHGDKVTEALRPFHERMEACFKQLKEKVEKEYGVRIMPSSLDDRRGSRPRSMVRSFTMPSSSRPLSVASVSSLSSDSTPSRPGSDGFALEPLLPKKMHSRSQDKLDKDDLEKEKKDKKKEKRNSKHQEIFEKEFKPTDISLQQSEAVILSETISPLRPQRPKSQVMNVIGSERRFSVSPSSPSSQQTPPPVTPRAKLSFSMQSSLELNGMTGADVADVPPPLPLKGSVADYGNLMENQDLLGSPTPPPPPPHQRHLPPPLPSKTPPPPPPKTTRKQTSVDSGIVQ

SEQ ID NO: 888938 - protein, 1857 aa, Homo sapiens
GSLKNAGDTLTSLVLPTSEFYTSGMYCEDPNMSLCTNCFNFVFDLGWYRGYTLRKKSKKGIFPASYIHLKEAIVEGKGQHETVIPGDLPLIQEVTTTLREWSTIWRQLYVQDNREMFRSVRHMIYDLIEWRSQILSGTLPQDELKELKKKVTAKIDYGNRILDLDLVVRDEDGNILDPELTSTISLFRAHEIASKQVEERLQEEKSQKQNIDINRQAKFAATPSLALFVNLKNVVCKIGEDAEVLMSLYDPVESKFISENYLVRWSSSGLPKDIDRLHNLRAVFTDLGSKDLKREKISFVCQIVRVGRMELRDNNTRKLTSGLRRPFGVAVMDVTDIINGKVDDEDKQHFIPFQPVAGENDFLQTVINKVIAAKEVNHKGQGLWVTLKLLPGDIHQIRKEFPHLVDRTTAVARKTGFPEIIMPGDVRNDIYVTLVQGDFDKGSKTTAKNVEVTVSVYDEDGKRLEHVIFPGAGDEAISEYKSVIYYQVKQPRWFETVKVAIPIEDVNRSHLRFTFRHRSSQDSKDKSEKIFALAFVKLMRYDGTTLRDGEHDLIVYKAEAKKLEDAATYLSLPSTKAELEEKGHSATGKSMQSLGSCTISKDSFQISTLVCSTKLTQNVDLLGLLKWRSNTSLLQQNLRQLMKVDGGEVVKFLQDTLDALFNIMMENSESETFDTLVFDALVFIIGLIADRKFQHFNPVLETYIKKHFSATLAYTKLTKVLKNYVDGAEKPGVNEQLYKAMKALESIFKFIVRSRILFNQLYENKGEADFVESLLQLFRSINDMMSSMSDQTVRVKGAALKYLPTIVNDVKLVFDPKELSKMFTEFILNVPMGLLTIQKLYCLIEIVHSDLFTQHDCREILLPMMTDQLKYHLERQEDLEACCQLLSHILEVLYRKDVGPTQRHVQIIMEKLLRTVNRTVISMGRDSELIGNFVACMTAILRQMEDYHYAHLIKTFGKMRTDVVDFLMETFIMFKNLIGKNVYPFDWVIMNMVQNKVFLRAINQYADMLNKKFLDQANFELQLWNNYFHLAVAFLTQESLQLENFSSAKRAKILNKYGDMRRQIGFEIRDMWYNLGQHKIKFIPEMVGPILEMTLIPETELRKATIPIFFDMMQCEFHSTRSFQMFENEIITKLDHEVEGGRGDEQYKVLFDKILLEHCRKHKYLAKTGETFVKLVVRLMERLLDYRTIMHDENKENRMSCTVNVLNFYKEIEREEMYIRYLYKLCDLHKECDNYTEAAYTLLLHAKLLKWSEDVCVAHLTQRDGYQATTQGQLKEQLYQEIIHYFDKGKMWEEAIALGKELAEQYENEMFDYEQLSELLKKQAQFYENIVKVIRPKPDYFAVGYYGQGFPTFLRGKVFIYRGKEYERREDFEARLLTQFPNAEKMKTTSPPGDDIKNSPGQYIQCFTVKPKLDLPPKFHRPVSEQIVSFYRVNEVQRFEYSRPIRKGEKNPDNEFANMWIERTIYTTAYKLPGILRWFEVKSVFMVEISPLENAIETMQLTNDKINSMVQQHLDDPSLPINPLSMLLNGIVDPAVMGGFANYEKAFFTDRYLQEHPEAHEKIEKLKDLIAWQIPFLAEGIRIHGDKVTEALRPFHERMEACFKQLKEKPSSLDDRRGSRPRSMVRSFTMPSSSRPLSVASVSSLSSDSTPSRPGSDGFALEPLLPKKMHSRSQDKLDKDDLEKEKKDKKKEKRNSKHQEIFEKEFKPTDISLQQSEAVILSETISPLRPQRPKSQVMNVIGSERRFSVSPSSPSSQQTPPPVTPRAKLSFSMQSSLELNGMTGADVADVPPPLPLKGSVADYGNLMENQDLLGSPTPPPPPPHQRHLPPPLPSKTPPPPPPKTTRKQTSVDSGIVQ

SEQ ID NO: 888939 - protein, 1849 aa, Homo sapiens
GSLKNAGDTLTSLVLPTSEFYTSGMYCEDPNMSLCTNCFNFVFDLGWYRGYTLRKKSKKGIFPASYIHLKEAIVEGKGQHETVIPGDLPLIQEVTTTLREWSTIWRQLYVQDNREMFRSVRHMIYDLIEWRSQILSGTLPQDELKELKKKVTAKIDYGNRILDLDLVVRDEDGNILDPELTSTISLFRAHEIASKQVEERLQEEKSQKQNIDINRQAKFAATPSLALFVNLKNVVCKIGEDAEVLMSLYDPVESKFISENYLVRWSSSGLPKDIDRLHNLRAVFTDLGSKDLKREKISFVCQIVRVGRMELRDNNTRKLTSGLRRPFGVAVMDVTDIINGKVDDEDKQHFIPFQPVAGENDFLQTVINKVIAAKEVNHKGQGLWVTLKLLPGDIHQIRKEFPHLVDRTTAVARKTGFPEIIMPGDVRNDIYVTLVQGDFDKGSKTTAKNVEVTVSVYDEDGKRLEHVIFPGAGDEAISEYKSVIYYQVKQPRWFETVKVAIPIEDVNRSHLRFTFRHRSSQDSKDKSEKIFALAFVKLMRYDGTTLRDGEHDLIVYKAEAKKLEDAATYLSLPSTKAELEEKGHSATGKSMQSLGSCTISKDSFQISTLVCSTKLTQNVDLLGLLKWRSNTSLLQQNLRQLMKVDGGEVVKFLQDTLDALFNIMMENSESETFDTLVFDALVFIIGLIADRKFQHFNPVLETYIKKHFSATLAYTKLTKVLKNYVDGAEKPGVNEQLYKAMKALESIFKFIVRSRILFNQLYENKGEADFVESLLQLFRSINDMMSSMSDQTVRVKGAALKYLPTIVNDVKLVFDPKELSKMFTEFILNVPMGLLTIQKLYCLIEIVHSDLFTQHDCREILLPMMTDQLKYHLERQEDLEACCQLLSHILEVLYRKDVGPTQRHVQIIMEKLLRTVNRTVISMGRDSELIGNFVACMTAILRQMEDYHYAHLIKTFGKMRTDVVDFLMETFIMFKNLIGKNVYPFDWVIMNMVQNKVFLRAINQYADMLNKKFLDQANFELQLWNNYFHLAVAFLTQESLQLENFSSAKRAKILNKYGDMRRQIGFEIRDMWYNLGQHKIKFIPEMVGPILEMTLIPETELRKATIPIFFDMMQCEFHSTRSFQMFENEIITKLDHEVEGGRGDEQYKVLFDKILLEHCRKHKYLAKTGETFVKLVVRLMERLLDYRTIMHDENKENRMSCTVNVLNFYKEIEREEMYIRYLYKLCDLHKECDNYTEAAYTLLLHAKLLKWSEDVCVAHLTQRDGYQATTQGQLKEQLYQEIIHYFDKGKMWEEAIALGKELAEQYENEMFDYEQLSELLKKQAQFYENIVKVIRPKPDYFAVGYYGQGFPTFLRGKVFIYRGKEYERREDFEARLLTQFPNAEKMKTTSPPGDDIKNSPGQYIQCFTVKPKLDLPPKFHRPVSEQIVSFYRVNEVQRFEYSRPIRKGEKNPDNEFANMWIERTIYTTAYKLPGILRWFEVKSVFMVEISPLENAIETMQLTNDKINSMVQQHLDDPSLPINPLSMLLNGIVDPAVMGGFANYEKAFFTDRYLQEHPEAHEKIEKLKDLIAWQIPFLAEGIRIHGDKVTEALRPFHERMEACFKQLKEKVEKEYGVRIMPSSLDDRRGSRPRSMVRSFTMPSSSRPLSVASVSSLSSDSTPSRPGSDGFALEPLLPKKMHSRSQDKLDKDDLEKEKKDKKKEKRNSKHQEIFEKEFKPTDISLQQSEAVILSETISPLRPQRPKSQVMNVIGSERRFSVSPSSPSSQQTPPPVTPRAKLSFSMQSSLELNGMTGADVADVPPPLPLKGSVADYGNLMENQDLLGSPTPPPPPPHQRHLPPPLPSSGIVQ

SEQ ID NO: 888940 - protein, 1867 aa, Homo sapiens; identical to SEQ ID NO: 888937

SEQ ID NO: 888941 - protein, 1414 aa, Homo sapiens
MFRSVRHMIYDLIEWRSQILSGTLPQDELKELKKKVTAKIDYGNRILDLDLVVRDEDGNILDPELTSTISLFRAHEIASKQVEERLQEEKSQKQNIDINRQAKFAATPSLALFVNLKNVVCKIGEDAEVLMSLYDPVESKFISENYLVRWSSSGLPKDIDRLHNLRAVFTDLGSKDLKREKISFVCQIVRVGRMELRDNNTRKLTSGLRRPFGVAVMDVTDIINGKVDDEDKQHFIPFQPVAGENDFLQTVINKVIAAKEVNHKGQGLWVTLKLLPGDIHQIRKEFPHLVDRTTAVARKTGFPEIIMPGDVRNDIYVTLVQGDFDKGSKTTAKNVEVTVSVYDEDGKRLEHVIFPGAGDEAISEYKSVIYYQVKQPRWFETVKVAIPIEDVNRSHLRFTFRHRSSQDSKDKSEKIFALAFVKLMRYDGTTLRDGEHDLIVYKAEAKKLEDAATYLSLPSTKAELEEKGHSATGKSMQSLGSCTISKDSFQISTLVCSTKLTQNVDLLGLLKWRSNTSLLQQNLRQLMKVDGGEVVKFLQDTLDALFNIMMENSESETFDTLVFDALVFIIGLIADRKFQHFNPVLETYIKKHFSATLAYTKLTKVLKNYVDGAEKPGVNEQLYKAMKALESIFKFIVRSRILFNQLYENKGEADFVESLLQLFRSINDMMSSMSDQTVRVKGAALKYLPTIVNDVKLVFDPKELSKMFTEFILNVPMGLLTIQKLYCLIEIVHSDLFTQHDCREILLPMMTDQLKYHLERQEDLEACCQLLSHILEVLYRKDVGPTQRHVQIIMEKLLRTVNRTVISMGRDSELIGNFVACMTAILRQMEDYHYAHLIKTFGKMRTDVVDFLMETFIMFKNLIGKNVYPFDWVIMNMVQNKVFLRAINQYADMLNKKFLDQANFELQLWNNYFHLAVAFLTQESLQLENFSSAKRAKILNKYGDMRRQIGFEIRDMWYNLGQHKIKFIPEMVGPILEMTLIPETELRKATIPIFFDMMQCEFHSTRSFQMFENEIITKLDHEVEGGRGDEQYKVLFDKILLEHCRKHKYLAKTGETFVKLVVRLMERLLDYRTIMHDENKENRMSCTVNVLNFYKEIEREEMYIRYLYKLCDLHKECDNYTEAAYTLLLHAKLLKWSEDVCVAHLTQRDGYQATTQGQLKEQLYQEIIHYFDKGKMWEEAIALGKELAEQYENEMFDYEQLSELLKKQAQFYENIVKVIRPKPDYFAVGYYGQGFPTFLRGKVFIYRGKEYERREDFEARLLTQFPNAEKMKTTSPPGDDIKNSPGQYIQCFTVKPKLDLPPKFHRPVSEQIVSFYRVNEVQRFEYSRPIRKGEKNPDNEFANMWIERTIYTTAYKLPGILRWFEVKSVFMVRMAPPQKELSVPFLNTVCHAFFTCSCPVVTVAACTQQTLQFP

SEQ ID NO: 888942 - protein, 983 aa, Homo sapiens
MFRSVRHMIYDLIEWRSQILSGTLPQDELKELKKKVTAKIDYGNRILDLDLVVRDEDGNILDPELTSTISLFRAHEIASKQVEERLQEEKSQKQNIDINRQAKFAATPSLALFVNLKNVVCKIGEDAEVLMSLYDPVESKFISENYLVRWSSSGLPKDIDRLHNLRAVFTDLGSKDLKREKISFVCQIVRVGRMELRDNNTRKLTSGLRRPFGVAVMDVTDIINGKVDDEDKQHFIPFQPVAGENDFLQTVINKVIAAKEVNHKGQGLWVTLKLLPGDIHQIRKEFPHLVDRTTAVARKTGFPEIIMPGDVRNDIYVTLVQGDFDKGSKTTAKNVEVTVSVYDEDGKRLEHVIFPGAGDEAISEYKSVIYYQVKQPRWFETVKVAIPIEDVNRSHLRFTFRHRSSQDSKDKSEKIFALAFVKLMRYDGTTLRDGEHDLIVYKAEAKKLEDAATYLSLPSTKAELEEKGHSATGKSMQSLGSCTISKDSFQISTLVCSTKLTQNVDLLGLLKWRSNTSLLQQNLRQLMKVDGGEVVKFLQDTLDALFNIMMENSESETFDTLVFDALVFIIGLIADRKFQHFNPVLETYIKKHFSATLAYTKLTKVLKNYVDGAEKPGVNEQLYKAMKALESIFKFIVRSRILFNQLYENKGEADFVESLLQLFRSINDMMSSMSDQTVRVKGAALKYLPTIVNDVKLVFDPKELSKMFTEFILNVPMGLLTIQKLYCLIEIVHSDLFTQHDCREILLPMMTDQLKYHLERQEDLEACCQLLSHILEVLYRKDVGPTQRHVQIIMEKLLRTVNRTVISMGRDSELIGNFVACMTAILRQMEDYHYAHLIKTFGKMRTDVVDFLMETFIMFKNLIGKNVYPFDWVIMNMVQNKVFLRAINQYADMLNKKFLDQANFELQLWNNYFHLAVAFLTQESLQLENFSSAKRAKILNKSFEWTEAAPSIIVNKPLQSSMKAEILAGPSSSVTPVCIMHRS

SEQ ID NO: 888943 - protein, 912 aa, Homo sapiens
MFRSVRHMIYDLIEWRSQILSGTLPQDELKELKKKVTAKIDYGNRILDLDLVVRDEDGNILDPELTSTISLFRAHEIASKQVEERLQEEKSQKQNIDINRQAKFAATPSLALFVNLKNVVCKIGEDAEVLMSLYDPVESKFISENYLVRWSSSGLPKDIDRLHNLRAVFTDLGSKDLKREKISFVCQIVRVGRMELRDNNTRKLTSGLRRPFGVAVMDVTDIINGKVDDEDKQHFIPFQPVAGENDFLQTVINKVIAAKEVNHKGQGLWVTLKLLPGDIHQIRKEFPHLVDRTTAVARKTGFPEIIMPGDVRNDIYVTLVQGDFDKGSKTTAKNVEVTVSVYDEDGKRLEHVIFPGAGDEAISEYKSVIYYQVKQPRWFETVKVAIPIEDVNRSHLRFTFRHRSSQDSKDKSEKIFALAFVKLMRYDGTTLRDGEHDLIVYKAEAKKLEDAATYLSLPSTKAELEEKGHSATGKSMQSLGSCTISKDSFQISTLVCSTKLTQNVDLLGLLKWRSNTSLLQQNLRQLMKVDGGEVVKFLQDTLDALFNIMMENSESETFDTLVFDALVFIIGLIADRKFQHFNPVLETYIKKHFSATLAYTKLTKVLKNYVDGAEKPGVNEQLYKAMKALESIFKFIVRSRILFNQLYENKGEADFVESLLQLFRSINDMMSSMSDQTVRVKGAALKYLPTIVNDVKLVFDPKELSKMFTEFILNVPMGLLTIQKLYCLIEIVHSDLFTQHDCREILLPMMTDQLKYHLERQEDLEACCQLLSHILEVLYRKDVGPTQRHVQIIMEKLLRTVNRTVISMGRDSELIGNFVACMTAILRQMEDYHYAHLIKTFGKMRTDVVDFLMETFIMFKNLIGKNVYPFDWVIMNMVQNNQLHDISSITTAGEWRKAAVHDYLLFCGQPFP

SEQ ID NO: 888944 - protein, 346 aa, Homo sapiens
GSLKNAGDTLTSLVLPTSEFYTSGMYCEDPNMSLCTNCFNFVFDLGWYRGYTLRKKSKKGIFPASYIHLKEAIVEGKGQHETVIPGDLPLIQEVTTTLREWSTIWRQLYVQDNREMFRSVRHMIYDLIEWRSQILSGTLPQDELKELKKKVTAKIDYGNRILDLDLVVRDEDGNILDPELTSTISLFRAHEIASKQVEERLQEEKSQKQNIDINRQAKFAATPSLALFVNLKNVVCKIGEDAEVLMSLYDPVESKFISENYLVRWSSSGLPKDIDRLHNLRAVFTDLGSKDLKREKISFVCQIVRVGRMELRDNNTRKLTSGLRRPFGVAVMDVTDIINLGLMVLE

SEQ ID NO: 888945 - protein, 137 aa, Homo sapiens
MFRSVRHMIYDLIEWRSQILSGTLPQDELKELKKKVTAKIDYGNRILDLDLVVRDEDGNILDPELTSTISLFRAHEIASKQVEERLQEEKSQKQNIDINRQAKFAATPSLALFVNLKNVVCKIGEETQLPEKKRNYL

SEQ ID NO: 888946 - protein, 1872 aa, Homo sapiens
TSGSGGAMTRWVPTKREEKYGVAFYNYDARGADELSLQIGDTVHILETYEGWYRGYTLRKKSKKGIFPASYIHLKEAIVEGKGQHETVIPGDLPLIQEVTTTLREWSTIWRQLYVQDNREMFRSVRHMIYDLIEWRSQILSGTLPQDELKELKKKVTAKIDYGNRILDLDLVVRDEDGNILDPELTSTISLFRAHEIASKQVEERLQEEKSQKQNIDINRQAKFAATPSLALFVNLKNVVCKIGEDAEVLMSLYDPVESKFISENYLVRWSSSGLPKDIDRLHNLRAVFTDLGSKDLKREKISFVCQIVRVGRMELRDNNTRKLTSGLRRPFGVAVMDVTDIINGKVDDEDKQHFIPFQPVAGENDFLQTVINKVIAAKEVNHKGQGLWVTLKLLPGDIHQIRKEFPHLVDRTTAVARKTGFPEIIMPGDVRNDIYVTLVQGDFDKGSKTTAKNVEVTVSVYDEDGKRLEHVIFPGAGDEAISEYKSVIYYQVKQPRWFETVKVAIPIEDVNRSHLRFTFRHRSSQDSKDKSEKIFALAFVKLMRYDGTTLRDGEHDLIVYKAEAKKLEDAATYLSLPSTKAELEEKGHSATGKSMQSLGSCTISKDSFQISTLVCSTKLTQNVDLLGLLKWRSNTSLLQQNLRQLMKVDGGEVVKFLQDTLDALFNIMMENSESETFDTLVFDALVFIIGLIADRKFQHFNPVLETYIKKHFSATLAYTKLTKVLKNYVDGAEKPGVNEQLYKAMKALESIFKFIVRSRILFNQLYENKGEADFVESLLQLFRSINDMMSSMSDQTVRVKGAALKYLPTIVNDVKLVFDPKELSKMFTEFILNVPMGLLTIQKLYCLIEIVHSDLFTQHDCREILLPMMTDQLKYHLERQEDLEACCQLLSHILEVLYRKDVGPTQRHVQIIMEKLLRTVNRTVISMGRDSELIGNFVACMTAILRQMEDYHYAHLIKTFGKMRTDVVDFLMETFIMFKNLIGKNVYPFDWVIMNMVQNKVFLRAINQYADMLNKKFLDQANFELQLWNNYFHLAVAFLTQESLQLENFSSAKRAKILNKYGDMRRQIGFEIRDMWYNLGQHKIKFIPEMVGPILEMTLIPETELRKATIPIFFDMMQCEFHSTRSFQMFENEIITKLDHEVEGGRGDEQYKVLFDKILLEHCRKHKYLAKTGETFVKLVVRLMERLLDYRTIMHDENKENRMSCTVNVLNFYKEIEREEMYIRYLYKLCDLHKECDNYTEAAYTLLLHAKLLKWSEDVCVAHLTQRDGYQATTQGQLKEQLYQEIIHYFDKGKMWEEAIALGKELAEQYENEMFDYEQLSELLKKQAQFYENIVKVIRPKPDYFAVGYYGQGFPTFLRGKVFIYRGKEYERREDFEARLLTQFPNAEKMKTTSPPGDDIKNSPGQYIQCFTVKPKLDLPPKFHRPVSEQIVSFYRVNEVQRFEYSRPIRKGEKNPDNEFANMWIERTIYTTAYKLPGILRWFEVKSVFMVEISPLENAIETMQLTNDKINSMVQQHLDDPSLPINPLSMLLNGIVDPAVMGGFANYEKAFFTDRYLQEHPEAHEKIEKLKDLIAWQIPFLAEGIRIHGDKVTEALRPFHERMEACFKQLKEKVEKEYGVRIMPSSLDDRRGSRPRSMVRSFTMPSSSRPLSVASVSSLSSDSTPSRPGSDGFALEPLLPKKMHSRSQDKLDKDDLEKEKKDKKKEKRNSKHQEIFEKEFKPTDISLQQSEAVILSETISPLRPQRPKSQVMNVIGSERRFSVSPSSPSSQQTPPPVTPRAKLSFSMQSSLELNGMTGADVADVPPPLPLKGSVADYGNLMENQDLLGSPTPPPPPPHQRHLPPPLPSKTPPPPPPKTTRKQTSVDSGIVQ

SEQ ID NO: 888947 - protein, 1861 aa, Homo sapiens
GSLKNAGDTLTSLVLPTSEFYTSGMYCEDPNMSLCTNCFNFVFDLGWYRGYTLRKKSKKGIFPASYIHLKEAIVEGKGQHETVIPGDLPLIQEVTTTLREWSTIWRQLYVQDNREMFRSVRHMIYDLIEWRSQILSGTLPQDELKELKKKVTAKIDYGNRILDLDLVVRDEDGNILDPELTSTISLFRAHEIASKQVEERLQEEKSQKQNIDINRQAKFAATPSLALFVNLKNVVCKIGEDAEVLMSLYDPVESKFISENYLVRWSSSGLPKDIDRLHNLRAVFTDLGSKDLKREKISFVCQIVRVGRMELRDNNTRKLTSGLRRPFGVAVMDVTDIINGKVDDEDKQHFIPFQPVAGENDFLQTVINKVIAAKEVNHKGQGLWVTLKLLPGDIHQIRKEFPHLVDRTTAVARKTGFPEIIMPGDVRNDIYVTLVQGDFDKGSKTTAKNVEVTVSVYDEDGKRLEHVIFPGAGDEAISEYKSVIYYQVKQPRWFETVKVAIPIEDVNRSHLRFTFRHRSSQDSKDKSEKIFALAFVKLMRYDGTTLRDGEHDLIVYKAEAKKLEDAATYLSLPSTKAELEEKGHSATGKSMQSLGSCTISKDSFQISTLVCSTKLTQNVDLLGLLKWRSNTSLLQQNLRQLMKVDGGEVVKFLQDTLDALFNIMMENSESETFDTLVFDALVFIIGLIADRKFQHFNPVLETYIKKHFSATLAYTKLTKVLKNYVDGAEKPGVNEQLYKAMKALESIFKFIVRSRILFNQLYENKGEADFVESLLQLFRSINDMMSSMSDQTVRVKGAALKYLPTIVNDVKLVFDPKELSKMFTEFILNVPMGLLTIQKLYCLIEIVHSDLFTQHDCREILLPMMTDQLKYHLERQEDLEACCQLLSHILEVLYRKDVGPTQRHVQIIMEKLLRTVNRTVISMGRDSELIGNFVACMTAILRQMEDYHYAHLIKTFGKMRTDVVDFLMETFIMFKNLIGKNVYPFDWVIMNMVQNKVFLRAINQYADMLNKKFLDQANFELQLWNNYFHLAVAFLTQESLQLENFSSAKRAKILNKYGDMRRQIGFEIRDMWYNLGQHKIKFIPEMVGPILEMTLIPETELRKATIPIFFDMMQCEFHSTRSFQMFENEIITKLDHEVEGGRGDEQYKVLFDKILLEHCRKHKYLAKTGETFVKLVVRLMERLLDYRTIMHDENKENRMSCTVNVLNFYKEIEREEMYIRYLYKLCDLHKECDNYTEAAYTLLLHAKLLKWSEDVCVAHLTQRDGYQATTQGQLKEQLYQEIIHYFDKGKMWEEAIALGKELAEQYENEMFDYEQLSELLKKQAQFYENIVKVIRPKPDYFAVGYYGQGFPTFLRGKVFIYRGKEYERREDFEARLLTQFPNAEKMKTTSPPGDDIKNSPGQYIQCFTVKPKLDLPPKFHRPVFYRVNEVQRFEYSRPIRKGEKNPDNEFANMWIERTIYTTAYKLPGILRWFEVKSVFMVEISPLENAIETMQLTNDKINSMVQQHLDDPSLPINPLSMLLNGIVDPAVMGGFANYEKAFFTDRYLQEHPEAHEKIEKLKDLIAWQIPFLAEGIRIHGDKVTEALRPFHERMEACFKQLKEKVEKEYGVRIMPSSLDDRRGSRPRSMVRSFTMPSSSRPLSVASVSSLSSDSTPSRPGSDGFALEPLLPKKMHSRSQDKLDKDDLEKEKKDKKKEKRNSKHQEIFEKEFKPTDISLQQSEAVILSETISPLRPQRPKSQVMNVIGSERRFSVSPSSPSSQQTPPPVTPRAKLSFSMQSSLELNGMTGADVADVPPPLPLKGSVADYGNLMENQDLLGSPTPPPPPPHQRHLPPPLPSKTPPPPPPKTTRKQTSVDSGIVQ

SEQ ID NO: 888948 - protein, 819 aa, Homo sapiens
MFRSVRHMIYDLIEWRSQILSGTLPQDELKELKKKVTAKIDYGNRILDLDLVVRDEDGNILDPELTSTISLFRAHEIASKQVEERLQEEKSQKQNIDINRQAKFAATPSLALFVNLKNVVCKIGEDAEVLMSLYDPVESKFISENYLVRWSSSGLPKDIDRLHNLRAVFTDLGSKDLKREKISFVCQIVRVGRMELRDNNTRKLTSGLRRPFGVAVMDVTDIINGKVDDEDKQHFIPFQPVAGENDFLQTVINKVIAAKEVNHKGQGLWVTLKLLPGDIHQIRKEFPHLVDRTTAVARKTGFPEIIMPGDVRNDIYVTLVQGDFDKGSKTTAKNVEVTVSVYDEDGKRLEHVIFPGAGDEAISEYKSVIYYQVKQPRWFETVKVAIPIEDVNRSHLRFTFRHRSSQDSKDKSEKIFALAFVKLMRYDGTTLRDGEHDLIVYKAEAKKLEDAATYLSLPSTKAELEEKGHSATGKSMQSLGSCTISKDSFQISTLVCSTKLTQNVDLLGLLKWRSNTSLLQQNLRQLMKVDGGEVVKFLQDTLDALFNIMMENSESETFDTLVFDALVFIIGLIADRKFQHFNPVLETYIKKHFSATLAYTKLTKVLKNYVDGAEKPGVNEQLYKAMKALESIFKFIVRSRILFNQLYENKGEADFVESLLQLFRSINDMMSSMSDQTVRVKGAALKYLPTIVNDVKLVFDPKELSKMFTEFILNVPMGLLTIQKLYCLIEIVHSDLFTQHDCREILLPMMTDQLKYHLERQEDLEACCQLLSHILEVLYRKDVGPTQRHVQIIMEKLLRTVNRTVISMGRDSELIVSAW

SEQ ID NO: 888949 - protein, 881 aa, Homo sapiens
MFRSVRHMIYDLIEWRSQILSGTLPQDELKELKKKVTAKIDYGNRILDLDLVVRDEDGNILDPELTSTISLFRAHEIASKQVEERLQEEKSQKQNIDINRQAKFAATPSLALFVNLKNVVCKIGEDAEVLMSLYDPVESKFISENYLVRWSSSGLPKDIDRLHNLRAVFTDLGSKDLKREKISFVCQIVRVGRMELRDNNTRKLTSGLRRPFGVAVMDVTDIINGKVDDEDKQHFIPFQPVAGENDFLQTVINKVIAAKEVNHKGQGLWVTLKLLPGDIHQIRKEFPHLVDRTTAVARKTGFPEIIMPGDVRNDIYVTLVQGDFDKGSKTTAKNVEVTVSVYDEDGKRLEHVIFPGAGDEAISEYKSVIYYQVKQPRWFETVKVAIPIEDVNRSHLRFTFRHRSSQDSKDKSEKIFALAFVKLMRYDGTTLRDGEHDLIVYKAEAKKLEDAATYLSLPSTKAELEEKGHSATGKSMQSLGSCTISKDSFQISTLVCSTKLTQNVDLLGLLKWRSNTSLLQQNLRQLMKVDGGEVVKFLQDTLDALFNIMMENSESETFDTLVFDALVFIIGLIADRKFQHFNPVLETYIKKHFSATLAYTKLTKVLKNYVDGAEKPGVNEQLYKAMKALESIFKFIVRSRILFNQLYENKGEADFVESLLQLFRSINDMMSSMSDQTVRVKGAALKYLPTIVNDVKLVFDPKELSKMFTEFILNVPMGLLTIQKLYCLIEIVHSDLFTQHDCREILLPMMTDQLKYHLERQEDLEACCQLLSHILEVLYRKDVGPTQRHVQIIMEKLLRTVNRTVISMGRDSELIGNFVACMTAILRQMEDYHYAHLIKTFGKMRTDVVDFLMETFIMFKNLIGKNVYPFDWVIMNMVQNK

SEQ ID NO: 888950 - protein, 836 aa, Homo sapiens
MFRSVRHMIYDLIEWRSQILSGTLPQDELKELKKKVTAKIDYGNRILDLDLVVRDEDGNILDPELTSTISLFRAHEIASKQVEERLQEEKSQKQNIDINRQAKFAATPSLALFVNLKNVVCKIGEDAEVLMSLYDPVESKFISENYLVRWSSSGLPKDIDRLHNLRAVFTDLGSKDLKREKISFVCQIVRVGRMELRDNNTRKLTSGLRRPFGVAVMDVTDIINGKVDDEDKQHFIPFQPVAGENDFLQTVINKVIAAKEVNHKGQGLWVTLKLLPGDIHQIRKEFPHLVDRTTAVARKTGFPEIIMPGDVRNDIYVTLVQGDFDKGSKTTAKNVEVTVSVYDEDGKRLEHVIFPGAGDEAISEYKSVIYYQVKQPRWFETVKVAIPIEDVNRSHLRFTFRHRSSQDSKDKSEKIFALAFVKLMRYDGTTLRDGEHDLIVYKAEAKKLEDAATYLSLPSTKAELEEKGHSATGKSMQSLGSCTISKDSFQISTLVCSTKLTQNVDLLGLLKWRSNTSLLQQNLRQLMKVDGGEVVKFLQDTLDALFNIMMENSESETFDTLVFDALVFIIGLIADRKFQHFNPVLETYIKKHFSATLAYTKLTKVLKNYVDGAEKPGVNEQLYKAMKALESIFKFIVRSRILFNQLYENKGEADFVESLLQLFRSINDMMSSMSDQTVRVKGAALKYLPTIVNDVKLVFDPKELSKMFTEFILNVPMGLLTIQKLYCLIEIVHSDLFTQHDCREILLPMMTDQLKYHLERQEDLEACCQLLSHILEVLYRKDVGPTQRHVQIIMEKLLRTVNRTVISMGRDSELIGYFVACMTAILRHCDLRLGRF

SEQ ID NO: 888951 - protein, 395 aa, Homo sapiens
GSLKNAGDTLTSLVLPTSEFYTSGMYCEDPNMSLCTNCFNFVFDLGWYRGYTLRKKSKKGIFPASYIHLKEAIVEGKGQHETVIPGDLPLIQEVTTTLREWSTIWRQLYVQDNREMFRSVRHMIYDLIEWRSQILSGTLPQDELKELKKKVTAKIDYGNRILDLDLVVRDEDGNILDPELTSTISLFRAHEIASKQVEERLQEEKSQKQNIDINRQAKFAATPSLALFVNLKNVVCKIGEDAEVLMSLYDPVESKFISENYLVRWSSSGLPKDIDRLHNLRAVFTDLGSKDLKREKISFVCQIVRVGRMELRDNNTRKLTSGLRRPFGVAVMDVTDIINGKVDDEDKQHFIPFQPVAGENDFLQTVINKVIAAKEVNHKGQGCVDAAANLVVVVD

SEQ ID NO: 888952 - protein, 107 aa, Homo sapiens
VGQDGAQLMWGGWFRLSGCARSDPTWRRCLFCQDISYVTSSPSSCFLASATSTAQQNSASSPSKDNSQADIGGLRDRAVTSQGSLERVCCPSPSPCPLLLCPLSLLF

SEQ ID NO: 888953 - protein, 730 aa, Homo sapiens
MKIFSESHKTVFVVDHCPYMAESCRQHVEFDMLVKNRTQGIIPLAPISKSLWTCSVESSMEYCRIMYDIFPFKKLVNFIVSDSGAHVLNSWTQEDQNLQELMAALAAVGPPNPRADPECCSILHGLVAAVETLCKITEYQHEARTLLMENAERVGNRGRIICITNAKSDSHVRMLEDCVQETIHEHNKLAANSDHLMQIQKCELVLIHTYPVGEDSLVSDRSKKELSPVLTSEVHSVRAGRHLATKLNILVQQHFDLASTTITNIPMKEEQHANTSANYDVELLHHKDAHVDFLKSGDSHLGGGSREGSFKETITLKWCTPRTNNIELHYCTGAYRISPVDVNSRPSSCLTNFLLNGRSVLLEQPRKSGSKVISHMLSSHGGEIFLHVLSSSRSILEDPPSISEGCGGRVTDYRITDFGEFMRENRLTPFLDPRYKIDGSLEVPLERAKDQLEKHTRYWPMIISQTTIFNMQAVVPLASVIVKESLTEEDVLNCQKTIYNLVDMERKNDPLPISTVGTRGKGPKRDEQYRIMWNELETLVRAHINNSEKHQRVLECLSLLSLTCPLCLPSFFLVSFVLPLLMACRSKPPEEEERKKRGRKREDKEDKSEKAVKDYEQEKSWQDSERLKGILERGKEELAEAEIIKDSPDSPEPPNKKPLVEMDETPQVEKSKGPVSLLSLWSNRINTANSRKHQEFAGRLNSVNNRAELYQHLKEENGMETTENGKASRQ

SEQ ID NO: 888954 - protein, 601 aa, Homo sapiens
MKIFSESHKTVFVVDHCPYMAESCRQHVEFDMLVKNRTQGIIPLAPISKSLWTCSVESSMEYCRIMYDIFPFKKLVNFIVSDSGAHVLNSWTQEDQNLQELMAALAAVGPPNPRADPECCSILHGLVAAVETLCKITEYQHEARTLLMENAERVGNRGRIICITNAKSDSHVRMLEDCVQETIHEHNKLAANSDHLMQIQKCELVLIHTYPVGEDSLVSDRSKKELSPVLTSEVHSVRAGRHLATKLNILVQQHFDLASTTITNIPMKEEQHANTSANYDVELLHHKDAHVDFLKSELHYCTGAYRISPVDVNSRPSSCLTNFLLNDPRYKIDGSLEVPLERAKDQLEKHTRYWPMIISQTTIFNMQAVVPLASVIVKESLTEEDVLNCQKTIYNLVDMERKNDPLPISTVGTRGKGPKRDEQYRIMWNELETLVRAHINNSEKHQRVLECLMACRSKPPEEEERKKRGRKREDKEDKSEKAVKDYEQEKSWQDSERLKGILERGKEELAEAEIIKDSPDSPEPPNKKPLVEMDETPQVEKSKGPVSLLSLWSNRINTANSRKHQEFAGRLNSVNNRAELYQHLKEENGMETTENGKASRQ

SEQ ID NO: 888955 - protein, 290 aa, Homo sapiens
MTSLRSAPSLSYSPRVWPSVRDIHRLGVTGSITMHLSTLSMMSRTVPHCRRDDSASGLLPQFATRIIFSLHIQLVAYPFSHLHNLVDMERKNDPLPISTVGTRGKGPKRDEQYRIMWNELETLVRAHINNSEKHQRVLECLMACRSKPPEEEERKKRGRKREDKEDKSEKAVKDYEQEKSWQDSERLKGILERGKEELAEAEIIKDSPDSPEPPNKKPLVEMDETPQVEKSKGPVSLLSLWSNRINTANSRKHQEFAGRLNSVNNRAELYQHLKEENGMETTENGKASRQ

SEQ ID NO: 888956 - protein, 706 aa, Homo sapiens
MKIFSESHKTVFVVDHCPYMAESCRQHVEFDMLVKNRTQGIIPLAPISKSLWTCSVESSMEYCRIMYDIFPFKKLVNFIVSDSGAHVLNSWTQEDQNLQELMAALAAVGPPNPRADPECCSILHGLVAAVETLCKITEYQHEARTLLMENAERVGNRGRIICITNAKSDSHVRMLEDCVQETIHEHNKLAANSDHLMQIQKCELVLIHTYPVGEDSLVSDRSKKELSPVLTSEVHSVRAGRHLATKLNILVQQHFDLASTTITNIPMKEEQHANTSANYDVELLHHKDAHVDFLKSGDSHLGGGSREGSFKETITLKWCTPRTNNIELHYCTGAYRISPVDVNSRPSSCLTNFLLNGRSVLLEQPRKSGSKVISHMLSSHGGEIFLHVLSSSRSILEDPPSISEGCGGRVTDYRITDFGEFMRENRLTPFLDPRYKIDGSLEVPLERAKDQLEKHTRYWPMIISQTTIFNMQAVVPLASVIVKESLTEEDVLNCQKTIYNLVDMERKNDPLPISTVGTRGKGPKRDEQYRIMWNELETLVRAHINNSEKHQRVLECLMACRSKPPEEEERKKRGRKREDKEDKSEKAVKDYEQEKSWQDSERLKGILERGKEELAEAEIIKDSPDSPEPPNKKPLVEMDETPQVEKSKGPVSLLSLWSNRINTANSRKHQEFAGRLNSVNNRAELYQHLKEENGMETTENGKASRQ

SEQ ID NO: 888957 - protein, 272 aa, Homo sapiens
MKIFSESHKTVFVVDHCPYMAESCRQHVEFDMLVKNRTQGIIPLAPISKSLWTCSVESSMEYCRIMYDIFPFKKLVNFIVSDSGAHVLNSWTQEDQNLQELMAALAAVGPPNPRADPECCSILHGLVAAVETLCKITEYQHEARTLLMENAERVGNRGRIICITNAKSDSHVRMLEDCVQETIHEHNKLAANSDHLMQIQKCELVLIHTYPVGEDSLVSDRSKKELSPVLTSEVHSVRAGRHLATKLNILVQQHFDLASTTITNIPMKVIRI

SEQ ID NO: 888958 - protein, 314 aa, Homo sapiens
MTSLRSAPSLSYSPRVWPSVRDIHRLGVTGSITMHLSTLSMMSRTVPHCRRDDSASGLLPQFATRIIFSLHIQLVAYPFSHLHNLVDMERKNDPLPISTVGTRGKGPKRDEQYRIMWNELETLVRAHINNSEKHQRVLECLSLLSLTCPLCLPSFFLVSFVLPLLMACRSKPPEEEERKKRGRKREDKEDKSEKAVKDYEQEKSWQDSERLKGILERGKEELAEAEIIKDSPDSPEPPNKKPLVEMDETPQVEKSKGPVSLLSLWSNRINTANSRKHQEFAGRLNSVNNRAELYQHLKEENGMETTENGKASRQ

SEQ ID NO: 888959 - protein, 287 aa, Homo sapiens
LPLLCPAPGTRLFPLQCLRGGDGSTMDPRLSTVRQTCCCFNVRIATTALAIYHVIMSVLLFIEHSVEVAHGKASCKLSQMGYLRIADLISSFLLITMLFIISLSLLIGVVKNREKYLLPFLSLQIMDYLLCLLTLLGSYIELPAYLKLASRSRASSSKFPLMTLQLLDFCLSILTLCSSYMEVPTYLNFKSMNHMNYLPSQEDMPHNQFIKMMIIFSIAFITVLIFKVYMFKCVWRCYRLIKCMNSVEEKRNSKMLQKVVLPSYEEALSLPSKTPEGGPAPPPYSEV

SEQ ID NO: 888960 - protein, 191 aa, Homo sapiens [sequence omitted]

SEQ ID NO: 888961 - protein, 287 aa, Homo sapiens; identical to SEQ ID NO: 888959

SEQ ID NO: 888962 - protein, 287 aa, Homo sapiens; identical to SEQ ID NO: 888959

SEQ ID NO: 888963 - protein, 509 aa, Homo sapiens
MAERAALEELVKLQGERVRGLKQQKASAELIEEEVAKLLKLKAQLGPDESKQKFVLKTPKGTRDYSPRQMAVREKVFDVIIRCFKRHGAEVIDTPVFELKETLMGKYGEDSKLIYDLKDQGGELLSLRYDLTVPFARYLAMNKLTNIKRYHIAKVYRRDNPAMTRGRYREFYQCDFDIAGNFDPMIPDAECLKIMCEILSSLQIGDFLVKVNDRRILDGMFAICGVSDSKFRTICSSVDKLDKVSWEEVKNEMVGEKGLAPEVADRIGDYVQQHGGVSLVEQLLQDPKLSQNKQALEGLGDLKLLFEYLTLFGIDDKISFDLSLARGLDYYTGVIYEAVLLQTPAQAGEEPLGVGSVAAGGRYDGLVGMFDPKGRKVPCVGLSIGVERIFSIVEQRLEALEEKIRTTETQVLVASAQKKLLEERLKLVSELWDAGIKAELLYKKNPKLLNQLQYCEEAGIPLVAIIGEQELKDGVIKLRSVTSREEVDVRREDLVEEIKRRTGQPLCIC

SEQ ID NO: 888964 - protein, 509 aa, Homo sapiens; identical to SEQ ID NO: 888963

SEQ ID NO: 888965 - protein, 403 aa, Homo sapiens
MAERAALEELVKLQGERVRGLKQQKASAELIEEEVAKLLKLKAQLGPDESKQKFVLKTPKGTRDYSPRQMAVREKVFDVIIRCFKRHGAEVIDTPVFELKETLMGKYGEDSKLIYDLKDQGGELLSLRYDLTVPFARYLAMNKLTNIKRYHIAKVYRRDNPAMTRGRYREFYQCDFDIAGNFDPMIPDAECLKIMCEILSSLQIGDFLVKVNDRRILDGMFAICGVSDSKFRTICSSVDKLDKVSWEEVKNEMVGEKGLAPEVADRIGDYVQQHGGVSLVEQLLQDPKLSQNKQALEGLGDLKLLFEYLTLFGIDDKISFDLSLARGLDYYTGVIYEAVLLQTPAQAGEEPLGVGSVAAGGRYDGLVGMFDPKGRKVPCVGLSIGVERIFSIVEQRLEVGPRR

SEQ ID NO: 888966 - protein, 489 aa, Homo sapiens
MAERAALEELVKLQGERVRGLKQQKASAELIEEEVAKLLKLKAQLGPDESKQKFVLKTPKGTRDYSPRQMAVREKVFDVIIRCFKRHGAEVIDTPVFELKETLMGKYGEDSKLIYDLKDQGGELLSLRYDLTVPFARYLAMNKLTNIKRYHIAKDFDIAGNFDPMIPDAECLKIMCEILSSLQIGDFLVKVNDRRILDGMFAICGVSDSKFRTICSSVDKLDKVSWEEVKNEMVGEKGLAPEVADRIGDYVQQHGGVSLVEQLLQDPKLSQNKQALEGLGDLKLLFEYLTLFGIDDKISFDLSLARGLDYYTGVIYEAVLLQTPAQAGEEPLGVGSVAAGGRYDGLVGMFDPKGRKVPCVGLSIGVERIFSIVEQRLEALEEKIRTTETQVLVASAQKKLLEERLKLVSELWDAGIKAELLYKKNPKLLNQLQYCEEAGIPLVAIIGEQELKDGVIKLRSVTSREEVDVRREDLVEEIKRRTGQPLCIC

SEQ ID NO: 888967 - protein, 473 aa, Homo sapiens
MAERAALEELVKLQGERVRGLKQQKASAELIEEEVAKLLKLKAQLGPDESKQKFVLKTPKGTRDYSPRQMAVREKVFDVIIRCFKRHGAEVIDTPVFELKETLMGKYGEDSKLIYDLKDQGGELLSLRYDLTVPFARYLAMNKLTNIKRYHIAKVYRRDNPAMTRGRYREFYQCVNDRRILDGMFAICGVSDSKFRTICSSVDKLDKVSWEEVKNEMVGEKGLAPEVADRIGDYVQQHGGVSLVEQLLQDPKLSQNKQALEGLGDLKLLFEYLTLFGIDDKISFDLSLARGLDYYTGVIYEAVLLQTPAQAGEEPLGVGSVAAGGRYDGLVGMFDPKGRKVPCVGLSIGVERIFSIVEQRLEALEEKIRTTETQVLVASAQKKLLEERLKLVSELWDAGIKAELLYKKNPKLLNQLQYCEEAGIPLVAIIGEQELKDGVIKLRSVTSREEVDVRREDLVEEIKRRTGQPLCIC

SEQ ID NO: 888968 - protein, 138 aa, Homo sapiens
VTSREEVDVRREDLVERIFSIVDLRLEALEEKIRTTETQVLVASAQKKLLEERLKLVSELWDAGIKAELLYKKNPKLLNQLQYCEEAGIPLVAIIGEQELKDGVIKLRSVTSREEVDVRREDLVEEIKRRTGQPLCIC

SEQ ID NO: 888969 - protein, 135 aa, Homo sapiens
MAERAALEELVKLQGERVRGLKQQKASAELIEEEVAKLLKLKAQLGPDESKQKFVLKTPKGTRDYSPRQMAVREKVFDVIIRCFKRHGAEVIDTPVFELKETLMGKYGEDSKLIYDLKDQGGELLSLRYDLTVSF

SEQ ID NO: 888970 - protein, 106 aa, Homo sapiens [sequence omitted]

SEQ ID NO: 888971 - protein, 509 aa, Homo sapiens; identical to SEQ ID NO: 888963

SEQ ID NO: 888972 - protein, 509 aa, Homo sapiens; identical to SEQ ID NO: 888963

SEQ ID NO: 888973 - protein, 560 aa, Homo sapiens
MAERAALEELVKLQGERVRGLKQQKASAELIEEEVAKLLKLKAQLGPDESKQKFVLKTPKGTRDYSPRQMAVREKVFDVIIRCFKRHGAEVIDTPVFELKETLMGKYGEDSKLIYDLKDQGGELLSLRYDLTVPFARYLAMNKLTNIKRYHIAKVYRRDNPAMTRGRYREFYQCDFDIAGNFDPMIPDAECLKIMCEILSSLQIGDFLVKVRADKAGRAKLGLASHKRRSLCRGTSSLSDHDYCRYVRKEIPPSLCIGSLQVNDRRILDGMFAICGVSDSKFRTICSSVDKLDKVSWEEVKNEMVGEKGLAPEVADRIGDYVQQHGGVSLVEQLLQDPKLSQNKQALEGLGDLKLLFEYLTLFGIDDKISFDLSLARGLDYYTGVIYEAVLLQTPAQAGEEPLGVGSVAAGGRYDGLVGMFDPKGRKVPCVGLSIGVERIFSIVEQRLEALEEKIRTTETQVLVASAQKKLLEERLKLVSELWDAGIKAELLYKKNPKLLNQLQYCEEAGIPLVAIIGEQELKDGVIKLRSVTSREEVDVRREDLVEEIKRRTGQPLCIC

SEQ ID NO: 888974 - protein, 435 aa, Homo sapiens
MAERAALEELVKLQGERVRGLKQQKASAELIEEEVAKLLKLKAQLGPDESKQKFVLKTPKGTRDYSPRQMAVREKVFDVIIRCFKRHGAEVIDTPVFELKDFDIAGNFDPMIPDAECLKIMCEILSSLQIGDFLVKVNDRRILDGMFAICGVSDSKFRTICSSVDKLDKVSWEEVKNEMVGEKGLAPEVADRIGDYVQQHGGVSLVEQLLQDPKLSQNKQALEGLGDLKLLFEYLTLFGIDDKISFDLSLARGLDYYTGVIYEAVLLQTPAQAGEEPLGVGSVAAGGRYDGLVGMFDPKGRKVPCVGLSIGVERIFSIVEQRLEALEEKIRTTETQVLVASAQKKLLEERLKLVSELWDAGIKAELLYKKNPKLLNQLQYCEEAGIPLVAIIGEQELKDGVIKLRSVTSREEVDVRREDLVEEIKRRTGQPLCIC

SEQ ID NO: 888975 - protein, 195 aa, Homo sapiens
MAERAALEELVKLQGERVRGLKQQKASAELIEEEVAKLLKLKAQLGPDESKQKFVLKTPKGTRDYSPRQMAVREKVFDVIIRCFKRHGAEVIDTPVFELKETLMGKYGEDSKLIYDLKDQGGELLSLRYDLTVPFARYLAMNKLTNIKRYHIAKVYRRDNPAMTRGRYREFYQCVSVGKPWGRMSYLGLSQASRI

SEQ ID NO: 888976 - protein, 110 aa, Homo sapiens
MAERAALEELVKLQGERVRGLKQQKASAELIEEEVAKLLKLKAQLGPDESKQKFVLKTPKGTRDYSPRQMAVREKVFDVIIRCFKRHGAEVIDTPVFELKVRNGQEETTW

SEQ ID NO: 888977 - protein, 136 aa, Homo sapiens [sequence omitted]

SEQ ID NO: 888978 - protein, 136 aa, Homo sapiens [sequence omitted]

SEQ ID NO: 888979 - protein, 169 aa, Homo sapiens
  misc_feature (9)..(9): Xaa can be any naturally occurring amino acid
MMYDVDTGXCISVTRGRRFSCISRCVFCGLYQVMLYDFLVKPYRVRRCPKAPDHFRSHLEHQKGSSSQGYGSVCLDIVWNCALSPQASPELKGSKNILKLLFQNMRFRRNQVSPGERGSLLNQHRELLAGRLPSAVESPPASGLGAPSHFLLLMEYMGLLCFKPRSELL

SEQ ID NO: 888980 - protein, 261 aa, Homo sapiens
MDWGTLHTFIGGVNKHSTSIGKVWITVIFIFRVMILVVAAQEVWGDEQEDFVCNTLQPGCKNVCYDHFFPVSHIRLWALQLIFVSTPALLVAMHVAYYRHETTRKFRRGEKRNDFKDIEDIKKQKVRIEGSLWWTYTSSIFFRIIFEAAFMYVFYFLYNGYHLPWVLKCGIDPCPNLVDCFISRPTEKTVFTIFMISASVICMLLNVAELCYLLLKVCFRRSKRAQTQKNHPNHALKESKQNEMNELISDSGQNAITGFPS

SEQ ID NO: 888981 - protein, 261 aa, Homo sapiens; identical to SEQ ID NO: 888980

SEQ ID NO: 888982 - protein, 466 aa, Homo sapiens
QHREWKTAEVTEQPCSKRSWSPSSPPQVKTGPAGDTMGHLSAPLHRVRVPWQGLLLTASLLTFWNPPTTAQLTTESMPFNVAEGKEVLLLVHNLPQQLFGYSWYKGERVDGNRQIVGYAIGTQQATPGPANSGRETIYPNASLLIQNVTQNDTGFYTLQVIKSDLVNEEATGQFHVYPELPKPSISSNNSNPVEDKDAVAFTCEPETQDTTYLWWINNQSLPVSPRLQLSNGNRTLTLLSVTRNDTGPYECEIQNPVSANRSDPVTLNVTYGPDTPTISPSDTYYRPGANLSLSCYAASNPPAQYSWLINGTFQQSTQELFIPNITVNNSGSYTCHANNSVTGCNRTTVKTIIVTDNALPQENGLSPGAIAGIVIGVVALVALIAVALACFLHFGKTGRASDQRDLTEHKPSVSNHTQDHSNDPPNKMNEVTYSTLNFEAQQPTQPTSASPSLTATEIIYSEVKKQ

SEQ ID NO: 888983 - protein, 453 aa, Homo sapiens
QHREWKTAEVTEQPCSKRSWSPSSPPQVKTGPAGDTMGHLSAPLHRVRVPWQGLLLTASLLTFWNPPTTAQLTTESMPFNVAEGKEVLLLVHNLPQQLFGYSWYKGERVDGNRQIVGYAIGTQQATPGPANSGRETIYPNASLLIQNVTQNDTGFYTLQVIKSDLVNEEATGQFHVYPELPKPSISSNNSNPVEDKDAVAFTCEPETQDTTYLWWINNQSLPVSPRLQLSNGNRTLTLLSVTRNDTGPYECEIQNPVSANRSDPVTLNVTYGPDTPTISPSDTYYRPGANLSLSCYAASNPPAQYSWLINGTFQQSTQELFIPNITVNNSGSYTCHANNSVTGCNRTTVKTIIVTELSPVVAKPQIKASKTTVTGDKDSVNLTCSTNDTGISIRWFFKNQSLPSSERMKLSQGNTTLSINPVKREDAGTYWCEVFNPISKNQSDPIMLNVNCK

SEQ ID NO: 888984 - protein, 321 aa, Homo sapiens
MGHLSAPLHRVRVPWQGLLLTASLLTFWNPPTTAQLTTESMPFNVAEGKEVLLLVHNLPQQLFGYSWYKGERVDGNRQIVGYAIGTQQATPGPANSGRETIYPNASLLIQNVTQNDTGFYTLQVIKSDLVNEEATGQFHVYPELPKPSISSNNSNPVEDKDAVAFTCEPETQDTTYLWWINNQSLPVSPRLQLSNGNRTLTLLSVTRNDTGPYECEIQNPVSANRSDPVTLNVTYGPDTPTISPSDTYYRPGANLSLSCYAASNPPAQYSWLINGTFQQSTQELFIPNITVNNSGSYTCHANNSVTGCNRTTVKTIIVTGK

SEQ ID NO: 888985 - protein, 387 aa, Homo sapiens
QHREWKTAEVTEQPCSKRSWSPSSPPQVKTGPAGDTMGHLSAPLHRVRVPWQGLLLTASLLTFWNPPTTAQLTTESMPFNVAEGKEVLLLVHNLPQQLFGYSWYKGERVDGNRQIVGYAIGTQQATPGPANSGRETIYPNASLLIQNVTQNDTGFYTLQVIKSDLVNEEATGQFHVYPELPKPSISSNNSNPVEDKDAVAFTCEPETQDTTYLWWINNQSLPVSPRLQLSNGNRTLTLLSVTRNDTGPYECEIQNPVSANRSDPVTLNVTYGPDTPTISPSDTYYRPGANLSLSCYAASNPPAQYSWLINGTFQQSTQELFIPNITVNNSGSYTCHANNSVTGCNRTTVKTIIVTESPVLGEDEAVPGQHHPQHKPCQEGGCWDVLV

SEQ ID NO: 888986 - protein, 73 aa, Homo sapiens
AQRVENSRGDRAAVLEAFLEPKLSSTGEDRASRRHHGAPLSPTSQSACTLAGASAHSLTSNLLEPAHHCPAHY

SEQ ID NO: 888987 - protein, 568 aa, Homo sapiens
QHREWKTAEVTEQPCSKRSWSPSSPPQVKTGPAGDTMGHLSAPLHRVRVPWQGLLLTASLLTFWNPPTTAQLTTESMPFNVAEGKEVLLLVHNLPQQLFGYSWYKGERVDGNRQIVGYAIGTQQATPGPANSGRETIYPNASLLIQNVTQNDTGFYTLQVIKSDLVNEEATGQFHVYPELPKPSISSNNSNPVEDKDAVAFTCEPETQDTTYLWWINNQSLPVSPRLQLSNGNRTLTLLSVTRNDTGPYECEIQNPVSANRSDPVTLNVTYGPDTPTISPSDTYYRPGANLSLSCYAASNPPAQYSWLINGTFQQSTQELFIPNITVNNSGSYTCHANNSVTGCNRTTVKTIIVTELSPVVAKPQIKASKTTVTGDKDSVNLTCSTNDTGISIRWFFKNQSLPSSERMKLSQGNTTLSINPVKREDAGTYWCEVFNPISKNQSDPIMLNVNYNALPQENGLSPGAIAGIVIGVVALVALIAVALACFLHFGKTGRYDGLSSCSVSSKADCHAWERERILCLSLGLDLILLPLNSCFSALIPTGFLFPGLRAPCLPLSLGHGYSNPHLI

SEQ ID NO: 888988 - protein, 461 aa, Homo sapiens
MGHLSAPLHRVRVPWQGLLLTASLLTFWNPPTTAQLTTESMPFNVAEGKEVLLLVHNLPQQLFGYSWYKGERVDGNRQIVGYAIGTQQATPGPANSGRETIYPNASLLIQNVTQNDTGFYTLQVIKSDLVNEEATGQFHVYPELPKPSISSNNSNPVEDKDAVAFTCEPETQDTTYLWWINNQSLPVSPRLQLSNGNRTLTLLSVTRNDTGPYECEIQNPVSANRSDPVTLNVTYGPDTPTISPSDTYYRPGANLSLSCYAASNPPAQYSWLINGTFQQSTQELFIPNITVNNSGSYTCHANNSVTGCNRTTVKTIIVTERQNLTMLPRLDSNSWAQAILPSVSQSAEITDNALPQENGLSPGAIAGIVIGVVALVALIAVALACFLHFGKTGRASDQRDLTEHKPSVSNHTQDHSNDPPNKMNEVTYSTLNFEAQQPTQPTSASPSLTATEIIYSEVKKQ

SEQ ID NO: 888989 - protein, 324 aa, Homo sapiens
CEVIQRSRNNSNPVEDKDAVAFTCEPETQDTTYLWWINNQSLPVSPRLQLSNGNRTLTLLSVTRNDTGPYECEIQNPVSANRSDPVTLNVTYGPDTPTISPSDTYYRPGANLSLSCYAASNPPAQYSWLINGTFQQSTQELFIPNITVNNSGSYTCHANNSVTGCNRTTVKTIIVTEMAFHHVAKAGLKLLSSSNPPASTSQSAKITDNALPQENGLSPGAIAGIVIGVVALVALIAVALACFLHFGKTGRYDGLSSCSVSSKADCHAWERERILCLSLGLDLILLPLNSCFSALIPTGFLFPGLRAPCLPLSLGHGYSNPHLI

SEQ ID NO: 888990 - protein, 161 aa, Homo sapiens
MKLSQGNTTLSINPVKREDAGTYWCEVFNPISKNQSDPIMLNVNYNALPQENGLSPGAIAGIVIGVVALVALIAVALACFLHFGKTGRYDGLSSCSVSSKADCHAWERERILCLSLGLDLILLPLNSCFSALIPTGFLFPGLRAPCLPLSLGHGYSNPHLI

SEQ ID NO: 888991 - protein, 73 aa, Homo sapiens; identical to SEQ ID NO: 888986

SEQ ID NO: 888992 - protein, 292 aa, Homo sapiens
QHREWKTAEVTEQPCSKRSWSPSSPPQVKTGPAGDTMGHLSAPLHRVRVPWQGLLLTASLLTFWNPPTTAQLTTESMPFNVAEGKEVLLLVHNLPQQLFGYSWYKGERVDGNRQIVGYAIGTQQATPGPANSGRETIYPNASLLIQNVTQNDTGFYTLQVIKSDLVNEEATGQFHVYPELPKPSISSNNSNPVEDKDAVAFTCEPETQDTTYLWWINNQSLPVSPRLQLSNGNRTLTLLSVTRNDTGPYECEIQNPVSANRSDPVTLNVTYGPDTPPFPLQTLASRGYRADL

SEQ ID NO: 888993 - protein, 95 aa, Homo sapiens
IQNVTQNDTGFYTLQVIKSDLVNEEATGQFHVYREYFPMTSGCWGVSSTSHTWDCQAWAVPVSSSALYPMLRFEHLVQDTLWDRHQNTECLTLES

SEQ ID NO: 888994 - protein, 562 aa, Homo sapiens
QHREWKTAEVTEQPCSKRSWSPSSPPQVKTGPAGDTMGHLSAPLHRVRVPWQGLLLTASLLTFWNPPTTAQLTTESMPFNVAEGKEVLLLVHNLPQQLFGYSWYKGERVDGNRQIVGYAIGTQQATPGPANSGRETIYPNASLLIQNVTQNDTGFYTLQVIKSDLVNEEATGQFHVYPELPKPSISSNNSNPVEDKDAVAFTCEPETQDTTYLWWINNQSLPVSPRLQLSNGNRTLTLLSVTRNDTGPYECEIQNPVSANRSDPVTLNVTYGPDTPTISPSDTYYRPGANLSLSCYAASNPPAQYSWLINGTFQQSTQELFIPNITVNNSGSYTCHANNSVTGCNRTTVKTIIVTELSPVVAKPQIKASKTTVTGDKDSVNLTCSTNDTGISIRWFFKNQSLPSSERMKLSQGNTTLSINPVKREDAGTYWCEVFNPISKNQSDPIMLNVNYNALPQENGLSPGAIAGIVIGVVALVALIAVALACFLHFGKTGRASDQRDLTEHKPSVSNHTQDHSNDPPNKMNEVTYSTLNFEAQQPTQPTSASPSLTATEIIYSEVKKQ

SEQ ID NO: 888995 - protein, 464 aa, Homo sapiens
MGHLSAPLHRVRVPWQGLLLTASLLTFWNPPTTAQLTTESMPFNVAEGKEVLLLVHNLPQQLFGYSWYKGERVDGNRQIVGYAIGTQQATPGPANSGRETIYPNASLLIQNVTQNDTGFYTLQVIKSDLVNEEATGQFHVYPELPKPSISSNNSNPVEDKDAVAFTCEPETQDTTYLWWINNQSLPVSPRLQLSNGNRTLTLLSVTRNDTGPYECEIQNPVSANRSDPVTLNVTYGPDTPTISPSDTYYRPGANLSLSCYAASNPPAQYSWLINGTFQQSTQELFIPNITVNNSGSYTCHANNSVTGCNRTTVKTIIVTELSPVVAKPQIKASKTTVTGDKDSVNLTCSTNDTGISIRWFFKNQSLPSSERMKLSQGNTTLSINPVKREDAGTYWCEVFNPISKNQSDPIMLNVNYNALPQENGLSPGAIAGIVIGVVALVALIAVALACFLHFGKTGSSGPLQ

SEQ ID NO: 888996 - protein, 372 aa, Homo sapiens
QHREWKTAEVTEQPCSKRSWSPSSPPQVKTGPAGDTMGHLSAPLHRVRVPWQGLLLTASLLTFWNPPTTAQLTTESMPFNVAEGKEVLLLVHNLPQQLFGYSWYKGERVDGNRQIVGYAIGTQQATPGPANSGRETIYPNASLLIQNVTQNDTGFYTLQVIKSDLVNEEATGQFHVYPELPKPSISSNNSNPVEDKDAVAFTCEPETQDTTYLWWINNQSLPVSPRLQLSNGNRTLTLLSVTRNDTGPYECEIQNPVSANRSDPVTLNVTYGPDTPTISPSDTYYRPGANLSLSCYAASNPPAQYSWLINGTFQQSTQELFIPNITVNNSGSYTCHANNSVTGCNRTTVKTIIVTERQNLTMLPRLDSNSWA

SEQ ID NO: 888997 - protein, 73 aa, Homo sapiens; identical to SEQ ID NO: 888986

SEQ ID NO: 888998 - protein, 464 aa, Homo sapiens; identical to SEQ ID NO: 888995

SEQ ID NO: 888999 - protein, 435 aa, Homo sapiens
QHREWKTAEVTEQPCSKRSWSPSSPPQVKTGPAGDTMGHLSAPLHRVRVPWQGLLLTASLLTFWNPPTTAQLTTESMPFNVAEGKEVLLLVHNLPQQLFGYSWYKGERVDGNRQIVGYAIGTQQATPGPANSGRETIYPNASLLIQNVTQNDTGFYTLQVIKSDLVNEEATGQFHVYPELPKPSISSNNSNPVEDKDAVAFTCEPETQDTTYLWWINNQSLPVSPRLQLSNGNRTLTLLSVTRNDTGPYECEIQNPVSANRSDPVTLNVTYGPDTPTISPSDTYYRPGANLSLSCYAASNPPAQYSWLINGTFQQSTQELFIPNITVNNSGSYTCHANNSVTGCNRTTVKTIIVTEMAFHHVAKAGLKLLSSSNPPASTSQSAKITDNALPQENGLSPGAIAGIVIGVVALVALIAVALACFLHFGKTGSSGPLQ

SEQ ID NO: 889000 - protein, 161 aa, Homo sapiens; identical to SEQ ID NO: 888990

SEQ ID NO: 889001 - protein, 128 aa, Homo sapiens
QEREIKSIQIGREESKLSLFVEDMILCLENPIVSAQKLLKLINNFSKVLGYKINVQKSPATHTTNFSLPIPNSHRNNLFRSKKAVMKPVLLTAVLMYFKSLTLITRRFLSPVGVEGWGQKQLSPTLPS

SEQ ID NO: 889002 - protein, 481 aa, Homo sapiens
MGHLSAPLHRVRVPWQGLLLTASLLTFWNPPTTAQLTTESMPFNVAEGKEVLLLVHNLPQQLFGYSWYKGERVDGNRQIVGYAIGTQQATPGPANSGRETIYPNASLLIQNVTQNDTGFYTLQVIKSDLVNEEATGQFHVYPELPKPSISSNNSNPVEDKDAVAFTCEPETQDTTYLWWINNQSLPVSPRLQLSNGNRTLTLLSVTRNDTGPYECEIQNPVSANRSDPVTLNVTYGPDTPTISPSDTYYRPGANLSLSCYAASNPPAQYSWLINGTFQQSTQELFIPNITVNNSGSYTCHANNSVTGCNRTTVKTIIVTELSPVVAKPQIKASKTTVTGDKDSVNLTCSTNDTGISIRWFFKNQSLPSSERMKLSQGNTTLSINPVKREDAGTYWCEVFNPISKNQSDPIMLNVNYNALPQENGLSPGAIAGIVIGVVALVALIAVALACFLHFGKTGRASDQRDLTEHKPSVSNHTTGVP

SEQ ID NO: 889003 - protein, 269 aa, Homo sapiens
MPIVMARDLEETASSSEDEEVISQEDHPCIMWTGGCRRIPVLVFHADAILTKDNNIRVIGERYHLSYKIVRTDSRLVRSILTAHGFHEVHPSSTDYNLMWTGSHLKPFLLRTLSEAQKVNHFPRSYELTRKDRLYKNIIRMQHTHGFKAFHILPQTFLLPAEYAEFCNSYSKDRGPWIVKPVASSRGRGVYLINNPNQISLEENILVSRYINNPLLIDDFKFDVRLYVLVTSYDPLVIYLYEEGLARKCNWKMGNTMDKRRLPIYVQVL

SEQ ID NO: 889004 - protein, 105 aa, Homo sapiens
MTGYLPLGFEFAVELTYPESEGISSGLLNISAQVFGIIFTISQGQIIDNYGTKPGNIFLCVFLTLGAALTAFIKADLRRQKANKETLENVSIWELCGAEIGVQGF

SEQ ID NO: 889005 - protein, 269 aa, Homo sapiens; identical to SEQ ID NO: 889003

SEQ ID NO: 889006 - protein, 268 aa, Homo sapiens
MPIVMARDLEETASSSEDEEVISQEDHPCIMWTGGCRRIPVLVFHADAILTKDNNIRVIGERYHLSYKIVRTDSRLVRSILTAHGFHEVHPSSTDYNLMWTGSHLKPFLLRTLSEAQKVNHFPRSYELTRKDRLYKNIIRMQHTHGFKAFHILPQTFLLPAEYAEFCNSYSKDRGPWIVKPVASSRGRGVYLINNPNQISLEENILVSRYINNPLLIDDFKFDVRLYVLVTSYDPLVIYLYEEGLARFATVRYDQGAKNIRNQFMHLT

SEQ ID NO: 889007 - protein, 526 aa, Homo sapiens
MVNEGPNQEESDDTPVPESALQADPSVSVHPSVSVHPSVSINPSVSVHPSSSAHPSALAQPSGLAHPSSSGPEDLSVIKVSRRRWAVVLVFSCYSMCNSFQWIQYGSINNIFMHFYGVSAFAIDWLSMCYMLTYIPLLLPVAWLLEKFGLRTIALTGSALNCLGAWVKLGSLKPHLFPVTVVGQLICSVAQVFILGMPSRIASVWFGANEVSTACSVAVFGNQLGIAIGFLVPPVLVPNIEDRDELAYHISIMFYIIGGVATLLLILVIIVFKEKPKYPPSRAQSLSYALTSPDASYLGSIARLFKNLNFVLLVITYGLNAGAFYALSTLLNRMVIWHYPGEEVNAGRIGLTIVIAGMLGAVISGIWLDRSKTYKETTLVVYIMTLVGMVVYTFTLNLGHLWVVFITAGTMGFFMTGYLPLGFEFAVELTYPESEGISSGLLNISAQVFGIIFTISQGQIIDNYGTKPGNIFLCVFLTLGAALTAFIKADLRRQKANKETLENKLQEEEEESNTSKVPTAVSEDHL

SEQ ID NO: 889008 - protein, 124 aa, Homo sapiens
MPIVMARDLEETASSSEDEEVISQEDHPCIMWTGGCRRIPVLVFHADAILTKDNNIRVIGERYHLSYKIVRTDSRLVRSILTAHGFHEVHPSSTDYNLMWTGSHLKPFLLRTLSEAQKVNHFPR

SEQ ID NO: 889009 - protein, 246 aa, Homo sapiens
MVNEGPNQEESDDTPVPESALQADPSVSVHPSVSVHPSVSINPSVSVHPSSSAHPSALAQPSGLAHPSSSGPEDLSVIKVSRRRWAVVLVFSCYSMCNSFQWIQYGSINNIFMHFYGVSAFAIDWLSMCYMLTYIPLLLPVAWLLEKFGLRTIALTGSALNCLGAWVKLGSLKPHLFPVTVVGQLICSVAQVFILGMPSRIASVWFGANEVSTACSVAVFGNQESVPSKLLDPVNLLGKVSEAPVC

SEQ ID NO: 889010 - protein, 108 aa, Homo sapiens
VRNVLDDDNDNVGQPNEYDLNDSFLDDEEEDYEPTDEDSDWEPGKEDEEKEDGEELLKEEKETHIDNLRLVKKHHNITETDMRYDAVVKNLHIPSIQIGRRQRTQDRN

SEQ ID NO: 889011 - protein, 499 aa, Homo sapiens
DLPSGASPAYISVKSTPSDMAPEETIASPEDGQSKEDATGIWRRRRRVRTRPEAREPPDQHRLVGVQDSPPQGSLCCHFSAMATSEQSICQARASVMVYDDTSKKWVPIKPGQQGFSRINIYHNTASNTFRVVGVKLQDQQVVINYSIVKGLKYNQATPTFHQWRDARQVYGLNFASKEEATTFSNAMLFALNIMNSQEGGPSSQRQVQNGPSPDEMDIQRRQVMEQHQQQRQESLERRTSATGPILPPGHPSSAASAPVSCSGPPPPPPPPVPPPPTGATPPPPPPLPAGGAQGSSHDESSMSGLAAAIAGAKLRRVQRPEDASGGSSPSGTSKSDANRASSGGGGGGLMEEMNKLLAKRRKAASQSDKPAEKKEDESQMEDPSTSPSPGTRAASQPPNSSEAGRKPWERSNSVEKPVSSILSRTPSVAKSPEAKSPLQSQPHSRMKPAGSVNDMALDAFDLDRMKQEILEEVVRELHKVKEEIIDAIRQELSGISTT

SEQ ID NO: 889012 - protein, 467 aa, Homo sapiens
DLPSGASPAYISVKSTPSDMAPEETIASPEDGQSKEDATGIWRRRRRVRTRPEAREPPDQHRLVGVQDSPPQGSLCCHFSAMATSEQSICQARASVMVYDDTSKKWVPIKPGQQGFSRINIYHNTASNTFRVVGVKLQDQQVVINYSIVKGLKYNQATPTFHQWRDARQVYGLNFASKEEATTFSNAMLFALNIMNSQEGGPSSQRQVQNGPSPDEMDIQRRQVMEQHQQQRQESLERRTSATGPILPPGHPSSAASAPVSCSGPPPPPPPPVPPPPTGATPPPPPPLPAGGAQGSSHDESSMSGLAAAIAGAKLRRVQRPEDASGGSSPSGTSKSDANRASSGGGGGGLMEEMNKLLAKRRKAASQSDKPAEKKEDESQMEDPSTSPSPGTRAASQPPNSSEAGRKPWERSNSVEKPVSSILSRTPSVAKSPEAKSPLQSQPHSRYRTTLLLTCPPGFGAPLSPVP

SEQ ID NO: 889013 - protein, 414 aa, Homo sapiens
AKMAGAGAQLSVRRRRRVAPGPARPSPAATMSEQSICQARASVMVYDDTSKKWVPIKPGQQGFSRINIYHNTASNTFRVVGVKLQDQQVVINYSIVKGLKYNQATPTFHQWRDARQVYGLNFASKEEATTFSNAMLFALNIMNSQEGGPSSQRQVQNGPSPDEMDIQRRQVMEQHQQQRQESLERRTSATGPILPPGHPSSAASAPVSCSGPPPPPPPPVPPPPTGATPPPPPPLPAGGAQGSSHDESSMSGLAAAIAGAKLRRVQRPEDASGGSSPSGTSKSDANRASSGGGGGGLMEEMNKLLAKRRKAASQSDKPAEKKEDESQMEDPSTSPSPGTRAASQPPNSSEAGRKPWERSNSVEKPVSSILSRTPSVAKSPEAKSPLQSQPHSRYRTTLLLTCPPGFGAPLSPVP

SEQ ID NO: 889014 - protein, 384 aa, Homo sapiens [sequence omitted]

SEQ ID NO: 889015 - protein, 493 aa, Homo sapiens
DLPSGASPAYISVKSTPSDMAPEETIASPEDGQSKEDATGIWRRRRRVRTRPEAREPPDQHRLVGVQDSPPQGSLCCHFSAMATSEQSICQARASVMVYDDTSKKWVPIKPGQQGFSRINIYHNTASNTFRVVGVKLQDQQVVINYSIVKGLKYNQATPTFHQWRDARQVYGLNFASKEEATTFSNAMLFALNIMNSQEGGACILLNDKATLYFLPQMNGGSLTSCGPSSQRQVQNGPSPDEMDIQRRQVMEQHQQQRQESLERRTSATGPILPPGHPSSAASAPVSCSGPPPPPPPPVPPPPTGATPPPPPPLPAGGAQGSSHDESSMSGLAAAIAGAKLRRVQRPEDASGGSSPSGTSKSDANRASSGGGGGGLMEEMNKLLAKRRKAASQSDKPAEKKEDESQMEDPSTSPSPGTRAASQPPNSSEAGRKPWERSNSVEKPVSSILSRTPSVAKSPEAKSPLQSQPHSRYRTTLLLTCPPGFGAPLSPVP

SEQ ID NO: 889016 - protein, 443 aa, Homo sapiens
DLPSGASPAYISVKSTPSDMAPEETIASPEDGQSKEDATGIWRRRRRVRTRPEAREPPDQHRLVGVQDSPPQGSLCCHFSAMATSEQSICQARASVMVYDDTSKKWVPIKPGQQGFSRINIYHNTASNTFRVVGVKLQDQQVVINYSIVKGLKYNQATPTFHQWRDARQVYGLNFASKEEATTFSNAMLFALNIMNSQEGGPSSQRQVQNGPSPDEMDIQRRQVMEQHQQQRQESLERRTSATGPILPPGHPSSAASAPVSCSGPPPPPPPPVPPPPTGATPPPPPPLPAGGAQGSSHDESSMSGLAAAIAGAKLRRVQRPEDASGGSSPSGTSKSDANRASSGGGGGGLMEEMNKLLAKREKQPPSQTSQPALTPQRLAGSPGSGATRWRSLCPRFCPEPRLWQRAPKLRAPFSRSLTLGTEQPSCSHVPQGLGLLCPPSRD

SEQ ID NO: 889017 - protein, 235 aa, Homo sapiens
AAHILKLGTIQRRLAWPLRKDDTQIREAFHILPPPPPPPPVPPPPTGATPPPPPPLPAGGAQGSSHDESSMSGLAAAIAGAKLRRVQRPEDASGGSSPSGTSKSDANRASSGGGGGGLMEEMNKLLAKRRKAASQSDKPAEKKEDESQMEDPSTSPSPGTRAASQPPNSSEAGRKPWERSNSVEKPVSSILSRTPSVAKSPEAKSPLQSQPHSRYRTTLLLTCPPGFGAPLSPVP

SEQ ID NO: 889018 - protein, 467 aa, Homo sapiens; identical to SEQ ID NO: 889012

SEQ ID NO: 889019 - protein, 467 aa, Homo sapiens; identical to SEQ ID NO: 889012

SEQ ID NO: 889020 - protein, 103 aa, Homo sapiens
VAEVTLEDPFLLCGVGWGKPLSGAGIFVDPDEEESALRRSWGQPPKLKEGMKPAGSVNDMALDAFDLDRMKQEILEEVVRELHKVKEEIIDAIRQELSGISTT

SEQ ID NO: 889021 - protein, 467 aa, Homo sapiens; identical to SEQ ID NO: 889012

SEQ ID NO: 889022 - protein, 467 aa, Homo sapiens; identical to SEQ ID NO: 889012

SEQ ID NO: 889023 - protein, 499 aa, Homo sapiens; identical to SEQ ID NO: 889011

SEQ ID NO: 889024 - protein, 467 aa, Homo sapiens; identical to SEQ ID NO: 889012

SEQ ID NO: 889025 - protein, 395 aa, Homo sapiens
DLPSGASPAYISVKSTPSDMAPEETIASPEDGQSKEDATGIWRRRRRVRTRPEAREPPDQHRLVGVQDSPPQGSLCCHFSAMATSEQSICQARASVMVYDDTSKKWVPIKPGQQGFSRINIYHNTASNTFRVVGVKLQDQQVVINYSIVKGLKYNQATPTFHQWRDARQVYGLNFASKEEATTFSNAMLFALNIMNSQEGGPSSQRQVQNGPSPDEMDIQRRQVMEQHQQQRQESLERRTSATGPILPPGHPSSAASAPVSCSGPPPPPPPPVPPPPTGATPPPPPPLPAGGAQGSSHDESSMSGLAAAIAGAKLRRVQRPEDASGGSSPSGTSKSDANRASSGGGGGGLMEEMNKLLAKREKQPPSQTSQPALTPQRLAGSPGRKQLRPQRSWC

SEQ ID NO: 889026 - protein, 786 aa, Homo sapiens
RSSFRSLASIYINQVTPSDMAPEETIASPEDGQSKEDATGIWRRRRRVRTRPEAREPPDQHRLVGVQDSPPQGSLCCHFSAMATSEQSICQARASVMVYDDTSKKWVPIKPGQQGFSRINIYHNTASNTFRVVGVKLQDQQVVINYSIVKGLKYNQATPTFHQWRDARQVYGLNFASKEEATTFSNAMLFALNIMNSQEGGPSSQRQVQNGPSPDEMDIQRRQVMEQHQQQRQESLERRTSATGPILPPGHPSSAASAPVSCSGHTKDRKTEKKEKREETKKGKGKKKGRKRKREKKKRQKNREEKGEREERSETRQRKTKKQQKTQRSKEKTKAREKTDQKEEEHKTERQQNTHQTPTNEKTKTTNEKEDSERGSKGEESKKKTKKERRREREKEENEDPNESEETKRQRRKGKRGTGKQNRKKRRKRQQKRKQKTKQKERQGAREEREERKKNGETAERRTRHKNRKEKKKRGEGEGQRREDESGKHRGRGPENEARRQEEQGEKRKTRARHEEEREAGQHEGGGERQKKTRRRARTTDAPSERRRGDDSSKDSAQKAATRETAEQHEREEKKQQEDGTRRGESRERPQRQEEDEKLREERNREGHKTSEKRERQMSATNERTRARGASRKEREEKRSGRAKQTDRESRTREDDERRRERSEEHGNDQQRKERQGEEHRDKRRKTDRSRTREADEARTGERRTRSRASTEQTQEPRERSRHSGKNTREKRKKKTKDERETKRENHGRGRTTQQRRDTTAMKQQRRQRAKVHASAQDRARRGRTT

SEQ ID NO: 889027 - protein, 300 aa, Homo sapiens
  misc_feature (265)..(265): Xaa can be any naturally occurring amino acid
DLPSGASPAYISVKSTPSDMAPEETIASPEDGQSKEDATGIWRRRRRVRTRPEAREPPDQHRLVGVQDSPPQGSLCCHFSAMATSEQSICQARASVMVYDDTSKKWVPIKPGQQGFSRINIYHNTASNTFRVVGVKLQDQQVVINYSIVKGLKYNQATPTFHQWRDARQVYGLNFASKEEATTFSNAMLFALNIMNSQEGGPSSQRQVQNGPSPDEMDIQRRQVMEQHQQQRQESLERRTSATGPILPPGHPSSAASAPVSCSGXYGIPKHTRFAAQPEFHAGPVADMPVSCHIRPLGRF

SEQ ID NO: 889028 - protein, 733 aa, Homo sapiens
AKMAGAGAQLSVRRRRRVAPGPARPSPAATMSEQSICQARASVMVYDDTSKKWVPIKPGQQGFSRINIYHNTASNTFRVVGVKLQDQQVVINYSIVKGLKYNQATPTFHQWRDARQVYGLNFASKEEATTFSNAMLFALNIMNSQEGGPSSQRQVQNGPSPDEMDIQRRQVMEQHQQQRQESLERRTSATGPILPPGHPSSAASAPVSCSGHTKDRKTEKKEKREETKKGKGKKKGRKRKREKKKRQKNREEKGEREERSETRQRKTKKQQKTQRSKEKTKAREKTDQKEEEHKTERQQNTHQTPTNEKTKTTNEKEDSERGSKGEESKKKTKKERRREREKEENEDPNESEETKRQRRKGKRGTGKQNRKKRRKRQQKRKQKTKQKERQGAREEREERKKNGETAERRTRHKNRKEKKKRGEGEGQRREDESGKHRGRGPENEARRQEEQGEKRKTRARHEEEREAGQHEGGGERQKKTRRRARTTDAPSERRRGDDSSKDSAQKAATRETAEQHEREEKKQQEDGTRRGESRERPQRQEEDEKLREERNREGHKTSEKRERQMSATNERTRARGASRKEREEKRSGRAKQTDRESRTREDDERRRERSEEHGNDQQRKERQGEEHRDKRRKTDRSRTREADEARTGERRTRSRASTEQTQEPRERSRHSGKNTREKRKKKTKDERETKRENHGRGRTTQQRRDTTAMKQQRRQRAKVHASAQDRARRGRTT

SEQ ID NO: 889029 - protein, 467 aa, Homo sapiens; identical to SEQ ID NO: 889012

SEQ ID NO: 889030 - protein, 390 aa, Homo sapiens
HRRRSSLHEQSICQARASVMVYDDTSKKWVPIKPGQQGFSRINIYHNTASNTFRVVGVKLQDQQVVINYSIVKGLKYNQATPTFHQWRDARQVYGLNFASKEEATTFSNAMLFALNIMNSQEGGPSSQRQVQNGPSPDEMDIQRRQVMEQHQQQRQESLERRTSATGPILPPGHPSSAASAPVSCSGPPPPPPPPVPPPPTGATPPPPPPLPAGGAQGSSHDESSMSGLAAAIAGAKLRRVQRPEDASGGSSPSGTSKSDANRASSGGGGGGLMEEMNKLLAKRRKAASQSDKPAEKKEDESQMEDPSTSPSPGTRAASQPPNSSEAGRKPWERSNSVEKPVSSILSRTPSVAKSPEAKSPLQSQPHSRYRTTLLLTCPPGFGAPLSPVP

SEQ ID NO: 889031 - protein, 251 aa, Homo sapiens
MDIQRRQVMEQHQQQRQESLERRTSATGPILPPGHPSSAASAPVSCSGPPPPPPPPVPPPPTGATPPPPPPLPAGGAQGSSHDESSMSGLAAAIAGAKLRRVQRPEDASGGSSPSGTSKSDANRASSGGGGGGLMEEMNKLLAKRRKAASQSDKPAEKKEDESQMEDPSTSPSPGTRAASQPPNSSEAGRKPWERSNSVEKPVSSILSRTPSVAKSPEAKSPLQSQPHSRYRTTLLLTCPPGFGAPLSPVP

SEQ ID NO: 889032 - protein, 538 aa, Homo sapiens
DLPSGASPAYISVKSTPSDMAPEETIASPEDGQSKEDATGIWRRRRRVRTRPEAREPPDQHRLVGVQDSPPQGSLCCHFSAMATSEQSICQARASVMVYDDTSKKWVPIKPGQQGFSRINIYHNTASNTFRVVGVKLQDQQVVINYSIVKGLKYNQATPTFHQWRDARQVYGLNFASKEEATTFSNAMLFALNIMNSQEGGPSSQRQVQNGPSPDEMDIQRRQVMEQHQQQRQESLERRTSATGPILPPGHPSSAASAPVSCSGPPPPPPPPVPPPPTGATPPPPPPLPAGGAQGSSHDESSMSGLAAAIAGAKLRRVQRPEDASGGSSPSGTSKSDANRASSGGGGGGLMEEMNKLLAKRRKAASQSDKPAEKKEDESQMEHALSLSLTEKKEGLFERRKEPQMWSPVTWAGPLPWQSWPGPMELLLRGPVPPPENLHPGMAASQTVRLPEEDPSTSPSPGTRAASQPPNSSEAGRKPWERSNSVEKPVSSILSRTPSVAKSPEAKSPLQSQPHSRYRTTLLLTCPPGFGAPLSPVP

SEQ ID NO: 889033 - protein, 570 aa, Homo sapiens
DLPSGASPAYISVKSTPSDMAPEETIASPEDGQSKEDATGIWRRRRRVRTRPEAREPPDQHRLVGVQDSPPQGSLCCHFSAMATSEQSICQARASVMVYDDTSKKWVPIKPGQQGFSRINIYHNTASNTFRVVGVKLQDQQVVINYSIVKGLKYNQATPTFHQWRDARQVYGLNFASKEEATTFSNAMLFALNIMNSQEGGPSSQRQVQNGPSPDEMDIQRRQVMEQHQQQRQESLERRTSATGPILPPGHPSSAASAPVSCSGPPPPPPPPVPPPPTGATPPPPPPLPAGGAQGSSHDESSMSGLAAAIAGAKLRRVQRPEDASGGSSPSGTSKSDANRASSGGGGGGLMEEMNKLLAKRRKAASQSDKPAEKKEDESQMEHALSLSLTEKKEGLFERRKEPQMWSPVTWAGPLPWQSWPGPMELLLRGPVPPPENLHPGMAASQTVRLPEEDPSTSPSPGTRAASQPPNSSEAGRKPWERSNSVEKPVSSILSRTPSVAKSPEAKSPLQSQPHSRMKPAGSVNDMALDAFDLDRMKQEILEEVVRELHKVKEEIIDAIRQELSGISTT

SEQ ID NO: 889034 - protein, 467 aa, Homo sapiens; identical to SEQ ID NO: 889012

SEQ ID NO: 889035 - protein, 467 aa, Homo sapiens; identical to SEQ ID NO: 889012

SEQ ID NO: 889036 - protein, 467 aa, Homo sapiens; identical to SEQ ID NO: 889012

SEQ ID NO: 889037 - protein, 467 aa, Homo sapiens; identical to SEQ ID NO: 889012

SEQ ID NO: 889038 - protein, 276 aa, Homo sapiens
DLPSGASPAYISVKSTPSDMAPEETIASPEDGQSKEDATGIWRRRRRVRTRPEAREPPDQHRLVGVQDSPPQGSLCCHFSAMATSEQSICQARASVMVYDDTSKKWVPIKPGQQGFSRINIYHNTASNTFRVVGVKLQDQQVVINYSIVKGLKYNQATPTFHQWRDARQVYGLNFASKEEATTFSNAMLFALNIMNSQEGGPSSQRQVQNGPSPDEMDIQRRQVMEQHQQQRQESLERRTSATGPILPPGHPSSAASAPVSCSGTEQQKTKDKPPT

SEQ ID NO: 889039 - protein, 266 aa, Homo sapiens
DLPSGASPAYISVKSTPSDMAPEETIASPEDGQSKEDATGIWRRRRRVRTRPEAREPPDQHRLVGVQDSPPQGSLCCHFSAMATSEQSICQARASVMVYDDTSKKWVPIKPGQQGFSRINIYHNTASNTFRVVGVKLQDQQVVINYSIVKGLKYNQATPTFHQWRDARQVYGLNFASKEEATTFSNAMLFALNIMNSQEGGPSSQRQVQNGPSPDEMDIQRRQVMEQHQQQRQESLERRTSATGPILPPGHPSSAASAPVSCSGRT

SEQ ID NO: 889040 - protein, 294 aa, Homo sapiens
ARGSGRPHLPVVLHGNNLLVFGGTGIPFGESNGNDVHVCNVKYKRWALLSCRGKKPSRIYGQAMAIINGSLYVFGGTTGYIYSTDLHKLDLNTREWTQLKPNNLSCDLPEERYRHEIAHDGQRIYILGGGTSWTAYSLNKIHAYNLETNAWEEIATKPHEKIGFPAARRCHSCVQIKNDVFICGGYNGEVILGDIWKLNLQTFQWVKLPATMPEPVYFHCAAVTPAGCMYIHGGVVNIHENKRTGSLFKIWLVVPSLLELAWEKLLAAFPNLANLSRTQLLHLGLTQGLIERLK

SEQ ID NO: 889041 - protein, 442 aa, Homo sapiens
MSAAQGWDRNRRRGGGAAGAGGGGSGAGGGSGGSGGRGTGQLNRFVQLSGRPHLPGKKKIRWDPVRRRFIQSCPIIRIPNRFLRGHRPPPARSGHRCVADNTNLYVFGGYNPDYDESGGPDNEDYPLFRELWRYHFATGVWHQMGTDGYMPRELASMSLVLHGNNLLVFGGTGIPFGESNGNDVHVCNVKYKRWALLSCRGKKPSRIYGQAMAIINGSLYVFGGTTGYIYSTDLHKLDLNTREWTQLKPNNLSCDLPEERYRHEIAHDGQRIYILGGGTSWTAYSLNKIHAYNLETNAWEEIATKPHEKIGFPAARRCHSCVQIKNDVFICGGYNGEVILGDIWKLNLQTFQWVKLPATMPEPVYFHCAAVTPAGCMYIHGGVVNIHENKRTGSLFKIWLVVPSLLELAWEKLLAAFPNLANLSRTQLLHLGLTQGLIERLK

SEQ ID NO: 889042 - protein, 496 aa, Homo sapiens
LKPTNLSCDLPEERYRHEIALDGQRIYLLGGGTSWTAYSLNKIHAYSLETNAWEEIATKPHEKIGFPAARRCHSCVQIKNDVGGSGGSGGRGTGQLNRFVQLSGRPHLPGKKKIRWDPVRRRFIQSCPIIRIPNRFLRGHRPPPARSGHRCVADNTNLYVFGGYNPDYDESGGPDNEDYPLFRELWRYHFATGVWHQMGTDGYMPRELASMSLVLHGNNLLVFGGTGIPFGESNGNDVHVCNVKYKRWALLSCRGKKPSRIYGQAMAIINGSLYVFGGTTGYIYSTDLHKLDLNTREWTQLKPNNLSCDLPEERYRHEIAHDGQRIYILGGGTSWTAYSLNKIHAYNLETNAWEEIATKPHEKIGFPAARRCHSCVQIKNDVFICGGYNGEVILGDIWKLNLQTFQWVKLPATMPEPVYFHCAAVTPAGCMYIHGGVVNIHENKRTGSLFKIWLVVPSLLELAWEKLLAAFPNLANLSRTQLLHLGLTQGLIERLK

SEQ ID NO: 889043 - protein, 423 aa, Homo sapiens
VIGLWWDRALPPSPVSWVSGGAQEGGSAGSAGSGADGTGLRQSLAGHVGRPGRGQWGQRGSGDWPGHRPPPARSGHRCVADNTNLYVFGGYNPDYDESGGPDNEDYPLFRELWRYHFATGVWHQMGTDGYMPRELASMSLVLHGNNLLVFGGTGIPFGESNGNDVHVCNVKYKRWALLSCRGKKPSRIYGQAMAIINGSLYVFGGTTGYIYSTDLHKLDLNTREWTQLKPNNLSCDLPEERYRHEIAHDGQRIYILGGGTSWTAYSLNKIHAYNLETNAWEEIATKPHEKIGFPAARRCHSCVQIKNDVFICGGYNGEVILGDIWKLNLQTFQWVKLPATMPEPVYFHCAAVTPAGCMYIHGGVVNIHENKRTGSLFKIWLVVPSLLELAWEKLLAAFPNLANLSRTQLLHLGLTQGLIERLK

SEQ ID NO: 889044 - protein, 298 aa, Homo sapiens
MSAAQGWDRNRRRGGGAAGAGGGGSGAGGGSGGSGGRGTGQLNRFVQLSGRPHLPGHRPPPARSGHRCVADNTNLYVFGGYNPDYDESGGPDNEDYPLFRELWRYHFATGVWHQMGTDGYMPRELASMSLVLHGNNLLVFGGTGIPFGESNGNDVHVCNVKYKRWALLSCRGKKPSRIYGQAMAIINGSLYVFGGTTGYIYSTDLHKLDLNTREWTQLKPNNLSCDLPEERYRHEIAHDGQRIYILGGGTSWTAYSLNKIHAYNLETNAWEEIATKPHEKIGFPAGRRCPVLPLKLMY

SEQ ID NO: 889045 - protein, 108 aa, Homo sapiens
SSSLLGHRPPPARSGHRCVADNTNLYVFGGYNPDYDESGGPDNEDYPLFRELWRYHFATGVWHQMGTDGYMPRELASMSRECKQFVTPDFMKCLRSQVQCPIFLINNL

SEQ ID NO: 889046 - protein, 423 aa, Homo sapiens; identical to SEQ ID NO: 889043

SEQ ID NO: 889047 - protein, 413 aa, Homo sapiens
MSAAQGWDRNRRRGGGAAGAGGGGSGAGGGSGGSGGRGTGQLNRFVQLSGRPHLPGHRPPPARSGHRCVADNTNLYVFGGYNPDYDESGGPDNEDYPLFRELWRYHFATGVWHQMGTDGYMPRELASMSLVLHGNNLLVFGGTGIPFGESNGNDVHVCNVKYKRWALLSCRGKKPSRIYGQAMAIINGSLYVFGGTTGYIYSTDLHKLDLNTREWTQLKPNNLSCDLPEERYRHEIAHDGQRIYILGGGTSWTAYSLNKIHAYNLETNAWEEIATKPHEKIGFPAARRCHSCVQIKNDVFICGGYNGEVILGDIWKLNLQTFQWVKLPATMPEPVYFHCAAVTPAGCMYIHGGVVNIHENKRTGSLFKIWLVVPSLLELAWEKLLAAFPNLANLSRTQLLHLGLTQGLIERLK

SEQ ID NO: 889048 - protein, 294 aa, Homo sapiens; identical to SEQ ID NO: 889040

SEQ ID NO: 889049 - protein, 442 aa, Homo sapiens; identical to SEQ ID NO: 889041

SEQ ID NO: 889050 - protein, 147 aa, Homo sapiens
MSAAQGWDRNRRRGGGAAGAGGGGSGAGGGSGGSGGRGTGQLNRFVQLSGRPHLPGHRPPPARSGHRCVADNTNLYVFGGYNPDYDESGGPDNEDYPLFRELWRYHFATGVWHQMGTDGYMPRELASMSLFTASSLGVDSISRNHFH

SEQ ID NO: 889051 - protein, 241 aa, Homo sapiens
MLRDTMKSWNDSQSDLCSTDQEEEEEMIFGENEDDLDEMMDLSDLPTSLFACSVHEAVFEAREQKERFEALFTIYDDQVTFQLFKSFRRVRINFSKPEAAARARIELHETDFNGQKLKLYFAQVQMSGEVRDKSYLLPPQPVKQFLISPPASPPVGWKQSEDAMPVINYDLLCAVSKLGPGEKYELHAGTESTPSVVVHVCESETEEEEETKNPKQKIAQTRRPDPPTAALNEPQTFDCAL

SEQ ID NO: 889052 - protein, 241 aa, Homo sapiens; identical to SEQ ID NO: 889051

SEQ ID NO: 889053 - protein, 231 aa, Homo sapiens
MLRDTMKSWNDSQSDLCSTDQEEEEEMIFGENEDDLDEMMDLSDLPTSLFACSVHEAVFEAREQKERFEALFTIYDDQVTFQLFKSFRRVRINFSKPEAAARARIELHETDFNGQKLKLYFAQSYLLPPQPVKQFLISPPASPPVGWKQSEDAMPVINYDLLCAVSKLGPGEKYELHAGTESTPSVVVHVCESETEEEEETKNPKQKIAQTRRPDPPTAALNEPQTFDCAL

SEQ ID NO: 889054 - protein, 178 aa, Homo sapiens
RNCPCTTGGGAAKGGGRWRRGRGGIFKRNNSRLMDEILKQQQELLGLDCSKYSPEFANSNDKDDQVLNCHLAVKVLSPEDGKADIVRAAQDFCQLVAQKQKRPTDLDVDTLASLLSSNGCPDPDLVLKFGPVDSTLGFLPWHIRLTEIVSLPSHLNISYEDFFSALRQYAACEQRLGK

SEQ ID NO: 889055 - protein, 293 aa, Homo sapiens
MTGLYELVWRVLHALLCLHRTLTSWLRVRFGTWNWIWRRCCRAASAAVLAPLGFTLRKPPAVGRNRRHHRHPRGGSCLAAAHHRMRWRADGRSLEKLPVHMGLVITEVEQEPSFSDIASLVVWCMAVGISYISVYDHQGIFKRNNSRLMDEILKQQQELLGLDCSKYSPEFANSNDKDDQVLNCHLAVKVLSPEDGKADIVRAAQDFCQLVAQKQKRPTDLDVDTLASLLSSNGCPDPDLVLKFGPVDSTLGFLPWHIRLTEIVSLPSHLNISYEDFFSALRQYAACEQRLGK

SEQ ID NO: 889056 - protein, 293 aa, Homo sapiens; identical to SEQ ID NO: 889055

SEQ ID NO: 889057 - protein, 169 aa, Homo sapiens
RNCPCTTGGGAAKGGGRWRRGRGGWRADGRSLEKLPVHMGLVITEVEQEPSFSDIASLVVWCMAVGISYISVYDHQGIFKRNNSRLMDEILKQQQELLGLDCSKYSPEFANSNDKDDQVLNCHLAVKVLSPEDGKADIVRAAQDFCQLVAQKQKRPTDLDVDTLASLLK

SEQ ID NO: 889058 - protein, 293 aa, Homo sapiens; identical to SEQ ID NO: 889055

SEQ ID NO: 889059 - protein, 275 aa, Homo sapiens
MTGLYELVWRVLHALLCLHRTLTSWLRVRFGTWNWIWRRCCRAASAAVLAPLGFTLRKPPAVGRNRRHHRHPRGGSCLAAAHHRMRWRADGRSLEKLPVHMGLVITEVEQEPSFSDIASLVVWCMAVGISYISVYDHQGIFKRNNSRLMDEILKQQQELLGLDCSKYSPEFANSNDKDDQVLNCHLAVKVLSPEDGQKRPTDLDVDTLASLLSSNGCPDPDLVLKFGPVDSTLGFLPWHIRLTEIVSLPSHLNISYEDFFSALRQYAACEQRLGK

SEQ ID NO: 889060 - protein, 293 aa, Homo sapiens; identical to SEQ ID NO: 889055

SEQ ID NO: 889061 - protein, 124 aa, Homo sapiens
STSASGAAAVQIRSKMAVVGVSSVSRLLGRSRPQLGRPMSSGAHGEEGSARMWKTLTFFVALPGVAVSMLNVYLKSHHGEHERPEFIAYPHLRIRTKPFPWGDGNHTLFHNPHVNPLPTGYEDE

SEQ ID NO: 889062 - protein, 84 aa, Homo sapiens
GGPVLRRRGDVGCGGPAASGGAVSGWADERGGEGDGRIYVGNLPTDVREKDLEDLFYKYGRIREIELKNRHGLVPFAFVRFEDP

SEQ ID NO: 889063 - protein, 124 aa, Homo sapiens
SAFPGLQEFGTRRSKMAVVGVSSVSRLLGRSRPQLGRPMSSGAHGEEGSARMWKTLTFFVALPGVAVSMLNVYLKSHHGEHERPEFIAYPHLRIRTKPFPWGDGNHTLFHNPHVNPLPTGYEDE

SEQ ID NO: 889064 - protein, 124 aa, Homo sapiens; identical to SEQ ID NO: 889063

SEQ ID NO: 889065 - protein, 124 aa, Homo sapiens; identical to SEQ ID NO: 889063

SEQ ID NO: 889066 - protein, 124 aa, Homo sapiens; identical to SEQ ID NO: 889063

SEQ ID NO: 889067 - protein, 146 aa, Homo sapiens
GALRGPRKEEMWSRLVWLGLRAPLGGRQGFTSKADPQGSGRITAAVIEHLERLALVDFGSREAVARLEKAIAFADRLRAVDTDGVEPMESVLEDRCLYLRSDNVVEGNCADELLQNSHRVVEEYFVAPPGNISLPKLDEQEPFPHS

SEQ ID NO: 889068 - protein, 146 aa, Homo sapiens; identical to SEQ ID NO: 889067

SEQ ID NO: 889069 - protein, 206 aa, Homo sapiens
SAFPGLQEFGTRRSKMAVVGVSSVSRLLGRSRPQLGRPMSSGAHGEEGSARMWKTLTFFVALPGVAVSMLNVYLKSHHGEHERPEFIAYPHLRIRTKGSGRITAAVIEHLERLALVDFGSREAVARLEKAIAFADRLRAVDTDGVEPMESVLEDRCLYLRSDNVVEGNCADELLQNSHRVVEEYFVAPPGNISLPKLDEQEPFPHS

SEQ ID NO: 889070 - protein, 131 aa, Homo sapiens
GALRGPRKEEMWSRLVWLGLRAPLGGRQGFTSKADPQGSGRITAAVIEHLERLALVDFGSREAVARLEKAIAFADRLRAVDTDGVEPMESVLEDRLECSGVISAHYKLCFLHSSDSCASASQVAGITDVYT

SEQ ID NO: 889071 - protein, 124 aa, Homo sapiens; identical to SEQ ID NO: 889063

SEQ ID NO: 889072 - protein, 81 aa, Homo sapiens
VCGFSAARMWKTLTFFVALPGVAVSMLNVYLKSHHGEHERPEFIAYPHLRIRTKPFPWGDGNHTLFHNPHVNPLPTGYEDE

SEQ ID NO: 889073 - protein, 146 aa, Homo sapiens; identical to SEQ ID NO: 889067

SEQ ID NO: 889074 - protein, 146 aa, Homo sapiens; identical to SEQ ID NO: 889067

SEQ ID NO: 889075 - protein, 123 aa, Homo sapiens
  misc_feature (122)..(123): Xaa can be any naturally occurring amino acid
SAFPGLQEFGTRRSKMAVVGVSSVSRLLGRSRPQLGRPMSSGAHGEEGSARMWKTLTFFVALPGVAVSMLNVYLKSHHGEHERPEFIAYPHLRIRTKPFPWGDGNHTLFHNPHVNPLPTGYXX

SEQ ID NO: 889076 - protein, 124 aa, Homo sapiens; identical to SEQ ID NO: 889063

SEQ ID NO: 889077 - protein, 124 aa, Homo sapiens; identical to SEQ ID NO: 889063

SEQ ID NO: 889078 - protein, 124 aa, Homo sapiens; identical to SEQ ID NO: 889063

SEQ ID NO: 889079 - protein, 124 aa, Homo sapiens; identical to SEQ ID NO: 889063

SEQ ID NO: 889080 - protein, 124 aa, Homo sapiens; identical to SEQ ID NO: 889063

SEQ ID NO: 889081 - protein, 146 aa, Homo sapiens; identical to SEQ ID NO: 889067

SEQ ID NO: 889082 - protein, 124 aa, Homo sapiens
RQGKSTGLCIGPLSKPTCVRLWTCKNTFLWTEFTDRTLARCPHCRKVSSIGRRYPRKRCICCFLLGLLLAVTATGLAFGTWKHARRYGGIYAAWAFVILLAVLCLGRALYWACMKVSHPVQNFS

SEQ ID NO: 889083 - protein, 277 aa, Homo sapiens
MAADGERSPLLSEPIDGGAGGNGLVGPGGSGAGPGGGLTPSAPPYGAAFPPFPEGHPAVLPGEDPPPYSPLTSPDSGSAPMITCRVCQSLINVEGKMHQHVVKCGVCNEATPIKNAPPGKKYVRCPCNCLLICKVTSQRIACPRPYCKRIINLGPVHPGPLSPEPQPMGVRVICGHCKNTFLWTEFTDRTLARCPHCRKVSSIGRRYPRKRCICCFLLGLLLAVTATGLAFGTWKHARRYGGIYAAWAFVILLAVLCLGRALYWACMKVSHPVQNFS

SEQ ID NO: 889084 - protein, 149 aa, Homo sapiens
MAADGERSPLLSEPIDGGAGGNGLVGPGGSGAGPGGGLTPSAPPYGAGKHAPPQGKPGRVRGAPRGTLKAGEGAGPRAEAGPSRQVRDCCTCDWARLPSLRNRDHSLGTEGGSEQPDRSANYEKPSELGQRVEDQKDFPTTVEHQWGCK

SEQ ID NO: 889085 - protein, 284 aa, Homo sapiens
MAADGERSPLLSEPIDGGAGGNGLVGPGGSGAGPGGGLTPSAPPYGAGKHAPPQAFPPFPEGHPAVLPGEDPPPYSPLTSPDSGSAPMITCRVCQSLINVEGKMHQHVVKCGVCNEATPIKNAPPGKKYVRCPCNCLLICKVTSQRIACPRPYCKRIINLGPVHPGPLSPEPQPMGVRVICGHCKNTFLWTEFTDRTLARCPHCRKVSSIGRRYPRKRCICCFLLGLLLAVTATGLAFGTWKHARRYGGIYAAWAFVILLAVLCLGRALYWACMKVSHPVQNFS

SEQ ID NO: 889086 - protein, 197 aa, Homo sapiens
MITCRVCQSLINVEGKMHQHVVKCGVCNEATPIKNAPPGKKYVRCPCNCLLICKVTSQRIACPRPYCKRIINLGPVHPGPLSPEPQPMGVRVICGHCKNTFLWTEFTDRTLARCPHCRKVSSIGRRYPRKRCICCFLLGLLLAVTATGLAFGTWKHARRYGGIYAAWAFVILLAVLCLGRALYWACMKVSHPVQNFS

SEQ ID NO: 889087 - protein, 149 aa, Homo sapiens; identical to SEQ ID NO: 889084

SEQ ID NO: 889088 - protein, 390 aa, Homo sapiens
MAADGERSPLLSEPIDGGAGGNGLVGPGGSGAGPGGGLTPSAPPYGAGKHAPPQGKPGRVRGAPRGTLKAGEGAGPRAEAGPSRQVRDCCTCDWARLPSLRNRDHSLGTEGGSEQPDRSANYEKPSELGQRVEDQKDFPTTVEHQWGCEVIPALLFASSPAFPPFPEGHPAVLPGEDPPPYSPLTSPDSGSAPMITCRVCQSLINVEGKMHQHVVKCGVCNEATPIKNAPPGKKYVRCPCNCLLICKVTSQRIACPRPYCKRIINLGPVHPGPLSPEPQPMGVRVICGHCKNTFLWTEFTDRTLARCPHCRKVSSIGRRYPRKRCICCFLLGLLLAVTATGLAFGTWKHARRYGGIYAAWAFVILLAVLCLGRALYWACMKVSHPVQNFS

SEQ ID NO: 889089 - protein, 149 aa, Homo sapiens; identical to SEQ ID NO: 889084

SEQ ID NO: 889090 - protein, 74 aa, Homo sapiens
PLTSDTPISLRTGLDYTVKLRMSHVLQFEDKSRKVKDASMQDSDTFEIYDPRNPVNKRRREESKKLMREKKERR

SEQ ID NO: 889091 - protein, 252 aa, Homo sapiens
MSNIYIQEPPTNGKVLLKTTAGDIDIELWSKEAPKACRNFIQLCLEAYYDNTIFHRVVPGFIVQGGDPTGTGSGGESIYGAPFKDEFHSRLRFNRRGLVAMANAGSHDNGSQFFFTLGRADELNNKHTIFGKVTGDTVYNMLRLSEVDIDDDERPHNPHKIKSCEVLFNPFDDIIPREIKRLKKEKPEEEVKKLKPKGTKNFSLLSFGEEAEEEEEEVNRVSQSMKGKSKSSHDLLKDDPHLSSVPVVERPC

SEQ ID NO: 889092 - protein, 200 aa, Homo sapiens
GASHEWEGFIENYSWMYDVAHLGQYKGLCSLRGMSNIYIQEPPTNGKVLLKTTAGDIDIELWSKEAPKACRNFIQLCLEAYYDNTIFHRVVPGFIVQGGDPTGTGSGGESIYGAPFKDEFHSRLRFNRRGLVAMANAGSHDNGSQFFFTLGRADELNNKHTIFGKVTGDTVYNMLRLSEVDIDDDERPHNPHKIKSCEVR

SEQ ID NO: 889093 - protein, 472 aa, Homo sapiens
MSNIYIQEPPTNGKVLLKTTAGDIDIELWSKEAPKACRNFIQLCLEAYYDNTIFHRVVPGFIVQGGDPTGTGSGGESIYGAPFKDEFHSRLRFNRRGLVAMANAGSHDNGSQFFFTLGRADELNNKHTIFGKVTGDTVYNMLRLSEVDIDDDERPHNPHKIKSCEVLFNPFDDIIPREIKRLKKEKPEEEVKKLKPKGTKNFSLLSFGEEAEEEEEEVNRVSQSMKGKSKSSHDLLKDDPHLSSVPVVESEKGDAPDLVDDGEDESAEHDEYIDGDEKNLMRERIAKKLKKDTSANVKSAGEGEVEKKSVSRSEELRKEARQLKRELLAAKQKKVENAAKQAEKRSEEEEAPPDGAVAEYRREKQKYEALRKQQSKKGTSREDQTLALLNQFKSKLTQAIAETPENDIPETEVEDDEGWMSHVLQFEDKSRKVKDASMQDSDTFEIYDPRNPVNKRRREESKKLMREKKERR

SEQ ID NO: 889094 - protein, 372 aa, Homo sapiens
MANAGSHDNGSQFFFTLGRADELNNKHTIFGKVTGDTVYNMLRLSEVDIDDDERPHNPHKIKSCEVLFNPFDDIIPREIKRLKKEKPEEEVKKLKPKGTKNFSLLSFGEEAEEEEEEVNRVSQSMKGKSKSSHDLLKDDPHLSSVPVVESEKGDAPDLVDDGEDESAEHDEYIDGDEKNLMRERIAKKLKKDTSANVKSAGEGEVEKKSVSRSEELRKEARQLKRELLAAKQKKVENAAKQAEKRSEEEEAPPDGAVAEYRREKQKYEALRKQQSKKGTSREDQTLALLNQFKSKLTQAIAETPENDIPETEVEDDEGWMSHVLQFEDKSRKVKDASMQDSDTFEIYDPRNPVNKRRREESKKLMREKKERR

SEQ ID NO: 889095 - protein, 71 aa, Homo sapiens
  misc_feature (11)..(11): Xaa can be any naturally occurring amino acid
GGGRRRTVSLXGFEYDQLMSHVLQFEDKSRKVKDASMQDSDTFEIYDPRNPVNKRRREESKKLMREKKERR

SEQ ID NO: 889096 - protein, 472 aa, Homo sapiens; identical to SEQ ID NO: 889093

SEQ ID NO: 889097 - protein, 334 aa, Homo sapiens
MPNRTPENNKHTARSLTTNRPTRTTPDTNITNTHRTSQNKRKHSSATNQHTQHNRRQHTHRTIENGRAHQPRNDTTRGEEHATPAGNNNHTPSNTHRDAQAHSTAPNSNEQHQRTAPSRRRPNDTGTRHAPSSTPEGTKERKSRRRRNRERKDEEKNTQERGTRKDEEDSDKGDKTTKRKEEGKRQGEEQRRTRGQNSRDQRGTPDAPPDSRRREGGTAEEQDERPATARPEGDEGAENEEARDPASQRTAGRSAGSAAQHTHERRRARRSQAHRARAKGRGATTGSAGNTQTQQQRKGGTGERSSDRRRGRSTKNKNKRRKTEGEKSKNPRTE

SEQ ID NO: 889098 - protein, 472 aa, Homo sapiens; identical to SEQ ID NO: 889093

SEQ ID NO: 889099 - protein, 389 aa, Homo sapiens
MSNIYIQEPPTNGKVLLKTTAGDIDIELWSKEAPKACRNFIQLCLEAYYDNTIFHRVVPGFIVQGGDPTGTGSGGESIYGAPFKDEFHSRLRFNRRGLVAMANAGSHDNGSQFFFTLGRADELNNKHTIFGKVTGDTVYNMLRLSEVDIDDDERPHNPHKIKSCEVLFNPFDDIIPREIKRLKKEKPEEEVKKLKPKGTKNFSLLSFGEEAEEEEEEVNRVSQSMKGKSKSSHDLLKDDPHLSSVPVVERNTHFPFLQDGEDESAEHDEYIDGDEKNLMRERIAKKLKKDTSANVKSAGEGEVEKKSVSRSEELRKEARQLKRELLAAKQKKVENAAKQAEKRSEEEEAPPDGAVAEYRREKQKYEALRKQQSKKGTSREDQDVTCTSV

SEQ ID NO: 889100 - protein, 174 aa, Homo sapiens
MCKLSRNERLKKLKSEELRKEARQLKRELLAAKQKKVENAAKQAEKRSEEEEAPPDGAVAEYRREKQKYEALRKQQSKKGTSREDQTLALLNQFKSKLTQAIAETPENDIPETEVEDDEGWMSHVLQFEDKSRKVKDASMQDSDTFEIYDPRNPVNKRRREESKKLMREKKERR

SEQ ID NO: 889101 - protein, 131 aa, Homo sapiens [sequence omitted]

SEQ ID NO: 889102 - protein, 393 aa, Homo sapiens
MDENESNQSLMTSSQYPKEAVRKRQNSARNSGASDSSRFSRKSFKLDYRLEEDVTKSKKGKDGRFVNPWPTWKNPSIPNVLRWLIMEKDHSSVPSSKEELDKELPVLKPYFITNPEEAGVREAGLRVTWLGHATVMVEMDELIFLTDPIFSSRASPSQYMGPKRFRRSPCTISELPPIDAVLISHNHYDHLDYNSVIALNERFGNELRWFVPLGLLDWMQKCGCENVIELDWWEENCVPGHDKVTFVFTPSQHWCKRTLMDDNKVLWGSWSVLGPWNRFFFAGDTGYCPAFEEIGKRFGPFDLAAIPIGAYEPRWFMKYQHVDPEEAVRIHTDVQTKKSMAIHWGTFALANEHYLEPPVKLNEALERYGLNAEDFFVLKHGESRYLNNNDENF

SEQ ID NO: 889103 - protein, 411 aa, Homo sapiens
MFNSVFFPLVFFSSSPKDMDENESNQSLMTSSQYPKEAVRKRQNSARNSGASDSSRFSRKSFKLDYRLEEDVTKSKKGKDGRFVNPWPTWKNPSIPNVLRWLIMEKDHSSVPSSKEELDKELPVLKPYFITNPEEAGVREAGLRVTWLGHATVMVEMDELIFLTDPIFSSRASPSQYMGPKRFRRSPCTISELPPIDAVLISHNHYDHLDYNSVIALNERFGNELRWFVPLGLLDWMQKCGCENVIELDWWEENCVPGHDKVTFVFTPSQHWCKRTLMDDNKVLWGSWSVLGPWNRFFFAGDTGYCPAFEEIGKRFGPFDLAAIPIGAYEPRWFMKYQHVDPEEAVRIHTDVQTKKSMAIHWGTFALANEHYLEPPVKLNEALERYGLNAEDFFVLKHGESRYLNNNDENF

SEQ ID NO: 889104 - protein, 393 aa, Homo sapiens; identical to SEQ ID NO: 889102

SEQ ID NO: 889105 - protein, 393 aa, Homo sapiens; identical to SEQ ID NO: 889102

SEQ ID NO: 889106 - protein, 113 aa, Homo sapiens [sequence omitted]

SEQ ID NO: 889107 - protein, 169 aa, Homo sapiens
DNWDVLFQVPPHIQRQVAKRVWKSSPEALDFIRRRNLRKIQSARIKMEEDALLSDPVETSAEARAAVLAQSKPSDEGSSEEPAVPSGTARSHDDEEGAGNPPIPEQDRPLLRVPREKEAKTGVTTSFLRCFSFYKVPDRGKGWGYIWDVTGNIKERVEGKDLKVRRSST

SEQ ID NO: 889108 - protein, 356 aa, Homo sapiens
SVLGGAPGHNPDRRTKMVSIHSLSELERLKLQETAYHELVARHFLSEFKPDRALPIDRPNTLDKWFLILRGQQRAVSHKTFGISLEEVLVNEFTRRKHLELTATMQVEEATGQAAGRRRGNVVRRVFGRIRRFFSRRRNEPTLPREFTRRGRRGAVSVDSLAELEDGALLLQTLQLSKISFPIGQRLLGSKRKMSLNPIAKQIPQVVEACCQFIEKHGLSAVGIFTLEYSVQRVRQLREEFDQGLDVVLDDNQNVHDVAALLKEFFRDMKDSLLPDDLYMSFLLTATLKPQDQLSALQLLVYLMPPCHSDTLERLLKALHKITENCEDSIGIDGQLVPGNRMTSTNLALVFGSTFL

SEQ ID NO: 889109 - protein, 363 aa, Homo sapiens
  misc_feature (354)..(354): Xaa can be any naturally occurring amino acid
  misc_feature (361)..(361): Xaa can be any naturally occurring amino acid
SVLGGAPGHNPDRRTKMVSIHSLSELERLKLQETAYHELVARHFLSEFKPDRALPIDRPNTLDKWFLILRGQQRAVSHKTFGISLEEVLVNEFTRRKHLELTATMQVEEATGQAAGRRRGNVVRRVFGRIRRFFSRRRNEPTLPREFTRRGRRGAVSVDSLAELEDGALLLQTLQLSKISFPIGQRLLGSKRKMSLNPIAKQIPQVVEACCQFIEKHGLSAVGIFTLEYSVQRVRQLREEFDQGLDVVLDDNQNVHDVAALLKEFFRDMKDSLLPDDLYMSFLLTATLKPQDQLSALQLLVYLMPPCHSDTLERLLKALHKITENCEDSIGIDGQLVQATDDFTTWLGVGLSLXKFARESXAL

SEQ ID NO: 889110 - protein, 1015 aa, Homo sapiens
MGAERRLLSIKEAFRLAQQPHQNQAKLVVALSRTYRTMDDKTVFHEEFIHYLKYVMVVYKREPAVERVIEFAAKFVTSFHQSDMEDDEEEEDGGLLNYLFTFLLKSHEANSNAVRFRVCLLINKLLGSMPENAQIDDDVFDKINKAMLIRLKDKIPNVRIQAVLALSRLQDPKDDECPVVNAYATLIENDSNPEVRRAVLSCIAPSAKTLPKIVGRTKDVKEAVRKLAYQVLAEKVHMRAMSIAQRVMLLQQGLNDRSDAVKQAMQKHLLQGWLRFSEGNILELLHRLDVENSSEVAVSVLNALFSITPLSELVGLCKNNDGRKLIPVETLTPEIALYWCALCEYLKSKGDEGEEFLEQILPEPVVYADYLLSYIQSIPVVNEEHRGDFSYIGNLMTKEFIGQQLILIIKSLDTSEEGGRKKLLAVLQEILILPTIPISLVSFLVERLLHIIIDDNKRTQIVTEIISEIRAPIVTVGVNNDPADVRKKELKMAEIKVKLIEAKEALENCITLQDFNRASELKEEIKALEDARINLLKETEQLEIKEVHIEKNDAETLQKCLILCYELLKQMSISTGLSATMNGIIESLILPGIISIHPVVRNLAVLCLGCCGLQNQDFARKHFVLLLQVLQIDDVTIKISALKAIFDQLMTFGIEPFKTKKIKTLHCEGTEINSDDEQESKEVEETATAKNVLKLLSDFLDSEVSELRTGAAEGLAKLMFSGLLVSSRILSRLILLWYNPVTEEDVQLRHCLGVFFPVFAYASRTNQECFEEAFLPTLQTLANAPASSPLAEIDITNVAELLVDLTRPSGLNPQAKTSQDYQALTVHDNLAMKICNEILTSPCSPEIRVYTKALSSLELSSHLAKDLLVLLNEILEQVKDRTCLRALEKIKIQLEKGNKEFGDQAEAAQDATLTTTTFQNEDEKNKEVYMTPLRGVKATQASKSTQLKTNRGQRKVTVSARTNRRCQTAEADSESDHEVPEPESEMKMRLPRRAKTAALEKSKLNLAQFLNEDLS

SEQ ID NO: 889111 - protein, 158 aa, Homo sapiens
MQKHLLQGWLRFSEGNILELLHRLDVENSSEVAVSVLNALFSITPLSELVGLCKNNDGRKLIPVETLTPEIALYWCALCEYLKSKGDEGEEFLEQILPEPVVYADYLLSYIQSIPVVNEEHRGDFSYIGNLMTKEFIGQQLILIIKSLDTSEEGGRYV

SEQ ID NO: 889112 - protein, 1015 aa, Homo sapiens; identical to SEQ ID NO: 889110

SEQ ID NO: 889113 - protein, 975 aa, Homo sapiens
MGAERRLLSIKEAFRLAQQPHQNQAKLVVALSRTYRTMDDKTVFHEEFIHYLKYVMVVYKREPAVERVIEFAAKFVTSFHQSDMEDDEEEEDGGLLNYLFTFLLKSHEANSNAVRFRVCLLINKLLGSMPENAQIDDDVFDKINKAMLIRLKDKIPNVRIQAVLALSRLQDPKDDECPVVNAYATLIENDSNPEVRRAVLSCIAPSAKTLPKIVGRTKDVKEAVRKLAYQVLAEKVHMRAMSIAQRVMLLQQGLNDRSDAVKQAMQKHLLQGWLRFSEGNILELLHRLDVENSSEVAVSVLNALFSITPLSELVGLCKNNDGRKLIPVETLTPEIALYWCALCEYLKSKGDEGEEFLEQILPEPVVYADYLLSYIQSIPVVNEEHRGDFSYIGNLMTKEFIGQQLILIIKSLDTSEEGGRKKLLAVLQEILILPTIPISLVSFLVERLLHIIIDDNKRTQIVTEIISEIRAPIVTVGVNNDPADVRKKELKMAEIKVKLIEAKEALENCITLQDFNRASELKEEIKALEDARINLLKETEQLEIKEVHIEKNDAETLQKCLILCYELLKQMSISTGLSATMNGIIESLILPGIISIHPVVRNLAVLCLGCCGLQNQDFARKHFVLLLQVLQIDDVTIKISALKAIFDQLMTFGIEPFKTKKIKTLHCEGTEINSDDEQESKEVEETATAKNVLKLLSDFLDSEVSELRTGAAEGLAKLMFSGLLVSSRILSRLILLWYNPVTEEDVQLRHCLGVFFPVFAYASRTNQECFEEAFLPTLQTLANAPASSPLAEIDITNVAELLVDLTRPSGLNPQAKTSQDYQALTVHDNLAMKICNEILTSPCSPEIRVYTKALSSLELSSHLAKDLLVLLNEILEQVKDRTCLRALEKIKIQLEKGNKEFGDQAEAAQDATLTTTTFQNEDEKNKEVYMTPLRGVKATQASKSTQLKTNRGQRKVTVSARTNRRCQTAEADSER

SEQ ID NO: 889114 - protein, 935 aa, Homo sapiens
MGAERRLLSIKEAFRLAQQPHQNQAKLVVALSRTYRTMDDKTVFHEEFIHYLKYVMVVYKREPAVERVIEFAAKFVTSFHQSDMEDDEEEEDGGLLNYLFTFLLKSHEANSNAVRFRVCLLINKLLGSMPENAQIDDDVFDKINKAMLIRLKDKIPNVRIQAVLALSRLQDPKDDECPVVNAYATLIENDSNPEVRRAVLSCIAPSAKTLPKIVGRTKDVKEAVRKLAYQVLAEKVHMRAMSIAQRVMLLQQGLNDRSDAVKQAMQKHLLQGWLRFSEGNILELLHRLDVENSSEVAVSVLNALFSITPLSELVGLCKNNDGRKLIPVETLTPEIALYWCALCEYLKSKGDEGEEFLEQILPEPVVYADYLLSYIQSIPVVNEEHRGDFSYIGNLMTKEFIGQQLILIIKSLDTSEEGGRKKLLAVLQEILILPTIPISLVSFLVERLLHIIIDDNKRTQIVTEIISEIRAPIVTVGVNNDPADVRKKELKMAEIKVKLIEAKEALENCITLQDFNRASELKEEIKALEDARINLLKETEQLEIKEVHIEKNDAETLQKCLILCYELLKQMSISTGLSATMNGIIESLILPGIISIHPVVRNLAVLCLGCCGLQNQDFARKHFVLLLQVLQIDDVTIKISALKAIFDQLMTFGIEPFKTKKIKTLHCEGTEINSDDEQESKEVEETATAKNVLKLLSDFLDSEVSELRTGAAEGLAKLMFSGLLVSSRILSRLILLWYNPVTEEDVQLRHCLGVFFPVFAYASRTNQECFEEAFLPTLQTLANAPASSPLAEIDITNVAELLVDLTRPSGLNPQAKTSQDYQALTVHDNLAMKICNEILTSPCSPEIRVYTKALSSLELSSHLAKDLLVLLNEILEQVKDRTCLRALEKIKIQLEKGNKEFGDQAEAAQDATLTTTTFQNEDGNHILNRIFIRKE

SEQ ID NO: 889115 - protein, 388 aa, Homo sapiens
MGAERRLLSIKEAFRLAQQPHQNQAKLVVALSRTYRTMDDKTVFHEEFIHYLKYVMVVYKREPAVERVIEFAAKFVTSFHQSDMEDDEEEEDGGLLNYLFTFLLKSHEANSNAVRFRVCLLINKLLGSMPENAQIDDDVFDKINKAMLIRLKDKIPNVRIQAVLALSRLQDPKDDECPVVNAYATLIENDSNPEVRRAVLSCIAPSAKTLPKIVGRTKDVKEAVRKLAYQVLAEKVHMRAMSIAQRVMLLQQGLNDRSDAVKQAMQKHLLQGWLRFSEGNILELLHRLDVENSSEVAVSVLNALFSITPLSELVGLLQKLSQRFGRPLLLLVLITIQLYEGIQLQSTAEPEFSTDDGDVLFARCHSKHFTTELHNSTSIRWVFLSPLS

SEQ ID NO: 889116 - protein, 117 aa, Homo sapiens
KRSRPRPPPLARPGPPSLRGPPWPSGSAHRDSSLVHLRDSLHRDLRFGEVRDLPEVAWAQARKPPKPGRRSHGPRLGFSEPTPPASGRRGPLFLSPIVNVERNIYDHRGDQTSNIEP

SEQ ID NO: 889117 - protein, 276 aa, Homo sapiens
GLSCLKKMLICTGVGGLSRGGYARRTNQECFEEAFLPTLQTLANAPASSPLAEIDITNVAELLVDLTRPSGLNPQAKTSQDYQALTVHDNLAMKICNEILTSPCSPEIRVYTKALSSLELSSHLAKDLLVLLNEILEQVKDRTCLRALEKIKIQLEKGNKEFGDQAEAAQDATLTTTTFQNEDEKNKEVYMTPLRGVKATQASKSTQLKTNRGQRKVTVSARTNRRCQTAEADSESDHEVPEPESEMKMRLPRRAKTAALEKSKLNLAQFLNEDLS

SEQ ID NO: 889118 - protein, 751 aa, Homo sapiens [sequence omitted]

SEQ ID NO: 889119 - protein, 980 aa, Homo sapiens
MGAERRLLSIKEAFRLAQQPHQNQAKLVVALSRTYRTMDDKTVFHEEFIHYLKYVMVVYKREPAVERVIEFAAKFVTSFHQSDMEDDEEEEDGGLLNYLFTFLLKSHEANSNAVRFRVCLLINKLLGSMPENAQIDDDVFDKINKAMLIRLKDKIPNVRIQAVLALSRLQDPKDDECPVVNAYATLIENDSNPEVRRAVLSCIAPSAKTLPKIVGRTKDVKEAVRKLAYQVLAEKVHMRAMSIAQRVMLLQQGLNDRSDAVKQAMQKHLLQGWLRFSEGNILELLHRLDVENSSEVAVSVLNALFSITPLSELVGLCKNNDGRKLIPVETLTPEIALYWCALCEYLKSKGDEGEEFLEQILPEPVVYADYLLSYIQSIPVVNEEHRGDFSYIGNLMTKEFIGQQLILIIKSLDTSEEGGRKKLLAVLQEILILPTIPISLVSFLVERLLHIIIDDNKRTQIVTEIISEIRAPIVTVGVNNDPADVRKKELKMAEIKVKLIEAKEALENCITLQDFNRASELKEEIKALEDARINLLKETEQLEIKEVHIEKNDAETLQKCLILCYELLKQMSISTGLSATMNGIIESLILPGIISIHPVVRNLAVLCLGCCGLQNQDFARKHFVLLLQVLQIDDVTIKISALKAIFDQLMTFGIEPFKTKKIKTLHCEGTEINSDDEQESKEVEETATAKNVLKLLSDFLDSEVSELRTGAAEGLAKLMFSGLLVSSRILSRLILLWYNPVTEEDVQLRHCLGVFFPVFAYASRTNQECFEEAFLPTLQTLANAPASSPLAEIDITNVAELLVDLTRPSGLNPQAKTSQDYQALTVHDNLAMKICNEILTSPCSPEIRVYTKALSSLELSSHLAKDLLVLLNEILEQVKDRTCLRALEKIKIQLEKGNKEFGDQAEAAQDATLTTTTFQNEDEKNKEVYMTPLRGVKATQASKSTQLKTNRGQRKVTVSARTNRRCQTAEADSERYVMHV

SEQ ID NO: 889120 - protein, 1015 aa, Homo sapiens; identical to SEQ ID NO: 889110

SEQ ID NO: 889121 - protein, 401 aa, Homo sapiens
  misc_feature (1)..(1): Xaa can be any naturally occurring amino acid
XDAALTLLTYHALQVLQIDDVTIKISALKAIFDQLMTFGIEPFKTKKIKTLHCEGTEINSDDEQESKEVEETATAKNVLKLLSDFLDSEVSELRTGAAEGLAKLMFSGLLVSSRILSRLILLWYNPVTEEDVQLRHCLGVFFPVFAYASRTNQECFEEAFLPTLQTLANAPASSPLAEIDITNVAELLVDLTRPSGLNPQAKTSQDYQALTVHDNLAMKICNEILTSPCSPEIRVYTKALSSLELSSHLAKDLLVLLNEILEQVKDRTCLRALEKIKIQLEKGNKEFGDQAEAAQDATLTTTTFQNEDEKNKEVYMTPLRGVKATQASKSTQLKTNRGQRKVTVSARTNRRCQTAEADSESDHEVPEPESEMKMRLPRRAKTAALEKSKLNLAQFLNEDLS

SEQ ID NO: 889122 - protein, 691 aa, Homo sapiens
MGAERRLLSIKEAFRLAQQPHQNQAKLVVALSRTYRTMDDKTVFHEEFIHYLKYVMVVYKREPAVERVIEFAAKFVTSFHQSDMEDDEEEEDGGLLNYLFTFLLKSHEANSNAVRFRVCLLINKLLGSMPENAQIDDDVFDKINKAMLIRLKDKIPNVRIQAVLALSRLQDPKDDECPVVNAYATLIENDSNPEVRRAVLSCIAPSAKTLPKIVGRTKDVKEAVRKLAYQVLAEKVHMRAMSIAQRVMLLQQGLNDRSDAVKQAMQKHLLQGWLRFSEGNILELLHRLDVENSSEVAVSVLNALFSITPLSELVGLCKNNDGRKLIPVETLTPEIALYWCALCEYLKSKGDEGEEFLEQILPEPVVYADYLLSYIQSIPVVNEEHRGDFSYIGNLMTKEFIGQQLILIIKSLDTSEEGGRKKLLAVLQEILILPTIPISLVSFLVERLLHIIIDDNKRTQIVTEIISEIRAPIVTVGVNNDPADVRKKELKMAEIKVKLIEAKEALENCITLQDFNRASELKEEIKALEDARINLLKETEQLEIKEVHIEKNDAETLQKCLILCYELLKQMSISTGLSATMNGIIESLILPGIISIHPVVRNLAVLCLGCCGLQNQDFARKHFVLLLQVLQIDDVTIKISALKAIFDQLMTFGIEPFKTKKKKKKKKKKNLWGAGALKKFFQTPFGVGGGG

SEQ ID NO: 889123 - protein, 351 aa, Homo sapiens
MALPFQKELEKYKNIDEDELLGKLSEEELKQLENVLDDLDPESAMLPAGFRQKDQTQKAATGPFDREHLLMYLEKEALEQKDREDFVPFTGEKKGRVFIPKEKPIETRKEEKVTLDPELEEALASASDTELYDLAAVLGVHNLLNNPKFDEETANNKGGKGPVRNVVKGEKVKPVFEEPPNPTNVEISLQQMKANDPSLQEVNLNNIKNIPIPTLREFAKALETNTHVKKFSLAATRSNDPVAIAFADMLKVNKTLTSLNIESNFITGTGILALVEALKENDTLTEIKIDNQRQQLGTAVEMEIAQMLEENSRILKFGYQFTKQGPRTRVAAAITKNNDLVRKKRVEADRR

SEQ ID NO: 889124 - protein, 378 aa, Homo sapiens
MALPFQKELEKYKNIDEDELLGKLSEEELKQLENVLDDLDPEAGVPGKISAHCNLCLPDSSDSPTSASQSAMLPAGFRQKDQTQKAATGPFDREHLLMYLEKEALEQKDREDFVPFTGEKKGRVFIPKEKPIETRKEEKVTLDPELEEALASASDTELYDLAAVLGVHNLLNNPKFDEETANNKGGKGPVRNVVKGEKVKPVFEEPPNPTNVEISLQQMKANDPSLQEVNLNNIKNIPIPTLREFAKALETNTHVKKFSLAATRSNDPVAIAFADMLKVNKTLTSLNIESNFITGTGILALVEALKENDTLTEIKIDNQRQQLGTAVEMEIAQMLEENSRILKFGYQFTKQGPRTRVAAAITKNNDLVRKKRVEADRR

SEQ ID NO: 889125 - protein, 307 aa, Homo sapiens
MLPAGFRQKDQTQKAATGPFDREHLLMYLEKEALEQKDREDFVPFTGEKKGRVFIPKEKPIETRKEEKVTLDPELEEALASASDTELYDLAAVLGVHNLLNNPKFDEETANNKGGKGPVRNVVKGEKVKPVFEEPPNPTNVEISLQQMKANDPSLQEVNLNNIKNIPIPTLREFAKALETNTHVKKFSLAATRSNDPVAIAFADMLKVNKTLTSLNIESNFITGTGILALVEALKENDTLTEIKIDNQRQQLGTAVEMEIAQMLEENSRILKFGYQFTKQGPRTRVAAAITKNNDLVRKKRVEADRR

SEQ ID NO: 889126 - protein, 378 aa, Homo sapiens; identical to SEQ ID NO: 889124

SEQ ID NO: 889127 - protein, 280 aa, Homo sapiens
MALPFQKELEKYKNIDEDELLGKLSEEELKQLENVLDDLDPEAGVPGKISAHCNLCLPDSSDSPTSASQSAMLPAGFRQKDQTQKAATGPFDREHLLMYLEKEALEQKDREDFVPFTGEKKGRVFIPKEKPIETRKEEKVTLDPELEEALASASDTELYDLAAVLGVHNLLNNPKFDEETANNKGGKGPVRNVVKGEKVKPVFEEPPNPTNVEISLQQMKANDPSLQEVNLNNIKNIPIPTLREFAKALETNTHVKKFSLAATRSNDPVAIVSKILRNIT

SEQ ID NO: 889128 - protein, 255 aa, Homo sapiens
MALPFQKELEKYKNIDEDELLGKLSEEELKQLENVLDDLDPEAGVPGKISAHCNLCLPDSSDSPTSASQSAMLPAGFRQKDQTQKAATGPFDREHLLMYLEKEALEQKDREDFVPFTGEKKGRVFIPKEKPIETRKEEKVTLDPELEEALASASDTELYDLAAVLGVHNLLNNPKFDEETANNKGGKGPVRNVVKGEKVKPVFEEPPNPTNVEISLQQMKANDPSLQEVNLNNIKNITNSKLVKKKPRQRTSGIL

SEQ ID NO: 889129 - protein, 1723 aa, Homo sapiens
GGQVEDLSKQLKRVDGQVQGIATHVQHFSQASGLDLAALEWPEEQEVGVRAFDRVRTGSIMKDAAEELSFARVLLQRVDELEKLFKDREQFLELVSRKLSLVPGAEEVTMVTWEELEQAITDGWRASQAGSETLMGFSKHGGFTSLTSPEGTLSGDSTKQPSIEQALDSASGLGPDRTASGSGGTAHPSDGVSSREQSKVPSGTGRQQQPRARDEAGVPRLHQSSTFQFKSDSDRHRSREKLTSTQPRRNARPGPVQQDLPLARDQPSSVPASQSQVHLRPDRRGLEPTGMNQPGLVPASTYPHGVVPLSMGQLGVPPPEMDDRELIPFVVDEQRMLPPSVPGRDQQGLELPSTDQHGLVSVSAYQHGMTFPGTDQRSMEPLGMDQRGCVISGMGQQGLVPPGIDQQGLTLPVVDQHGLVLPFTDQHGLVSPGLMPISADQQGFVQPSLEATGFIQPGTEQHDLIQSGRFQRALVQRGAYQPGLVQPGADQRGLVRPGMDQSGLAQPGADQRGLVWPGMDQSGLAQPGRDQHGLIQPGTGQHDLVQSGTGQGVLVQPGVDQPGMVQPGRFQRALVQPGAYQPGLVQPGADQIDVVQPGADQHGLVQSGADQSDLAQPGAVQHGLVQPGVDQRGLAQPRADHQRGLVPPGADQRGLVQPGADQHGLVQPGVDQHGLAQPGEVQRSLVQPGIVQRGLVQPGAVQRGLVQPGAVQRGLVQPGVDQRGLVQPGAVQRGLVQPGAVQHGLVQPGADQRGLVQPGVDQRGLVQPGVDQRGLVQPGMDQRGLIQPGADQPGLVQPGAGQLGMVQPGIGQQGMVQPQADPHGLVQPGAYPLGLVQPGAYLHDLSQSGTYPRGLVQPGMDQYGLRQPGAYQPGLIAPGTKLRGSSTFQADSTGFISVRPYQHGMVPPGREQYGQVSPLLASQGLASPGIDRRSLVPPETYQQGLMHPGTDQHSPIPLSTGLGSTHPDQQHVASPGPGEHDQVYPDAAQHGHAFSLFDSHDSMYPGYRGPGYLSADQHGQEGLDPNRTRASDRHGIPAQKAPGQDVTLFRSPDSVDRVLSEGSEVSSEVLSERRNSLRRMSSSFPTAVETFHLMGELSSLYVGLKESMKDLDEEQAGQTDLEKIQFLLAQMVKRTIPPELQEQLKTVKTLAKEVWQEKAKVERLQRILEGEGNQEAGKELKAGELRLQLGVLRVTVADIEKELAELRESQDRGKAAMENSVSEASLYLQDQLDKLRMIIESMLTSSSTLLSMSMAPHKAHTLAPGQIDPEATCPACSLDVSHQVSTLVRRYEQLQDMVNSLAVSRPSKKAKLQRQDEELLGRVQSAILQVQGDCEKLNITTSNLIEDHRQKQKDIAMLYQGLEKLEKEKANREHLEMEIDVKADKSALATKVSRVQFDATTEQLNHMMQELVAKMSGQEQDWQKMLDRLLTEMDNKLDRLELDPVKQLLEDRWKSLRQQLRERPPLYQADEAAAMRRQLLAHFHCLSCDRPLETPVTGHAIPVTPAGPGLPGHHSIRPYTVFELEQVRQHSRNLKLGSAFPRGDLAQMEQSVGRLRSMHSKMLMNIEKVQIHFGGSTKASSQIIRELLHAQCLGSPCYKRVTDMADYTYSTVPRRCGGSHTLTYPYHRSRPQHLPRGLYPTEEIQIAMKHDEVDILGLDGHIYKGRMDTRLPGILRKDSSGTSKRKSQQPRPHVHRPPSLSSNGQLPSRPQSAQISAGNTSER

SEQ ID NO: 889130 - protein, 142 aa, Homo sapiens
SQSNSGPGLGNAKISFLDCVPSRRLKETTSDGPSELSLCSAQSYRPEASQDRGIARDSLDKIHWRGVEGERPPAVSASPCVPDGPGSAWVWPECGVWQSLIVHHRVTVADIEKELAELRESQDRGKAAMENSVSEASLYLQD

SEQ ID NO: 889131 - protein, 1723 aa, Homo sapiens; identical to SEQ ID NO: 889129

SEQ ID NO: 889132 - protein, 1184 aa, Homo sapiens
GGQVEDLSKQLKRVDGQVQGIATHVQHFSQASGLDLAALEWPEEQEVGVRAFDRVRTGSIMKDAAEELSFARVLLQRVDELEKLFKDREQFLELVSRKLSLVPGAEEVTMVTWEELEQAITDGWRASQAGSETLMGFSKHGGFTSLTSPEGTLSGDSTKQPSIEQALDSASGLGPDRTASGSGGTAHPSDGVSSREQSKVPSGTGRQQQPRARDEAGVPRLHQSSTFQFKSDSDRHRSREKLTSTQPRRNARPGPVQQDLPLARDQPSSVPASQSQVHLRPDRRGLEPTGMNQPGLVPASTYPHGVVPLSMGQLGVPPPEMDDRELIPFVVDEQRMLPPSVPGRDQQGLELPSTDQHGLVSVSAYQHGMTFPGTDQRSMEPLGMDQRGCVISGMGQQGLVPPGIDQQGLTLPVVDQHGLVLPFTDQHGLVSPGLMPISADQQGFVQPSLEATGFIQPGTEQHDLIQSGRFQRALVQRGAYQPGLVQPGADQRGLVRPGMDQSGLAQPGADQRGLVWPGMDQSGLAQPGRDQHGLIQPGTGQHDLVQSGTGQGVLVQPGVDQPGMVQPGRFQRALVQPGAYQPGLVQPGADQIDVVQPGADQHGLVQSGADQSDLAQPGAVQHGLVQPGVDQRGLAQPRADHQRGLVPPGADQRGLVQPGADQHGLVQPGVDQHGLAQPGEVQRSLVQPGIVQRGLVQPGAVQRGLVQPGAVQRGLVQPGVDQRGLVQPGAVQRGLVQPGAVQHGLVQPGADQRGLVQPGVDQRGLVQPGVDQRGLVQPGMDQRGLIQPGADQPGLVQPGAGQLGMVQPGIGQQGMVQPQADPHGLVQPGAYPLGLVQPGAYLHDLSQSGTYPRGLVQPGMDQYGLRQPGAYQPGLIAPGTKLRGSSTFQADSTGFISVRPYQHGMVPPGREQYGQVSPLLASQGLASPGIDRRSLVPPETYQQGLMHPGTDQHSPIPLSTGLGSTHPDQQHVASPGPGEHDQVYPDAAQHGHAFSLFDSHDSMYPGYRGPGYLSADQHGQEGLDPNRTRASDRHGIPAQKAPGQDVTLFRSPDSVDRVLSEGSEVSSEVLSERRNSLRRMSSSFPTAVETFHLMGELSSLYVGLKESMKDLDEEQAGQTDLEKIQFLLAQMGGCRLPIEEKPLSLFSVGFILFFPWPQLLAATHLPESLKTACHSEHVPQPSES

SEQ ID NO: 889133 - protein, 292 aa, Homo sapiens
MKSEAKDGEEESLQTAFKKLRVDASGSVASLSVGEGTGVRAPVRTATDDTKPKTTCASKDSWHGSTRKSSRGAVRTQRRRRSKSPVLHPPKFIHCSTIASSSSSQLKHKSQTDSPDGSSGLGISSPKEFSAGESSTSLDANHTGAVVEPLRTSVPRLPSESKKEDSSDATQVPQASLKASDLSDFQSVSKLNQGKPCTCIGKECQCKRWHDMEVYSFSGLQSVPPLAPERRSTLEDYSQSLHARTLSGSPRSCSEQARVFVDDVTIEDLSGYMEYYLYIPKKMSHMAEMMYT

SEQ ID NO: 889134 - protein, 292 aa, Homo sapiens; identical to SEQ ID NO: 889133

SEQ ID NO: 889135 - protein, 292 aa, Homo sapiens; identical to SEQ ID NO: 889133

SEQ ID NO: 889136 - protein, 292 aa, Homo sapiens; identical to SEQ ID NO: 889133

SEQ ID NO: 889137 - protein, 292 aa, Homo sapiens; identical to SEQ ID NO: 889133

SEQ ID NO: 889138 - protein, 292 aa, Homo sapiens; identical to SEQ ID NO: 889133

SEQ ID NO: 889139 - protein, 292 aa, Homo sapiens; identical to SEQ ID NO: 889133

SEQ ID NO: 889140 - protein, 254 aa, Homo sapiens
MKSEAKDGEEESLQTAFKKLRVDASGSTRKSSRGAVRTQRRRRSKSPVLHPPKFIHCSTIASSSSSQLKHKSQTDSPDGSSGLGISSPKEFSAGESSTSLDANHTGAVVEPLRTSVPRLPSESKKEDSSDATQVPQASLKASDLSDFQSVSKLNQGKPCTCIGKECQCKRWHDMEVYSFSGLQSVPPLAPERRSTLEDYSQSLHARTLSGSPRSCSEQARVFVDDVTIEDLSGYMEYYLYIPKKMSHMAEMMYT

SEQ ID NO: 889141 - protein, 68 aa, Homo sapiens
ALERRGRRPASAQSSAAALPSHWGGRSISRGRGACRSAQAQRDSRGAGRPLGWFGSGSVGCRDLGETL

SEQ ID NO: 889142 - protein, 229 aa, Homo sapiens
MKSEAKDGEEESLQTAFKKLRVDASGSVASLSVGEGTGVRAPVRTATDDTKPKTTCASKDSWHGSTRKSSRGAVRTQRRRRSKSPVLHPPKFIHCSTIASSSSSQLKHKSQTDSPDGSSGLGISSPKEFSAGESSTSLDANHTGAVVEPLRTSVPRLPSESKKEDSSDATQVPQASLKASDLSDFQSVSKLNQTLWPLCVRRHLFLLTVLAIKTFLGISVNLHSFNLLS

SEQ ID NO: 889143 - protein, 274 aa, Homo sapiens
MKSEAKDGEEESLQTAFKKLRVDASGSVASLSVGEGTGVRAPVRTATDDTKPKTTCASKDSWHGSTRKSSRGAVRTQRRRRSKSPVLHPPKFIHCSTIASSSSSQLKHKKFSAGESSTSLDANHTGAVVEPLRTSVPRLPSESKKEDSSDATQVPQASLKASDLSDFQSVSKLNQGKPCTCIGKECQCKRWHDMEVYSFSGLQSVPPLAPERRSTLEDYSQSLHARTLSGSPRSCSEQARVFVDDVTIEDLSGYMEYYLYIPKKMSHMAEMMYT

SEQ ID NO: 889144 - protein, 70 aa, Homo sapiens
ARRPHTIGWSSPLLLGWVAVETAAVLGGVGEGREAARASERARCFWERGTGDLRRQELGRGAAARLPAAL

SEQ ID NO: 889145 - protein, 70 aa, Homo sapiens; identical to SEQ ID NO: 889144

SEQ ID NO: 889146 - protein, 70 aa, Homo sapiens; identical to SEQ ID NO: 889144

SEQ ID NO: 889147 - protein, 70 aa, Homo sapiens; identical to SEQ ID NO: 889144

SEQ ID NO: 889148 - protein, 142 aa, Homo sapiens [sequence omitted]

SEQ ID NO: 889149 - protein, 102 aa, Homo sapiens
  misc_feature (9)..(9): Xaa can be any naturally occurring amino acid
PCVRPTSPXRPLLLLCAQTIQDEEGPLCCPHPGCLLRAHVICLAEEFLQEEPGQLLPLEGQCPCCEKSLLWGDLIWLCQMDTEKEVEDSELEEAHWTDLLET

SEQ ID NO: 889150 - protein, 73 aa, Homo sapiens
MEWPSARHPPFNLSGRGGVPAILCVRGHKPLPPMPRHDIIYSTPAVWLGADTAHPTDETPYIVRRDNHIIKRP

SEQ ID NO: 889151 - protein, 97 aa, Homo sapiens
MCAQTIQDEEGPLCCPHPGCLLRAHVICLAEEFLQEEPGQLLPLEGQCPCCEKSLLWGDLIWLCQMDTEKEVEDSELEEGHTLWSGHTLWRVGTHYG

SEQ ID NO: 889152 - protein, 295 aa, Homo sapiens
MELIQDTSRPPLEYVKGVPLIKYFAEALGPLQSFQARPDDLLINTYPKSGTTWVSQILDMIYQGGDLEKCNRAPIYVRVPFLEVNDPGEPSGLETLKDTPPPRLIKSHLPLALLPQTLLDQKVKVVYVARNPKDVAVSYYHFHRMEKAHPEPGTWDSFLEKFMAGEVSYGSWYQHVQEWWELSRTHPVLYLFYEDMKENPKREIQKILEFVGRSLPEETMDFMVQHTSFKEMKKNPMTNYTTVPQELMDHSISPFMRKGMAGDWKTTFTVAQNERFDADYAEKMAGCSLSFRSEL

SEQ ID NO: 889153 - protein, 295 aa, Homo sapiens; identical to SEQ ID NO: 889152

SEQ ID NO: 889154 - protein, 295 aa, Homo sapiens; identical to SEQ ID NO: 889152

SEQ ID NO: 889155 - protein, 354 aa, Homo sapiens [sequence omitted]

SEQ ID NO: 889156 - protein, 384 aa, Homo sapiens
MVRARRLDSSLASAVGLLHPPPDRRGARTGATASCRLPPDSPRELVPKQAPCSPSDPALPWTLGHGNQPPAVVPEPQGPMGPAGVAARPGRFFGVYLLYCLNPRYRGRVYVGFTVNTARRVQQHNGGRKKGGAWRTSGRGPWEMVLVVHGFPSSVAALRFEWAWQHPHASRRLAHVGPRLRGETAFAFHLRVLAHMLRAPPWARLPLTLRWVRPDLRQDLCLPPPPHVPLAFGPPPPQAPAPRRRAGPFDDAEPEPDQGDPGACCSLCAQTIQDEEGPLCCPHPGCLLRAHVICLAEEFLQEEPGQLLPLEGQCPCCEKSLLWGDLIWLCQMDTEKEVEDSELEEEHGADPGHLPPATGVREGGPAHQVLCRGTGAPAELPSPT

SEQ ID NO: 889157 - protein, 295 aa, Homo sapiens; identical to SEQ ID NO: 889152

SEQ ID NO: 889158 - protein, 384 aa, Homo sapiens; identical to SEQ ID NO: 889156

SEQ ID NO: 889159 - protein, 384 aa, Homo sapiens; identical to SEQ ID NO: 889156

SEQ ID NO: 889160 - protein, 295 aa, Homo sapiens; identical to SEQ ID NO: 889152

SEQ ID NO: 889161 - protein, 295 aa, Homo sapiens; identical to SEQ ID NO: 889152

SEQ ID NO: 889162 - protein, 295 aa, Homo sapiens; identical to SEQ ID NO: 889152

SEQ ID NO: 889163 - protein, 295 aa, Homo sapiens; identical to SEQ ID NO: 889152

SEQ ID NO: 889164 - protein, 354 aa, Homo sapiens [sequence omitted]

SEQ ID NO: 889165 - protein, 384 aa, Homo sapiens; identical to SEQ ID NO: 889156

SEQ ID NO: 889166 - protein, 295 aa, Homo sapiens; identical to SEQ ID NO: 889152

SEQ ID NO: 889167 - protein, 295 aa, Homo sapiens; identical to SEQ ID NO: 889152

SEQ ID NO: 889168 - protein, 163 aa, Homo sapiens [sequence omitted]

SEQ ID NO: 889169 - protein, 384 aa, Homo sapiens; identical to SEQ ID NO: 889156

SEQ ID NO: 889170 - protein, 295 aa, Homo sapiens; identical to SEQ ID NO: 889152

SEQ ID NO: 889171 - protein, 316 aa, Homo sapiens
TPILSPCRQGENRSGSRELRNMELIQDTSRPPLEYVKGVPLIKYFAEALGPLQSFQARPDDLLINTYPKSGTTWVSQILDMIYQGGDLEKCNRAPIYVRVPFLEVNDPGEPSGLETLKDTPPPRLIKSHLPLALLPQTLLDQKVKVVYVARNPKDVAVSYYHFHRMEKAHPEPGTWDSFLEKFMAGEVSYGSWYQHVQEWWELSRTHPVLYLFYEDMKENPKREIQKILEFVGRSLPEETMDFMVQHTSFKEMKKNPMTNYTTVPQELMDHSISPFMRKGMAGDWKTTFTVAQNERFDADYAEKMAGCSLSFRSEL

SEQ ID NO: 889172 - protein, 295 aa, Homo sapiens; identical to SEQ ID NO: 889152

SEQ ID NO: 889173 - protein, 293 aa, Homo sapiens
EDSELEEEHGADPGHLPLIKYFAEALGPLQSFQARPDDLLINTYPKSGTTWVSQILDMIYQGGDLEKCNRAPIYVRVPFLEVNDPGEPSGLETLKDTPPPRLIKSHLPLALLPQTLLDQKVKVVYVARNPKDVAVSYYHFHRMEKAHPEPGTWDSFLEKFMAGEVSYGSWYQHVQEWWELSRTHPVLYLFYEDMKENPKREIQKILEFVGRSLPEETMDFMVQHTSFKEMKKNPMTNYTTVPQELMDHSISPFMRKGMAGDWKTTFTVAQNERFDADYAEKMAGCSLSFRSEL

SEQ ID NO: 889174 - protein, 103 aa, Homo sapiens
MNYMDDNPKREIQKILEFVGRSLPEETMDFMVQHTSFKEMKKNPMTNYTTVPQELMDHSISPFMRKGMAGDWKTTFTVAQNERFDADYAEKMAGCSLSFRSEL

SEQ ID NO: 889175 - protein, 142 aa, Homo sapiens [sequence omitted]

SEQ ID NO: 889176 - protein, 107 aa, Homo sapiens
PGRPNTPLPGRSHGPLAGSQGGGNTRAPLHPGWSGRTGSSRPLDPPGLAQEFLQEEPGQLLPLEGQCPCCEKSLLWGDLIWLCQMDTEKEVEDSELEEAHWTDLLET

SEQ ID NO: 889177 - protein, 156 aa, Homo sapiens
  misc_feature (4)..(4): Xaa can be any naturally occurring amino acid
RKKXNYARVRVLRVNRPRVGLLHPPPDRRGARTGATASCRLPPDSPRELVPKQAPCSPSDPALPWTLGHGNQPPAVVPEPQGPMGPAGVAARPGRFFGVYLLYCLNPRYRGRVYVGFTVNTARRVHIGLLVGTLGSGGMQEREEVGQVGTWAGGRA

SEQ ID NO: 889178 - protein, 336 aa, Homo sapiens
MVRARRLDSSLASAVGLLHPPPDRRGARTGATASCRLPPDSPRELVPKQAPCSPSDPALPWTLGHGNQPPAVVPEPQGPMGPAGVAARPGRFFGVYLLYCLNPRYRGRVYVGFTVNTARRVQQHNGGRKKGGAWRTSGRGPWEMVLVVHGFPSSVAALRFEWAWQHPHASRRLAHVGPRLRGETAFAFHLRVLAHMLRAPPWARLPLTLRWVRPDLRQDLCLPPPPHVPLAFGPPPPQAPAPRRRAGPFDDAEPEPDQGDPGACCSLCAQTIQDEEGPLCCPHPGCLLRAHVICLAEEFLQEEPGQLLPLEGQCPCCEKSLLWGDLIWLCQMAWEE

SEQ ID NO: 889179 - protein, 381 aa, Homo sapiens
MVRARRLDSSLASAVGLLHPPPDRRGARTGATASCRLPPDSPRELVPKQAPCSPSDPALPWTLGHGNQPPAVVPEPQGPMGPAGVAARPGRFFGVYLLYCLNPRYRGRVYVGFTVNTARRVQQHNGGRKKGGAWRTSGRGPWEMVLVVHGFPSSVAALRFEWAWQHPHASRRLAHVGPRLRGETAFAFHLRVLAHMLRAPPWARLPLTLRWVRPDLRQDLCLPPPPHVPLAFGPPPPQAPAPRRRAGPFDDAEPEPDQGDPGACCSLCAQTIQDEEGPLCCPHPGCLLRAHVICLAEEFLQEEPGQLLPLEGQCPCCEKSLLWGDLIWLCQMDTEKEVEDSELEEGEWALVAGSLPHSLPWAACDHTAVPLQAHWTDLLET

SEQ ID NO: 889180 - protein, 295 aa, Homo sapiens; identical to SEQ ID NO: 889152

SEQ ID NO: 889181 - protein, 117 aa, Homo sapiens
MELIQDTSRPPLEYVKGVPLIKYFAEALGPLQSFQARPDDLLINTYPKSGTTWVSQILDMIYQGGDLEKCNRAPIYVRVPFLEVNDPGEPSGGLCCPKPKGRGGLLLPFPPYGKGAP

SEQ ID NO: 889182 - protein, 244 aa, Homo sapiens
  misc_feature (4)..(4): Xaa can be any naturally occurring amino acid
RKKXNYARVRVLRVNRPRVGLLHPPPDRRGARTGATASCRLPPDSPRELVPKQAPCSPSDPALPWTLGHGNQPPAVVPEPQGPMGPAGVAARPGRFFGVYLLYCLNPRYRGRVYVGFTVNTARRVQQHNGGRKKGGAWRTSGRGPWEMVLVVHGFPSSVAALRDEEGPLCCPHPGCLLRAHVICLAEEFLQEEPGQLLPLEGQCPCCEKSLLWGDLIWLCQMDTEKEVEDSELEEAHWTDLLET

SEQ ID NO: 889183 - protein, 105 aa, Homo sapiens
AAAPTSEWSGCTGSSRPLDPQTIQDEEGPLCCPHPGCLLRAHVICLAEEFLQEEPGQLLPLEGQCPCCEKSLLWGDLIWLCQMDTEKEVEDSELEEAHWTDLLET

SEQ ID NO: 889184 - protein, 76 aa, Homo sapiens
MELIQDTSRPPLEYVKGVPLIKYFAEALGPLQSFQARPDDLLINTYPKSGKSGGPPTLSQAAVPTLVSKVVPSACS

SEQ ID NO: 889185 - protein, 105 aa, Homo sapiens
MKCNTFIRQVKEEHGRHTDATVKVPFLKKCKEAGLLNYLLEEILDKVHSIPEKLMDETTSESDYEEIGSALFDCRLFEDTFVNFQAAIEKKIHASQQIVSSKGIP

SEQ ID NO: 889186 - protein, 193 aa, Homo sapiens
AGALPGSRYPAATRSCSTVMAQASPPRPERVLGASSPEARPAQEALLLPTGVFQVAEKMEKRTCALCPKDVEYNVLYFAQSENIAAHENCLLYSSGLVECEDQDPLNPDRSFDVESVKKEIQRGRKLKCKFCHKRGATVGCDLKNCNKNYHFFCAKKDDAVPQSDGVRGIYKLLCQQHAQFPIIAQSELNFQE

SEQ ID NO: 889187 - protein, 178 aa, Homo sapiens
AGALPGSRYPAATRSCSTVMAQASPPRPERVLGASSPEARPAQEALLLPTGVFQVAEKMEKRTCALCPKDVEYNVLYFAQSENIAAHENCLLYSSGLVECEDQDPLNPDRSFDVESVKKEIQRGRKLKCKFCHKRGATVGCDLKNCNKNYHFFCAKKDDAVPQSDGVRGIYKYLIKHF

SEQ ID NO: 889188 - protein, 137 aa, Homo sapiens [sequence omitted]

SEQ ID NO: 889189 - protein, 135 aa, Homo sapiens
MEKRTCALCPKDVEYNVLYFAQSENIAAHENCLLYSSGLVECEDQDPLNPDRSFDVESVKKEIQRGRKLKCKFCHKRGATVGCDLKNCNKNYHFFCAKKDDAVPQSDGVRGIYKLLCQQHAQFPIIAQSELNFQE

SEQ ID NO: 889190 - protein, 152 aa, Homo sapiens
LGHFRDLAIRPPPAAAAQSWPRRRRPGPRGCSAPAARRPGPRRRRSSFPPLYSSGLVECEDQDPLNPDRSFDVESVKKEIQRGRKLKCKFCHKRGATVGCDLKNCNKNYHFFCAKKDDAVPQSDGVRGIYKLLCQQHAQFPIIAQSELNFQE

SEQ ID NO: 889191 - protein, 106 aa, Homo sapiens
MDCKLYSSGLVECEDQDPLNPDRSFDVESVKKEIQRGRKLKCKFCHKRGATVGCDLKNCNKNYHFFCAKKDDAVPQSDGVRGIYKLLCQQHAQFPIIAQSELNFQE

SEQ ID NO: 889192 - protein, 167 aa, Homo sapiens
LGHFRDLAIRPPPAAAAQSWPRRRRPGPRGCSAPAARRPGPRRRRSSFPPLYSSGLVECEDQDPLNPDRSFDVESVKKEIQRGRKLKCKFCHKRGATVGCDLKNCNKNYHFFCAKKDDAVPQSDGVRGIYKLLCQQHAQFPIIAQSDLFSLNHSLVSFILPTLTEPN

SEQ ID NO: 889193 - protein, 137 aa, Homo sapiens [sequence omitted]

SEQ ID NO: 889194 - protein, 104 aa, Homo sapiens
MKCNTFIRQVKEEHGRHTDATVKVPFLKKCKEAGLLNYLLEEILDKVHSIPEKLMDETTSESDYEEIGSALFDCRLFEDTFVNFQAALRCPQDRLHLHLFMSLV

SEQ ID NO: 889195 - protein, 137 aa, Homo sapiens [sequence omitted]

SEQ ID NO: 889196 - protein, 135 aa, Homo sapiens; identical to SEQ ID NO: 889189

SEQ ID NO: 889197 - protein, 137 aa, Homo sapiens [sequence omitted]

SEQ ID NO: 889198 - protein, 135 aa, Homo sapiens; identical to SEQ ID NO: 889189

SEQ ID NO: 889199 - protein, 104 aa, Homo sapiens; identical to SEQ ID NO: 889194

SEQ ID NO: 889200 - protein, 629 aa, Homo sapiens
ERAALPPFPASAGAASSLRPARPPLLPPLLAGFGGDGGGGGGGGGGRGGRAPAERCRRRGKGSFKWKVVRRPARPPALLRSIMAEPSGSPVHVQLPQQAAPVTAAAAAAPAAATAAPAPAAPAAPAPAPAPAPAAQAVGWPICRDAYELQEVIGSGATAVVQAALCKPRQERVAIKRINLEKCQTSMDELLKEIQAMSQCSHPNVVTYYTSFVVKDELWLVMKLLSGGSMLDIIKYIVNRGEHKNGVLEEAIIATILKEVLEGLDYLHRNGQIHRDLKAGNILLGEDGSVQIADFGVSAFLATGGDVTRNKVRKTFVGTPCWMAPEVMEQVRGYDFKADMWSFGITAIELATGAAPYHKYPPMKVLMLTLQNDPPTLETGVEDKEMMKKYGKSFRKLLSLCLQKDPSKRPTAAELLKCKFFQKAKNREYLIEKLLTRTPDIAQRAKKVRRVPGSSGHLHKTEDGDWEWSDDEMDEKSEEGKAAFSQEKSRRVKEENPEIAVSASTIPEQIQSLSVHDSQGPPNANEDYREASSCAVNLVLRLRNSRKELNDIRFEFTPGRDTADGVSQELFSAGLVDGHDVVIVAANLQKIVDDPKALKTLTFKLASGCDGSEIPDEVKLIGFAQLSVS

SEQ ID NO: 889201 - protein, 629 aa, Homo sapiens; identical to SEQ ID NO: 889200

SEQ ID NO: 889202 - protein, 608 aa, Homo sapiens
ERAALPPFPASAGAASSLRPARPPLLPPLLAGFGGDGGGGGGGGGGRGGRAPAERCRRRGKGSFKWKVVRRPARPPALLRSIMAEPSGSPVHVQLPQQAAPVTAAAAAAPAAATAAPAPAAPAAPAPAPAPAPAAQAVGWPICRDAYELQEVIGSGATAVVQAALCKPRQERVAIKRINLEKCQTSMDELLKEIQAMSQCSHPNVVTYYTSFVVKDELWLVMKLLSGGSMLDIIKYIVNRGEHKNGVLEEAIIATILKEVLEGLDYLHRNGQIHRDLKAGNILLGEDGSVQIADFGVSAFLATGGDVTRNKVRKTFVGTPCWMAPEVMEQVRGYDFKADMWSFGITAIELATGAAPYHKYPPMKVLMLTLQNDPPTLETGVEDKEMMKKYGKSFRKLLSLCLQKDPSKRPTAAELLKCKFFQKAKNREYLIEKLLTRTPDIAQRAKKVRRVPGSSGHLHKTEDGDWEWSDDEMDEKSEEGKAAFSQEKSRRVKEENPEGPPNANEDYREASSCAVNLVLRLRNSRKELNDIRFEFTPGRDTADGVSQELFSAGLVDGHDVVIVAANLQKIVDDPKALKTLTFKLASGCDGSEIPDEVKLIGFAQLSVS

SEQ ID NO: 889203 - protein, 623 aa, Homo sapiens
ERAALPPFPASAGAASSLRPARPPLLPPLLAGFGGDGGGGGGGGGGRGGRAPAERCRRRGKGSFKWKVVRRPARPPALLRSIMAEPSGSPVHVQLPQQAAPVTAAAAAAPAAATAAPAPAAPAAPAPAPAPAPAAQAVGWPICRDAYELQEVIGSGATAVVQAALCKPRQERVAIKRINLEKCQTSMDELLKEIQAMSQCSHPNVVTYYTSFVVKDELWLVMKLLSGGSMLDIIKYIVNRGEHKNGVLEEAIIATILKEVLEGLDYLHRNGQIHRDLKAGNILLGEDGSVQIADFGVSAFLATGGDVTRNKVRKTFVGTPCWMAPEVMEQVRGYDFKADMWSFGITAIELATGAAPYHKYPPMKVLMLTLQNDPPTLETGVEDKEMMKKYGKSFRKLLSLCLQKDPSKRPTAAELLKCKFFQKAKNREYLIEKLLTRTPDIAQRAKKVRRVPGSSGHLHKTEDGDWEWSDDEMDEKSEEGKAAFSQEKSRRVKEENPEIAVSASTIPEQIQSLSVHDSQGPPNANEDYREASSCAVNLVLRLRNSRKELNDIRFEFTPGRDTADGVSQELFSAGLVDGHDVVIVAANLQKIVDDPKALKTLTFKLNQFLHLEAFDSAALGNVF

SEQ ID NO: 889204 - protein, 629 aa, Homo sapiens; identical to SEQ ID NO: 889200

SEQ ID NO: 889205 - protein, 629 aa, Homo sapiens; identical to SEQ ID NO: 889200

SEQ ID NO: 889206 - protein, 239 aa, Homo sapiens
MGAAKVWGEVGRWLVIALIQLAKAVLRMLLLLWFKAGLQTSPPIVPLDRETQAQPPDGDHSPGNHEQSYVGKRSNRVVRTLQNTPSLHSRHWGAPQQREGRQQQHHEELSATPTPLGLQETIAEFLYIARPLLHLLSLGLWGQRSWKPWLLAGVVDVTSLSLLSDRKGLTRRERRELRRRTILLLYYLLRSPFYDRFSEARILFLLQLLADHVPGVGLVTRPLMDYLPTWQKIYFYSWG

SEQ ID NO: 889207 - protein, 351 aa, Homo sapiens
MEKLRLLGLRYQEYVTRHPAATAQLETAVRGFSYLLAGRFADSHELSELVYSASNLLVLLNDGILRKELRKKLPVSLSQQKLLTWLSVLECVEVFMEMGAAKVWGEVGRWLVIALIQLAKAVLRMLLLLWFKAGLQTSPPIVPLDRETQAQPPDGDHSPGNHEQSYVGKRSNRVVRTLQNTPSLHSRHWGAPQQREGRQQQHHEELSATPTPLGLQETIAEFLYIARPLLHLLSLGLWGQRSWKPWLLAGVVDVTSLSLLSDRKGLTRRERRELRRRTILLLYYLLRSPFYDRFSEARILFLLQLLADHVPGVGLVTSPSVRPLRAYRPGPTHSPGRHQRSSQDTLDCALL

SEQ ID NO: 889208 - protein, 363 aa, Homo sapiens
SFCWDSDTGNFFRSSFRRIPSLSSTGRMEKLRLLGLRYQEYVTRHPAATAQLETAVRGFSYLLAGRFADSHELSELVYSASNLLVLLNDGILRKELRKKLPVSLSQQKLLTWLSVLECVEVFMEMGAAKVWGEVGRWLVIALIQLAKAVLRMLLLLWFKAGLQTSPPIVPLDRETQAQPPDGDHSPGNHEQSYVGKRSNRVVRTLQNTPSLHSRHWGAPQQREGRQQQHHEELSATPTPLGLQETIAEFLYIARPLLHLLSLGLWGQRSWKPWLLAGVVDVTSLSLLSDRKGLTRRERRELRRRTILLLYYLLRSPFYDRFSEARILFLLQLLADHVPGVGLVTRPLMDYLPTWQKIYFYSWG

SEQ ID NO: 889209 - protein, 254 aa, Homo sapiens
MEKLRLLGLRYQEYVTRHPAATAQLETAVRGFSYLLAGRFADSHELSELVYSASNLLVLLNDGILRKELRKKLPVSLSQQKLLTWLSVLECVEVFMEMGAAKVWGEVGRWLVIALIQLAKAVLRMLLLLWFKAGLQTSPPIVPLDRETQAQPPDGDHSPGNHEQSYVGKRSNRVVRTLQNTPSLHSRHWGAPQQREGRQQQHHEELSATPTPLGLQETIAEFLYIARPLLHCILSAGQDRAGTVGWGLSGECAE

SEQ ID NO: 889210 - protein, 239 aa, Homo sapiens; identical to SEQ ID NO: 889206

SEQ ID NO: 889211 - protein, 212 aa, Homo sapiens
MEKLRLLGLRYQEYVTRHPAATAQLETAVRGFSYLLAAALLPAALSFLRPLLRGQDPLPAPVAGRPRPWRWPGHKAAHGLLAHLAENLLLQLGLTDLPEGGCGEGWGREPLFPNKTDSGSVPACGLSVPTGQAPHTALVATSVPPRTPLTALSCDDATAARTLSLLGQEAFTRSGIQAPLPQKAVTSPHGAREAACLGSHRSEHCCSLAGPW

SEQ ID NO: 889212 - protein, 336 aa, Homo sapiens
MEKLRLLGLRYQEYVTRHPAATAQLETAVRGFSYLLAGRFADSHELSELVYSASNLLVLLNDGILRKELRKKLPVSLSQQKLLTWLSVLECVEVFMEMGAAKVWGEVGRWLVIALIQLAKAVLRMLLLLWFKAGLQTSPPIVPLDRETQAQPPDGDHSPGNHEQSYVGKRSNRVVRTLQNTPSLHSRHWGAPQQREGRQQQHHEELSATPTPLGLQETIAEFLYIARPLLHLLSLGLWGQRSWKPWLLAGVVDVTSLSLLSDRKGLTRRERRELRRRTILLLYYLLRSPFYDRFSEARILFLLQLLADHVPGVGLVTRPLMDYLPTWQKIYFYSWG

SEQ ID NO: 889213 - protein, 336 aa, Homo sapiens; identical to SEQ ID NO: 889212

SEQ ID NO: 889214 - protein, 239 aa, Homo sapiens; identical to SEQ ID NO: 889206

SEQ ID NO: 889215 - protein, 105 aa, Homo sapiens
MLSLGLWGQRSWKPWLLAGVVDVTSLSLLSDRKGLTRRERRELRRRTILLLYYLLRSPFYDRFSEARILFLLQLLADHVPGVGLVTRPLMDYLPTWQKIYFYSWG

SEQ ID NO: 889216 - protein, 70 aa, Homo sapiens
FLRPLLRVSTQDTLSQGEGWQAGTGAPVPAGAFPSPRLIQGSPSTVCCPGGSHQMPAQSRPQSSLGHQAT

SEQ ID NO: 889217 - protein, 545 aa, Homo sapiens
SGGGTRRGVGREPPVLISARSCGGGAARPGARRRDGEAAEVPARRVWWAAARLGRGEPERGAAVAPTRAGRPQHPQPPASAPKTARRRERAGGGAQALPAPSVPTPLRPFLSPPSSRLPRPRTGRPPCPPPAGALSVLAAAAGRAGPAGRGMALLDLALEGMAVFGFVLFLVLWLMHFMAIIYTRLHLNKKATDKQPYSKLPGVSLLKPLKGVDPNLINNLETFFELDYPKYEVLLCVQDHDDPAIDVCKKLLGKYPNVDARLFIGGKKVGINPKINNLMPGYEVAKYDLIWICDSGIRVIPDTLTDMVNQMTEKVGLVHGLPYVADRQGFAATLEQVYFGTSHPRYYISANVTGFKCVTGMSCLMRKDVLDQAGGLIAFAQYIAEDYFMAKAIADRGWRFAMSTQVAMQNSGSYSISQFQSRMIRWTKLRINMLPATIICEPISECFVASLIIGWAAHHVFRWDIMVFFMCHCLAWFIFDYIQLRGVQGGTLCFSKLDYAVAWFIRESMTIYIFLSALWDPTISWRTGRYRLRCGGTAEEILDV

SEQ ID NO: 889218 - protein, 545 aa, Homo sapiens; identical to SEQ ID NO: 889217

SEQ ID NO: 889219 - protein, 545 aa, Homo sapiens; identical to SEQ ID NO: 889217

SEQ ID NO: 889220 - protein, 248 aa, Homo sapiens
SGGGTRRGVGREPPVLISARSCGGGAARPGARRRDGEAAEVPARRVWWAAARLGRGEPERGAAVAPTRAGRPQHPQPPASAPKTARRRERAGGGAQALPAPSVPTPLRPFLSPPSSRLPRPRTGRPPCPPPAGALSVLAAAAGRAGPAGRGMALLDLALEGMAVFGFVLFLVLWLMHFMAIIYTRLHLNKKATDKQPYSKLPGVSLLKPLKGVDPNLINNLETFFELDYPKPLFFSVAPMKRIEKTQM

SEQ ID NO: 889221 - protein, 457 aa, Homo sapiens
SGGGTRRGVGREPPVLISARSCGGGAARPGARRRDGEAAEVPARRVWWAAARLGRGEPERGAAVAPTRAGRPQHPQPPASAPKTARRRERAGGGAQALPAPSVPTPLRPFLSPPSSRLPRPRTGRPPCPPPAGALSVLAAAAGRAGPAGRGMALLDLALEGMAVFGFVLFLVLWLMHFMAIIYTRLHLNKKATDKQPYSKLPGVSLLKPLKGVDPNLINNLETFFELDYPKYEVLLCVQDHDDPAIDVCKKLLGKYPRYYISANVTGFKCVTGMSCLMRKDVLDQAGGLIAFAQYIAEDYFMAKAIADRGWRFAMSTQVAMQNSGSYSISQFQSRMIRWTKLRINMLPATIICEPISECFVASLIIGWAAHHVFRWDIMVFFMCHCLAWFIFDYIQLRGVQGGTLCFSKLDYAVAWFIRESMTIYIFLSALWDPTISWRTGRYRLRCGGTAEEILDV

SEQ ID NO: 889222 - protein, 376 aa, Homo sapiens
SGGGTRRGVGREPPVLISARSCGGGAARPGARRRDGEAAEVPARRVWWAAARLGRGEPERGAAVAPTRAGRPQHPQPPASAPKTARRRERAGGGAQALPAPSVPTPLRPFLSPPSSRLPRPRTGRPPCPPPAGALSVLAAAAGRAGPAGRGMALLDLALEGMAVFGFVLFLVLWLMHFMAIIYTRLHLNKKATDKQPYSKLPGVSLLKPLKGVDPNLINNLETFFELDYPKYEVLLCVQDHDDPAIDVCKKLLGKYPNVDARLFIGGKKVGINPKINNLMPGYEVAKYDLIWICDSGIRVIPDTLTDMVNQMTEKVGLVHGLPYVADRQGFAATLEQMESRSVAQARVQWRDLGSLQAPPPGFTPFSCLSRLSSWD

SEQ ID NO: 889223 - protein, 249 aa, Homo sapiens
SGGGTRRGVGREPPVLISARSCGGGAARPGARRRDGEAAEVPARRVWWAAARLGRGEPERGAAVAPTRAGRPQHPQPPASAPKTARRRERAGGGAQALPAPSVPTPLRPFLSPPSSRLPRPRTGRPPCPPPAGALSVLAAAAGRAGPAGRGMALLDLALEGMAVFGFVLFLVLWLMHFMAIIYTRLHLNKKATDKQPYSKLPGVSLLKPLKGVDPNLINNLETFFELDYPKVSSVLRFFVLFCFVLFPS

SEQ ID NO: 889224 - protein, 545 aa, Homo sapiens; identical to SEQ ID NO: 889217

SEQ ID NO: 889225 - protein, 545 aa, Homo sapiens; identical to SEQ ID NO: 889217

SEQ ID NO: 889226 - protein, 556 aa, Homo sapiens
SGGGTRRGVGREPPVLISARSCGGGAARPGARRRDGEAAEVPARRVWWAAARLGRGEPERGAAVAPTRAGRPQHPQPPASAPKTARRRERAGGGAQALPAPSVPTPLRPFLSPPSSRLPRPRTGRPPCPPPAGALSVLAAAAGRAGPAGRGMALLDLALEGMAVFGFVLFLVLWLMHFMAIIYTRLHLNKKATDKQPYSKLPGVSLLKPLKGVDPNLINNLETFFELDYPKNLIYIQCFLTEYEVLLCVQDHDDPAIDVCKKLLGKYPNVDARLFIGGKKVGINPKINNLMPGYEVAKYDLIWICDSGIRVIPDTLTDMVNQMTEKVGLVHGLPYVADRQGFAATLEQVYFGTSHPRYYISANVTGFKCVTGMSCLMRKDVLDQAGGLIAFAQYIAEDYFMAKAIADRGWRFAMSTQVAMQNSGSYSISQFQSRMIRWTKLRINMLPATIICEPISECFVASLIIGWAAHHVFRWDIMVFFMCHCLAWFIFDYIQLRGVQGGTLCFSKLDYAVAWFIRESMTIYIFLSALWDPTISWRTGRYRLRCGGTAEEILDV

SEQ ID NO: 889227 - protein, 426 aa, Homo sapiens
SGGGTRRGVGREPPVLISARSCGGGAARPGARRRDGEAAEVPARRVWWAAARLGRGEPERGAAVAPTRAGRPQHPQPPASAPKTARRRERAGGGAQALPAPSVPTPLRPFLSPPSSRLPRPRTGRPPCPPPAGALSVLAAAAGRAGPAGRGMALLDLALEGMAVFGFVLFLVLWLMHFMAIIYTRLHLNKKATDKQPYSKLPGVSLLKPLKGVDPNLINNLETFFELDYPKYEVLLCVQDHDDPAIDVCKKLLGKYPNVDARLFIGGKKVGINPKINNLMPGYEVAKYDLIWICDSGIRVIPDTLTDMVNQMTEKVGLVHGLPYVADRQGFAATLEQVYFGTSHPRYYISANVTGFKCVTGMSCLMRKDVLDQAGGLIAFAQYIAEDYFMAKAIADRGWRFAMSTQVAMQNSGSYSISQFQSRMIR

SEQ ID NO: 889228 - protein, 838 aa, Homo sapiens
TSSVKSEYTDPWGYYIDYTGMQEDPGNPAGGCSTSSGVPTGNGPVRHVQEGSRATMPQVPGGSVKPKIMSPEKSHRVISPSSGYSSQSNTPTALTPVPVFLKSVSPANGKGKPKPKVPERKSSLISSVSISSSSTSLSSSTSTEGSGTMKKLDPAVGSPPAPPPPPVPSPPFPCPADRSPFLPPPPPVTDCSQGSPLPHSPVFPPPPPEALIPFCSPPDWCLSPPRPALSPILPDSPVSLPLPPPLLPSSEPPPAPPLDPKFMKDTRPPFTNSGQPESSRGSLRPPSTKEETSRPPMPLITTEALQMVQLRPVRKNSGAEAAQLSERTAQEQRTPVAPQYHLKPSAFLKSRNSTNEMESESQPASVTSSLPTPAKSSSQGDHGSAAERGGPVSRSPGAPSAGEAEARPSPSTTPLPDSSPSRKPPPISKKPKLFLVVPPPQKDFAVEPAENVSEALRAVPSPTTGEEGSVHSREAKESSAAQAGSHATHPGTSVLEGGAAGSMSPSRVEANVPMVQPDVSPAPKQEEPAENSADTGGDGESCLSQQDGAAGVPETNAAGSSSEACDFLKEDGNDEVMTPSRPRTTEDLFAAIHRSKRKVLGRRDSDDDHSRNHSPSPPVTPTGAAPSLASPKQVGSIQRSIRKSSTSSDNFKALLLKKGSRSDTSARMSAAEMLKNTDPRFQRSRSEPSPDAPESPSSCSPSKNRRAQEEWAKNEGLMPRSLSFSGPRYGRSRTPPSAASSRYSMRNRIQSSPMTVISEGEGEAVEPVDSIARGALGAAEGCSLDGLAREEMDEGGLLCGEGPAASLQPQAPGPVDGTASAEGREPSPQCGGSLSEES

SEQ ID NO: 889229 - protein, 838 aa, Homo sapiens; identical to SEQ ID NO: 889228

SEQ ID NO: 889230 - protein, 772 aa, Homo sapiens
HKQRQVRVHGPLGLLHRLHGHAGRSGEPGRGLFNQQWGAHWERASPPCPRRVQSHNAPSARWFSQTKDHVTREVTQSHFSIQWVFQPVEYTHSTHPCACVFKISVTMDPAVGSPPAPPPPPVPSPPFPCPADRSPFLPPPPPVTDCSQGSPLPHSPVFPPPPPEALIPFCSPPDWCLSPPRPALSPILPDSPVSLPLPPPLLPSSEPPPAPPLDPKFMKDTRPPFTNSGQPESSRGSLRPPSTKEETSRPPMPLITTEALQMVQLRPVRKNSGAEAAQLSERTAQEQRTPVAPQYHLKPSAFLKSRNSTNEMESESQPASVTSSLPTPAKSSSQGDHGSAAERGGPVSRSPGAPSAGEAEARPSPSTTPLPDSSPSRKPPPISKKPKLFLVVPPPQKDFAVEPAENVSEALRAVPSPTTGEEGSVHSREAKESSAAQAGSHATHPGTSVLEGGAAGSMSPSRVEANVPMVQPDVSPAPKQEEPAGVPETNAAGSSSEACDFLKEDGNDEVMTPSRPRTTEDLFAAIHRSKRKVLGRRDSDDDHSRNHSPSPPVTPTGAAPSLASPKQVGSIQRSIRKSSTSSDNFKALLLKKGSRSDTSARMSAAEMLKNTDPRFQRSRSEPSPDAPESPSSCSPSKNRRAQEEWAKNEGLMPRSLSFSGPRYGRSRTPPSAASSRYSMRNRIQSSPMTVISEGEGEAVEPVDSIARGALGAAEGCSLDGLAREEMDEGGLLCGEGPAASLQPQAPGPVDGTASAEGREPSPQCGGSLSEES

SEQ ID NO: 889231 - protein, 236 aa, Homo sapiens
MLLNLRSKRKVLGRRDSDDDHSRNHSPSPKQVGSIQRSIRKSSTSSDNFKALLLKKGSRSDTSARMSAAEMLKNTDPRFQRSRSEPSPDAPESPSSCSPSKNRRAQEEWAKNEGLMPRSLSFSGPRYGRSRTPPSAASSRYSMRNRIQSSPMTVISEGEGEAVEPVDSIARGALGAAEGCSLDGLAREEMDEGGLLCGEGPAASLQPQAPGPVDGTASAEGREPSPQCGGSLSEES

SEQ ID NO: 889232 - protein, 236 aa, Homo sapiens; identical to SEQ ID NO: 889231

SEQ ID NO: 889233 - protein, 838 aa, Homo sapiens; identical to SEQ ID NO: 889228

SEQ ID NO: 889234 - protein, 236 aa, Homo sapiens; identical to SEQ ID NO: 889231

SEQ ID NO: 889235 - protein, 236 aa, Homo sapiens; identical to SEQ ID NO: 889231

SEQ ID NO: 889236 - protein, 335 aa, Homo sapiens
MGTVPTSICCQPATPPSTLRSCSGSGSCGCWKIWASRTSRCSRGALWSQAPQSPGSPRNPDGGSQMQCLSPHRWAGSAPGAPSSTSPRGLAVRCAAGRAPRPTRSPPHTSPTRRSERAWRARRRRCVSTSRECLQGTIRNSQEAEVSCPFIDNTYSCSGKLLEREIKALLTPEDYQRFLDLGISIAENRSAFSYHCKTPDCKGWCFFEDDVNEFTCPVCFHVNCLLCKAIHEQMNCKEYQEDLALRAQNDVAARQTTEMLKVMLQQGEAMRCPQCQIVVQKKDGCDWIRCTVCHTEICWVTKGPRWGPGGPGDTSGGCRCRVNGIPCHPSCQNCH

SEQ ID NO: 889237 - protein, 114 aa, Homo sapiens
PPTPPAAQLLPAALRCGPQGDPGGSPGTRDQPRRTGWGRPKQERRDRWDPALGVRRRRVAGQWRSRMRRQFFRPPLPVPPHFRGRHFHFLFRTLLKSIAQKLYTLLPLIPVDQN

SEQ ID NO: 889238 - protein, 519 aa, Homo sapiens
MDEKTKKAEEMALSLTRAVAGGDEQVAMKCAIWLAEQRVPLSVQLKPEVSPTQDIRLWVSVEDAQMHTVTIWLTVRPDMTVASLKDMVFLDYGFPPVLQQWVIGQRLARDQETLHSHGVRQNGDSAYLYLLSARNTSLNPQELQRERQLRMLEDLGFKDLTLQPRGPLEPGPPKPGVPQEPGRGQPDAVPEPPPVGWQCPGCTFINKPTRPGCEMCCRARPEAYQVPASYQPDEEERARLAGEEEALRQYQQRKQQQQEGNYLQHVQLDQRSLVLNTEPAECPVCYSVLAPGEAVVLRECLHTFCRECLQGTIRNSQEAEVSCPFIDNTYSCSGKLLEREIKALLTPEDYQRFLDLGISIAENRSAFSYHCKTPDCKGWCFFEDDVNEFTCPVCFHVNCLLCKAIHEQMNCKEYQEDLALRAQNDVAARQTTEMLKVMLQQGEAMRCPQCQIVVQKKDGCDWIRCTVCHTEICWVTKGPRWGPGGESLLVVVWRGCPCGLCLRGGLGKLQPMGHIQPST

SEQ ID NO: 889239 - protein, 551 aa, Homo sapiens
MDEKTKKAEEMALSLTRAVAGGDEQVAMKCAIWLAEQRVPLSVQLKPEVSPTQDIRSRGEKTEEVGEVREVPDHGGPRVLPRVDSKSSVEPLEGPNWLWVSVEDAQMHTVTIWLTVRPDMTVASLKDMVFLDYGFPPVLQQWVIGQRLARDQETLHSHGVRQNGDSAYLYLLSARNTSLNPQELQRERQLRMLEDLGFKDLTLQPRGPLEPGPPKPGVPQEPGRGQPDAVPEPPPVGWQCPGCTFINKPTRPGCEMCCRARPEAYQVPASYQPDEEERARLAGEEEALRQYQQRKQQQQEGNYLQHVQLDQRSLVLNTEPAECPVCYSVLAPGEAVVLRECLHTFCRECLQGTIRNSQEAEVSCPFIDNTYSCSGKLLEREIKALLTPEDYQRFLDLGISIAENRSAFSYHCKTPDCKGWCFFEDDVNEFTCPVCFHVNCLLCKAIHEQMNCKEYQEDLALRAQNDVAARQTTEMLKVMLQQGEAMRCPQCQIVVQKKDGCDWIRCTVCHTEICWVTKGPRWGPGGPGDTSGGCRCRVNGIPCHPSCQNCH

SEQ ID NO: 889240 - protein, 519 aa, Homo sapiens; identical to SEQ ID NO: 889238

SEQ ID NO: 889241 - protein, 409 aa, Homo sapiens
MDEKTKKAEEMALSLTRAVAGGDEQVAMKCAIWLAEQRVPLSVQLKPEVSPTQDIRLWVSVEDAQMHTVTIWLTVRPDMTVASLKDMVFLDYGFPPVLQQWVIGQRLARDQETLHSHGVRQNGDSAYLYLLSVGWQCPGCTFINKPTRPGCEMCCRARPEAYQVPASYQPDEEERARLAGEEEALRQYQQRKQQQQEGNYLQHVQLDQRSLVLNTEPAECPVCYSVLAPGEAVVLRECLHTFCRECLQGTIRNSQEAEVSCPFIDNTYSCSGKLLEREIKALLTPEDYQRFLDLGISIAENRSAFSYHCKTPDCKGWCFFEDDVNEFTCPVCFHVNCLLCKAIHEQMNCKEYQEDLALRAQNDVAARQTTEMLKVRLGQGRGLGILSSGIQVGAGGFPVRAVLTHPWRL

SEQ ID NO: 889242 - protein, 527 aa, Homo sapiens
MDEKTKKAPENKPCANWLLLYWLSAEEMALSLTRAVAGGDEQVAMKCAIWLAEQRVPLSVQLKPEVSPTQDIRLWVSVEDAQMHTVTIWLTVRPDMTVASLKDMVFLDYGFPPVLQQWVIGQRLARDQETLHSHGVRQNGDSAYLYLLSARNTSLNPQELQRERQLRMLEDLGFKDLTLQPRGPLEPGPPKPGVPQEPGRGQPDAVPEPPPVGWQCPGCTFINKPTRPGCEMCCRARPEAYQVPASYQPDEEERARLAGEEEALRQYQQRKQQQQEGNYLQHVQLDQRSLVLNTEPAECPVCYSVLAPGEAVVLRECLHTFCRECLQGTIRNSQEAEVSCPFIDNTYSCSGKLLEREIKALLTPEDYQRFLDLGISIAENRSAFSYHCKTPDCKGWCFFEDDVNEFTCPVCFHVNCLLCKAIHEQMNCKEYQEDLALRAQNDVAARQTTEMLKVMLQQGEAMRCPQCQIVVQKKDGCDWIRCTVCHTEICWVTKGPRWGPGGPGDTSGGCRCRVNGIPCHPSCQNCH

SEQ ID NO: 889243 - protein, 510 aa, Homo sapiens
MDEKTKKAEEMALSLTRAVAGGDEQVAMKCAIWLAEQRVPLSVQLKPEVSPTQDIRLWVSVEDAQMHTVTIWLTVRPDMTVASLKDMVFLDYGFPPVLQQWVIGQRLARDQETLHSHGVRQNGDSAYLYLLSARNTSLNPQELQRERQLRMLEDLGFKDLTLQPRGPLEPGPPKPGVPQEPGRGQPDAVPEPPPVGWQCPGCTFINKPTRPGCEMCCRARPEAYQVPASYQPDEEERARLAGEEEALRQYQQRKQQQQEGNYLQHVQLDQRSLVLNTEPAECPVCYSVLAPGEAVVLRECLHTFCRECLQGTIRNSQEAEVSCPFIDNTYSCSGKLLEREIKALLTPEDYQRFLDLGISIAENRSAFSYHCKTPDCKGWCFFEDDVNEFTCPVCFHVNCLLCKAIHEQMNCKEYQEDLALRAQNDVAARQTTEMLKVMLQQGEAMRCPQCQIVVQKKDGCDWIRCTVCHTEICWVTKGPRWGPGGPGDTSGGCRCRVNGIPCHPSCQNCH

SEQ ID NO: 889244 - protein, 269 aa, Homo sapiens [sequence omitted]

SEQ ID NO: 889245 - protein, 510 aa, Homo sapiens; identical to SEQ ID NO: 889243

SEQ ID NO: 889246 - protein, 304 aa, Homo sapiens
MDEKTKKAEEMALSLTRAVAGGDEQVAMKCAIWLAEQRVPLSVQLKPEVSPTQDIRLWVSVEDAQMHTVTIWLTVRPDMTVASLKDMVFLDYGFPPVLQQWVIGQRLARDQETLHSHGVRQNGDSAYLYLLSARNTSLNPQELQRERQLRMLEDLGFKDLTLQPRGPLEPGPPKPGVPQEPGRGQPDAVPEPPPVGWQCPGCTFINKPTRPGCEMCCRARPEAYQVPASYQPDEEERARLAGEEEALRQYQQVTLWLRPAPWLWRTSRFTCPTPTWAVAPSPALTHHTSMAGHDPSTLAMTPAP

SEQ ID NO: 889247 - protein, 445 aa, Homo sapiens
MHTVTIWLTVRPDMTVASLKDMVFLDYGFPPVLQQWVIGQRLARDQETLHSHGVRQNGDSAYLYLLSARNTSLNPQELQRERQLRMLEDLGFKDLTLQPRGPLEPGPPKPGVPQEPGRGQPDAVPEPPPVGWQCPGCTFINKPTRPGCEMCCRARPEAYQVPASYQPDEEERARLAGEEEALRQYQQRKQQQQEGNYLQHVQLDQRSLVLNTEPAECPVCYSVLAPGEAVVLRECLHTFCRECLQGTIRNSQEAEVSCPFIDNTYSCSGKLLEREIKALLTPEDYQRFLDLGISIAENRSAFSYHCKTPDCKGWCFFEDDVNEFTCPVCFHVNCLLCKAIHEQMNCKEYQEDLALRAQNDVAARQTTEMLKVMLQQGEAMRCPQCQIVVQKKDGCDWIRCTVCHTEICWVTKGPRWGPGGPGDTSGGCRCRVNGIPCHPSCQNCH

SEQ ID NO: 889248 - protein, 424 aa, Homo sapiens
MVFLDYGFPPVLQQWVIGQRLARDQETLHSHGVRQNGDSAYLYLLSARNTSLNPQELQRERQLRMLEDLGFKDLTLQPRGPLEPGPPKPGVPQEPGRGQPDAVPEPPPVGWQCPGCTFINKPTRPGCEMCCRARPEAYQVPASYQPDEEERARLAGEEEALRQYQQRKQQQQEGNYLQHVQLDQRSLVLNTEPAECPVCYSVLAPGEAVVLRECLHTFCRECLQGTIRNSQEAEVSCPFIDNTYSCSGKLLEREIKALLTPEDYQRFLDLGISIAENRSAFSYHCKTPDCKGWCFFEDDVNEFTCPVCFHVNCLLCKAIHEQMNCKEYQEDLALRAQNDVAARQTTEMLKVMLQQGEAMRCPQCQIVVQKKDGCDWIRCTVCHTEICWVTKGPRWGPGGPGDTSGGCRCRVNGIPCHPSCQNCH

SEQ ID NO: 889249 - protein, 105 aa, Homo sapiens
MDEKTKKAEEMALSLTRAVAGGDEQVAMKCAIWLAEQRVPLSVQLKPEVSPTQDIRFLMVQNGHSSSIQPSHHRRKGRKTPLHTLLKSIAQKLYTLLPLIPVDQN

SEQ ID NO: 889250 - protein, 122 aa, Homo sapiens
MDEKTKKAPENKPCANWLLLYWLSAEEMALSLTRAVAGGDEQVAMKCAIWLAEQRVPLSVQLKPEVSPTQDIRFLMVQNGHSSSIQPSHHRRKGRKTPLHTLLKSIAQKLYTLLPLIPVDQN

SEQ ID NO: 889251 - protein, 220 aa, Homo sapiens
PPTPPAAQLLPAALRCGPQGDPGGSPGTRDQPRRTGWGRPKQERRDRWDPALGVRRRRVAGQWRSRMRRQFFRPPLPVPPHFRGRHFHFLFRRSRSPCEELGPPGRREGFALKPGTPGALPQVGVLRDLERPGWVVSGRPFPASSHLGWSRFLLRPVRTCLGARCPLTAPRRIPAWSPGSVMLPDCRGDSEAHTGLGPRRRPHGLAELLLVSRLSQATRR

SEQ ID NO: 889252 - protein, 220 aa, Homo sapiens; identical to SEQ ID NO: 889251

SEQ ID NO: 889253 - protein, 468 aa, Homo sapiens
MGTATPDGREDQERLWVSVEDAQMHTVTIWLTVRPDMTVASLKDMVFLDYGFPPVLQQWVIGQRLARDQETLHSHGVRQNGDSAYLYLLSARNTSLNPQELQRERQLRMLEDLGFKDLTLQPRGPLEPGPPKPGVPQEPGRGQPDAVPEPPPVGWQCPGCTFINKPTRPGCEMCCRARPEAYQVPASYQPDEEERARLAGEEEALRQYQQRKQQQQEGNYLQHVQLDQRSLVLNTEPAECPVCYSVLAPGEAVVLRECLHTFCRECLQGTIRNSQEAEVSCPFIDNTYSCSGKLLEREIKALLTPEDYQRFLDLGISIAENRSAFSYHCKTPDCKGWCFFEDDVNEFTCPVCFHVNCLLCKAIHEQMNCKEYQEDLALRAQNDVAARQTTEMLKVMLQQGEAMRCPQCQIVVQKKDGCDWIRCTVCHTEICWVTKGPRWGPGGPGDTSGGCRCRVNGIPCHPSCQNCH

SEQ ID NO: 889254 - protein, 510 aa, Homo sapiens; identical to SEQ ID NO: 889243

SEQ ID NO: 889255 - protein, 471 aa, Homo sapiens
MDEKTKKAEEMALSLTRAVAGGDEQVAMKCAIWLAEQRVPLSVQLKPEVSPTQDIRLWVSVEDAQMHTVTIWLTVRPDMTVASLKDMVFLDYGFPPVLQQWVIGQRLARDQETLHSHGVRQNGDSAYLYLLSARNTSLNPQELQRERQLRMLEDLGFKDLTLQPRGPLEPGPPKPGVPQEPGRGQPDAVPEPPPVGWQCPGCTFINKPTRPGCEMCCRARPEAYQVPASYQPDEEERARLAGEEEALRQYQQRKQQQQEGNYLQHVQLDQRSLVLNTEPAECPVCYSVLAPGEAVVLRECLHTFCRECLQGTIRNSQEAEVSCPFIDNTYSCSGKLLEREIKALLTPEDYQRFLDLGISIAENRSAFSYHCKTPDCKGWCFFEDDVNEFTCPVCFHVNCLLCKAIHEQMNCKEYQEDLALRAQNDVAARQTTEMLKVRLGQGRGLGILSSGIQVGAGGFPVRAVLTHPWRL

SEQ ID NO: 889256 - protein, 335 aa, Homo sapiens; identical to SEQ ID NO: 889236

SEQ ID NO: 889257 - protein, 510 aa, Homo sapiens; identical to SEQ ID NO: 889243

SEQ ID NO: 889258 - protein, 105 aa, Homo sapiens; identical to SEQ ID NO: 889249

SEQ ID NO: 889259 - protein, 378 aa, Homo sapiens
MDEKTKKAEEMALSLTRAVAGGDEQVAMKCAIWLAEQRVPLSVQLKPEVSPTQDIRLWVSVEDAQMHTVTIWLTVRPDMTVASLKDMVFLDYGFPPVLQQWVIGQRLARDQETLHSHGVRQNGDSAYLYLLSARNTSLNPQELQRERQLRMLEDLGFKDLTLQPRGPLEPGPPKPGVPQEPGRGQPDAVPEPPPVGWQCPGCTFINKPTRPGCEMCCRARPEAYQVPASYQPDEEERARLAGEEEALRQYQQRKQQQQEGNYLQHVQLDQRSLVLNTEPAECPVCYSVLAPGEAVVLRECLHTFCRCGPQSHPRQCSLIKAANYAGLDVGGALCSDTSLDARENLRGRLRLPMLRTRNLREREAQRLTPGPRLMREAA

SEQ ID NO: 889260 - protein, 269 aa, Homo sapiens [sequence omitted]

SEQ ID NO: 889261 - protein, 269 aa, Homo sapiens [sequence omitted]

SEQ ID NO: 889262 - protein, 445 aa, Homo sapiens; identical to SEQ ID NO: 889247

SEQ ID NO: 889263 - protein, 261 aa, Homo sapiens
  misc_feature (4)..(4): Xaa can be any naturally occurring amino acid
GVSXLFNLVALRTDSDFEDTRTSLVLNTEPAECPVCYSVLAPGEAVVLRECLHTFCRECLQGTIRNSQEAEVSCPFIDNTYSCSGKLLEREIKALLTPEDYQRFLDLGISIAENRSAFSYHCKTPDCKGWCFFEDDVNEFTCPVCFHVNCLLCKAIHEQMNCKEYQEDLALRAQNDVAARQTTEMLKVMLQQGEAMRCPQCQIVVQKKDGCDWIRCTVCHTEICWVTKGPRWGPGGPGDTSGGCRCRVNGIPCHPSCQNCH

SEQ ID NO: 889264 - protein, 225 aa, Homo sapiens
MESPVKGVPMILTLFPSPPPRECLQGTIRNSQEAEVSCPFIDNTYSCSGKLLEREIKALLTPEDYQRFLDLGISIAENRSAFSYHCKTPDCKGWCFFEDDVNEFTCPVCFHVNCLLCKAIHEQMNCKEYQEDLALRAQNDVAARQTTEMLKVMLQQGEAMRCPQCQIVVQKKDGCDWIRCTVCHTEICWVTKGPRWGPGGPGDTSGGCRCRVNGIPCHPSCQNCH

SEQ ID NO: 889265 - protein, 220 aa, Homo sapiens; identical to SEQ ID NO: 889251

SEQ ID NO: 889266 - protein, 234 aa, Homo sapiens [sequence omitted]

SEQ ID NO: 889267 - protein, 137 aa, Homo sapiens
MAGPELLLDSNIYATGVGPSQTENTQTEDKETSRRSKDQSRGKSEQGEKMLQLQDTGEEDEDQVALHRPRPSAKLKRVSILPKSRRSMIKAKPEKNWHEKPRNLHQNGDPSQTKSEKERPNNPRENPDGLRGETERV

SEQ ID NO: 889268 - protein, 164 aa, Homo sapiens; identical to SEQ ID NO: 746823

SEQ ID NO: 889269 - protein, 258 aa, Homo sapiens
QCDQSQGMRNMESNAVQLTRMEYAMKSLSLLYPKSLSRHVSVRTSVVTQQLLSEPSPKAPRARPCRVSTADRSVRKGIMAYSLEDLLLKVRDTLMLADKPFFLVLEEDGTTVETEEYFQALAGDTVFMVLQKGQKWQPPSEQGTRHPLSLSHKPAKKIDVARVTFDLYKLNPQDFIGCLNVKATFYDTYSLSYDLHCCGAKRIMKEAFRWALFSMQATGHVLLGTSCYLQQLLDATEEGQPPKGKASSLIPTCLKILQ

SEQ ID NO: 889270 - protein, 92 aa, Homo sapiens
VVIQRILRGQGGGSDPNTQNPKYITAACEMVAEMVESLQSVLALGHKRNSGRNGLEGVVLAAEEGLKGIRLWLLRHPPQDRPLTVIPLIQSL

SEQ ID NO: 889271 - protein, 2709 aa, Homo sapiens
MLVHYLLGKVLLGEEEALEDDSESRSDVSSSALTASVKDEISGELAASSGVSTPGSAGHDIITEQPRSQHTLQADSVDLASCDLTSSATDGDEEDILSHSSSQVSAVPSDPAMDLNDGTQASSPISDSSQTTTEGPDSAVTPSDSSEIVLDGTDNQYLGLQIGQPQDEDEEATGILPDEASEAFRNSSMALQQAHLLKNMSHCRQPSDSSVDKFVLRDEATEPGDQENKPCRIKGDIGQSTDDDSAPLVHCVRLLSASFLLTGGKNVLVPDRDVRVSVKALALSCVGAAVALHPESFFSKLYKVPLDTTEYPEEQYVSDILNYIDHGDPQVRGATAILCGTLICSILSRSRFHVGDWMGTIRTLTGNTFSLADCIPLLRKTLKDESSVTCKLACTAVRNCVMSLCSSSYSELGLQLIIDVLTLRNSSYWLVRTELLETLAEIDFRLVSFLEAKAENLHRGAHHYTGLLKLQERVLNNVVIHLLGDEDPRVRHVAAASLIRLVPKLFYKCDQGQADPVVAVARDQSSVYLKLLMHETQPPSHFSVSTITRIYRGYNLLPSITDVTMENNLSRVIAAVSHELITSTTRALTFGCCEALCLLSTAFPVCIWSLGWHCGVPPLSASDESRKSCTVGMATMILTLLSSAWFPLDLSAHQDALILAGNLLAASAPKSLRSSWASEEEANPAATKQEEVWPALGDRALVPMVEQLFSHLLKVINICAHVLDDVAPGPAIKAALPSLTNPPSLSPIRRKGKEKEPGEQASVPLSPKKGSEASAASRQSDTSGPVTTSKSSSLGSFYHLPSYLKLHDVLKATHANYKVTLDLQNSTEKFGGFLRSALDVLSQILELATLQDIGKCVEEILGYLKSCFSREPMMATVCVQQLLKTLFGTNLASQFDGLSSNPSKSQGRAQRLGSSSVRPGLYHYCFMAPYTHFTQALADASLRNMVQAEQENDTSGWFDVLQKVSTQLKTNLTSVTKNRADKNAIHNHIRLFEPLVIKALKQYTTTTCVQLQKQVLDLLAQLVQLRVNYCLLDSDQVFIGFVLKQFEYIEVGQFRESEAIIPNIFFFLVLLSYERYHSKQIIGIPKIIQLCDGIMASGRKAVTHAIPALQPIVHDLFVLRGTNKADAGKELETQKEVVVSMLLRLIQYHQVLEMFILVLQQCHKENEDKWKRLSRQIADIILPMLAKQQMHIDSHEALGVLNTLFEILAPSSLRPVDMLLRSMFVTPNTMASVSTVQLWISGILAILRVLISQSTEDIVLSRIQELSFSPYLISCTVINRLRDGDSTSTLEEHSEGKQIKNLPEETFSRFLLQLVGILLEDIVTKQLKVEMSEQQHTFYCQELGTLLMCLIHIFKSGMFRRITAAATRLFRSDGCGGSFYTLDSLNLRARSMITTHPALVLLWCQILLLVNHTDYRWWAEVQQTPKRHSLSSTKLLSPQMSGEEEDSDLAAKLGMCNREIVRRGALILFCDYVCQNLHDSEHLTWLIVNHIQDLISLSHEPPVQDFISAVHRNSAASGLFIQAIQSRCENLSTPTMLKKTLQCLEGIHLSQSGAVLTLYVDRLLCTPFRVLARMVDILACRRVEMLLAANLQSSMAQLPMEELNRIQEYLQSSGLAQRHQRLYSLLDRFRLSTMQDSLSPSPPVSSHPLDGDGHVSLETVSPDKDWYVHLVKSQCWTRSDSALLEGAELVNRIPAEDMNAFMMNSEFNLSLLAPCLSLGMSEISGGQKSALFEAAREVTLARVSGTVQQLPAVHHVFQPELPAEPAAYWSKLNDLFGDAALYQSLPTLARALAQYLVVVSKLPSHLHLPPEKEKDIVKFVVATLEALSWHLIHEQIPLSLDLQAGLDCCCLALQLPGLWSVVSSTEFVTHACSLIYCVHFILEAVAVQPGEQLLSPERRTNTPKAISEEEEEVDPNTQNPKYITAACEMVAEMVESLQSVLALGHKRNSGVPAFLTPLLRNIIISLARLPLVNSYTRVPPLVWKLGWSPKPGGDFGTAFPEIPVEFLQEKEVFKEFIYRINTLGWTSRTQFEETWATLLGVLVTQPLVMEQEESPPEEDTERTQINVLAVQAITSLVLSAMTVPVAGNPAVSCLEQQPRNKPLKALDTRFGRKLSIIRGIVEQEIQAMVSKRENIATHHLYQAWDPVPSLSPATTGALISHEKLLLQINPERELGSMSYKLGQVSIHSVWLGNSITPLREEEWDEEEEEEADAPAPSSPPTSPVNSRKHRAGVDIHSCSQFLLELYSRWILPSSSARRTPAILISEVVRSLLVVSDLFTERNQFELMYVTLTELRRVHPSEDEILAQYLVPATCKAAAVLGMDKAVAEPVSRLLESTLRSSHLPSRVGALHGVLYVLECDLLDDTAKQLIPVISDYLLSNLKGIAHCVNIHSQQHVLVMCATAFYLIENYPLDVGPEFSASIIQMCGVMLSGSEESTPSIIYHCALRGLERLLLSEQLSRLDAESLVKLSVDRVNVHSPHRAMAALGLMLTCMYTGKEKVSPGRTSDPNPAAPDSESVIVAMERVSVLFDRIRKGFPCEARVVARILPQFLDDFFPPQDIMNKVIGEFLSNQQPYPQFMATVVYKVFQTLHSTGQSSMVRDWVMLSLSNFTQRAPVAMATWSLSCFFVSASTSPWVAAILPHVISRMGKLEQVDVNLFCLVATDFYRHQIEEELDRRAFQSVLEVVAAPGSPYHRLLTCLRNVHKVTTC

SEQ ID NO: 889272 - protein, 2308 aa, Homo sapiens [sequence omitted]

SEQ ID NO: 889273 - protein, 3144 aa, Homo sapiens
MATLEKLMKAFESLKSFQQQQQQQQQQQQQQQQQQQQQQQPPPPPPPPPPPQLPQPPPQAQPLLPQPQPPPPPPPPPPGPAVAEEPLHRPKKELSATKKDRVNHCLTICENIVAQSVRNSPEFQKLLGIAMELFLLCSDDAESDVRMVADECLNKVIKALMDSNLPRLQLELYKEIKKNGAPRSLRAALWRFAELAHLVRPQKCRPYLVNLLPCLTRTSKRPEESVQETLAAAVPKIMASFGNFANDNEIKVLLKAFIANLKSSSPTIRRTAAGSAVSICQHSRRTQYFYSWLLNVLLGLLVPVEDEHSTLLILGVLLTLRYLVPLLQQQVKDTSLKGSFGVTRKEMEVSPSAEQLVQVYELTLHHTQHQDHNVVTGALELLQQLFRTPPPELLQTLTAVGGIGQLTAAKEESGGRSRSGSIVELIAGGGSSCSPVLSRKQKGKVLLGEEEALEDDSESRSDVSSSALTASVKDEISGELAASSGVSTPGSAGHDIITEQPRSQHTLQADSVDLASCDLTSSATDGDEEDILSHSSSQVSAVPSDPAMDLNDGTQASSPISDSSQTTTEGPDSAVTPSDSSEIVLDGTDNQYLGLQIGQPQDEDEEATGILPDEASEAFRNSSMALQQAHLLKNMSHCRQPSDSSVDKFVLRDEATEPGDQENKPCRIKGDIGQSTDDDSAPLVHCVRLLSASFLLTGGKNVLVPDRDVRVSVKALALSCVGAAVALHPESFFSKLYKVPLDTTEYPEEQYVSDILNYIDHGDPQVRGATAILCGTLICSILSRSRFHVGDWMGTIRTLTGNTFSLADCIPLLRKTLKDESSVTCKLACTAVRNCVMSLCSSSYSELGLQLIIDVLTLRNSSYWLVRTELLETLAEIDFRLVSFLEAKAENLHRGAHHYTGLLKLQERVLNNVVIHLLGDEDPRVRHVAAASLIRLVPKLFYKCDQGQADPVVAVARDQSSVYLKLLMHETQPPSHFSVSTITRIYRGYNLLPSITDVTMENNLSRVIAAVSHELITSTTRALTFGCCEALCLLSTAFPVCIWSLGWHCGVPPLSASDESRKSCTVGMATMILTLLSSAWFPLDLSAHQDALILAGNLLAASAPKSLRSSWASEEEANPAATKQEEVWPALGDRALVPMVEQLFSHLLKVINICAHVLDDVAPGPAIKAALPSLTNPPSLSPIRRKGKEKEPGEQASVPLSPKKGSEASAASRQSDTSGPVTTSKSSSLGSFYHLPSYLKLHDVLKATHANYKVTLDLQNSTEKFGGFLRSALDVLSQILELATLQDIGKCVEEILGYLKSCFSREPMMATVCVQQLLKTLFGTNLASQFDGLSSNPSKSQGRAQRLGSSSVRPGLYHYCFMAPYTHFTQALADASLRNMVQAEQENDTSGWFDVLQKVSTQLKTNLTSVTKNRADKNAIHNHIRLFEPLVIKALKQYTTTTCVQLQKQVLDLLAQLVQLRVNYCLLDSDQVFIGFVLKQFEYIEVGQFRESEAIIPNIFFFLVLLSYERYHSKQIIGIPKIIQLCDGIMASGRKAVTHAIPALQPIVHDLFVLRGTNKADAGKELETQKEVVVSMLLRLIQYHQVLEMFILVLQQCHKENEDKWKRLSRQIADIILPMLAKQQMHIDSHEALGVLNTLFEILAPSSLRPVDMLLRSMFVTPNTMASVSTVQLWISGILAILRVLISQSTEDIVLSRIQELSFSPYLISCTVINRLRDGDSTSTLEEHSEGKQIKNLPEETFSRFLLQLVGILLEDIVTKQLKVEMSEQQHTFYCQELGTLLMCLIHIFKSGMFRRITAAATRLFRSDGCGGSFYTLDSLNLRARSMITTHPALVLLWCQILLLVNHTDYRWWAEVQQTPKRHSLSSTKLLSPQMSGEEEDSDLAAKLGMCNREIVRRGALILFCDYVCQNLHDSEHLTWLIVNHIQDLISLSHEPPVQDFISAVHRNSAASGLFIQAIQSRCENLSTPTMLKKTLQCLEGIHLSQSGAVLTLYVDRLLCTPFRVLARMVDILACRRVEMLLAANLQSSMAQLPMEELNRIQEYLQSSGLAQRHQRLYSLLDRFRLSTMQDSLSPSPPVSSHPLDGDGHVSLETVSPDKDWYVHLVKSQCWTRSDSALLEGAELVNRIPAEDMNAFMMNSEFNLSLLAPCLSLGMSEISGGQKSALFEAAREVTLARVSGTVQQLPAVHHVFQPELPAEPAAYWSKLNDLFGDAALYQSLPTLARALAQYLVVVSKLPSHLHLPPEKEKDIVKFVVATLEALSWHLIHEQIPLSLDLQAGLDCCCLALQLPGLWSVVSSTEFVTHACSLIYCVHFILEAVAVQPGEQLLSPERRTNTPKAISEEEEEVDPNTQNPKYITAACEMVAEMVESLQSVLALGHKRNSGVPAFLTPLLRNIIISLARLPLVNSYTRVPPLVWKLGWSPKPGGDFGTAFPEIPVEFLQEKEVFKEFIYRINTLGWTSRTQFEETWATLLGVLVTQPLVMEQEESPPEEDTERTQINVLAVQAITSLVLSAMTVPVAGNPAVSCLEQQPRNKPLKALDTRFGRKLSIIRGIVEQEIQAMVSKRENIATHHLYQAWDPVPSLSPATTGALISHEKLLLQINPERELGSMSYKLGQVSIHSVWLGNSITPLREEEWDEEEEEEADAPAPSSPPTSPVNSRKHRAGVDIHSCSQFLLELYSRWILPSSSARRTPAILISEVVRSLLVVSDLFTERNQFELMYVTLTELRRVHPSEDEILAQYLVPATCKAAAVLGMDKAVAEPVSRLLESTLRSSHLPSRVGALHGVLYVLECDLLDDTAKQLIPVISDYLLSNLKGIAHCVNIHSQQHVLVMCATAFYLIENYPLDVGPEFSASIIQMCGVMLSGSEESTPSIIYHCALRGLERLLLSEQLSRLDAESLVKLSVDRVNVHSPHRAMAALGLMLTCMYTGKEKVSPGRTSDPNPAAPDSESVIVAMERVSVLFDRIRKGFPCEARVVARILPQFLDDFFPPQDIMNKVIGEFLSNQQPYPQFMATVVYKVFQTLHSTGQSSMVRDWVMLSLSNFTQRAPVAMATWSLSCFFVSASTSPWVAAILPHVISRMGKLEQVDVNLFCLVATDFYRHQIEEELDRRAFQSVLEVVAAPGSPYHRLLTCLRNVHKVTTC

SEQ ID NO: 889274 - protein, 3144 aa, Homo sapiens; identical to SEQ ID NO: 889273

SEQ ID NO: 889275 - protein, 281 aa, Homo sapiens
MLSGSEESTPSIIYHCALRGLERLLLSEQLSRLDAESLVKLSVDRVNVHSPHRAMAALGLMLTCMYTGKEKVSPGRTSDPNPAAPDSESVIVAMERVSVLFDRIRKGFPCEARVVARILPQFLDDFFPPQDIMNKVIGEFLSNQQPYPQFMATVVYKVFQTLHSTGQSSMVRDWVMLSLSNFTQRAPVAMATWSLSCFFVSASTSPWVAAILPHVISRMGKLEQVDVNLFCLVATDFYRHQIEEELDRRAFQSVLEVVAAPGSPYHRLLTCLRNVHKVTTC

SEQ ID NO: 889276 - protein, 2777 aa, Homo sapiens
  misc_feature (2771)..(2771): Xaa can be any naturally occurring amino acid
  misc_feature (2773)..(2773): Xaa can be any naturally occurring amino acid
MATLEKLMKAFESLKSFQQQQQQQQQQQQQQQQQQQQQQQPPPPPPPPPPPQLPQPPPQAQPLLPQPQPPPPPPPPPPGPAVAEEPLHRPKKELSATKKDRVNHCLTICENIVAQSVRNSPEFQKLLGIAMELFLLCSDDAESDVRMVADECLNKVIKALMDSNLPRLQLELYKEIKKNGAPRSLRAALWRFAELAHLVRPQKCRPYLVNLLPCLTRTSKRPEESVQETLAAAVPKIMASFGNFANDNEIKVLLKAFIANLKSSSPTIRRTAAGSAVSICQHSRRTQYFYSWLLNVLLGLLVPVEDEHSTLLILGVLLTLRYLVPLLQQQVKDTSLKGSFGVTRKEMEVSPSAEQLVQVYELTLHHTQHQDHNVVTGALELLQQLFRTPPPELLQTLTAVGGIGQLTAAKEESGGRSRSGSIVELIAGGGSSCSPVLSRKQKGKVLLGEEEALEDDSESRSDVSSSALTASVKDEISGELAASSGVSTPGSAGHDIITEQPRSQHTLQADSVDLASCDLTSSATDGDEEDILSHSSSQVSAVPSDPAMDLNDGTQASSPISDSSQTTTEGPDSAVTPSDSSEIVLDGTDNQYLGLQIGQPQDEDEEATGILPDEASEAFRNSSMALQQAHLLKNMSHCRQPSDSSVDKFVLRDEATEPGDQENKPCRIKGDIGQSTDDDSAPLVHCVRLLSASFLLTGGKNVLVPDRDVRVSVKALALSCVGAAVALHPESFFSKLYKVPLDTTEYPEEQYVSDILNYIDHGDPQVRGATAILCGTLICSILSRSRFHVGDWMGTIRTLTGNTFSLADCIPLLRKTLKDESSVTCKLACTAVRNCVMSLCSSSYSELGLQLIIDVLTLRNSSYWLVRTELLETLAEIDFRLVSFLEAKAENLHRGAHHYTGLLKLQERVLNNVVIHLLGDEDPRVRHVAAASLIRLVPKLFYKCDQGQADPVVAVARDQSSVYLKLLMHETQPPSHFSVSTITRIYRGYNLLPSITDVTMENNLSRVIAAVSHELITSTTRALTFGCCEALCLLSTAFPVCIWSLGWHCGVPPLSASDESRKSCTVGMATMILTLLSSAWFPLDLSAHQDALILAGNLLAASAPKSLRSSWASEEEANPAATKQEEVWPALGDRALVPMVEQLFSHLLKVINICAHVLDDVAPGPAIKAALPSLTNPPSLSPIRRKGKEKEPGEQASVPLSPKKGSEASAASRQSDTSGPVTTSKSSSLGSFYHLPSYLKLHDVLKATHANYKVTLDLQNSTEKFGGFLRSALDVLSQILELATLQDIGKCVEEILGYLKSCFSREPMMATVCVQQLLKTLFGTNLASQFDGLSSNPSKSQGRAQRLGSSSVRPGLYHYCFMAPYTHFTQALADASLRNMVQAEQENDTSGWFDVLQKVSTQLKTNLTSVTKNRADKNAIHNHIRLFEPLVIKALKQYTTTTCVQLQKQVLDLLAQLVQLRVNYCLLDSDQVFIGFVLKQFEYIEVGQFRESEAIIPNIFFFLVLLSYERYHSKQIIGIPKIIQLCDGIMASGRKAVTHAIPALQPIVHDLFVLRGTNKADAGKELETQKEVVVSMLLRLIQYHQVLEMFILVLQQCHKENEDKWKRLSRQIADIILPMLAKQQMHIDSHEALGVLNTLFEILAPSSLRPVDMLLRSMFVTPNTMASVSTVQLWISGILAILRVLISQSTEDIVLSRIQELSFSPYLISCTVINRLRDGDSTSTLEEHSEGKQIKNLPEETFSRFLLQLVGILLEDIVTKQLKVEMSEQQHTFYCQELGTLLMCLIHIFKSGMFRRITAAATRLFRSDGCGGSFYTLDSLNLRARSMITTHPALVLLWCQILLLVNHTDYRWWAEVQQTPKRHSLSSTKLLSPQMSGEEEDSDLAAKLGMCNREIVRRGALILFCDYVCQNLHDSEHLTWLIVNHIQDLISLSHEPPVQDFISAVHRNSAASGLFIQAIQSRCENLSTPTMLKKTLQCLEGIHLSQSGAVLTLYVDRLLCTPFRVLARMVDILACRRVEMLLAANLQSSMAQLPMEELNRIQEYLQSSGLAQRHQRLYSLLDRFRLSTMQDSLSPSPPVSSHPLDGDGHVSLETVSPDKDWYVHLVKSQCWTRSDSALLEGAELVNRIPAEDMNAFMMNSEFNLSLLAPCLSLGMSEISGGQKSALFEAAREVTLARVSGTVQQLPAVHHVFQPELPAEPAAYWSKLNDLFGDAALYQSLPTLARALAQYLVVVSKLPSHLHLPPEKEKDIVKFVVATLEALSWHLIHEQIPLSLDLQAGLDCCCLALQLPGLWSVVSSTEFVTHACSLIYCVHFILEAVAVQPGEQLLSPERRTNTPKAISEEEEEVDPNTQNPKYITAACEMVAEMVESLQSVLALGHKRNSGVPAFLTPLLRNIIISLARLPLVNSYTRVPPLVWKLGWSPKPGGDFGTAFPEIPVEFLQEKEVFKEFIYRINTLGWTSRTQFEETWATLLGVLVTQPLVMEQEESPPEEDTERTQINVLAVQAITSLVLSAMTVPVAGNPAVSCLEQQPRNKPLKALDTRFGRKLSIIRGIVEQEIQAMVSKRENIATHHLYQAWDPVPSLSPATTGALISHEKLLLQINPERELGSMSYKLGQVSIHSVWLGNSITPLREEEWDEEEEEEADAPAPSSPPTSPVNSRKHRAGVDIHSCSQFLLELYSRWILPSSSARRTPAILISEVVRSLLVVSDLFTERNQFELMYVTLTELRRVHPSEDEILAQYLVPATCKAAAVLGMARPGGPGTAVETPXTXLPQV

SEQ ID NO: 889277 - protein, 1653 aa, Homo sapiens
MATLEKLMKAFESLKSFQQQQQQQQQQQQQQQQQQQQQQQPPPPPPPPPPPQLPQPPPQAQPLLPQPQPPPPPPPPPPGPAVAEEPLHRPKKELSATKKDRVNHCLTICENIVAQSVRNSPEFQKLLGIAMELFLLCSDDAESDVRMVADECLNKVIKALMDSNLPRLQLELYKEIKKNGAPRSLRAALWRFAELAHLVRPQKCRPYLVNLLPCLTRTSKRPEESVQETLAAAVPKIMASFGNFANDNEIKVLLKAFIANLKSSSPTIRRTAAGSAVSICQHSRRTQYFYSWLLNVLLGLLVPVEDEHSTLLILGVLLTLRYLVPLLQQQVKDTSLKGSFGVTRKEMEVSPSAEQLVQVYELTLHHTQHQDHNVVTGALELLQQLFRTPPPELLQTLTAVGGIGQLTAAKEESGGRSRSGSIVELIAGGGSSCSPVLSRKQKGKVLLGEEEALEDDSESRSDVSSSALTASVKDEISGELAASSGVSTPGSAGHDIITEQPRSQHTLQADSVDLASCDLTSSATDGDEEDILSHSSSQVSAVPSDPAMDLNDGTQASSPISDSSQTTTEGPDSAVTPSDSSEIVLDGTDNQYLGLQIGQPQDEDEEATGILPDEASEAFRNSSMALQQAHLLKNMSHCRQPSDSSVDKFVLRDEATEPGDQENKPCRIKGDIGQSTDDDSAPLVHCVRLLSASFLLTGGKNVLVPDRDVRVSVKALALSCVGAAVALHPESFFSKLYKVPLDTTEYPEEQYVSDILNYIDHGDPQVRGATAILCGTLICSILSRSRFHVGDWMGTIRTLTGNTFSLADCIPLLRKTLKDESSVTCKLACTAVRNCVMSLCSSSYSELGLQLIIDVLTLRNSSYWLVRTELLETLAEIDFRLVSFLEAKAENLHRGAHHYTGLLKLQERVLNNVVIHLLGDEDPRVRHVAAASLIRLVPKLFYKCDQGQADPVVAVARDQSSVYLKLLMHETQPPSHFSVSTITRIYRGYNLLPSITDVTMENNLSRVIAAVSHELITSTTRALTFGCCEALCLLSTAFPVCIWSLGWHCGVPPLSASDESRKSCTVGMATMILTLLSSAWFPLDLSAHQDALILAGNLLAASAPKSLRSSWASEEEANPAATKQEEVWPALGDRALVPMVEQLFSHLLKVINICAHVLDDVAPGPAIKAALPSLTNPPSLSPIRRKGKEKEPGEQASVPLSPKKGSEASAASRQSDTSGPVTTSKSSSLGSFYHLPSYLKLHDVLKATHANYKVTLDLQNSTEKFGGFLRSALDVLSQILELATLQDIGKCVEEILGYLKSCFSREPMMATVCVQQLLKTLFGTNLASQFDGLSSNPSKSQGRAQRLGSSSVRPGLYHYCFMAPYTHFTQALADASLRNMVQAEQENDTSGWFDVLQKVSTQLKTNLTSVTKNRADKNAIHNHIRLFEPLVIKALKQYTTTTCVQLQKQVLDLLAQLVQLRVNYCLLDSDQVFIGFVLKQFEYIEVGQFRESEAIIPNIFFFLVLLSYERYHSKQIIGIPKIIQLCDGIMASGRKAVTHAIPALQPIVHDLFVLRGTNKADAGKELETQKEVVVSMLLRLIQYHQVRGMYVGTVVDTLLTRADGRKCHVVTLTVNCVTLNQVWAFWGLGRYAVFAKHQQSGCSFIFFKAFPNH

SEQ ID NO: 889278 - protein, 462 aa, Homo sapiens
MATLEKLMKAFESLKSFQQQQQQQQQQQQQQQQQQQQQQQPPPPPPPPPPPQLPQPPPQAQPLLPQPQPPPPPPPPPPGPAVAEEPLHRPKKELSATKKDRVNHCLTICENIVAQSVRNSPEFQKLLGIAMELFLLCSDDAESDVRMVADECLNKVIKALMDSNLPRLQLELYKEIKKNGAPRSLRAALWRFAELAHLVRPQKCRPYLVNLLPCLTRTSKRPEESVQETLAAAVPKIMASFGNFANDNEIKVLLKAFIANLKSSSPTIRRTAAGSAVSICQHSRRTQYFYSWLLNVLLGLLVPVEDEHSTLLILGVLLTLRYLVPLLQQQVKDTSLKGSFGVTRKEMEVSPSAEQLVQVYELTLHHTQHQDHNVVTGALELLQQLFRTPPPELLQTLTAVGGIGQLTAAKEESGGRSRSGSIVELIAGGGSSCSPVLSRKQKGDYFRNQSLVLNLTDFLVFL

SEQ ID NO: 889279 - protein, 447 aa, Homo sapiens
MATLEKLMKAFESLKSFQQQQQQQQQQQQQQQQQQQQQQQPPPPPPPPPPPQLPQPPPQAQPLLPQPQPPPPPPPPPPGPAVAEEPLHRPKKELSATKKDRVNHCLTICENIVAQSVRNSPEFQKLLGIAMELFLLCSDDAESDVRMVADECLNKVIKALMDSNLPRLQLELYKEIKKNGAPRSLRAALWRFAELAHLVRPQKCRPYLVNLLPCLTRTSKRPEESVQETLAAAVPKIMASFGNFANDNEIKVLLKAFIANLKSSSPTIRRTAAGSAVSICQHSRRTQYFYSWLLNVLLGLLVPVEDEHSTLLILGVLLTLRYLVPLLQQQVKDTSLKGSFGVTRKEMEVSPSAEQLVQVYELTLHHTQHQDHNVVTGALELLQQLFRTPPPELLQTLTAVGGIGQLTAAKEESGGRSRSGSIVELIGKLLARSTLTINFAVILVTLY

SEQ ID NO: 889280 - protein, 3144 aa, Homo sapiens; identical to SEQ ID NO: 889273

SEQ ID NO: 889281 - protein, 3144 aa, Homo sapiens; identical to SEQ ID NO: 889273

SEQ ID NO: 889282 - protein, 1321 aa, Homo sapiens
MIVPLCSSLGDTARRCLWGKKKETEPRGVQPSESGPFRRHSLSSTKLLSPQMSGEEEDSDLAAKLGMCNREIVRRGALILFCDYVCQNLHDSEHLTWLIVNHIQDLISLSHEPPVQDFISAVHRNSAASGLFIQAIQSRCENLSTPTMLKKTLQCLEGIHLSQSGAVLTLYVDRLLCTPFRVLARMVDILACRRVEMLLAANLQSSMAQLPMEELNRIQEYLQSSGLAQRHQRLYSLLDRFRLSTMQDSLSPSPPVSSHPLDGDGHVSLETVSPDKDWYVHLVKSQCWTRSDSALLEGAELVNRIPAEDMNAFMMNSEFNLSLLAPCLSLGMSEISGGQKSALFEAAREVTLARVSGTVQQLPAVHHVFQPELPAEPAAYWSKLNDLFGDAALYQSLPTLARALAQYLVVVSKLPSHLHLPPEKEKDIVKFVVATLEALSWHLIHEQIPLSLDLQAGLDCCCLALQLPGLWSVVSSTEFVTHACSLIYCVHFILEAVAVQPGEQLLSPERRTNTPKAISEEEEEVDPNTQNPKYITAACEMVAEMVESLQSVLALGHKRNSGVPAFLTPLLRNIIISLARLPLVNSYTRVPPLVWKLGWSPKPGGDFGTAFPEIPVEFLQEKEVFKEFIYRINTLGWTSRTQFEETWATLLGVLVTQPLVMEQEESPPEEDTERTQINVLAVQAITSLVLSAMTVPVAGNPAVSCLEQQPRNKPLKALDTRFGRKLSIIRGIVEQEIQAMVSKRENIATHHLYQAWDPVPSLSPATTGALISHEKLLLQINPERELGSMSYKLGQVSIHSVWLGNSITPLREEEWDEEEEEEADAPAPSSPPTSPVNSRKHRAGVDIHSCSQFLLELYSRWILPSSSARRTPAILISEVVRSLLVVSDLFTERNQFELMYVTLTELRRVHPSEDEILAQYLVPATCKAAAVLGMDKAVAEPVSRLLESTLRSSHLPSRVGALHGVLYVLECDLLDDTAKQLIPVISDYLLSNLKGIAHCVNIHSQQHVLVMCATAFYLIENYPLDVGPEFSASIIQMCGVMLSGSEESTPSIIYHCALRGLERLLLSEQLSRLDAESLVKLSVDRVNVHSPHRAMAALGLMLTCMYTGKEKVSPGRTSDPNPAAPDSESVIVAMERVSVLFDRIRKGFPCEARVVARILPQFLDDFFPPQDIMNKVIGEFLSNQQPYPQFMATVVYKVFQTLHSTGQSSMVRDWVMLSLSNFTQRAPVAMATWSLSCFFVSASTSPWVAAILPHVISRMGKLEQVDVNLFCLVATDFYRHQIEEELDRRAFQSVLEVVAAPGSPYHRLLTCLRNVHKVTTC

SEQ ID NO: 889283 - protein, 606 aa, Homo sapiens
FFLKCRFGRKLSIIRGIVEQEIQAMVSKRENIATHHLYQAWDPVPSLSPATTGALISHEKLLLQINPERELGSMSYKLGQVSIHSVWLGNSITPLREEEWDEEEEEEADAPAPSSPPTSPVNSRKHRAGVDIHSCSQFLLELYSRWILPSSSARRTPAILISEVVRSLLVVSDLFTERNQFELMYVTLTELRRVHPSEDEILAQYLVPATCKAAAVLGMDKAVAEPVSRLLESTLRSSHLPSRVGALHGVLYVLECDLLDDTAKQLIPVISDYLLSNLKGIAHCVNIHSQQHVLVMCATAFYLIENYPLDVGPEFSASIIQMCGVMLSGSEESTPSIIYHCALRGLERLLLSEQLSRLDAESLVKLSVDRVNVHSPHRAMAALGLMLTCMYTGKEKVSPGRTSDPNPAAPDSESVIVAMERVSVLFDRIRKGFPCEARVVARILPQFLDDFFPPQDIMNKVIGEFLSNQQPYPQFMATVVYKVFQTLHSTGQSSMVRDWVMLSLSNFTQRAPVAMATWSLSCFFVSASTSPWVAAILPHVISRMGKLEQVDVNLFCLVATDFYRHQIEEELDRRAFQSVLEVVAAPGSPYHRLLTCLRNVHKVTTC

SEQ ID NO: 889284 - protein, 2940 aa, Homo sapiens
MATLEKLMKAFESLKSFQQQQQQQQQQQQQQQQQQQQQQQPPPPPPPPPPPQLPQPPPQAQPLLPQPQPPPPPPPPPPGPAVAEEPLHRPKKELSATKKDRVNHCLTICENIVAQSVRNSPEFQKLLGIAMELFLLCSDDAESDVRMVADECLNKVIKALMDSNLPRLQLELYKEIKKNGAPRSLRAALWRFAELAHLVRPQKCRPYLVNLLPCLTRTSKRPEESVQETLAAAVPKIMASFGNFANDNEIKVLLKAFIANLKSSSPTIRRTAAGSAVSICQHSRRTQYFYSWLLNVLLGLLVPVEDEHSTLLILGVLLTLRYLVPLLQQQVKDTSLKGSFGVTRKEMEVSPSAEQLVQVYELTLHHTQHQDHNVVTGALELLQQLFRTPPPELLQTLTAVGGIGQLTAAKEESGGRSRSGSIVELIAGGGSSCSPVLSRKQKGKVLLGEEEALEDDSESRSDVSSSALTASVKDEISGELAASSGVSTPGSAGHDIITEQPRSQHTLQADSVDLASCDLTSSATDGDEEDILSHSSSQVSAVPSDPAMDLNDGTQASSPISDSSQTTTEGPDSAVTPSDSSEIVLDGTDNQYLGLQIGQPQDEDEEATGILPDEASEAFRNSSMALQQAHLLKNMSHCRQPSDSSVDKFVLRDEATEPGDQENKPCRIKGDIGQSTDDDSAPLVHCVRLLSASFLLTGGKNVLVPDRDVRVSVKALALSCVGAAVALHPESFFSKLYKVPLDTTEYPEEQYVSDILNYIDHGDPQVRGATAILCGTLICSILSRSRFHVGDWMGTIRTLTGNTFSLADCIPLLRKTLKDESSVTCKLACTAVRNCVMSLCSSSYSELGLQLIIDVLTLRNSSYWLVRTELLETLAEIDFRLVSFLEAKAENLHRGAHHYTGLLKLQERVLNNVVIHLLGDEDPRVRHVAAASLIRLVPKLFYKCDQGQADPVVAVARDQSSVYLKLLMHETQPPSHFSVSTITRIYRGYNLLPSITDVTMENNLSRVIAAVSHELITSTTRALTFGCCEALCLLSTAFPVCIWSLGWHCGVPPLSASDESRKSCTVGMATMILTLLSSAWFPLDLSAHQDALILAGNLLAASAPKSLRSSWASEEEANPAATKQEEVWPALGDRALVPMVEQLFSHLLKVINICAHVLDDVAPGPAIKAALPSLTNPPSLSPIRRKGKEKEPGEQASVPLSPKKGSEASAASRQSDTSGPVTTSKSSSLGSFYHLPSYLKLHDVLKATHANYKVTLDLQNSTEKFGGFLRSALDVLSQILELATLQDIGKCVEEILGYLKSCFSREPMMATVCVQQLLKTLFGTNLASQFDGLSSNPSKSQGRAQRLGSSSVRPGLYHYCFMAPYTHFTQALADASLRNMVQAEQENDTSGWFDVLQKVSTQLKTNLTSVTKNRADKNAIHNHIRLFEPLVIKALKQYTTTTCVQLQKQVLDLLAQLVQLRVNYCLLDSDQVFIGFVLKQFEYIEVGQFRESEAIIPNIFFFLVLLSYERYHSKQIIGIPKIIQLCDGIMASGRKAVTHAIPALQPIVHDLFVLRGTNKADAGKELETQKEVVVSMLLRLIQYHQVLEMFILVLQQCHKENEDKWKRLSRQIADIILPMLAKQQMHIDSHEALGVLNTLFEILAPSSLRPVDMLLRSMFVTPNTMASVSTVQLWISGILAILRVLISQSTEDIVLSRIQELSFSPYLISCTVINRLRDGDSTSTLEEHSEGKQIKNLPEETFSRFLLQLVGILLEDIVTKQLKVEMSEQQHTFYCQELGTLLMCLIHIFKSGMFRRITAAATRLFRSDGCGGSFYTLDSLNLRARSMITTHPALVLLWCQILLLVNHTDYRWWAEVQQTPKRHSLSSTKLLSPQMSGEEEDSDLAAKLGMCNREIVRRGALILFCDYVCQNLHDSEHLTWLIVNHIQDLISLSHEPPVQDFISAVHRNSAASGLFIQAIQSRCENLSTPTMLKKTLQCLEGIHLSQSGAVLTLYVDRLLCTPFRVLARMVDILACRRVEMLLAANLQSSMAQLPMEELNRIQEYLQSSGLAQRHQRLYSLLDRFRLSTMQDSLSPSPPVSSHPLDGDGHVSLETVSPDKDWYVHLVKSQCWTRSDSALLEGAELVNRIPAEDMNAFMMNSEFNLSLLAPCLSLGMSEISGGQKSALFEAAREVTLARVSGTVQQLPAVHHVFQPELPAEPAAYWSKLNDLFGDAALYQSLPTLARALAQYLVVVSKLPSHLHLPPEKEKDIVKFVVATLEALSWHLIHEQIPLSLDLQAGLDCCCLALQLPGLWSVVSSTEFVTHACSLIYCVHFILEAVAVQPGEQLLSPERRTNTPKAISEEEEEVDPNTQNPKYITAACEMVAEMVESLQSVLALGHKRNSGVPAFLTPLLRNIIISLARLPLVNSYTRVPPLVWKLGWSPKPGGDFGTAFPEIPVEFLQEKEVFKEFIYRINTLGWTSRTQFEETWATLLGVLVTQPLVMEQEESPPEEDTERTQINVLAVQAITSLVLSAMTVPVAGNPAVSCLEQQPRNKPLKALDTRFGRKLSIIRGIVEQEIQAMVSKRENIATHHLYQAWDPVPSLSPATTGALISHEKLLLQINPERELGSMSYKLGQVSIHSVWLGNSITPLREEEWDEEEEEEADAPAPSSPPTSPVNSRKHRAGVDIHSCSQFLLELYSRWILPSSSARRTPAILISEVVRSLLVVSDLFTERNQFELMYVTLTELRRVHPSEDEILAQYLVPATCKAAAVLGMDKAVAEPVSRLLESTLRSSHLPSRVGALHGVLYVLECDLLDDTAKQLIPVISDYLLSNLKGIAHCVNIHSQQHVLVMCATAFYLIENYPLDVGPEFSASIIQMCGVMLSGSEELYATPAGTQLRCRTQHTTLTDPPHSTQLRCRTQHMTLTQTLHTAHNSDATHSTQHSYTAQQHMTHTDATP

SEQ ID NO: 889285 - protein, 1391 aa, Homo sapiens
MATLEKLMKAFESLKSFQQQQQQQQQQQQQQQQQQQQQQQPPPPPPPPPPPQLPQPPPQAQPLLPQPQPPPPPPPPPPGPAVAEEPLHRPKKELSATKKDRVNHCLTICENIVAQSVRNSPEFQKLLGIAMELFLLCSDDAESDVRMVADECLNKVIKALMDSNLPRLQLELYKEIKKNGAPRSLRAALWRFAELAHLVRPQKCRPYLVNLLPCLTRTSKRPEESVQETLAAAVPKIMASFGNFANDNEIKVLLKAFIANLKSSSPTIRRTAAGSAVSICQHSRRTQYFYSWLLNVLLGLLVPVEDEHSTLLILGVLLTLRYLVPLLQQQVKDTSLKGSFGVTRKEMEVSPSAEQLVQVYELTLHHTQHQDHNVVTGALELLQQLFRTPPPELLQTLTAVGGIGQLTAAKEESGGRSRSGSIVELIAGGGSSCSPVLSRKQKGKVLLGEEEALEDDSESRSDVSSSALTASVKDEISGELAASSGVSTPGSAGHDIITEQPRSQHTLQADSVDLASCDLTSSATDGDEEDILSHSSSQVSAVPSDPAMDLNDGTQASSPISDSSQTTTEGPDSAVTPSDSSEIVLDGTDNQYLGLQIGQPQDEDEEATGILPDEASEAFRNSSMALQQAHLLKNMSHCRQPSDSSVDKFVLRDEATEPGDQENKPCRIKGDIGQSTDDDSAPLVHCVRLLSASFLLTGGKNVLVPDRDVRVSVKALALSCVGAAVALHPESFFSKLYKVPLDTTEYPEEQYVSDILNYIDHGDPQVRGATAILCGTLICSILSRSRFHVGDWMGTIRTLTGNTFSLADCIPLLRKTLKDESSVTCKLACTAVRNCVMSLCSSSYSELGLQLIIDVLTLRNSSYWLVRTELLETLAEIDFRLVSFLEAKAENLHRGAHHYTGLLKLQERVLNNVVIHLLGDEDPRVRHVAAASLIRLVPKLFYKCDQGQADPVVAVARDQSSVYLKLLMHETQPPSHFSVSTITRIYRGYNLLPSITDVTMENNLSRVIAAVSHELITSTTRALTFGCCEALCLLSTAFPVCIWSLGWHCGVPPLSASDESRKSCTVGMATMILTLLSSAWFPLDLSAHQDALILAGNLLAASAPKSLRSSWASEEEANPAATKQEEVWPALGDRALVPMVEQLFSHLLKVINICAHVLDDVAPGPAIKAALPSLTNPPSLSPIRRKGKEKEPGEQASVPLSPKKGSEASAASRQSDTSGPVTTSKSSSLGSFYHLPSYLKLHDVLKATHANYKVTLDLQNSTEKFGGFLRSALDVLSQILELATLQDIGKCVEEILGYLKSCFSREPMMATVCVQQLLKTLFGTNLASQFDGLSSNPSKSQGRAQRLGSSSVRPGLYHYCFMAPYTHFTQALADASLRNMVQAEQENDTSG

SEQ ID NO: 889286 - protein, 858 aa, Homo sapiens
MATLEKLMKAFESLKSFQQQQQQQQQQQQQQQQQQQQQQQPPPPPPPPPPPQLPQPPPQAQPLLPQPQPPPPPPPPPPGPAVAEEPLHRPKKELSATKKDRVNHCLTICENIVAQSVRNSPEFQKLLGIAMELFLLCSDDAESDVRMVADECLNKVIKALMDSNLPRLQLELYKEIKKNGAPRSLRAALWRFAELAHLVRPQKCRPYLVNLLPCLTRTSKRPEESVQETLAAAVPKIMASFGNFANDNEIKVLLKAFIANLKSSSPTIRRTAAGSAVSICQHSRRTQYFYSWLLNVLLGLLVPVEDEHSTLLILGVLLTLRYLVPLLQQQVKDTSLKGSFGVTRKEMEVSPSAEQLVQVYELTLHHTQHQDHNVVTGALELLQQLFRTPPPELLQTLTAVGGIGQLTAAKEESGGRSRSGSIVELIAGGGSSCSPVLSRKQKGKVLLGEEEALEDDSESRSDVSSSALTASVKDEISGELAASSGVSTPGSAGHDIITEQPRSQHTLQADSVDLASCDLTSSATDGDEEDILSHSSSQVSAVPSDPAMDLNDGTQASSPISDSSQTTTEGPDSAVTPSDSSEIVLDGTDNQYLGLQIGQPQDEDEEATGILPDEASEAFRNSSMALQQAHLLKNMSHCRQPSDSSVDKFVLRDEATEPGDQENKPCRIKGDIGQSTDDDSAPLVHCVRLLSASFLLTGGKNVLVPDRDVRVSVKALALSCVGAAVALHPESFFSKLYKVPLDTTEYPEEQYVSDILNYIDHGDPQVRGATAILCGTLICSILSRSRFHVGDWMGTIRTLTGNTFSLADCIPLLRKTLKDESSVTCKLACTAVRVSIIFCGTISSLSGHFIIATIKIGA

SEQ ID NO: 889287 - protein, 98 aa, Homo sapiens [sequence omitted]

SEQ ID NO: 889288 - protein, 419 aa, Homo sapiens
EGGDVFGSGTHHFSCVLGSFRVSAMFPRVSTFLPLRPLSRHPLSSGSPETSAAAIMLLTVRHGTVRYRSSALLARTKNNIQRYFGTNSVICSKKDKQSVRTEETSKETSESQDSEKENTKKDLLGIIKGMKVELSTVNVRTTKPPKRRPLKSLEATLGRLRRATEYAPKKRIEPLSPELVAAASAVADSLPFDKQTTKSELLSQLQQHEEESRAQRDAKRPKISFSNIISDMKVARSATARVRSRPELRIQFDEGYDNYPGQEKTDDLKKRKNIFTGKRLNIFDMMAVTKEAPETDTSPSLWDVEFAKQLATVNEQPLQNGFEELIQWTKEGKLWEFPINNEAGFDDDGSEFHEHIFLEKHLESFPKQGPIRHFMELVTCGLSKNPYLSVKQKVEHIEWFRNYFNEKKDILKESNIQFN

SEQ ID NO: 889289 - protein, 419 aa, Homo sapiens; identical to SEQ ID NO: 889288

SEQ ID NO: 889290 - protein, 406 aa, Homo sapiens
EGGDVFGSGTHHFSCVLGSFRVSAMFPRVSTFLPLRPLSRHPLSSGSPETSAAAIMLLTVRHGTVRYRSSALLARTKNNIQRYFGTNSVICSKKDKQSVRTEETSKETSESQDSEKENTKKDLLGIIKGMKVELSTVNVRTTKPPKRRPLKSLEATLGRLRRATEYAPKKRIEPLSPELVAAASAVADSLPFDKQTTKSELLSQLQQHEEESRAQRDAKRPKISFSNIISDMKVARSATARVRSRPELRIQFDEGYDNYPGQEKTDDLKKRKNIFTGKRLNIFDMMAVTKEAPETDTSPSLWDVEFAKQLATVNEQPLQNGFEELIQWTKEGKLWEFPINNEAGFDDDGSEFHEHIFLTHPPNPILRQCLADNLGWPQKLFIPDSMCVSAYGGHGGPHLCFFLPLV

SEQ ID NO: 889291 - protein, 275 aa, Homo sapiens
EGGDVFGSGTHHFSCVLGSFRVSAMFPRVSTFLPLRPLSRHPLSSGSPETSAAAIMLLTVRHGTVRYRSSALLARTKNNIQRYFGTNSVICSKKDKQSVRTEETSKETSESQDSEKENTKKDLLGIIKGMKVELSTVNVRTTKPPKRRPLKSLEATLGRLRRATEYAPKKRIEPLSPELVAAASAVADSLPFDKQTTKSELLSQLQQHEEESRAQRDAKRPKISFSNIISDMKVARSATARVRSRPELRIQFDEGYDNYPGQEKTDDLKKRYQAL

SEQ ID NO: 889292 - protein, 275 aa, Homo sapiens; identical to SEQ ID NO: 889291

SEQ ID NO: 889293 - protein, 418 aa, Homo sapiens
KTLPRLELARALGGGCRSFRVSAMFPRVSTFLPLRPLSRHPLSSGSPETSAAAIMLLTVRHGTVRYRSSALLARTKNNIQRYFGTNSVICSKKDKQSVRTEETSKETSESQDSEKENTKKDLLGIIKGMKVELSTVNVRTTKPPKRRPLKSLEATLGRLRRATEYAPKKRIEPLSPELVAAASAVADSLPFDKQTTKSELLSQLQQHEEESRAQRDAKRPKISFSNIISDMKVARSATARVRSRPELRIQFDEGYDNYPGQEKTDDLKKRKNIFTGKRLNIFDMMAVTKEAPETDTSPSLWDVEFAKQLATVNEQPLQNGFEELIQWTKEGKLWEFPINNEAGFDDDGSEFHEHIFLEKHLESFPKQGPIRHFMELVTCGLSKNPYLSVKQKVEHIEWFRNYFNEKKDILKESNIQFN

SEQ ID NO: 889294 - protein, 430 aa, Homo sapiens
WQHESASQVVFWCAEHGHWLMSLLKILRIDCTKLPFGLLYPRTTLVLASWKAARDTVHTESRMDVKTVIREQCYTSGVEVKFQLDWTKNNIQRYFGTNSVICSKKDKQSVRTEETSKETSESQDSEKENTKKDLLGIIKGMKVELSTVNVRTTKPPKRRPLKSLEATLGRLRRATEYAPKKRIEPLSPELVAAASAVADSLPFDKQTTKSELLSQLQQHEEESRAQRDAKRPKISFSNIISDMKVARSATARVRSRPELRIQFDEGYDNYPGQEKTDDLKKRKNIFTGKRLNIFDMMAVTKEAPETDTSPSLWDVEFAKQLATVNEQPLQNGFEELIQWTKEGKLWEFPINNEAGFDDDGSEFHEHIFLEKHLESFPKQGPIRHFMELVTCGLSKNPYLSVKQKVEHIEWFRNYFNEKKDILKESNIQFN

SEQ ID NO: 889295 - protein, 410 aa, Homo sapiens
EGGDVFGSGTHHFSCVLGSFRVSAMFPRVSTFLPLRPLSRHPLSSGSPETSAAAIMLLTVRHGTVRTKNNIQRYFGTNSVICSKKDKQSVRTEETSKETSESQDSEKENTKKDLLGIIKGMKVELSTVNVRTTKPPKRRPLKSLEATLGRLRRATEYAPKKRIEPLSPELVAAASAVADSLPFDKQTTKSELLSQLQQHEEESRAQRDAKRPKISFSNIISDMKVARSATARVRSRPELRIQFDEGYDNYPGQEKTDDLKKRKNIFTGKRLNIFDMMAVTKEAPETDTSPSLWDVEFAKQLATVNEQPLQNGFEELIQWTKEGKLWEFPINNEAGFDDDGSEFHEHIFLEKHLESFPKQGPIRHFMELVTCGLSKNPYLSVKQKVEHIEWFRNYFNEKKDILKESNIQFN

SEQ ID NO: 889296 - protein, 366 aa, Homo sapiens
EGGDVFGSGTHHFSCVLGSFRVSAMFPRVSTFLPLRPLSRHPLSSGSPETSAAAIMLLTVRHGTVRYRSSALLARTKNNIQRYFGTNSVICSKKDKQSVRTEETSKETSESQDSEKENTKKDLLGIIKGMKVELSTVNVRTTKPPKRRPLKSLEATLGRLRRATEYAPKKSFSNIISDMKVARSATARVRSRPELRIQFDEGYDNYPGQEKTDDLKKRKNIFTGKRLNIFDMMAVTKEAPETDTSPSLWDVEFAKQLATVNEQPLQNGFEELIQWTKEGKLWEFPINNEAGFDDDGSEFHEHIFLEKHLESFPKQGPIRHFMELVTCGLSKNPYLSVKQKVEHIEWFRNYFNEKKDILKESNIQFN

SEQ ID NO: 889297 - protein, 323 aa, Homo sapiens
EGGDVFGSGTHHFSCVLGSFRVSAMFPRVSTFLPLRPLSRHPLSSGSPETSAAAIMLLTVRHGTVRYRSSALLARIEPLSPELVAAASAVADSLPFDKQTTKSELLSQLQQHEEESRAQRDAKRPKISFSNIISDMKVARSATARVRSRPELRIQFDEGYDNYPGQEKTDDLKKRKNIFTGKRLNIFDMMAVTKEAPETDTSPSLWDVEFAKQLATVNEQPLQNGFEELIQWTKEGKLWEFPINNEAGFDDDGSEFHEHIFLEKHLESFPKQGPIRHFMELVTCGLSKNPYLSVKQKVEHIEWFRNYFNEKKDILKESNIQFN

SEQ ID NO: 889298 - protein, 132 aa, Homo sapiens
VAFCETAGDTSPSLWDVEFAKQLATVNEQPLQNGFEELIQWTKEGKLWEFPINNEAGFDDDGSEFHEHIFLEKHLESFPKQGPIRHFMELVTCGLSKNPYLSVKQKVEHIEWFRNYFNEKKDILKESNIQFN

SEQ ID NO: 889299 - protein, 425 aa, Homo sapiens
MAPITTSREEFDEIPTVVGIFSAFGLVFTVSLFAWICCQRKSSKSNKTPPYKFVHVLKGVDIYPENLNSKKKFGADDKNEVKNKPAVPKNSLHLDLEKRDLNGNFPKTNLKPGSPSDLENATPKLFLEGEKESVSPESLKSSTSLTSEEKQEKLGTLFFSLEYNFERKAFVVNIKEARGLPAMDEQSMTSDPYIKMTILPEKKHKVKTRVLRKTLDPAFDETFTFYGIPYTQIQELALHFTILSFDRFSRDDIIGEVLIPLSGIELSEGKMLMNREIIKRNVRKSSGRGELLISLCYQSTTNTLTVVVLKARHLPKSDVSGLSDPYVKVNLYHAKKRISKKKTHVKKCTPNAVFNELFVFDIPCEGLEDISVEFLVLDSERGSRNEVIGQLVLGAAAEGTGGEHWKEICDYPRRQIAKWHVLCDG

SEQ ID NO: 889300 - protein, 425 aa, Homo sapiens; identical to SEQ ID NO: 889299

SEQ ID NO: 889301 - protein, 173 aa, Homo sapiens
ASINLQDQLEKTGENKGWSDPTPGFPEPTNNTPKGILHLSPDVYQEMEASRHKVISGTTLGYLSPKDMNQPSSSFFSISPTSNSSATIARELLMNGTSSTAEAIGLKGSSPTPPCSPVQPSKQLEYLARIQGFQVHYCDRQSGKECVTCLTLAPVQMTFHAIGSSIEASHDQV

SEQ ID NO: 889302 - protein, 173 aa, Homo sapiens; identical to SEQ ID NO: 889301

SEQ ID NO: 889303 - protein, 173 aa, Homo sapiens; identical to SEQ ID NO: 889301

SEQ ID NO: 889304 - protein, 307 aa, Homo sapiens
MAEISDLDRQIEQLRRCELIKESEVKALCAKAREILVEESNVQRVDSPVTVCGDIHGQFYDLKELFRVGGDVPETNYLFMGDFVDRGFYSVETFLLLLALKVRYPDRITLIRGNHESRQITQVYGFYDECLRKYGSVTVWRYCTEIFDYLSLSAIIDGKIFCVHGGLSPSIQTLDQIRTIDRKQEVPHDGPMCDLLWSDPEDTTGWGVSPRGAGYLFGSDVVAQFNAANDIDMICRAHQLVMEGYKWHFNETVLTVWSAPNYCYRCGNVAAILELDEHLQKDFIIFEAAPQETRGIPSKKPVADYFL

SEQ ID NO: 889305 - protein, 307 aa, Homo sapiens; identical to SEQ ID NO: 889304

SEQ ID NO: 889306 - protein, 319 aa, Homo sapiens
MAEISDLDRQIEQLRRCELIKESEVKALCAKAREILVEESNVQRVDSPVTVCGDIHGQFYDLKELFRVGGDVPETNYLFMGDFVDRGFYSVETFLLLLALKVRYPDRITLIRGNHESRQITQVYGFYDECLRKYGSVTVWRYCTEIFDYLSLSAIIDGKIFCVHGGLSPSIQTLDQIRTIDRKQEVPHDGPMCDLLWSDPEDTTGWGVSPRGAGYLFGSDVVAQFNAANDIDMICRAHQLVMEGYKWHFNETVLTVWSAPNYCYRCGNVAAILELDEHLQKDFIIFEAAPQETRGIPSKKPVADYFLWPPPTLLALAPL

SEQ ID NO: 889307 - protein, 363 aa, Homo sapiens
REHAGSTTRCGVVDLGLKYEGMGAGEPRTGDRQRRETPVRCGGGGGPDSDPRRGWAMAEISDLDRQIEQLRRCELIKESEVKALCAKAREILVEESNVQRVDSPVTVCGDIHGQFYDLKELFRVGGDVPETNYLFMGDFVDRGFYSVETFLLLLALKVRYPDRITLIRGNHESRQITQVYGFYDECLRKYGSVTVWRYCTEIFDYLSLSAIIDGKIFCVHGGLSPSIQTLDQIRTIDRKQEVPHDGPMCDLLWSDPEDTTGWGVSPRGAGYLFGSDVVAQFNAANDIDMICRAHQLVMEGYKWHFNETVLTVWSAPNYCYRCGNVAAILELDEHLQKDFIIFEAAPQETRGIPSKKPVADYFL

SEQ ID NO: 889308 - protein, 228 aa, Homo sapiens
MGDFVDRGFYSVETFLLLLALKVRYPDRITLIRGNHESRQITQVYGFYDECLRKYGSVTVWRYCTEIFDYLSLSAIIDGKIFCVHGGLSPSIQTLDQIRTIDRKQEVPHDGPMCDLLWSDPEDTTGWGVSPRGAGYLFGSDVVAQFNAANDIDMICRAHQLVMEGYKWHFNETVLTVWSAPNYCYRCGNVAAILELDEHLQKDFIIFEAAPQETRGIPSKKPVADYFL

SEQ ID NO: 889309 - protein, 342 aa, Homo sapiens
MAEISDLDRQIEQLRRCELIKESEVKALCAKAREILVEESNVQRVDSPVTVCGDIHGQFYDLKELFRVGGDVPETNYLFMGDFVDRGFYSVETFLLLLALKVRYPDRITLIRGNHESRQITQVYGFYDECLRKYGSVTVWRYCTEIFDYLSLSAIIDGKIFCVHGGLSPSIQTLDQIRTIDRKQEVPHDGPMCDLLWSDPEDTTGWGVSPRGAGYLFGSDVVAQFNAANDIDMICRAHQLVMEGYKWHFNETVLTVWSAPNYCYRCGNVAAILELDEHLQKDFIIFEAAPQETRGIPPRPAPAPSNPSGPRTTVTLPSSSDGGWAWGGAVLALLSPKRVLRG

SEQ ID NO: 889310 - protein, 228 aa, Homo sapiens; identical to SEQ ID NO: 889308

SEQ ID NO: 889311 - protein, 286 aa, Homo sapiens
MAEISDLDRQIEQLRRCELIKESEVKALCAKAREILVEESNVQRVDSPVTVCGDIHGQFYDLKELFRVGGDVPETNYLFMGDFVDRGFYSVETFLLLLALKVRYPDRITLIRGNHESRQITQVYGFYDECLRKYGSVTVWRYCTEIFDYLSLSAIIDGKIFCVHGGLSPSIQTLDQIRTIDRKQEVPHDGPMCDLLWSDPEDTTGWGVSPRGAGYLFGSDVVAQFNAANDIDMICRAHQLVMEGYKWHFNETVLTVWSAPNYCYRVRTSLERPGDLAPCSSSSLPT

SEQ ID NO: 889312 - protein, 341 aa, Homo sapiens
MAEISDLDRQIEQLRRCELIKESEVKALCAKAREILVEESNVQRVDSPVTVCGDIHGQFYDLKELFRVGGDVPETNYLFMGDFVDRGFYSVETFLLLLALKVRYPDRITLIRGNHESRQITQVYGFYDECLRKYGSVTVWRYCTEIFDYLSLSAIIDGKIFCVHGGLSPSIQTLDQIRTIDRKQEVPHDGPMCDLLWSDPEDTTGWGVSPRGAGYLFGSDVVAQFNAANDIDMICRAHQLVMEGYKWHFNETVLTVWSAPNYCYRCGNVAAILELDEHLQKDFIIFEAVCCPPRGCFEGEDFSGEAWRPSSMFLLLSPHLNHEVSNNFFFFFSFFFLFVFR

SEQ ID NO: 889313 - protein, 257 aa, Homo sapiens
TSSQIASDLELVKELFRVGGDVPETNYLFMGDFVDRGFYSVETFLLLLALKVRYPDRITLIRGNHESRQITQVYGFYDECLRKYGSVTVWRYCTEIFDYLSLSAIIDGKIFCVHGGLSPSIQTLDQIRTIDRKQEVPHDGPMCDLLWSDPEDTTGWGVSPRGAGYLFGSDVVAQFNAANDIDMICRAHQLVMEGYKWHFNETVLTVWSAPNYCYRCGNVAAILELDEHLQKDFIIFEAAPQETRGIPSKKPVADYFL

SEQ ID NO: 889314 - protein, 254 aa, Homo sapiens
MPHDSGKRCQECAGQWLLGWQAGGHEEVREGCVERPSRRQPWLGGHPQVRYPDRITLIRGNHESRQITQVYGFYDECLRKYGSVTVWRYCTEIFDYLSLSAIIDGKIFCVHGGLSPSIQTLDQIRTIDRKQEVPHDGPMCDLLWSDPEDTTGWGVSPRGAGYLFGSDVVAQFNAANDIDMICRAHQLVMEGYKWHFNETVLTVWSAPNYCYRCGNVAAILELDEHLQKDFIIFEAAPQETRGIPSKKPVADYFL

SEQ ID NO: 889315 - protein, 254 aa, Homo sapiens; identical to SEQ ID NO: 889314

SEQ ID NO: 889316 - protein, 273 aa, Homo sapiens
MAEISDLDRQIEQLRRCELIKESEVKALCAKAREILVEESNVQRVDSPVTVCGDIHGQFYDLKELFRVRYPDRITLIRGNHESRQITQVYGFYDECLRKYGSVTVWRYCTEIFDYLSLSAIIDGKIFCVHGGLSPSIQTLDQIRTIDRKQEVPHDGPMCDLLWSDPEDTTGWGVSPRGAGYLFGSDVVAQFNAANDIDMICRAHQLVMEGYKWHFNETVLTVWSAPNYCYRCGNVAAILELDEHLQKDFIIFEAAPQETRGIPSKKPVADYFL

SEQ ID NO: 889317 - protein, 254 aa, Homo sapiens; identical to SEQ ID NO: 889314

SEQ ID NO: 889318 - protein, 225 aa, Homo sapiens
MAEISDLDRQIEQLRRCELIKESEVKALCAKAREILVEESNVQRVDSPVTVCGDIHGQFYDLKELFRVGGDVPETNYLFMGDFVDRGFYSVETFLLLLALKVRYPDRITLIRGNHESRQITQVYGFYDECLRKYGSVTVVAQFNAANDIDMICRAHQLVMEGYKWHFNETVLTVWSAPNYCYRCGNVAAILELDEHLQKDFIIFEAAPQETRGIPSKKPVADYFL

SEQ ID NO: 889319 - protein, 119 aa, Homo sapiens
  misc_feature (1)..(1): Xaa can be any naturally occurring amino acid
  misc_feature (6)..(8): Xaa can be any naturally occurring amino acid
XREREXXXREREREREREREREREAGYLFGSDVVAQFNAANDIDMICRAHQLVMEGYKWHFNETVLTVWSAPNYCYRCGNVAAILELDEHLQKDFIIFEAAPQETRGIPSKKPVADYFL

SEQ ID NO: 889320 - protein, 225 aa, Homo sapiens
MAEISDLDRQIEQLRRCELIKESEVKALCAKAREILVEESNVQRVDSPVTVCGDIHGQFYDLKELFRVGGDVPETNYLFMGDFVDRGFYSVETFLLLLALKVRYPDRITLIRGNHESRQITQVYGFYDECLRKYGSVTVWRYCTEIFDYLSLSAIIDGKTPPGPCPLQPFWPSHHCDSAIFLRRRLGVGGGCPGSAVPQEGASRVRTSLERPGDLAPCSSSSLPT

SEQ ID NO: 889321 - protein, 120 aa, Homo sapiens
MAEISDLDRQIEQLRRCELIKESEVKALCAKAREILVEESNVQRVDSPVTVCGDIHGQFYDLKELFRVGGDVPETNYLFMGDFVDRGFYSVETFLLLLALKVAVPGFCTPNLGDLGPGLS

SEQ ID NO: 889322 - protein, 112 aa, Homo sapiens
CVHGGLSPSIQTLDQIRTIDRKQEVPHDGPMCDLLWSDPEGEGMWAGAGRDSQEGLGKRGSRAGLHCHSSSTCQMAGTLEEEQGGLHGRCFEHTVAWGMAQRAVEDNQVMAP

SEQ ID NO: 889323 - protein, 136 aa, Homo sapiens
SFQDCLISSPPPKKGQELGWAGLAVVTLVFSCLQRDLGRGEQRAEGGLASHSEYLLSLQSQAWSFRHMKFPLHLGGSISPTLSSFICPFPHLQRSTAKRSGGCCARWLTPVIPAFWEGKVGTSLEVRSSRPAWPTW

SEQ ID NO: 889324 - protein, 1132 aa, Homo sapiens
MELFQAKDHYILQQGERALWCSRRDGGLQLRPATDLLLAWNPICLGLVEGVIGKIQLHSDLPWWLILIRQKALVGKLPGDHEVCKVTKIAVLSLSEMEPQDLELELCKKHHFGINKPEKIIPSPDDSKFLLKTFTHIKSNVSAPNKKKVKESKEKEKLERRLLEELLKMFMDSESFYYSLTYDLTNSVQRQSTGERDGRPLWQKVDDRFFWNKYMIQDLTEIGTPDVDFWIIPMIQGFVQIEELVVNYTESSDDEKSSPETPPQESTCVDDIHPRFLVALISRRSRHRAGMRYKRRGVDKNGNVANYVETEQLIHVHNHTLSFVQTRGSVPVFWSQVGYRYNPRPRLDRSEKETVAYFCAHFEEQLNIYKKQVIINLVDQAGREKIIGDAYLKQVLLFNNSHLTYVSFDFHEHCRGMKFENVQTLTDAIYDIILDMKWCWVDEAGVICKQEGIFRVNCMDCLDRTNVVQAAIARVVMEQQLKKLGVMPPEQPLPVKCNRIYQIMWANNGDSISRQYAGTAALKGDFTRTGERKLAGVMKDGVNSANRYYLNRFKDAYRQAVIDLMQGIPVTEDLYSIFTKEKEHEALHKENQRSHQELISQLLQSYMKLLLPDDEKFHGGWALIDCDPSLIDATHRDVDVLLLLSNSAYYVAYYDDEVDKVNQYQRLSLENLEKIEIGPEPTLFGKPKFSCMRLHYRYKEASGYFHTLRAVMRNPEEDGKDTLQCIAEMLQITKQAMGSDLPIIEKKLERKSSKPHEDIIGIRSQNQGSLAQGKNFLMSKFSSLNQKVKQTKSNVNIGNLRKLGNFTKPEMKVNFLKPNLKVNLWKSDSSLETMENTGVMDKVQAESDGDMSSDNDSYHSDEFLTNSKSDEDRQLANSLESVGPIDYVLPSCGIIASAPRLGSRSQSLSSTDSSVHAPSEITVAHGSGLGKGQESPLKKSPSAGDVHILTGFAKPMDIYCHRFVQDAQNKVTHLSETRSVSQQASQERNQMTNQVSNETQSESTEQTPSRPSQLDVSLSATGPQFLSVEPAHSVASQKTPTSASSMLELETGLHVTPSPSESSSSRAVSPFAKIRSSMVQVASITQAGLTHGINFAVSKVQKSPPEPEIINQVQQNELKKMFIQCQTRIIQI

SEQ ID NO: 889325 - protein, 89 aa, Homo sapiens
SPPTGRVPRGVPSAAASRRGSYPAAPRGAGSGGLDRLGRPVRRPRAAASLGARGQHGALPSQGPLHPAAGRARAVVQPPRRRPPAPTRY

SEQ ID NO: 889326 - protein, 918 aa, Homo sapiens [sequence omitted]

SEQ ID NO: 889327 - protein, 918 aa, Homo sapiens [sequence omitted]

SEQ ID NO: 889328 - protein, 522 aa, Homo sapiens
MCHDVIFMAWLKQQFSECTLIDATHRDVDVLLLLSNSAYYVAYYDDEVDKVNQYQRLSLENLEKIEIGPEPTLFGKPKFSCMRLHYRYKEASGYFHTLRAVMRNPEEDGKDTLQCIAEMLQITKQAMGSDLPIIEKKLERKSSKPHEDIIGIRSQNQGSLAQGKNFLMSKFSSLNQKVKQTKSNVNIGNLRKLGNFTKPEMKVNFLKPNLKVNLWKSDSSLETMENTGVMDKVQAESDGDMSSDNDSYHSDEFLTNSKSDEDRQLANSLESVGPIDYVLPSCGIIASAPRLGSRSQSLSSTDSSVHAPSEITVAHGSGLGKGQESPLKKSPSAGDVHILTGFAKPMDIYCHRFVQDAQNKVTHLSETRSVSQQASQERNQMTNQVSNETQSESTEQTPSRPSQLDVSLSATGPQFLSVEPAHSVASQKTPTSASSMLELETGLHVTPSPSESSSSRAVSPFAKIRSSMVQVASITQAGLTHGINFAVSKVQKSPPEPEIINQVQQNELKKMFIQCQTRIIQI

SEQ ID NO: 889329 - protein, 918 aa, Homo sapiens [sequence omitted]

SEQ ID NO: 889330 - protein, 219 aa, Homo sapiens
MELFQAKDHYILQQGERALWCSRRDGGLQLRPATDLLLAWNPICLGLVEGVIGKIQLHSDLPWWLILIRQKALVGKLPGDHEVCKVTKIAVLSLSEMEPQDLELELCKKHHFGINKPEKIIPSPDDSKFLLKTFTHIKSNVSAPNKKKVKESKEKEKLERRLLEELLKMFMDSESFYYSLTYDLTNSVQRQSTGERDGRPLWQKVPLTARRAGFALGKK

SEQ ID NO: 889331 - protein, 57 aa, Homo sapiens
QSLMLMSPEDSGFYATIVAVVGLHVVLAIFVFIVWKEGCPSGGKTKTNRAASSELQT

SEQ ID NO: 889332 - protein, 548 aa, Homo sapiens
MSFAVFFDILLYVQIEVNLLFEIKTVGLKLQRGVSDVKNCSLRLCLIDATHRDVDVLLLLSNSAYYVAYYDDEVDKVNQYQRLSLENLEKIEIGPEPTLFGKPKFSCMRLHYRYKEASGYFHTLRAVMRNPEEDGKDTLQCIAEMLQITKQAMGSDLPIIEKKLERKSSKPHEDIIGIRSQNQGSLAQGKNFLMSKFSSLNQKVKQTKSNVNIGNLRKLGNFTKPEMKVNFLKPNLKVNLWKSDSSLETMENTGVMDKVQAESDGDMSSDNDSYHSDEFLTNSKSDEDRQLANSLESVGPIDYVLPSCGIIASAPRLGSRSQSLSSTDSSVHAPSEITVAHGSGLGKGQESPLKKSPSAGDVHILTGFAKPMDIYCHRFVQDAQNKVTHLSETRSVSQQASQERNQMTNQVSNETQSESTEQTPSRPSQLDVSLSATGPQFLSVEPAHSVASQKTPTSASSMLELETGLHVTPSPSESSSSRAVSPFAKIRSSMVQVASITQAGLTHGINFAVSKVQKSPPEPEIINQVQQNELKKMFIQCQTRIIQI

SEQ ID NO: 889333 - protein, 900 aa, Homo sapiens
MIQDLTEIGTPDVDFWIIPMIQGFVQIEELVVNYTESSDDEKSSPETPPQESTCVDDIHPRFLVALISRRSRHRAGMRYKRRGVDKNGNVANYVETEQLIHVHNHTLSFVQTRGSVPVFWSQVGYRYNPRPRLDRSEKETVAYFCAHFEEQLNIYKKQVIINLVDQAGREKIIGDAYLKQVLLFNNSHLTYVSFDFHEHCRGMKFENVQTLTDAIYDIILDMKWCWVDEAGVICKQEGIFRVNCMDCLDRTNVVQAAIARVVMEQQLKKLGVMPPEQPLPVKCNRIYQIMWANNGDSISRQYAGTAALKGDFTRTGERKLAGVMKDGVNSANRYYLNRFKDAYRQAVIDLMQGIPVTEDLYSIFTKEKEHEALHKENQRSHQELISQLLQSYMKLLLPDDEKFHGGWALIDCDPSLIDATHRDVDVLLLLSNSAYYVAYYDDEVDKVNQYQRLSLENLEKIEIGPEPTLFGKPKFSCMRLHYRYKEASGYFHTLRAVMRNPEEDGKDTLQCIAEMLQITKQAMGSDLPIIEKKLERKSSKPHEDIIGIRSQNQGSLAQGKNFLMSKFSSLNQKVKQTKSNVNIGNLRKLGNFTKPEMKVNFLKPNLKVNLWKSDSSLETMENTGVMDKVQAESDGDMSSDNDSYHSDEFLTNSKSDEDRQLANSLESVGPIDYVLPSCGIIASAPRLGSRSQSLSSTDSSVHAPSEITVAHGSGLGKGQESPLKDIYCHRFVQDAQNKVTHLSETRSVSQQASQERNQMTNQVSNETQSESTEQTPSRPSQLDVSLSATGPQFLSVEPAHSVASQKTPTSASSMLELETGLHVTPSPSESSSSRAVSPFAKIRSSMVQVASITQAGLTHGINFAVSKVQKSPPEPEIINQVQQNELKKMFIQCQTRIIQI

SEQ ID NO: 889334 - protein, 910 aa, Homo sapiens
MIQDLTEIGTPDVDFWIIPMIQGFVQIEELVVNYTESSDDEKSSPETPPQESTCVDDIHPRFLVALISRRSRHRAGMRYKRRGVDKNGNVANYVETEQLIHVHNHTLSFVQTRGSVPVFWSQVGYRYNPRPRLDRSEKETVAYFCAHFEEQLNIYKKQVIINLVDQAGREKIIGDAYLKQVLLFNNSHLTYVSFDFHEHCRGMKFENVQTLTDAIYDIILDMKWCWVDEAGVICKQEGIFRVNCMDCLDRTNVVQAAIARVVMEQQLKKLGVMPPEQPLPVKCNRIYQIMWANNGDSISRQYAGTAALKGDFTRTGERKLAGVMKDGVNSANRYYLNRFKDAYRQAVIDLMQGIPVTEDLYSIFTKEKEHEALHKENQRSHQELISQLLQSYMKLLLPDDEKFHGGWALIDCDPSLIDATHRDVDVLLLLSNSAYYVAYYDDEVDKVNQYQRLSLENLEKIEIGPEPTLFGKPKFSCMRLHYRYKEASGYFHTLRAVMRNPEEDGKDTLQCIAEMLQITKQAMGSDLPIIEKKLERKSSKPHEDIIGIRSQNQGSLAQGKNFLMSKFSSLNQKVKQTKSNVNIGNLRKLGNFTKPEMKVNFLKPNLKVNLWKSDSSLETMENTGVMDKVQAESDGDMSSDNDSYHSDEFLTNSKSDEDRQLANSLESVGPIDYVLPSCGIIASAPRLGSRSQSLSSTDSSVHAPSEITVAHGSGLGKGQESPLKKSPSAGDVHILTGFAKPMDIYCHRFVQDAQNKVTHLSETRSVSQQASQERNQMTNQVSNETQSESTEQTPSRPSQLDVSLSATGPQFLSVEPAHSVASQKTPTSASSMLELETGLHVTPSPSESSSSRAVSPFAKIRSSMVQVASITQAGLTHGINFAVSKVQKSPPEPEIINQVQQNLRGVRAPL

SEQ ID NO: 889335 - protein, 74 aa, Homo sapiens
DINNSTLDLMQGIPVTEDLYSIFTKEKEHEALHKENQRSHQELISQLLQSYMKLLLPDDEKFHGGWALIDCDPR

SEQ ID NO: 889336 - protein, 654 aa, Homo sapiens
RRSGPAAAAAASSPRIGCTVLTRKSSSAARQRRAGAMTQEYDNKRPVLALQNEALYPQRRSYTSEDEAWKSFLENPLTAATKAMMSINGDEDSAAALGLLYDYYKVPRERRSSTAKPEVEHPEPDHSKRNSIPIVTEQPLISAGENRVQVLKNVPFNIVLPHGNQLGIDKRGHLTAPDTTVTVSIATMPTHSIKTETQPHGFAVGIPPAVYHPEPTERVVVFDRNLNTDQFSSGAQAPNAQRRTPDSTFSETFKEGVQEVFFPSDLSLRMPGMNSEDYVFDSVSGNNFEYTLEASKSLRQKPGDSTMTYLNKGQFYPITLKEVSSSEGIHHPISKVRSVIMVVFAEDKSREDQLRHWKYWHSRQHTAKQRCIDIADYKESFNTISNIEEIAYNAISFTWDINDEAKVFISVNCLSTDFSSQKGVKGLPLNIQVDTYSYNNRSNKPVHRAYCQIKVFCDKGAERKIRDEERKQSKRKVSDVKVPLLPSHKRMDITVFKPFIDLDTQPVLFIPDVHFANLQRGTHVLPIASEELEGEGSVLKRGPYGTEDDFAVPPSTKLARIEEPKRVLLYVRKESEEVFDALMLKTPSLKGLMEAISDKYDVPHDKIGKIFKKCKKGILVNMDDNIVKHYSNEDTFQLQIEEAGGSYKLTLTEI

SEQ ID NO: 889337 - protein, 530 aa, Homo sapiens
RRSGPAAAAAASSPRIGCTVLTRKSSSAARQRRAGAMTQEYDNKRPVLALQNEALYPQRRSYTSEDEAWKSFLENPLTAATKAMMSINGDEDSAAALGLLYDYYKVPRERRSSTAKPEVEHPEPDHSKRNSIPIVTEQPLISAGENRVQVLKNVPFNIVLPHGNQLGIDKRGHLTAPDTTVTVSIATMPTHSIKTETQPMASLWESPQQCIILSPLSGWWFSIGISILTSSALVLKPQMLKGELQTRPSQRPSRKAFRRNNFEYTLEASKSLRQKPGDSTMTYLNKGQFYPITLKEVSSSEGIHHPISKVRSVIMVVFAEDKSREDQLRHWKYWHSRQHTAKQRCIDIADYKESFNTISNIEEIAYNAISFTWDINDEAKVFISVNCLSTDFSSQKGVKGLPLNIQVDTYSYNNRSNKPVHRAYCQIKVFCDKGAERKIRDEERKQSKRKVSDVKVPLLPSHKRMDITVFKPFIDLDTQPVLFIPDVHFANLQRGTHVGNQDPRGGYQEGRHGKRKFFGIIHGETEAKIE

SEQ ID NO: 889338 - protein, 556 aa, Homo sapiens
RRSGPAAAAAASSPRIGCTVLTRKSSSAARQRRAGAMTQEYDNKRPVLALQNEALYPQRRSYTSEDEAWKSFLENPLTAATKAMMSINGDEDSAAALGLLYDYYKVPRERRSSTAKPEVEHPEPDHSKRNSIPIVTEQPLISAGENRVQVLKNVPFNIVLPHGNQLGIDKRGHLTAPDTTVTVSIATMPTHSIKTETQPHGFAVGIPPAVYHPEPTERVVVFDRNLNTDQFSSGAQAPNAQRRTPDSTFSETFKEGVQEVFFPSDLSLRMPGMNSEDYVFDSVSGNNFEYTLEASKSLRQKPGDSTMTYLNKGQFYPITLKEVSSSEGIHHPISKVRSVIMVVFAEDKSREDQLRHWKYWHSRQHTAKQRCIDIADYKESFNTISNIEEIAYNAISFTWDINDEAKVFISVNCLSTDFSSQKGVKGLPLNIQVDTYSYNNRSNKPVHRAYCQIKVFCDKGAERKIRDEERKQSKRKVSDVKVPLLPSHKRMDITVFKPFIDLDTQPVLFIPDVHFANLQRGTHVGNQDPRGGYQEGRHGKRKFFGIIHGETEAKIE

SEQ ID NO: 889339 - protein, 107 aa, Homo sapiens
LLEDSRQSASISCGIMATERLANYTGGIYAEYQDTTYINHVVSVAGWGISDGSKTVFVPQESHRLPVEVAYKRGLFDEEMNEILTDPSDDTKGFFDPNTEENLTYLQ

SEQ ID NO: 889340 - protein, 303 aa, Homo sapiens
MARRGPGWRPLLLLVLLAGAAQGGLYFRRGQTCYRPLRGDGLAPLGRSTYPRPHEYLSPADLPKSWDWRNVDGVNYASITRNQHIPQYCGSCWAHASTSAMADRINIKRKGAWPSTLLSVQNVIDCGNAGSCEGGNDLSVWDYAHQHGIPDETCNNYQAKDQECDKFNQCGTCNEFKECHAIRNYTLWRVGDYGSLSGREKMMAEIYANGPISCGIMATERLANYTGGIYAEYQDTTYINHVVSVAGWGISDGTEYWIVRNSWGEPWGERGWLRIVTSTYKDGKGARYNLAIEEHCTFGDPIV

SEQ ID NO: 889341 - protein, 303 aa, Homo sapiens; identical to SEQ ID NO: 889340

SEQ ID NO: 889342 - protein, 303 aa, Homo sapiens; identical to SEQ ID NO: 889340

SEQ ID NO: 889343 - protein, 288 aa, Homo sapiens
MARRGPGWRPLLLLVLLAGAAQGGLYFRRGQTCYRPLRGDGLAPLGRSTYPRPHEYLSPADLPKSWDWRNVDGVNYASITRNQHIPQYCGSCWAHASTSAMADRINIKRKGAWPSTLLSVQNVIDCGNAGSCEGGNDLSVWDYAHQHGIPDETCNNYQAKDQECDKFNQCGTCNEFKECHAIRNYTLWRVGDYGSLSGREKMMAEIYANGPISCGIMATERLANYTGGIYAEYQDTTYINHVVSVAGWGISDGTEYWIVRNSWGEPWVRCFHFLKVIPRKKRPGTPLA

SEQ ID NO: 889344 - protein, 308 aa, Homo sapiens
MARRGPGWRPLLLLVLLAGAAQGGLYFRRGQTCYRPLRGDGLAPLGRSTYPRPHEYLSPADLPKSWDWRNVDGVNYASITRNQHIPQYCGSCWAHASTSAMADRINIKRKGAWPSTLLSVQNVIDCGNAGSCEGGNDLSVWDYAHQHGIPDETCNNYQAKDQECDKFNQCGTCNEFKECHAIRNYTLWRVGDYGSLSGREKMMAEIYANGPISCGIMATERLANYTGGIYAEYQDTTYINHVVSVAGWGISDGSKTVFSHQESHRLPVEVAYKRGLFDEEMNEILTDPSDDTKGFFDPNTEENLTYLQ

SEQ ID NO: 889345 - protein, 114 aa, Homo sapiens
MKISEPTFFFFFFFSDGTKMVLISCGIMATERLANYTGGIYAEYQDTTYINHVVSVAGWGISDGTEYWIVRNSWGEPWGERGWLRIVTSTYKDGKGARYNLAIEEHCTFGDPIV

SEQ ID NO: 889346 - protein, 145 aa, Homo sapiens
SSSSHQLWNMATERLANYTGGIYPNTRTPHINHVCFRGWVGITDGSKTGPVFILSCGIMATERLANYTGGIYAEYQDTTYINHVVSVAGWGISDGTEYWIVRNSWGEPWGERGWLRIVTSTYKDGKGARYNLAIEEHCTFGDPIV

SEQ ID NO: 889347 - protein, 115 aa, Homo sapiens
EIPPIPENRFLMRKSPPKADGSKISCGIMATERLANYTGGIYAEYQDTTYINHVVSVAGWGISDGTEYWIVRNSWGEPWGERGWLRIVTSTYKDGKGARYNLAIEEHCTFGDPIV

SEQ ID NO: 889348 - protein, 178 aa, Homo sapiens
MARRGPGWRPLLLLVLLAGAAQGGLYFRRGQTCYRPLRGDGLAPLGRSTYPRPHEYLSPADLPKSWDWRNVDGVNYASITRNQHIPQYCGSCWAHASTSAMAGEWPPLTVGQESPSRLPVYRPRQLSPRFQGPVIQGQVSLGWGAKAEERGPLPSAEVTQAGSFWGFWVTGRTRTESQ

SEQ ID NO: 889349 - protein, 142 aa, Homo sapiens
NGERGGGEKRKKKKERGKGGKIRKSETEALPRPLAGKAGVGRVLGRGRGRGRGGIQSGSRRGIWDSERDPERDPGAGAGPWRGAGQGGGRFCCSCCWRARRRAASTSAGDRPATGLCGGTGWLRWGAAHTPGLYVFCKINRF

SEQ ID NO: 889350 - protein, 85 aa, Homo sapiens
IFSVDLTQVVGVRASSDTTYINHVVSVAGWGISDGTEYWIVRNSWGEPWGERGWLRIVTSTYKDGKGARYNLAIEEHCTFGDPIV

SEQ ID NO: 889351 - protein, 303 aa, Homo sapiens; identical to SEQ ID NO: 889340

SEQ ID NO: 889352 - protein, 470 aa, Homo sapiens
MARRGPGWRPLLLLVLLAGAAQGGLYFRRGQTCYRPLRGDGLAPLGRRWAPAGRQPWGDGRPIARARRALCLLGALRRQQALEGQIQPLRFGGRSFSSTSRVSPDVCGVGQAPPGQKARPAPPPRPLGVALTARHGWGSNPVPSFRGCPASFTILRALEPPSVRWAHTWLTSGDCGPTPMPSGVGKGGRALPRASWAHGPREPQHRSGGGGSLLSTYPRPHEYLSPADLPKSWDWRNVDGVNYASITRNQHIPQYCGSCWAHASTSAMADRINIKRKGAWPSTLLSVQNVIDCGNAGSCEGGNDLSVWDYAHQHGIPDETCNNYQAKDQECDKFNQCGTCNEFKECHAIRNYTLWRVGDYGSLSGREKMMAEIYANGPISCGIMATERLANYTGGIYAEYQDTTYINHVVSVAGWGISDGTEYWIVRNSWGEPWGERGWLRIVTSTYKDGKGARYNLAIEEHCTFGDPIV

SEQ ID NO: 889353 - protein, 233 aa, Homo sapiens
QRTPKILSITRNQHIPQYCGSCWAHASTSAMADRINIKRKGAWPSTLLSVQNVIDCGNAGSCEGGNDLSVWDYAHQHGIPDETCNNYQAKDQECDKFNQCGTCNEFKECHAIRNYTLWRVGDYGSLSGREKMMAEIYANGPISCGIMATERLANYTGGIYAEYQDTTYINHVVSVAGWGISDGTEYWIVRNSWGEPWGERGWLRIVTSTYKDGKGARYNLAIEEHCTFGDPIV

SEQ ID NO: 889354 - protein, 102 aa, Homo sapiens
LLEDSRQSASISCGIMATERLANYTGGIYAEYQDTTYINHVVSVAGWGISDGTEYWIVRNSWGEPWGERGWLRIVTSTYKDGKGARYNLAIEEHCTFGDPIV

SEQ ID NO: 889355 - protein, 104 aa, Homo sapiens
MADGSKTGPVFILSCGIMATERLANYTGGIYAEYQDTTYINHVVSVAGWGISDGTEYWIVRNSWGEPWGERGWLRIVTSTYKDGKGARYNLAIEEHCTFGDPIV

SEQ ID NO: 889356 - protein, 142 aa, Homo sapiens
LEDPSSSISQIHTSLPPYGEVAFELALTDSRFGVGQLGNGNTDPDGSKMPISCGIMATERLANYTGGIYAEYQDTTYINHVVSVAGWGISDGTEYWIVRNSWGEPWGERGWLRIVTSTYKDGKGARYNLAIEEHCTFGDPIV

SEQ ID NO: 889357 - protein, 85 aa, Homo sapiens; identical to SEQ ID NO: 889350

SEQ ID NO: 889358 - protein, 516 aa, Homo sapiens
MTLLITGDSIVSAEAVWDHVTMANRELAFKAGDVIKVLDASNKDWWWGQIDDEEGWFPASFVRLWVNQEDEVEEGPSDVQNGHLDPNSDCLCLGRPLQNRDQMRANVINEIMSTERHYIKHLKDICEGYLKQCRKRRDMFSDEQLKVIFGNIEDIYRFQMGFVRDLEKQYNNDDPHLSEIGPCFLEHQDGFWIYSEYCNNHLDACMELSKLMKDSRYQHFFEACRLLQQMIDIAIDGFLLTPVQKICKYPLQLAELLKYTAQDHSDYRYVAAALAVMRNVTQQINERKRRLENIDKIAQWQASVLDWEGEDILDRSSELIYTGEMAWIYQPYGRNQQRVFFLFDHQMVLCKKDLIRRDILYYKGRIDMDKYEVVDIEDGRDDDFNVSMKNAFKLHNKETEEIHLFFAKKLEEKIRWLRAFREERKMVQEDEKIGFEISENQKRQAAMTVRKVPKQKGVNSARSVPPSYPPPQDPLNHGQYLVPDGIAQSQVFEFTEPKRSQSPFWQNFSRLTPFKK

SEQ ID NO: 889359 - protein, 463 aa, Homo sapiens
MQWIRGGSGMLWVNQEDEVEEGPSDVQNGHLDPNSDCLCLGRPLQNRDQMRANVINEIMSTERHYIKHLKDICEGYLKQCRKRRDMFSDEQLKVIFGNIEDIYRFQMGFVRDLEKQYNNDDPHLSEIGPCFLEHQDGFWIYSEYCNNHLDACMELSKLMKDSRYQHFFEACRLLQQMIDIAIDGFLLTPVQKICKYPLQLAELLKYTAQDHSDYRYVAAALAVMRNVTQQINERKRRLENIDKIAQWQASVLDWEGEDILDRSSELIYTGEMAWIYQPYGRNQQRVFFLFDHQMVLCKKDLIRRDILYYKGRIDMDKYEVVDIEDGRDDDFNVSMKNAFKLHNKETEEIHLFFAKKLEEKIRWLRAFREERKMVQEDEKIGFEISENQKRQAAMTVRKVPKQKGVNSARSVPPSYPPPQDPLNHGQYLVPDGIAQSQVFEFTEPKRSQSPFWQNFSRLTPFKK

SEQ ID NO: 889360 - protein, 523 aa, Homo sapiens
MQWIRGGSGMLITGDSIVSAEAVWDHVTMANRELAFKAGDVIKVLDASNKDWWWGQIDDEEGWFPASFVRLWVNQEDEVEEGPSDVQNGHLDPNSDCLCLGRPLQNRDQMRANVINEIMSTERHYIKHLKDICEGYLKQCRKRRDMFSDEQLKVIFGNIEDIYRFQMGFVRDLEKQYNNDDPHLSEIGPCFLEHQDGFWIYSEYCNNHLDACMELSKLMKDSRYQHFFEACRLLQQMIDIAIDGFLLTPVQKICKYPLQLAELLKYTAQDHSDYRYVAAALAVMRNVTQQINERKRRLENIDKIAQWQASVLDWEGEDILDRSSELIYTGEMAWIYQPYGRNQQRVFFLFDHQMVLCKKDLIRRDILYYKGRIDMDKYEVVDIEDGRDDDFNVSMKNAFKLHNKETEEIHLFFAKKLEEKIRWLRAFREERKMVQEDEKIGFEISENQKRQAAMTVRKVPKQKGVNSARSVPPSYPPPQDPLNHGQYLVPDGIAQSQVFEFTEPKRSQSPFWQNFSRLTPFKK

SEQ ID NO: 889361 - protein, 365 aa, Homo sapiens
MTLLITGDSIVSAEAVWDHVTMANRELAFKAGDVIKVLDASNKDWWWGQIDDEEGWFPASFVRLWVNQEDEVEEGPSDVQNGHLDPNSDCLCLGRPLQNRDQMRANVINEIMSTERHYIKHLKDICEGYLKQCRKRRDMFSDEQLKVIFGNIEDIYRFQMGFVRDLEKQYNNDDPHLSEIGPCFLEHQDGFWIYSEYCNNHLDACMELSKLMKDSRYQHFFEACRLLQQMIDIAIDGFLLTPVQKICKYPLQLAELLKYTAQDHSDYRYVAAALAVMRNVTQQINERKRRLENIDKIAQWQASVLDWEGEDILDRSSELIYTGEMAWIYQPYGRNQQRVFFLFDHQMVLCKKALKFLKTRRGRLQ

SEQ ID NO: 889362 - protein, 516 aa, Homo sapiens; identical to SEQ ID NO: 889358

SEQ ID NO: 889363 - protein, 83 aa, Homo sapiens
DSSDRIFAKSHPYAVEAKVPKQKGVNSARSVPPSYPPPQDPLNHGQYLVPDGIAQSQVFEFTEPKRSQSPFWQNFSRLTPFKK

SEQ ID NO: 889364 - protein, 516 aa, Homo sapiens; identical to SEQ ID NO: 889358

SEQ ID NO: 889365 - protein, 282 aa, Homo sapiens
MTLLITGDSIVSAEAVWDHVTMANRELAFKAGDVIKVLDASNKDWWWGQIDDEEGWFPASFVRLWVNQEDEVEEGPSDVQNGHLDPNSDCLCLGRPLQNRDQMRANVINEIMSTERHYIKHLKDICEGYLKQCRKRRDMFSDEQLKVIFGNIEDIYRFQMGFVRDLEKQYNNDDPHLSEIGPCFLEHQDGFWIYSEYCNNHLDACMELSKLMKDSRYQHFFEACRLLQQMIDIAIDGFLLTPVQKICKYPLQLAELLKYTAQDHSDYRVVACCFGLQEKMGS

SEQ ID NO: 889366 - protein, 516 aa, Homo sapiens; identical to SEQ ID NO: 889358

SEQ ID NO: 889367 - protein, 516 aa, Homo sapiens; identical to SEQ ID NO: 889358

SEQ ID NO: 889368 - protein, 516 aa, Homo sapiens; identical to SEQ ID NO: 889358

SEQ ID NO: 889369 - protein, 179 aa, Homo sapiens
  misc_feature (1)..(1): Xaa can be any naturally occurring amino acid
XALGSRSYLAEVGVIIVILFLQVSHKGRIDMDKYEVVDIEDGRDDDFNVSMKNAFKLHNKETEEIHLFFAKKLEEKIRWLRAFREERKMVQEDEKIGFEISENQKRQAAMTVRKVPKQKGVNSARSVPPSYPPPQDPLNHGQYLVPDGIAQSQVFEFTEPKRSQSPFWQNFSRLTPFKK

SEQ ID NO: 889370 - protein, 221 aa, Homo sapiens
MTLLITGDSIVSAEAVWDHVTMANRELAFKAGDVIKVLDASNKDWWWGQIDDEEGWFPASFVRLWVNQEDEVEEGPSDVQNGHLDPNSDCLCLGRPLQNRDQMRANVINEIMSTERHYIKHLKDICEGYLKQCRKRRDMFSDEQLKVIFGNIEDIYRFQMGFVRDLEKQYNNDDPHLSEIGPCFLEHQDGFWIYSEYCNNHLDACMELSKLMNSAVKSKPL

SEQ ID NO: 889371 - protein, 110 aa, Homo sapiens
MGEHITKSQSQRRCHCYGPVRVPASWCLGGRHQEDFGGVVSGQLSGPLCPFLASLAACTSRLVGRTVGRACGSPPRPPRGLGPAAASSTAAGWESPRDAASGPAPGLCPH

SEQ ID NO: 889372 - protein, 218 aa, Homo sapiens
MQPPGPPPAYAPTNGDFTFVSSADAEDLSGSIASPDVKLNLGGDFIKESTATTFLRQRGYGWLLEVEDDDPEDNKPLLEELDIDLKDIYYKIRCVLMPMPSLGFNRQVVRDNPDFWGPLAVVLFFSMISLYGQFRVAYGQVLGVIGYSLLPLIVIAPVLLVVGSFEVVSTLIKLFGVFWAAYSAASLLVGEEFKTKKPLLIYPIFLLYIYFLSLYTGV

SEQ ID NO: 889373 - protein, 226 aa, Homo sapiens
MQPPGPPPAYAPTNGDFTFVSSADAEDLSGSIASPDVKLNLGGDFIKESTATTFLRQRGYGWLLEVEDDDPEDNKPLLEELDIDLKDIYYVRDNPDFWGPLAVVLFFSMISLYGQFRVVSWIITIWIFGSLTIFLLARVLGGEVAYGQVLGVIGYSLLPLIVIAPVLLVVGSFEVVSTLIKLFGVFWAAYSAASLLVGEEFKTKKPLLIYPIFLLYIYFLSLYTGV

SEQ ID NO: 889374 - protein, 110 aa, Homo sapiens; identical to SEQ ID NO: 889371

SEQ ID NO: 889375 - protein, 110 aa, Homo sapiens; identical to SEQ ID NO: 889371

SEQ ID NO: 889376 - protein, 110 aa, Homo sapiens; identical to SEQ ID NO: 889371

SEQ ID NO: 889377 - protein, 244 aa, Homo sapiens
MQPPGPPPAYAPTNGDFTFVSSADAEDLSGSIASPDVKLNLGGDFIKESTATTFLRQRGYGWLLEVEDDDPEDNKPLLEELDIDLKDIYYKIRCVLMPMPSLGFNRQVVRDNPDFWGPLAVVLFFSMISLYGQFRVVSWIITIWIFGSLTIFLLARVLGGEVAYGQVLGVIGYSLLPLIVIAPVLLVVGSFEVVSTLIKLFGVFWAAYSAASLLVGEEFKTKKPLLIYPIFLLYIYFLSLYTGV

SEQ ID NO: 889378 - protein, 244 aa, Homo sapiens; identical to SEQ ID NO: 889377

SEQ ID NO: 889379 - protein, 244 aa, Homo sapiens; identical to SEQ ID NO: 889377

SEQ ID NO: 889380 - protein, 214 aa, Homo sapiens
MQPPGPPPAYAPTNGDFTFVSSADAEDLSGSIASPDVKLNLGGDFIKESTATTFLRQRGYGWLLEVEDDDPEDNKPLLEELDIDLKDIYYKIRCVLMPMPSLGFNRQVVRDNPDFWGPLAVVLFFSMISLYGQFRVVSWIITIWIFGSLTIFLLARVLGGEVAYGQVLGVIGYSLLPLIVIAPVLLVVGSFEVVSTLIKVRSTRGTGLLEVRII

SEQ ID NO: 889381 - protein, 422 aa, Homo sapiens
MDHPSREKDERQRTTKPMAQRSAHCSRPSGSSSSSGVLMVGPNFRVGKKIGCGNFGELRLGKNLYTNEYVAIKLEPIKSRAPQLHLEYRFYKQLGSAGEGLPQVYYFGPCGKYNAMVLELLGPSLEDLFDLCDRTFTLKTVLMIAIQLLSRMEYVHSKNLIYRDVKPENFLIGRQGNKKEHVIHIIDFGLAKEYIDPETKKHIPYREHKSLTGTARYMSINTHLGKEQSRRDDLEALGHMFMYFLRGSLPWQGLKADTLKERYQKIGDTKRNTPIEALCENFPEEMATYLRYVRRLDFFEKPDYEYLRTLFTDLFEKKGYTFDYAYDWVGRPIPTPVGSVHVDSGASAITRESHTHRDRPSQQQPLRNQVVSSTNGELNVDDPTGAHSNAPITAHAEVEVVEEAKCCCFFKRKRKKTAQRHK

SEQ ID NO: 889382 - protein, 393 aa, Homo sapiens
MDHPSREKDERQRTTKPMAQRSAHCSRPSGSSSSSGVLMVGPNFRVGKKIGCGNFGELRLGKNLYTNEYVAIKLEPIKSRAPQLHLEYRFYKQLGSAGEGLPQVYYFGPCGKYNAMVLELLGPSLEDLFDLCDRTFTLKTVLMIAIQLLSRMEYVHSKNLIYRDVKPENFLIGRQGNKKEHVIHIIDFGLAKEYIDPETKKHIPYREHKSLTGTARYMSINTHLGKEQSRRDDLEALGHMFMYFLRGSLPWQGLKADTLKERYQKIGDTKRNTPIEALCENFPEEMATYLRYVRRLDFFEKPDYEYLRTLFTDLFEKKGYTFDYAYDWVGRPIPTPVGSVHVDSGASAITRESHTHRDRPSQQQPLRNQSLRTVTAEHYDVNNSAIWHRGRGT

SEQ ID NO: 889383 - protein, 372 aa, Homo sapiens
MDHPSREKDERQRTTKPMAQRSAHCSRPSGSSSSSGVLMVGPNFRVGKKIGCGNFGELRLGKNLYTNEYVAIKLEPIKSRAPQLHLEYRFYKQLGSAGEGLPQVYYFGPCGKYNAMVLELLGPSLEDLFDLCDRTFTLKTVLMIAIQLLSRMEYVHSKNLIYRDVKPENFLIGRQGNKKEHVIHIIDFGLAKEYIDPETKKHIPYREHKSLTGTARYMSINTHLGKEQSRRDDLEALGHMFMYFLRGSLPWQGLKADTLKERYQKIGDTKRNTPIEALCENFPEEMATYLRYVRRLDFFEKPDYEYLRTLFTDLFEKKGYTFDYAYDWVGRPIPTPVGSVHVDSGASAITRESHTHRDRPSQQQPLRNQSTV

SEQ ID NO: 889384 - protein, 422 aa, Homo sapiens
MDHPSREKDERQRTTKPMAQRSAHCSRPSGSSSSSGVLMVGPNFRVGKKIGCGNFGELRLGKNLYTNEYVAIKLEPIKSRAPQLHLEYRFYKQLGSAGEGLPQVYYFGPCGKYNAMVLELLGPSLEDLFDLCDRTFTLKTVLMIAIQLLSRMEYVHSKNLIYRDVKPENFLIGRQGNKKEHVIHIIDFGLAKEYIDPETKKHIPYREHKSLTGTARYMSINTHLGKEQSRRDDLEALGHMFMYFLRGSLPWQGLKADTLKERYQKIGDTKRNTPIEALCENFPEEMATYLRYVRRLDFFEKPDYEYLRTLFTDLFEKKGYTFDYAYDWVGRPIPTPVGSVHVDSGASAITRESHTHRDRPSQQQPLRNQPRSLTSRVFCPAVRPLFPLPSTHINRNNVLEMKPGGRSSYTCKRSLIGSTLTR

SEQ ID NO: 889385 - protein, 107 aa, Homo sapiens
MDHPSREKDERQRTTKPMAQRSAHCSRPSGSSSSSGVLMVGPNFRVGKKIGCGNFGELRLGKNLYTNEYVAIKLEPIKSRAPQLHLEYRFYKQLGSAGKSSLFSPLT

SEQ ID NO: 889386 - protein, 210 aa, Homo sapiens
MDHPSREKDERQRTTKPMAQRSAHCSRPSGSSSSSGVLMVGPNFRVGKKIGCGNFGELRLGKNLYTNEYVAIKLEPIKSRAPQLHLEYRFYKQLGSAGEGLPQVYYFGPCGKYNAIKPSELKALSAEGDQEAGGKAKKVGGKWQTWAGEEPSPYPRCAWQYGFLFLCACAAFIPAGLGVQVPSSLPPVKLHCRTQAVSNLQSTVPVCWRS

SEQ ID NO: 889387 - protein, 473 aa, Homo sapiens
MDHPSREKDERQRTTKPMAQRSAHCSRPSGSSSSSGVLMVGPNFRVGKKIGCGNFGELRLGKCSVSYVAELLSNSWPEMILLPWPPAKVLAVIGISHCDWPNILPMDICHYGKNLYTNEYVAIKLEPIKSRAPQLHLEYRFYKQLGSAGEGLPQVYYFGPCGKYNAMVLELLGPSLEDLFDLCDRTFTLKTVLMIAIQLLSRMEYVHSKNLIYRDVKPENFLIGRQGNKKEHVIHIIDFGLAKEYIDPETKKHIPYREHKSLTGTARYMSINTHLGKEQSRRDDLEALGHMFMYFLRGSLPWQGLKADTLKERYQKIGDTKRNTPIEALCENFPEEMATYLRYVRRLDFFEKPDYEYLRTLFTDLFEKKGYTFDYAYDWVGRPIPTPVGSVHVDSGASAITRESHTHRDRPSQQQPLRNQVVSSTNGELNVDDPTGAHSNAPITAHAEVEVVEEAKCCCFFKRKRKKTAQRHK

SEQ ID NO: 889388 - protein, 381 aa, Homo sapiens
MDHPSREKDERQRTTKPMAQRSAHCSRPSGSSSSSGVLMVGPNFRVGKKIGCGNFGELRLGKNLYTNEYVAIKLEPIKSRAPQLHLEYRFYKQLGSAGEGLPQVYYFGPCGKYNAMVLELLGPSLEDLFDLCDRTFTLKTVLMIAIQLLSRMEYVHSKNLIYRDVKPENFLIGRQGNKKEHVIHIIDFGLAKEYIDPETKKHIPYREHKSLTGTARYMSINTHLGKEQSRRDDLEALGHMFMYFLRGSLPWQGLKADTLKERYQKIGDTKRNTPIEALCENFPEEMATYLRYVRRLDFFEKPDYEYLRTLFTDLFEKKGYTFDYAYDWVGRPIPTPVGSVHVDSGASAITRESHTHRDRPSQQQPLRNQRWTVPLQILQFD

SEQ ID NO: 889389 - protein, 299 aa, Homo sapiens
MDHPSREKDERQRTTKPMAQRSAHCSRPSGSSSSSGVLMVGPNFRVGKKIGCGNFGELRLGKNLYTNEYVAIKLEPIKSRAPQLHLEYRFYKQLGSAGEGLPQVYYFGPCGKYNAMVLELLGPSLEDLFDLCDRTFTLKTVLMIAIQLLSRMEYVHSKNLIYRDVKPENFLIGRQGNKKEHVIHIIDFGLAKEYIDPETKKHIPYREHKSLTGTARYMSINTHLGKEQSRRDDLEALGHMFMYFLRGSLPWQGLKADTLKERYQKIGDTKRNTPIEALCENFPVGDGNLPSIFRIPWIQ

SEQ ID NO: 889390 - protein, 546 aa, Homo sapiens [sequence omitted]

SEQ ID NO: 889391 - protein, 416 aa, Homo sapiens
ERTSIMCARSGQMQGGAIHERRQCLPHLGGSHTCDLSFRKEITLLMQTLNTLSTPEEKLAALCKKYAELLEEHRNSQKQMKLLQKKQSQLVQEKDHLRGEHSKAVLARSKLESLCRELQRHNRSLKEEGVQRAREEEEKRKEVTSHFQVTLNDIQLQMEQHNERNSKLRQENMELAERLKKLIEQYELREEHIDKVFKHKDLQQQLVDAKLQQAQEMLKEAEERHQREKDFLLKEAVESQRMCELMKQQETHLKQQLALYTEKFEEFQNTLSKSSEVFTTFKQEMEKMTKKIKKLEKETTMYRSRWESSNKALLEMAEEKTVRDKELEGLQVKIQRLEKLCRALQTERNDLNKRVQDLSAGGQGSLTDSGPERRPEGPGAQAPSSPRVTEAPCYPGAPSTEASGQTGPQEPTSARA

SEQ ID NO: 889392 - protein, 129 aa, Homo sapiens [sequence omitted]

SEQ ID NO: 889393 - protein, 546 aa, Homo sapiens [sequence omitted]

SEQ ID NO: 889394 - protein, 546 aa, Homo sapiens [sequence omitted]

SEQ ID NO: 889395 - protein, 520 aa, Homo sapiens
MKNQDKKNGAAKQSNPKSSPGQPEAGPEGAQERPSQAAPAVEAEGPGSSQAPRKPEGAQARTAQSGALRDVSEELSRQLEDILSTYCVDNNQGGPGEDGAQGEPAEPEDAEKSRTYVARNGEPEPTPVVNGEKEPSKGDPNTEEIRQSDEVGDGDHRRPQEKKKAKGLGKEITLLMQTLNTLSTPEEKLAALCKKYAELLEEHRNSQKQMKLLQKKQSQLVQEKDHLRGEHSKAVLARSKLESLCRELQRHNRSLKEEGVQRAREEEEKRKEVTSHFQVTLNDIQLQMEQHNERNSKLRQENMELAERLKKLIEQYELREEHIDKVFKHKDLQQQLVDAKLQQAQEMLKEAEERHQREKDFLLKEAVESQRMCELMKQQETHLKQQLALYTEKFEEFQNTLSKSSEVFTTFKQEMEKVTVVQARHGCWGISCFIQNCWACLQEAPIWGVSRAGLLGRFTAFPLLRQYQWYVYTPGCPREWGSLFCLFGFFGGFLLLLLLLLLFEMETHYALGGYAEASIS

SEQ ID NO: 889396 - protein, 71 aa, Homo sapiens
HRNSQKQMKLLQKKQSQLVQEKDHLRGEHSKAVLARSKLESLCRELQRHNRSLKVGLGPLEQVTLVSLTST

SEQ ID NO: 889397 - protein, 121 aa, Homo sapiens
MKNQDKKNGAAKQSNPKSSPGQPEAGPEGAQERPSQAAPAVEAEGPGSSQAPRKPEGAQARTAQSGALRDVSEELSRQLEDILSCCPSLSALHSTEVVTPGTARHLLLLPFLGEGSCLLSL

SEQ ID NO: 889398 - protein, 390 aa, Homo sapiens
PRSSFHQDSKENGKEITLLMQTLNTLSTPEEKLAALCKKYAELLEEHRNSQKQMKLLQKKQSQLVQEKDHLRGEHSKAVLARSKLESLCRELQRHNRSLKEEGVQRAREEEEKRKEVTSHFQVTLNDIQLQMEQHNERNSKLRQENMELAERLKKLIEQYELREEHIDKVFKHKDLQQQLVDAKLQQAQEMLKEAEERHQREKDFLLKEAVESQRMCELMKQQETHLKQQLALYTEKFEEFQNTLSKSSEVFTTFKQEMEKMTKKIKKLEKETTMYRSRWESSNKALLEMAEEKTVRDKELEGLQVKIQRLEKLCRALQTERNDLNKRVQDLSAGGQGSLTDSGPERRPEGPGAQAPSSPRVTEAPCYPGAPSTEASGQTGPQEPTSARA

SEQ ID NO: 889399 - protein, 367 aa, Homo sapiens
MKNQDKKNGAAKQSNPKSSPGQPEAGPEGAQERPSQAAPAVEAEGPGSSQAPRKPEGAQARTAQSGALRDVSEELSRQLEDILSTYCVDNNQGGPGEDGAQGEPAEPEDAEKSRTYVARNGEPEPTPVVNGEKEPSKGDPNTEEIRQSDEVGDGDHRRPQEKKKAKGLGKEITLLMQTLNTLSTPEEKLAALCKKYAELLEEHRNSQKQMKLLQKKQSQLVQEKDHLRGEHSKAVLARSKLESLCRELQRHNRSLKEEGVQRAREEEEKRKEVTSHFQVTLNDIQLQMEQHNERNSKLRQENMELAERLKKLIEQYELREEHIDKVFKHKDLQQQLVDAKLQQAQEMLKEAEERHQREKDFANDASQ

SEQ ID NO: 889400 - protein, 168 aa, Homo sapiens
HTKKPQRRRDSGRSSWLNKRNWSDKVKELQAANESKQQELEAVRKKLEKETTMYRSRWESSNKALLEMAEEKTVRDKELEGLQVKIQRLEKLCRALQTERNDLNKRVQDLSAGGQGSLTDSGPERRPEGPGAQAPSSPRVTEAPCYPGAPSTEASGQTGPQEPTSARA

SEQ ID NO: 889401 - protein, 546 aa, Homo sapiens [sequence omitted]

SEQ ID NO: 889402 - protein, 361 aa, Homo sapiens
MKNQDKKNGAAKQSNPKSSPGQPEAGPEGAQERPSQAAPAVEAEGPGSSQAPRKPEGAQARTAQSGALRDVSEELSRQLEDILSTYCVDNNQGGPGEDGAQGEPAEPEDAEKSRTYVARNGEPEPTPVVNGEKEPSKGDPNTEEIRQSDEVGDGDHRRPQEKKKAKGLGKEITLLMQTLNTLSTPEEKLAALCKKYAELLEEHRNSQKQMKLLQKKQSQLVQEKDHLRGEHSKAVLARSKLESLCRELQRHNRSLKEEGVQRAREEEEKRKEVTSHFQVTLNDIQLLPQPFRLAQHRGGHPRDSQAPAPLALPGGRELPSVPVTAFLMAQPGHSDLFEAALAAFLSPLGIHNSQGLDFDVF

SEQ ID NO: 889403 - protein, 152 aa, Homo sapiens [sequence omitted]

SEQ ID NO: 889404 - protein, 183 aa, Homo sapiens
MSPEAMGYPEVERRELLPAAAPRERGSQGCGCGGAPARAGEGNSCLLFLGFFGLSLALHLLTLCCYLELRSELRRERGAESRLGGSGTPGTSGTLSSLGGLDPDSPITSHLGQPSPKQQPLEPGEAALHSDSQDGHQMALLNFFFPDEKPYSEEESRRVRRNKRSKSNEGADGKSTQLILYHF

SEQ ID NO: 889405 - protein, 326 aa, Homo sapiens
MSPEAMGYPEVERRELLPAAAPRERGSQGCGCGGAPARAGEGNSCLLFLGFFGLSLALHSDSQDGHQMALLNFFFPDEKPYSEEESRRVRRNKRSKSNEGADGPVKNKKKGKKAGPPGPNGPPGPPGPPGPQGPPGIPGIPGIPGTTVMGPPGPPGPPGPQGPPGLQGPSGAADKAGTRENQPAVVHLQGQGSAIQVKNDLSGGVLNDWSRITMNPKVFKLHPRSGELEVLVDGTYFIYSQVEVYYINFTDFASYEVVVDEKPFLQCTRSIETGKTNYNTCYTAGVCLLKARQKIAVKMVHADISINMSKHTTFFGAIRLGEAPAS

SEQ ID NO: 889406 - protein, 396 aa, Homo sapiens
MSPEAMGYPEVERRELLPAAAPRERGSQGCGCGGAPARAGEGNSCLLFLGFFGLSLALHLLTLCCYLELRSELRRERGAESRLGGSGTPGTSGTLSSLGGLDPDSPITSHLGQPSPKQQPLEPGEAALHSDSQDGHQMALLNFFFPDEKPYSEEESRRVRRNKRSKSNEGADGPVKNKKKGKKAGPPGPNGPPGPPGPPGPQGPPGIPGIPGIPGTTVMGPPGPPGPPGPQGPPGLQGPSGAADKAGTRENQPAVVHLQGQGSAIQVKNDLSGGVLNDWSRITMNPKVFKLHPRSGELEVLVDGTYFIYSQVEVYYINFTDFASYEVVVDEKPFLQCTRSIETGKTNYNTCYTAGVCLLKARQKIAVKMVHADISINMSKHTTFFGAIRLGEAPAS

SEQ ID NO: 889407 - protein, 147 aa, Homo sapiens
MSPEAMGYPEVERRELLPAAAPRERGSQGCGCGGAPARAGEGNSCLLFLGFFGLSLALHLLTLCCYLELRSELRRERGAESRLGGSGTPGTSGTLSSLGGLDPDSPITSHLGQPSPKQQPLEPGEAALHSDSQDGHQACFPQVLLSL

SEQ ID NO: 889408 - protein, 233 aa, Homo sapiens
PRRTLPWAGLSRGTRWNRGERGAPGAANMDDYSLDEFRRRWQEELAQAQAPKKRRRPEAAERRARRPEVGSGRGEQASGDPALAQGLLEGAGRPPAARATRAEGQDVASRSRSPLAREGAGGGEQLVDQLIRDLNEMNDVPFFDIQLPYELAINIFQYLDRKELGRCAQVSKTWKVIAEDEVLWYRLCQQEGHLPDSSISDYSCWKLIFQECRAKEHMLQTNWKVGSGQYHYL

SEQ ID NO: 889409 - protein, 560 aa, Homo sapiens
PRRTLPWAGLSRGTRWNRGERGAPGAANMDDYSLDEFRRRWQEELAQAQAPKKRRRPEAAERRARRPENEMNDVPFFDIQLPYELAINIFQYLDRKELGRCAQVSKTWKVIAEDEVLWYRLCQQEGHLPDSSISDYSCWKLIFQECRAKEHMLQTNWKNRKGAVSELEHVPDTVLCDVHSHDGVVIAGYTSGDVRVWDTRTWDYVAPFLESEDEEDEPGMQPNVSFVRINSSLAVAAYEDGFLNIWDLRTGKYPVHRFEHDARIQALALSQDDATVATASAFDVVMLSPNEEGYWQIAAEFEVPKLVQYLEIVPETRRYPVAVAAAGDLMYLLKAEDSARTLLYAHGPPVTCLDVSANQVAFGVQGLGWVYEGSKILVYSLEAGRRLLKLGNVLRDFTCVNLSDSPPNLMVSGNMDGRVRIHDLRSGNIALSLSAHQLRVSAVQMDDWKIVSGGEEGLVSVWDYRMNQKLWEVYSGHPVQHISFSSHSLITANVPYQTVMRNADLDSFTTHRRHRGLIRAYEFAVDQLAFQSPLPVCRSSCDAMATHYYDLALAFPYNHV

SEQ ID NO: 889410 - protein, 560 aa, Homo sapiens; identical to SEQ ID NO: 889409

SEQ ID NO: 889411 - protein, 560 aa, Homo sapiens; identical to SEQ ID NO: 889409

SEQ ID NO: 889412 - protein, 560 aa, Homo sapiens; identical to SEQ ID NO: 889409

SEQ ID NO: 889413 - protein, 226 aa, Homo sapiens [sequence omitted]

SEQ ID NO: 889414 - protein, 224 aa, Homo sapiens
TDTNRAGTESRHIVHLYGYGRQFLFYNNFLFIPSFIFQLSYSSLRWWATRAYPNSSVCKAGTTLDRMPSHHRAHSPPTHTQTATRHQQTSPAHLWGVGGNQSAQKALRPGGRLDGAQTVAPAGNQFFSQCYNKMTLNKTMLFKDPLCVKWCMRAFSGKKRGYLASDSPRDYSPPENFISATRVCFVTQAMCHPGAAVAQAIIYVSEILQGRHHLLLPSTTPCAG

SEQ ID NO: 889415 - protein, 560 aa, Homo sapiens; identical to SEQ ID NO: 889409

SEQ ID NO: 889416 - protein, 626 aa, Homo sapiens
PRRTLPWAGLSRGTRWNRGERGAPGAANMDDYSLDEFRRRWQEELAQAQAPKKRRRPEAAERRARRPEVGSGRGEQASGDPALAQGLLEGAGRPPAARATRAEGQDVASRSRSPLAREGAGGGEQLVDQLIRDLNEMNDVPFFDIQLPYELAINIFQYLDRKELGRCAQVSKTWKVIAEDEVLWYRLCQQEGHLPDSSISDYSCWKLIFQECRAKEHMLQTNWKNRKGAVSELEHVPDTVLCDVHSHDGVVIAGYTSGDVRVWDTRTWDYVAPFLESEDEEDEPGMQPNVSFVRINSSLAVAAYEDGFLNIWDLRTGKYPVHRFEHDARIQALALSQDDATVATASAFDVVMLSPNEEGYWQIAAEFEVPKLVQYLEIVPETRRYPVAVAAAGDLMYLLKAEDSARTLLYAHGPPVTCLDVSANQVAFGVQGLGWVYEGSKILVYSLEAGRRLLKLGNVLRDFTCVNLSDSPPNLMVSGNMDGRVRIHDLRSGNIALSLSAHQLRVSAVQMDDWKIVSGGEEGLVSVWDYRMNQKLWEVYSGHPVQHISFSSHSLITANVPYQTVMRNADLDSFTTHRRHRGLIRAYEFAVDQLAFQSPLPVCRSSCDAMATHYYDLALAFPYNHV

SEQ ID NO: 889417 - protein, 434 aa, Homo sapiens
MRNKKILKEDELLSETQQAAFHQIAMEPFEINVPKPKRRNGVNFSLAVVVIYLILLTAGAGLLVVQVLNLQARLRVLEMYFLNDTLAAEDSPSFSLLQSAHPGEHLAQGASRLQVLQAQLTWVRVSHEHLLQRVDNFTQNPGMFRIKGEQGAPGLQGHKGAMGMPGAPGPPGPPAEKGAKGAMGRDGATGPSGPQGPPGVKGEAGLQGPQGAPGKQGATGTPGPQGEKGSKGDGGLIGPKGETGTKGEKGDLGLPGSKGDRGMKGDAGVMGPPGAQGSKGDFGRPGPPGLAGFPGAKGDQGQPGLQGVPGPPGAVGHPGAKGEPGSAGSPGRAGLPGSPGSPGATGLKGSKGDTGLQGQQGRKGESGVPGPAGVKGEQGSPGLAGPKGAPGQAGQKGDQGVKGSSGEQGVKGEKGERGENSVSVRIVHWADLAG

SEQ ID NO: 889418 - protein, 520 aa, Homo sapiens
MRNKKILKEDELLSETQQAAFHQIAMEPFEINVPKPKRRNGVNFSLAVVVIYLILLTAGAGLLVVQVLNLQARLRVLEMYFLNDTLAAEDSPSFSLLQSAHPGEHLAQGASRLQVLQAQLTWVRVSHEHLLQRVDNFTQNPGMFRIKGEQGAPGLQGHKGAMGMPGAPGPPGPPAEKGAKGAMGRDGATGPSGPQGPPGVKGEAGLQGPQGAPGKQGATGTPGPQGEKGSKGDGGLIGPKGETGTKGEKGDLGLPGSKGDRGMKGDAGVMGPPGAQGSKGDFGRPGPPGLAGFPGAKGDQGQPGLQGVPGPPGAVGHPGAKGEPGSAGSPGRAGLPGSPGSPGATGLKGSKGDTGLQGQQGRKGESGVPGPAGVKGEQGSPGLAGPKGAPGQAGQKGDQGVKGSSGEQGVKGEKGERGENSVSVRIVGSSNRGRAEVYYSGTWGTICDDEWQNSDAIVFCRMLGYSKGRALYKVGAGTGQIWLDNVQCRGTESTLWSCTKNSWGHHDCSHEEDAGVECSV

SEQ ID NO: 889419 - protein, 382 aa, Homo sapiens
MRNKKILKEDELLSETQQAAFHQIAMEPFEINVPKPKRRNGVNFSLAVVVIYLILLTAGAGLLVVQVLNLQARLRVLEMYFLNDTLAAEDSPSFSLLQSAHPGEHLAQGASRLQVLQAQLTWVRVSHEHLLQRVDNFTQNPGMFRIKGEQGAPGLQGHKGAMGMPGAPGPPGPPAEKGAKGAMGRDGATGPSGPQGPPGVKGEAGLQGPQGAPGKQGATGTPGPQGEKGSKGDGGLIGPKGETGTKGEKGDLGLPGSKGDRGMKGDAGVMGPPGAQGSKGDFGRPGPPGLAGFPGAKGDQGQPGLQGVPGPPGAVGHPGAKGEPGSAGSPGRAGLPGSPGSPGATGLKGSKGDTGLQGQQGRKGESGVPGPNAVVPGQDSSL

SEQ ID NO: 889420 - protein, 1164 aa, Homo sapiens
MAQQANVGELLAMLDSPMLGVRDDVTAVFKENLNSDRGPMLVNTLVDYYLETSSQPALHILTTLQEPHDKHLLDRINEYVGKAATRLSILSLLGHVIRLQPSWKHKLSQAPLLPSLLKCLKMDTDVVVLTTGVLVLITMLPMIPQSGKQHLLDFFDIFGRLSSWCLKKPGHVAEVYLVHLHASVYALFHRLYGMYPCNFVSFLRSHYSMKENLETFEEVVKPMMEHVRIHPELVTGSKDHELDPRRWKRLETHDVVIECAKISLDPTEASYEDGYSVSHQISARFPHRSADVTTSPYADTQNSYGCATSTPYSTSRLMLLNMPGQLPQTLSSPSTRLITEPPQATLWSPSMVCGMTTPPTSPGNVPPDLSHPYSKVFGTTAGGKGTPLGTPATSPPPAPLCHSDDYVHISLPQATVTPPRKEERMDSARPCLHRQHHLLNDRGSEEPPGSKGSVTLSDLPGFLGDLASEEDSIEKDKEEAAISRELSEITTAEAEPVVPRGGFDSPFYRDSLPGSQRKTHSAASSSQGASVNPEPLHSSLDKLGPDTPKQAFTPIDLPCGSADESPAGDRECQTSLETSIFTPSPCKIPPPTRVGFGSGQPPPYDHLFEVALPKTAHHFVIRKTEELLKKAKGNTEEDGVPSTSPMEVLDRLIQQGADAHSKELNKLPLPSKSVDWTHFGGSPPSDEIRTLRDQLLLLHNQLLYERFKRQQHALRNRRLLRKVIKAAALEEHNAAMKDQLKLQEKDIQMWKVSLQKEQARYNQLQEQRDTMVTKLHSQIRQLQHDREEFYNQSQELQTKLEDCRNMIAELRIELKKANNKVCHTELLLSQVSQKLSNSESVQQQMEFLNRQLLVLGEVNELYLEQLQNKHSDTTKEVEMMKAAYRKELEKNRSHVLQQTQRLDTSQKRILELESHLAKKDHLLLEQKKYLEDVKLQARGQLQAAESRYEAQKRITQVFELEILDLYGRLEKDGLLKKLEEEKAEAAEAAEERLDCCNDGCSDSMVGHNEEASGHNGETKTPRPSSARGSSGSRGGGGSSSSSSELSTPEKPPHQRAGPFSSRWETTMGEASASIPTTVGSLPSSKSFLGMKARELFRNKSESQCDEDGMTSSLSESLKTELGKDLGVEAKIPLNLDGPHPSPPTPDSVGQLHIMDYNETHHEHS

SEQ ID NO: 889421 - protein, 1164 aa, Homo sapiens; identical to SEQ ID NO: 889420

SEQ ID NO: 889422 - protein, 740 aa, Homo sapiens [sequence omitted]

SEQ ID NO: 889423 - protein, 1064 aa, Homo sapiens
GWKHYVYSSGTSLPSGLKGLKMDTDVVVLTTGVLVLITMLPMIPQSGKQHLLDFFDIFGRLSSWCLKKPGHVAEVYLVHLHASVYALFHRLYGMYPCNFVSFLRSHYSMKENLETFEEVVKPMMEHVRIHPELVTGSKDHELDPRRWKRLETHDVVIECAKISLDPTEASYEDGYSVSHQISARFPHRSADVTTSPYADTQNSYGCATSTPYSTSRLMLLNMPGQLPQTLSSPSTRLITEPPQATLWSPSMVCGMTTPPTSPGNVPPDLSHPYSKVFGTTAGGKGTPLGTPATSPPPAPLCHSDDYVHISLPQATVTPPRKEERMDSARPCLHRQHHLLNDRGSEEPPGSKGSVTLSDLPGFLGDLASEEDSIEKDKEEAAISRELSEITTAEAEPVVPRGGFDSPFYRDSLPGSQRKTHSAASSSQGASVNPEPLHSSLDKLGPDTPKQAFTPIDLPCGSADESPAGDRECQTSLETSIFTPSPCKIPPPTRVGFGSGQPPPYDHLFEVALPKTAHHFVIRKTEELLKKAKGNTEEDGVPSTSPMEVLDRLIQQGADAHSKELNKLPLPSKSVDWTHFGGSPPSDEIRTLRDQLLLLHNQLLYERFKRQQHALRNRRLLRKVIKAAALEEHNAAMKDQLKLQEKDIQMWKVSLQKEQARYNQLQEQRDTMVTKLHSQIRQLQHDREEFYNQSQELQTKLEDCRNMIAELRIELKKANNKVCHTELLLSQVSQKLSNSESVQQQMEFLNRQLLVLGEVNELYLEQLQNKHSDTTKEVEMMKAAYRKELEKNRSHVLQQTQRLDTSQKRILELESHLAKKDHLLLEQKKYLEDVKLQARGQLQAAESRYEAQKRITQVFELEILDLYGRLEKDGLLKKLEEEKAEAAEAAEERLDCCNDGCSDSMVGHNEEASGHNGETKTPRPSSARGSSGSRGGGGSSSSSSELSTPEKPPHQRAGPFSSRWETTMGEASASIPTTVGSLPSSKSFLGMKARELFRNKSESQCDEDGMTSSLSESLKTELGKDLGVEAKIPLNLDGPHPSPPTPDSVGQLHIMDYNETHHEHS

SEQ ID NO: 889424 - protein, 1164 aa, Homo sapiens; identical to SEQ ID NO: 889420

SEQ ID NO: 889425 - protein, 438 aa, Homo sapiens
MAQQANVGELLAMLDSPMLGVRDDVTAVFKENLNSDRGPMLVNTLVDYYLETSSQPALHILTTLQEPHDKHLLDRINEYVGKAATRLSILSLLGHVIRLQPSWKHKLSQAPLLPSLLKCLKMDTDVVVLTTGVLVLITMLPMIPQSGKQHLLDFFDIFGRLSSWCLKKPGHVAEVYLVHLHASVYALFHRLYGMYPCNFVSFLRSHYSMKENLETFEEVVKPMMEHVRIHPELVTGSKDHELDPRRWKRLETHDVVIECAKISLDPTEASYEDGYSVSHQISARFPHRSADVTTSPYADTQNSYGCATSTPYSTSRLMLLNMPGQLPQTLSSPSTRLITEPPQATLWSPSMVCGMTTPPTSPGNVPPDLSHPYSKVFGTTAGGKGTPLGTPATSPPPAPLCHSDDYVHISLPQATVTPPRKVRSSSSAIPLPRHSDSL

SEQ ID NO: 889426 - protein, 1164 aa, Homo sapiens; identical to SEQ ID NO: 889420

SEQ ID NO: 889427 - protein, 740 aa, Homo sapiens [sequence omitted]

SEQ ID NO: 889428 - protein, 754 aa, Homo sapiens
MKSYYRHILYSVSSFTLTGITLYFFDFSCLCFSSEEPPGSKGSVTLSDLPGFLGDLASEEDSIEKDKEEAAISRELSEITTAEAEPVVPRGGFDSPFYRDSLPGSQRKTHSAASSSQGASVNPEPLHSSLDKLGPDTPKQAFTPIDLPCGSADESPAGDRECQTSLETSIFTPSPCKIPPPTRVGFGSGQPPPYDHLFEVALPKTAHHFVIRKTEELLKKAKGNTEEDGVPSTSPMEVLDRLIQQGADAHSKELNKLPLPSKSVDWTHFGGSPPSDEIRTLRDQLLLLHNQLLYERFKRQQHALRNRRLLRKVIKAAALEEHNAAMKDQLKLQEKDIQMWKVSLQKEQARYNQLQEQRDTMVTKLHSQIRQLQHDREEFYNQSQELQTKLEDCRNMIAELRIELKKANNKVCHTELLLSQVSQKLSNSESVQQQMEFLNRQLLVLGEVNELYLEQLQNKHSDTTKEVEMMKAAYRKELEKNRSHVLQQTQRLDTSQKRILELESHLAKKDHLLLEQKKYLEDVKLQARGQLQAAESRYEAQKRITQVFELEILDLYGRLEKDGLLKKLEEEKAEAAEAAEERLDCCNDGCSDSMVGHNEEASGHNGETKTPRPSSARGSSGSRGGGGSSSSSSELSTPEKPPHQRAGPFSSRWETTMGEASASIPTTVGSLPSSKSFLGMKARELFRNKSESQCDEDGMTSSLSESLKTELGKDLGVEAKIPLNLDGPHPSPPTPDSVGQLHIMDYNETHHEHS

SEQ ID NO: 889429 - protein, 420 aa, Homo sapiens
MAQQANVGELLAMLDSPMLGVRDDVTAVFKENLNSDRGPMLVNTLVDYYLETSSQPALHILTTLQEPHDKHLLDRINEYVGKAATRLSILSLLGHVIRLQPSWKHKLSQAPLLPSLLKCLKMDTDVVVLTTGVLVLITMLPMIPQSGKQHLLDFFDIFGRLSSWCLKKPGHVAEVYLVHLHASVYALFHRLYGMYPCNFVSFLRSHYSMKENLETFEEVVKPMMEHVRIHPELVTGSKDHELDPRRWKRLETHDVVIECAKISLDPTEASYEDGYSVSHQISARFPHRSADVTTSPYADTQNSYGCATSTPYSTSRLMLLNMPGQLPQTLSSPSTRLITEPPQATLGAIYGRGMTILSSSECPTIAPYSKAGKRGRILGPELSLKPLDETGQYSSGSPRRQRPNRTEPIETDKPALARRT

SEQ ID NO: 889430 - protein, 672 aa, Homo sapiens
MTPSQVAFEIRGTLLPGEVFAICGSCDALGNWNPQNAVALLPENDTGESMLWKATIVLSRGVSVQYRYFKGYFLEPKTIGGPCQVIVHKWETHLQPRSITPLESEIIIDDGQFGIHNGVETLDSGWLTCQTEIRLRLHYSEKPPVSITKKKLKKSRFRVKLTLEGLEEDDDDRVSPTVLHKMSNSLEISLISDNEFKCRHSQPECGYGLQPDRWTEYSIQTMEPDNLELIFDFFEEDLSEHVVQGDALPGHVGTACLLSSTIAESGKSAGILTLPIMSRNSRKTIGKVRVDYIIIKPLPGYSCDMKSSFSKYWKPRIPLDVGHRGAGNSTTTAQLAKVQENTIASLRNAASHGAAFVEFDVHLSKDFVPVVYHDLTCCLTMKKKFDADPVELFEIPVKELTFDQLQLLKLTHVTALKSKDRKESVVQEENSFSENQPFPSLKMVLESLPEDVGFNIEIKWICQQRDGMWDGNLSTYFDMNLFLDIILKTVLENSGKRRIVFSSFDADICTMVRQKQNKYPILFLTQGKSEIYPELMDLRSRTTPIAMSFAQFENLLGINVHTEDLLRNPSYIQEAKAKGLVIFCWGDDTNDPENRRKLKELGVNGLIYDRIYDWMPEQPNIFQVEQLERLKQELPELKSCLCPTVSRFVPSSLCGESDIHVDANGIDNVENA

SEQ ID NO: 889431 - protein, 385 aa, Homo sapiens
MKVDYIIIKPLPGYSCDMKSSFSKYWKPRIPLDVGHRGAGNSTTTAQLAKVQENTIASLRNAASHGAAFVEFDVHLSKDFVPVVYHDLTCCLTMKKKFDADPVELFEIPVKELTFDQLQLLKLTHVTALKSKDRKESVVQEENSFSENQPFPSLKMVLESLPEDVGFNIEIKWICQQRDGMWDGNLSTYFDMNLFLDIILKTVLENSGKRRIVFSSFDADICTMVRQKQNKYPILFLTQGKSEIYPELMDLRSRTTPIAMSFAQFENLLGINVHTEDLLRNPSYIQEAKAKGLVIFCWGDDTNDPENRRKLKELGVNGLIYDRIYDWMPEQPNIFQVEQLERLKQELPELKSCLCPTVSRFVPSSLCGESDIHVDANGIDNVENA

SEQ ID NO: 889432 - protein, 385 aa, Homo sapiens; identical to SEQ ID NO: 889431

SEQ ID NO: 889433 - protein, 385 aa, Homo sapiens; identical to SEQ ID NO: 889431

SEQ ID NO: 889434 - protein, 205 aa, Homo sapiens [sequence omitted]

SEQ ID NO: 889435 - protein, 385 aa, Homo sapiens; identical to SEQ ID NO: 889431

SEQ ID NO: 889436 - protein, 385 aa, Homo sapiens; identical to SEQ ID NO: 889431

SEQ ID NO: 889437 - protein, 385 aa, Homo sapiens; identical to SEQ ID NO: 889431

SEQ ID NO: 889438 - protein, 385 aa, Homo sapiens; identical to SEQ ID NO: 889431

SEQ ID NO: 889439 - protein, 385 aa, Homo sapiens; identical to SEQ ID NO: 889431

SEQ ID NO: 889440 - protein, 385 aa, Homo sapiens; identical to SEQ ID NO: 889431

SEQ ID NO: 889441 - protein, 347 aa, Homo sapiens [sequence omitted]

SEQ ID NO: 889442 - protein, 227 aa, Homo sapiens
LETQSLEPSIEIKVEYCQQRDGMWDGNLSTYFDMNLFLDIILKTVLENSGKRRIVFSSFDADICTMVRQKQNKYPILFLTQGKSEIYPELMDLRSRTTPIAMSFAQFENLLGINVHTEDLLRNPSYIQEAKAKGLVIFCWGDDTNDPENRRKLKELGVNGLIYDRIYDWMPEQPNIFQVEQLERLKQELPELKSCLCPTVSRFVPSSLCGESDIHVDANGIDNVENA

SEQ ID NO: 889443 - protein, 385 aa, Homo sapiens; identical to SEQ ID NO: 889431

SEQ ID NO: 889444 - protein, 611 aa, Homo sapiens
MHLTLSLLLFSLHFPTYIIRVNFCLVSNLFQRMRSTKLLRLIDLDFSFTFSLLDLPPVNEYDMYIRNFGKKNTKQAYVQCNEDNVERDIQTEEIETREVWTQHPGESTVVSGGSEQRDTSDAVVMPKIDTPRLCSFLRAACQVMAVLLEEDRLAAEPSWNLRAQDRALYFSDSSSQLNTSLPFLQNRKVSSLHTSRVQRQMVVSVHDLPEKSFVPLLDSKYVLCVWDIWQPSGPQKVLICESQVTCCCLSPLKAFLLFAGTAHGSVVVWDLREDSRLHYSVTLSDGFWTFRTATFSTDGILTSVNHRSPLQAVEPISTSVHKKQSFVLSPFSTQEEMSGLSFHIASLDESGVLNVWVVVELPKADIAGSISDLGLMPGGRVKLVHSALIQLGDSLSHKGNEFWGTTQTLNVKFLPSDPNHFIIGTDMGLISHGTRQDLRVAPKLFKPQQHGIRPVKVNVIDFSPFGEPIFLAGCSDGSIRLHQLSSAFPLLQWDSSTDSHAVTGLQWSPTRPAVFLVQDDTSNIYIWDLLQSDLGPVAKQQVSPNRLVAMAAVGEPEKAGGSFLALVLARASGSIDIQHLKRRWAAPEVDECNRLRLLLQEALWPEGKLHK

SEQ ID NO: 889445 - protein, 275 aa, Homo sapiens
MSGLSFHIASLDESGVLNVWVVVELPKADIAGSISDLGLMPGGRVKLVHSALIQLGDSLSHKGNEFWGTTQTLNVKFLPSDPNHFIIGTDMGLISHGTRQDLRVAPKLFKPQQHGIRPVKVNVIDFSPFGEPIFLAGCSDGSIRLHQLSSAFPLLQWDSSTDSHAVTGLQWSPTRPAVFLVQDDTSNIYIWDLLQSDLGPVAKQQVSPNRLVAMAAVGEPEKAGGSFLALVLARASGSIDIQHLKRRWAAPEVDECNRLRLLLQEALWPEGKLHK

SEQ ID NO: 889446 - protein, 185 aa, Homo sapiens [sequence omitted]

SEQ ID NO: 889447 - protein, 185 aa, Homo sapiens [sequence omitted]

SEQ ID NO: 889448 - protein, 227 aa, Homo sapiens
MLFPHISPCEVRVLMLLYSSKKKIFMGLIPYDQSGFVSAIRQVITTRKQAVGPGGVNSGPVQIVNNKFLAWSGVMEWQEPRPEPNSRSKRWLPSHVYVNQGEILRTEQWPRKLYMQLIPQQLLTTLVPLFRNSRLVQFHFTKDLETLKSLCRIMDNGFAGCVHFSYKASCEIRVLMLLYSSEKKIFIGLIPHDQGNFVNGIRRVIANQQQVLQRNLEQEQQQRGMGG

SEQ ID NO: 889449 - protein, 479 aa, Homo sapiens
RLGERPAVKSARRPRLRGSGPLGPPMEGARVFGALGPIGPSSPGLTLGGLAVSEHRLSNKLLAWSGVLEWQEVSLCGAAAGLQGLVLSLRGQARASRLCTVTPLLPPQKRRPYSDSTAKLKRTLPCQAYVNQGENLECRGVAARAVAGAVAVAVGIRAALSDQLLPKGDRPVAAEADHAADPSAAAGETRPSHPIHSEHPHAWLTQLLSCRPQTTLGPLFRNSQLAQFHFTNRDCDSLKGLCRIMGNGFAGCMLFPHISPCEVRVLMLLYSSKKKIFMGLIPYDQSGFVSAIRQVITTRKQAVGPGGVNSGPVQIVNNKFLAWSGVMEWQEPRPEPNSRSKRWLPSHVYVNQGEILRTEQWPRKLYMQLIPQQLLTTLVPLFRNSRLVQFHFTKDLETLKSLCRIMDNGFAGCVHFSYKASCEIRVLMLLYSSEKKIFIGLIPHDQGNFVNGIRRVIANQQQVLQRNLEQEQQQRGMGG

SEQ ID NO: 889450 - protein, 332 aa, Homo sapiens
MAGARSCRGARRMPGGFPPGLHGKAATGRLCRAGGWVLARRQGSQRSGELGRGWDRPAAGRPCLVTTCPGHALPVEADSAGPVHQVRAGTCLRPLGSHGGLWQMRGRACSPGTREWTQLGLTAKARREGWQAPGQTDRFPRSLGPSSHPVPFQQAVGPGGVNSGPVQIVNNKFLAWSGVMEWQEPRPEPNSRSKRWLPSHVYVNQGEILRTEQWPRKLYMQLIPQQLLTTLVPLFRNSRLVQFHFTKDLETLKSLCRIMDNGFAGCVHFSYKASCEIRVLMLLYSSEKKIFIGLIPHDQGNFVNGIRRVIANQQQVLQRNLEQEQQQRGMGG

SEQ ID NO: 889451 - protein, 227 aa, Homo sapiens; identical to SEQ ID NO: 889448

SEQ ID NO: 889452 - protein, 255 aa, Homo sapiens
  misc_feature (4)..(4): Xaa can be any naturally occurring amino acid
LRIXELRYPHVSRSLGLCRIMGNGFAGCMLFPHISPCEVRVLMLLYSSKKKIFMGLIPYDQSGFVSAIRQVITTRKQAVGPGGVNSGPVQIVNNKFLAWSGVMEWQEPRPEPNSRSKRWLPSHVYVNQGEILRTEQWPRKLYMQLIPQQLLTTLVPLFRNSRLVQFHFTKDLETLKSLCRIMDNGFAGCVHFSYKASCEIRVLMLLYSSEKKIFIGLIPHDQGNFVNGIRRVIANQQQVLQRNLEQEQQQRGMGG

SEQ ID NO: 889453 - protein, 220 aa, Homo sapiens
MLFPHISPCEVRVLMLLYSSKKKIFMGLIPYDQSGFVSAIRQAVGPGGVNSGPVQIVNNKFLAWSGVMEWQEPRPEPNSRSKRWLPSHVYVNQGEILRTEQWPRKLYMQLIPQQLLTTLVPLFRNSRLVQFHFTKDLETLKSLCRIMDNGFAGCVHFSYKASCEIRVLMLLYSSEKKIFIGLIPHDQGNFVNGIRRVIANQQQVLQRNLEQEQQQRGMGG

SEQ ID NO: 889454 - protein, 136 aa, Homo sapiens
RLGERPAVKSARRPRLRGSGPLGPPMEGARVFGALGPIGPSSPGLTLGGLAVSEHRLSNKLLAWSGVLEWQEVSLCGAAAGLQGLVLSLRGQARASRLCTVTPLLPPQKRRPYSDSTAKLKRTLPCQAYVNQGENL

SEQ ID NO: 889455 - protein, 276 aa, Homo sapiens
MGGCEQMRGRACSPGTREWTQLGLTGQGSEGGMAGPRTDRQVSQEPGPLFPPRSLPTGSGTWWCQLRPSPDRQQQVSGMEWCHGVAGGEHSAAQGLVDPQILTDCGWEGTLALGVSSPEGSSLPLPQKPRPEPNSRSKRWLPSHVYVNQGEILRTEQWPRKLYMQLIPQQLLTTLVPLFRNSRLVQFHFTKDLETLKSLCRIMDNGFAGCVHFSYKASCEIRVLMLLYSSEKKIFIGLIPHDQGNFVNGIRRVIANQQQVLQRNLEQEQQQRGMGG

SEQ ID NO: 889456 - protein, 136 aa, Homo sapiens; identical to SEQ ID NO: 889454

SEQ ID NO: 889457 - protein, 227 aa, Homo sapiens; identical to SEQ ID NO: 889448

SEQ ID NO: 889458 - protein, 227 aa, Homo sapiens; identical to SEQ ID NO: 889448

SEQ ID NO: 889459 - protein, 136 aa, Homo sapiens; identical to SEQ ID NO: 889454

SEQ ID NO: 889460 - protein, 136 aa, Homo sapiens; identical to SEQ ID NO: 889454

SEQ ID NO: 889461 - protein, 136 aa, Homo sapiens; identical to SEQ ID NO: 889454

SEQ ID NO: 889462 - protein, 227 aa, Homo sapiens; identical to SEQ ID NO: 889448

SEQ ID NO: 889463 - protein, 227 aa, Homo sapiens; identical to SEQ ID NO: 889448

SEQ ID NO: 889464 - protein, 136 aa, Homo sapiens; identical to SEQ ID NO: 889454

SEQ ID NO: 889465 - protein, 136 aa, Homo sapiens; identical to SEQ ID NO: 889454

SEQ ID NO: 889466 - protein, 121 aa, Homo sapiens
RLRDHGQWLLSPSVRWRRLDFGVSEPSPRCPPSSWAILGPAACTFPTKHRVRSACLCSCTLQRRKSSLASSPMTRATLSTASGVSLPTSSRSCSGTWSRSNSNEGWGGSGYPGLGPSRSHR

SEQ ID NO: 889467 - protein, 136 aa, Homo sapiens; identical to SEQ ID NO: 889454

SEQ ID NO: 889468 - protein, 136 aa, Homo sapiens; identical to SEQ ID NO: 889454

SEQ ID NO: 889469 - protein, 136 aa, Homo sapiens; identical to SEQ ID NO: 889454

SEQ ID NO: 889470 - protein, 136 aa, Homo sapiens; identical to SEQ ID NO: 889454

SEQ ID NO: 889471 - protein, 1662 aa, Homo sapiens
MTDRFWDQWYLWYLRLLRLLDRGSFRNDGLKASDVLPILKEKVAFVSGGGRDKRGGPILTFPARSNHDRIRQEDLRKLVTYLASVPSEDVCKRGFTVIIDMRGSKWDLIKPLLKTLQEAFPAEIHVALIIKPDNFWQKQKTNFGSSKFIFETSMVSVEGLTKLVDPSQLTEEFDGSLDYNHEEWIELRLSLEEFFNSAVHLLSRLEDLQEMLARKEFPVDVEGSRRLIDEHTQLKKKVLKAPVEELDREGQRLLQCIRCSDGFSGRNCIPGSADFQSLVPKITSLLDKLHSTRQHLHQMWHVRKLKLDQCFQLRLFEQDAEKMFDWISHNKELFLQSHTEIGVSYQYALDLQTQHNHFAMNSMNAYVNINRIMSVASRLSEAGHYASQQIKQISTQLDQEWKSFAAALDERSTILAMSAVFHQKAEQFLSGVDAWCKMCSEGGLPSEMQDLELAIHHHQTLYEQVTQAYTEVSQDGKALLDVLQRPLSPGNSESLTATANYSKAVHQVLDVVHEVLHHQRRLESIWQHRKVRLHQRLQLCVFQQDVQQVLDWIENHGEAFLSKHTGVGKSLHRARALQKRHDDFEEVAQNTYTNADKLLEAAEQLAQTGECDPEEIYKAARHLEVRIQDFVRRVEQRKLLLDMSVSFHTHTKELWTWMEDLQKEMLEDVCADSVDAVQELIKQFQQQQTATLDATLNVIKEGEDLIQQLRSAPPSLGEPSGDSAVSNNKTPHSSSISHIESVLQQLDDAQVQMEELFHERKIKLDIFLQLRIFEQYTIEVTAELDAWNEDLLRQMNDFNTEDLTLAEQRLQRHTERKLAMNNMTFEVIQQGQDLHQYITEVQASGIELICEKDIDLAAQVQELLEFLHEKQHELELNAEQTHKRLEQCLQLRHLQAEVKQVLGWIRNGESMLNASLVNASSLSEAEQLQREHEQFQLAIESLFHATSLQKTHQSALQVQQKAEVLLQAGHYDADAIRECAEKVALHWQQLMLKMEDRLKLVNASVAFYKTSEQVCSVLESLEQEYRRDEDWCGGRDKLGPAAEIDHVIPLISKHLEQKEAFLKACTLARRNAEVFLKYIHRNNVSMPSVASHTRGPEQQVKAILSELLQRENRVLHFWTLKKRRLDQCQQYVVFERSAKQALDWIQETGEFYLSTHTSTGETTEETQELLKEYGEFRVPAKQTKEKVKLLIQLADSFVEKGHIHATEIRKWVTTVDKHYRDFSLRMGKYRYSLEKALGVNTEDNKDLELDIIPASLSDREVKLRDANHEVNEEKRKSARKKEFIMAELLQTEKAYVRDLHECLETYLWEMTSGVEEIPPGILNKEHIIFGNIQEIYDFHNNIFLKELEKYEQLPEDVGHCFVTWADKFQMYVTYCKNKPDSNQLILEHAGTFFDEIQQRHGLANSISSYLIKPVQRITKYQLLLKELLTCCEEGKGELKDGLEVMLSVPKKANDAMHVSMLEGFDENLDVQGELILQDAFQVWDPKSLIRKGRERHLFLFEISLVFSKEIKDSSGHTKYVYKNKLLTSELGVTEHVEGDPCKFALWSGRTPSSDNKTVLKASNIETKQEWIKNIREVIQERIIHLKGALKEPLQLPKTPAKQRNNSKRDGVEDIDSQGDGSSQPDTISIASRTSQNTVDSDKDGNLVPRWHLGPGDPFSTYV

SEQ ID NO: 889472 - protein, 124 aa, Homo sapiens
AAAAAPRALRPPGAEQPSAPGFFGSRLPADSPPTVMNPPEGAAEEGGAADSDVDAFFLDGSFRNDGLKASDVLPILKEKVAFVSGGGRDKRGGPILTFPARSNHDRIRQEDLRKLVTYLASVPR

SEQ ID NO: 889473 - protein, 1562 aa, Homo sapiens
MRGSKWDLIKPLLKTLQEAFPAEIHVALIIKPDNFWQKQKTNFGSSKFIFETSMVSVEGLTKLVDPSQLTEEFDGSLDYNHEEWIELRLSLEEFFNSAVHLLSRLEDLQEMLARKEFPVDVEGSRRLIDEHTQLKKKVLKAPVEELDREGQRLLQCIRCSDGFSGRNCIPGSADFQSLVPKITSLLDKLHSTRQHLHQMWHVRKLKLDQCFQLRLFEQDAEKMFDWISHNKELFLQSHTEIGVSYQYALDLQTQHNHFAMNSMNAYVNINRIMSVASRLSEAGHYASQQIKQISTQLDQEWKSFAAALDERSTILAMSAVFHQKAEQFLSGVDAWCKMCSEGGLPSEMQDLELAIHHHQTLYEQVTQAYTEVSQDGKALLDVLQRPLSPGNSESLTATANYSKAVHQVLDVVHEVLHHQRRLESIWQHRKVRLHQRLQLCVFQQDVQQVLDWIENHGEAFLSKHTGVGKSLHRARALQKRHDDFEEVAQNTYTNADKLLEAAEQLAQTGECDPEEIYKAARHLEVRIQDFVRRVEQRKLLLDMSVSFHTHTKELWTWMEDLQKEMLEDVCADSVDAVQELIKQFQQQQTATLDATLNVIKEGEDLIQQLRSAPPSLGEPSGDSAVSNNKTPHSSSISHIESVLQQLDDAQVQMEELFHERKIKLDIFLQLRIFEQYTIEVTAELDAWNEDLLRQMNDFNTEDLTLAEQRLQRHTERKLAMNNMTFEVIQQGQDLHQYITEVQASGIELICEKDIDLAAQVQELLEFLHEKQHELELNAEQTHKRLEQCLQLRHLQAEVKQVLGWIRNGESMLNASLVNASSLSEAEQLQREHEQFQLAIESLFHATSLQKTHQSALQVQQKAEVLLQAGHYDADAIRECAEKVALHWQQLMLKMEDRLKLVNASVAFYKTSEQVCSVLESLEQEYRRDEDWCGGRDKLGPAAEIDHVIPLISKHLEQKEAFLKACTLARRNAEVFLKYIHRNNVSMPSVASHTRGPEQQVKAILSELLQRENRVLHFWTLKKRRLDQCQQYVVFERSAKQALDWIQETGEFYLSTHTSTGETTEETQELLKEYGEFRVPAKQTKEKVKLLIQLADSFVEKGHIHATEIRKWVTTVDKHYRDFSLRMGKYRYSLEKALGVNTEDNKDLELDIIPASLSDREVKLRDANHEVNEEKRKSARKKEFIMAELLQTEKAYVRDLHECLETYLWEMTSGVEEIPPGILNKEHIIFGNIQEIYDFHNNIFLKELEKYEQLPEDVGHCFVTWADKFQMYVTYCKNKPDSNQLILEHAGTFFDEIQQRHGLANSISSYLIKPVQRITKYQLLLKELLTCCEEGKGELKDGLEVMLSVPKKANDAMHVSMLEGFDENLDVQGELILQDAFQVWDPKSLIRKGRERHLFLFEISLVFSKEIKDSSGHTKYVYKNKLLTSELGVTEHVEGDPCKFALWSGRTPSSDNKTVLKASNIETKQEWIKNIREVIQERIIHLKGALKEPLQLPKTPAKQRNNSKRDGVEDIDSQGDGSSQPDTISIASRTSQNTVDSDKDGNLVPRWHLGPGDPFSTYV

SEQ ID NO: 889474 - protein, 1551 aa, Homo sapiens
MRGSKWDLIKPLLKTLQEAFPAEIHVALIIKPDNFWQKQKTNFGSSKFIFETSMVSVEGLTKLVDPSQLTEEFDGSLDYNHEEWIELRLSLEEFFNSAVHLLSRLEDLQEMLARKEFPVDVEGSRRLIDEHTQLKKKVLKAPVEELDREGQRLLQCIRCSDGFSGRNCIPGSADFQSLVPKITSLLDKLHSTRQHLHQMWHVRKLKLDQCFQLRLFEQDAEKMFDWISHNKELFLQSHTEIGVSYQYALDLQTQHNHFAMNSMNAYVNINRIMSVASRLSEAGHYASQQIKQISTQLDQEWKSFAAALDERSTILAMSAVFHQKAEQFLSGVDAWCKMCSEGGLPSEMQDLELAIHHHQTLYEQVTQAYTEVSQDGKALLDVLQRPLSPGNSESLTATANYSKAVHQVLDVVHEVLHHQRRLESIWQHRKVRLHQRLQLCVFQQDVQQVLDWIENHGEAFLSKHTGVGKSLHRARALQKRHDDFEEVAQNTYTNADKLLEAAEQLAQTGECDPEEIYKAARHLEVRIQDFVRRVEQRKLLLDMSVSFHTHTKELWTWMEDLQKEMLEDVCADSVDAVQELIKQFQQQQTATLDATLNVIKEGEDLIQQLRDSAVSNNKTPHSSSISHIESVLQQLDDAQVQMEELFHERKIKLDIFLQLRIFEQYTIEVTAELDAWNEDLLRQMNDFNTEDLTLAEQRLQRHTERKLAMNNMTFEVIQQGQDLHQYITEVQASGIELICEKDIDLAAQVQELLEFLHEKQHELELNAEQTHKRLEQCLQLRHLQAEVKQVLGWIRNGESMLNASLVNASSLSEAEQLQREHEQFQLAIESLFHATSLQKTHQSALQVQQKAEVLLQAGHYDADAIRECAEKVALHWQQLMLKMEDRLKLVNASVAFYKTSEQVCSVLESLEQEYRRDEDWCGGRDKLGPAAEIDHVIPLISKHLEQKEAFLKACTLARRNAEVFLKYIHRNNVSMPSVASHTRGPEQQVKAILSELLQRENRVLHFWTLKKRRLDQCQQYVVFERSAKQALDWIQETGEFYLSTHTSTGETTEETQELLKEYGEFRVPAKQTKEKVKLLIQLADSFVEKGHIHATEIRKWVTTVDKHYRDFSLRMGKYRYSLEKALGVNTEDNKDLELDIIPASLSDREVKLRDANHEVNEEKRKSARKKEFIMAELLQTEKAYVRDLHECLETYLWEMTSGVEEIPPGILNKEHIIFGNIQEIYDFHNNIFLKELEKYEQLPEDVGHCFVTWADKFQMYVTYCKNKPDSNQLILEHAGTFFDEIQQRHGLANSISSYLIKPVQRITKYQLLLKELLTCCEEGKGELKDGLEVMLSVPKKANDAMHVSMLEGFDENLDVQGELILQDAFQVWDPKSLIRKGRERHLFLFEISLVFSKEIKDSSGHTKYVYKNKLLTSELGVTEHVEGDPCKFALWSGRTPSSDNKTVLKASNIETKQEWIKNIREVIQERIIHLKGALKEPLQLPKTPAKQRNNSKRDGVEDIDSQGDGSSQPDTISIASRTSQNTVDSDKDGNLVPRWHLGPGDPFSTYV

SEQ ID NO: 889475 - protein, 1686 aa, Homo sapiens
MRGSKWDLIKPLLKTLQEAFPAEIHVALIIKPDNFWQKQKTNFGSSKFIFETSMVSVEGLTKLVDPSQLTEEFDGSLDYNHEEWIELRLSLEEFFNSAVHLLSRLEDLQEMLARKEFPVDVEGSRRLIDEHTQLKKKVLKAPVEELDREGQRLLQCIRCSDGFSGRNCIPGSADFQSLVPKITSLLDKLHSTRQHLHQMWHVRKLKLDQCFQLRLFEQDAEKMFDWISHNKELFLQSHTEIGVSYQYALDLQTQHNHFAMNSMNAYVNINRIMSVASRLSEAGHYASQQIKQISTQLDQEWKSFAAALDERSTILAMSAVFHQKAEQFLSGVDAWCKMCSEGGLPSEMQDLELAIHHHQTLYEQVTQAYTEVSQDGKALLDVLQRPLSPGNSESLTATANYSKAVHQVLDVVHEVLHHQRRLESIWQHRKVRLHQRLQLCVFQQDVQQVLDWIENHGEAFLSKHTGVGKSLHRARALQKRHDDFEEVAQNTYTNADKLLEAAEQLAQTGECDPEEIYKAARHLEVRIQDFVRRVEQRKLLLDMSVSFHTHTKELWTWMEDLQKEMLEDVCADSVDAVQELIKQFQQQQTATLDATLNVIKEGEDLIQQLRSAPPSLGEPSGDSAVSNNKTPHSSSISHIESVLQQLDDAQVQMEELFHERKIKLDIFLQLRIFEQYTIEVTAELDAWNEDLLRQMNDFNTEDLTLAEQRLQRHTERKLAMNNMTFEVIQQGQDLHQYITEVQASGIELICEKDIDLAAQVQELLEFLHEKQHELELNAEQTHKRLEQCLQLRHLQAEVKQVLGWIRNGESMLNASLVNASSLSEAEQLQREHEQFQLAIESLFHATSLQKTHQSALQVQQKAEVLLQAGHYDADAIRECAEKVALHWQQLMLKMEDRLKLVNASVAFYKTSEQVCSVLESLEQEYRRDEDWCGGRDKLGPAAEIDHVIPLISKHLEQKEAFLKACTLARRNAEVFLKYIHRNNVSMPSVASHTRGPEQQVKAILSELLQRENRVLHFWTLKKRRLDQCQQYVVFERSAKQALDWIQETGEFYLSTHTSTGETTEETQELLKEYGEFRVPAKQTKEKVKLLIQLADSFVEKGHIHATEIRKWVTTVDKHYRDFSLRMGKYRYSLEKALGVNTEDNKDLELDIIPASLSDREVKLRDANHEVNEEKRKSARKKEFIMAELLQTEKAYVRDLHECLETYLWEMTSGVEEIPPGILNKEHIIFGNIQEIYDFHNNIFLKELEKYEQLPEDVGHCFVTWADKFQMYVTYCKNKPDSNQLILEHAGTFFDEIQQRHGLANSISSYLIKPVQRITKYQLLLKELLTCCEEGKGELKDGLEVMLSVPKKANDAMHVSMLEGFDENLDVQGELILQDAFQVWDPKSLIRKGRERHLFLFEISLVFSKEIKDSSGHTKYVYKNKLLTSELGVTEHVEGDPCKFALWSGRTPSSDNKTVLKASNIETKQEWIKNIREVIQERIIHLKGALKEPLQLPKTPAKQRNNSKRDGVEDIDSQGDGSSQPDTISIASRTSQNTVDSDKLSGGCELTVVLQDFSAGHSSELTIQVGQTVELLERPSERPGWCLVRTTERSPPLEGLVPSSALCISHSRSSVEMDCFFPLVKDAYSHSSSENGGKSESVANLQAQPSLNSIHSSPGPKRSTNTLKKWLTSPVRRLNSGKADGNI

SEQ ID NO: 889476 - protein, 577 aa, Homo sapiens
MPSVASHTRGPEQQVKAILSELLQRENRVLHFWTLKKRRLDQCQQYVVFERSAKQALDWIQETGEFYLSTHTSTGETTEETQELLKEYGEFRVPAKQTKEKVKLLIQLADSFVEKGHIHATEIRKWVTTVDKHYRDFSLRMGKYRYSLEKALGVNTEDNKDLELDIIPASLSDREVKLRDANHEVNEEKRKSARKKEFIMAELLQTEKAYVRDLHECLETYLWEMTSGVEEIPPGILNKEHIIFGNIQEIYDFHNNIFLKELEKYEQLPEDVGHCFVTWADKFQMYVTYCKNKPDSNQLILEHAGTFFDEIQQRHGLANSISSYLIKPVQRITKYQLLLKELLTCCEEGKGELKDGLEVMLSVPKKANDAMHVSMLEGFDENLDVQGELILQDAFQVWDPKSLIRKGRERHLFLFEISLVFSKEIKDSSGHTKYVYKNKLLTSELGVTEHVEGDPCKFALWSGRTPSSDNKTVLKASNIETKQEWIKNIREVIQERIIHLKGALKEPLQLPKTPAKQRNNSKRDGVEDIDSQGDGSSQPDTISIASRTSQNTVDSDKDGNLVPRWHLGPGDPFSTYV

SEQ ID NO: 889477 - protein, 1538 aa, Homo sapiens
MRGSKWDLIKPLLKTLQEAFPAEIHVALIIKPDNFWQKQKTNFGSSKFIFETSMVSVEGLTKLVDPSQLTEEFDGSLDYNHEEWIELRLSLEEFFNSAVHLLSRLEDLQEMLARKEFPVDVEGSRRLIDEHTQLKKKVLKAPVEELDREGQRLLQCIRCSDGFSGRNCIPGSADFQSLVPKITSLLDKLHSTRQHLHQMWHVRKLKLDQCFQLRLFEQDAEKMFDWISHNKELFLQSHTEIGVSYQYALDLQTQHNHFAMNSMNAYVNINRIMSVASRLSEAGHYASQQIKQISTQLDQEWKSFAAALDERSTILAMSAVFHQKAEQFLSGVDAWCKMCSEGGLPSEMQDLELAIHHHQTLYEQVTQAYTEVSQDGKALLDVLQRPLSPGNSESLTATANYSKAVHQVLDVVHEVLHHQRRLESIWQHRKVRLHQRLQLCVFQQDVQQVLDWIENHGEAFLSKHTGVGKSLHRARALQKRHDDFEEVAQNTYTNADKLLEAAEQLAQTGECDPEEIYKAARHLEVRIQDFVRRVEQRKLLLDMSVSFHTHTKELWTWMEDLQKEMLEDVCADSVDAVQELIKQFQQQQTATLDATLNVIKEGEDLIQQLRSAPPSLGEPSGDSAVSNNKTPHSSSISHIESVLQQLDDAQVQMEELFHERKIKLDIFLQLRIFEQYTIEVTAELDAWNEDLLRQMNDFNTEDLTLAEQRLQRHTERKLAMNNMTFEVIQQGQDLHQYITEVQASGIELICEKDIDLAAQVQELLEFLHEKQHELELNAEQTHKRLEQCLQLRHLQAEVKQVLGWIRNGESMLNASLVNASSLSEAEQLQREHEQFQLAIESLFHATSLQKTHQSALQVQQKAEVLLQAGHYDADAIRECAEKVALHWQQLMLKMEDRLKLVNASVAFYKTSEQVCSVLESLEQEYRRDEDWCGGRDKLGPAAEIDHVIPLISKHLEQKEAFLKACTLARRNAEVFLKYIHRNNVSMPSVASHTRGPEQQVKAILSELLQRENRVLHFWTLKKRRLDQCQQYVVFERSAKQALDWIQETGEFYLSTHTSTGETTEETQELLKEYGEFRVPAKQTKEKVKLLIQLADSFVEKGHIHATEIRKWVTTVDKHYRDFSLRMGKYRYSLEKALGVNTEDNKDLELDIIPASLSDREVKLRDANHEVNEEKRKSARKKEFIMAELLQTEKAYVRDLHECLETYLWEMTSGVEEIPPGILNKEHIIFGNIQEIYDFHNNIFLKELEKYEQLPEDVGHCFVTWADKFQMYVTYCKNKPDSNQLILEHAGTFFDEIQQRHGLANSISSYLIKPVQRITKYQLLLKELLTCCEEGKGELKDGLEVMLSVPKKANDAMHVSMLEGFDENLDVQGELILQDAFQVWDPKSLIRKGRERHLFLFEISLVFSKEIKDSSGHTKYVYKNKLLTSELGVTEHVEGDPCKFALWSGRTPSSDNKTVLKASNIETKQEWIKNIREVIQERIIHLKGALKEPLQLPKTPAKQRNNSKRMEWRILTERGQNWRETEPVYVAALSPLVAI

SEQ ID NO: 889478 - protein, 331 aa, Homo sapiens
SEDARLIGNNIFLKELEKYEQLPEDVGHCFVTWADKFQMYVTYCKNKPDSNQLILEHAGTFFDEIQQRHGLANSISSYLIKPVQRITKYQLLLKELLTCCEEGKGELKDGLEVMLSVPKKANDAMHVSMLEGFDENLDVQGELILQDAFQVWDPKSLIRKGRERHLFLFEISLVFSKEIKDSSGHTKYVYKNKLLTSELGVTEHVEGDPCKFALWSGRTPSSDNKTVLKASNIETKQEWIKNIREVIQERIIHLKGALKEPLQLPKTPAKQRNNSKRDGVEDIDSQGDGSSQPDTISIASRTSQNTVDSDKDGNLVPRWHLGPGDPFSTYV

SEQ ID NO: 889479 - protein, 1427 aa, Homo sapiens
MRGSKWDLIKPLLKTLQEAFPAEIHVALIIKPDNFWQKQKTNFGSSKFIFETSMVSVEGLTKLVDPSQLTEEFDGSLDYNHEEWIELRLSLEEFFNSAVHLLSRLEDLQEMLARKEFPVDVEGSRRLIDEHTQLKKKVLKAPVEELDREGQRLLQCIRCSDGFSGRNCIPGSADFQSLVPKITSLLDKLHSTRQHLHQMWHVRKLKLDQCFQLRLFEQDAEKMFDWISHNKELFLQSHTEIGVSYQYALDLQTQHNHFAMNSMNAYVNINRIMSVASRLSEAGHYASQQIKQISTQLDQEWKSFAAALDERSTILAMSAVFHQKAEQFLSGVDAWCKMCSEGGLPSEMQDLELAIHHHQTLYEQVTQAYTEVSQDGKALLDVLQRPLSPGNSESLTATANYSKAVHQVLDVVHEVLHHQRRLESIWQHRKVRLHQRLQLCVFQQDVQQVLDWIENHGEAFLSKHTGVGKSLHRARALQKRHDDFEEVAQNTYTNADKLLEAAEQLAQTGECDPEEIYKAARHLEVRIQDFVRRVEQRKLLLDMSVSFHTHTKELWTWMEDLQKEMLEDVCADSVDAVQELIKQFQQQQTATLDATLNVIKEGEDLIQQLRSAPPSLGEPSGDSAVSNNKTPHSSSISHIESVLQQLDDAQVQMEELFHERKIKLDIFLQLRIFEQYTIEVTAELDAWNEDLLRQMNDFNTEDLTLAEQRLQRHTERKLAMNNMTFEVIQQGQDLHQYITEVQASGIELICEKDIDLAAQVQELLEFLHEKQHELELNAEQTHKRLEQCLQLRHLQAEVKQVLGWIRNGESMLNASLVNASSLSEAEQLQREHEQFQLAIESLFHATSLQKTHQSALQVQQKAEVLLQAGHYDADAIRECAEKVALHWQQLMLKMEDRLKLVNASVAFYKTSEQVCSVLESLEQEYRRDEDWCGGRDKLGPAAEIDHVIPLISKHLEQKEAFLKACTLARRNAEVFLKYIHRNNVSMPSVASHTRGPEQQVKAILSELLQRENRVLHFWTLKKRRLDQCQQYVVFERSAKQALDWIQETGEFYLSTHTSTGETTEETQELLKEYGEFRVPAKQTKEKVKLLIQLADSFVEKGHIHATEIRKWVTTVDKHYRDFSLRMGKYRYSLEKALGVNTEDNKDLELDIIPASLSDREVKLRDANHEVNEEKRKSARKKEFIMAELLQTEKAYVRDLHECLETYLWEMTSGVEEIPPGILNKEHIIFGNIQEIYDFHNNIFLKELEKYEQLPEDVGHCFVTWADKFQMYVTYCKNKPDSNQLILEHAGTFFDEIQQRHGLANSISSYLIKPVQRITKYQLLLKELLTCCEEGKGELKDGLEVMLSVPKKANDAMHVSMLEGFDENLDVQGELILQDAFQVWDPKSLIRKGRERHLFLFEISLVFSKEIKDSSGHTKYVYKNKLLP

SEQ ID NO: 889480 - protein, 641 aa, Homo sapiens
MRGSKWDLIKPLLKTLQEAFPAEIHVALIIKPDNFWQKQKTNFGSSKFIFETSMVSVEGLTKLVDPSQLTEEFDGSLDYNHEEWIELRLSLEEFFNSAVHLLSRLEDLQEMLARKEFPVDVEGSRRLIDEHTQLKKKVLKAPVEELDREGQRLLQCIRCSDGFSGRNCIPGSADFQSLVPKITSLLDKLHSTRQHLHQMWHVRKLKLDQCFQLRLFEQDAEKMFDWISHNKELFLQSHTEIGVSYQYALDLQTQHNHFAMNSMNAYVNINRIMSVASRLSEAGHYASQQIKQISTQLDQEWKSFAAALDERSTILAMSAVFHQKAEQFLSGVDAWCKMCSEGGLPSEMQDLELAIHHHQTLYEQVTQAYTEVSQDGKALLDVLQRPLSPGNSESLTATANYSKAVHQVLDVVHEVLHHQRRLESIWQHRKVRLHQRLQLCVFQQDVQQVLDWIENHGEAFLSKHTGVGKSLHRARALQKRHDDFEEVAQNTYTNADKLLEAAEQLAQTGECDPEEIYKAARHLEVRIQDFVRRVEQRKLLLDMSVSFHTHTKELWTWMEDLQKEMLEDVCADSVDAVQELIKQFQQQQTATLDATLNVIKEGEDLIQQLRSAPPSLGEPSEEARSAWAELSSGKCLGLDVR

SEQ ID NO: 889481 - protein, 641 aa, Homo sapiens; identical to SEQ ID NO: 889480

SEQ ID NO: 889482 - protein, 66 aa, Homo sapiens
AAAAAPRALRPPGAEQPSAPGFFGSRLPADSPPTVMNPPEGAAEEGGAADSDVDAFFRTGLFGMMV

SEQ ID NO: 889483 - protein, 44 aa, Homo sapiens
MVSVEGLTKLVDPSQLTEEFDGSLDYNHEEWIELRLSLEEFFNS

SEQ ID NO: 889484 - protein, 1100 aa, Homo sapiens
MPGKLKVKIVAGRHLPVMDRASDLTDAFVEVKFGNTTFKTDVYLKSLNPQWNSEWFKFEVDDEDLQDEPLQITVLDHDTYSANDAIGKVYIDIDPLLYSEAATVISGWFPIYDTIHGIRGEINVVVKVDLFNDLNRFRQSSCGVKFFCTTSIPKCYRAVIIHGFVEELVVNEDPEYQWIDRIRTPRASNEARQRLISLMSGELQRKIGLKVLEMRGNAVVGYLQCFDLEGESGLVVRAIGTACTLDKLSSPAAFLPACNSPSKEMKESPLVHPPSHGCRSTHNSPIHTATGSRLTQNFSVSVPTLIYTGTRLLRLQSWGDAGHGQSGCRGRQAGMGSGSAGKEGGPFKALLRQQTQSALEQRGGSPHRFCRRREFPFFTLTAFPPGFLVHVGGVVSARSVKLLDRIHNPAFVGIMGNTRSYKLLDWNSFNSDEPETRDAWWAEIRQEIKSHAKALGCHAVVGYSESTSICEEVCILSASGTAAVLNPRFLQDGTVEGCLEQRLEENLPTRCGFCHIPYDELNMPFPAHLTYCYNCRKQKVPDVLFTTIDLPTDATVIGKGCLIQARLCRLKKKAQAEANATAISNLLPFMEYEVHTQLMNKLKLKGMNALFGLRIQITVGENMLMGLASATGVYLAALPTPGGIQIAGKTPNDGSYEQHISHMQKKINDTIAKNKELYEINPPEISEEIIGSPIPEPRQRSRLLRSQSESSDEVTELDLSHGKKDAFVLEIDDTDAMEDVHSLLTDVPPPSGFYSCNTEIMPGINNWTSEIQMFTSVRVIRLSSLNLTNQALNKNFNDLCENLLKSLYFKLRSMIPCCLCHVNFTVSLPEDELIQVTVTAVAITFDKNQALQTTKTPVEKSLQRASTDNEELLQFPLELCSDSLPSHPFPPAKEHLESASSNSGIPAAQRATSVDYSSFADRCSSWIELIKLKAQTIRRGSIKTTMTVEKASPVGDGNFRNRSAPPCANSTVGVVKMTPLSFIPGAKITKYLGIINMFFIRETTSLREEGGVSGFLHAFIAEVFAMVRAHVAALGGNAVVSYIMKQCVFMENPNKNQAQCLINVSGDAVVFVRESDLEVVSSQQPTTNCQSSCTEGEVTT

SEQ ID NO: 889485 - protein, 1000 aa, Homo sapiens
MPGKLKVKIVAGRHLPVMDRASDLTDAFVEVKFGNTTFKTDVYLKSLNPQWNSEWFKFEVDDEDLQDEPLQITVLDHDTYSANDAIGKVYIDIDPLLYSEAATVISGWFPIYDTIHGIRGEINVVVKVDLFNDLNRFRQSSCGVKFFCTTSIPKCYRAVIIHGFVEELVVNEDPEYQWIDRIRTPRASNEARQRLISLMSGELQRKIGLKVLEMRGNAVVGYLQCFDLEGESGLVVRAIGTACTLDKLSSPAAFLPACNSPSKEMKEIPFNEDPNPNTHSSGPSTPLKNQTYSFSPSKSYSRQSSSSDTDLSLTPKTGMGSGSAGKEGGPFKALLRQQTQSALEQREFPFFTLTAFPPGFLVHVGGVVSARSVKLLDRIHNPDEPETRDAWWAEIRQEIKSHAKALGCHAVVGYSESTSICEEVCILSASGTAAVLNPRFLQDGTVEGCLEQRLEENLPTRCGFCHIPYDELNMPFPAHLTYCYNCRKQKVPDVLFTTIDLPTDATVIGKGCLIQARLCRLKKKAQAEANATAISNLLPFMEYEVHTQLMNKLKLKGMNALFGLRIQITVGENMLMGLASATGVYLAALPTPGGIQIAGKTPNDGSYEQHISHMQKKINDTIAKNKELYEINPPEISEEIIGSPIPEPRQRSRLLRSQSESSDEVTELDLSHGKKDAFVLEIDDTDAMEDVHSLLTDVPPPSGFYSCNTEIMPGINNWTSEIQMFTSVRVIRLSSLNLTNQALNKNFNDLCENLLKSLYFKLRSMIPCCLCHVNFTVSLPEDELIQVTVTAVAITFDKNQALQTTKTPVEKSLQRASTDNEELLQFPLELCSDSLPSHPFPPAKAMTVEKASPVGDGNFRNRSAPPCANSTVGVVKMTPLSFIPGAKITKYLGIINMFFIRETTSLREEGGVSGFLHAFIAEVFAMVRAHVAALGGNAVVSYIMKQCVFMENPNKNQAQCLINVSGDAVVFVRESDLEVVSSQQPTTNCQSSCTEGEVTT

SEQ ID NO: 889486 - protein, 978 aa, Homo sapiens
MPGKLKVKIVAGRHLPVMDRASDLTDAFVEVKFGNTTFKTDVYLKSLNPQWNSEWFKFEVDDEDLQDEPLQITVLDHDTYSANDAIGKVYIDIDPLLYSEAATVISGWFPIYDTIHGIRGEINVVVKVDLFNDLNRFRQSSCGVKFFCTTSIPKCYRAVIIHGFVEELVVNEDPEYQWIDRIRTPRASNEARQRLISLMSGELQRKIGLKVLEMRGNAVVGYLQCFDLEGESGLVVRAIGTACTLDKLSSPAAFLPACNSPSKEMKEIPFNEDPNPNTHSSGPSTPLKNQTYSFSPSKSYSRQSSSSDTDLSLTPKTGMGSGSAGKEGGPFKALLRQQTQSALEQREFPFFTLTAFPPGFLVHVGGVVSARSVKLLDRIHNPDEPETRDAWWAEIRQEIKSHAKALGCHAVVGYSESTSICEEVCILSASGTAAVLNPRFLQDGTVEGCLEQRLEENLPTRCGFCHIPYDELNMPFPAHLTYCYNCRKQKVPDVLFTTIDLPTDATVIGKGCLIQARLCRLKKKAQAEANATAISNLLPFMEYEVHTQLMNKLKLKGMNALFGLRIQITVGENMLMGLASATGVYLAALPTPGGIQIAGKTPNDGSYEQHISHMQKKINDTIAKNKELYEINPPEISEEIIGSPIPEPRQRSRLLRSQSESSDEVTELDLSHGKKDAFVLEIDDTDAMEDVHSLLTDVPPPSGFYSCNTEIMPGINNWTSEIQMFTSVRVIRLSSLNLTNQALNKNFNDLCENLLKSLYFKLRSMIPCCLCHVNFTVSLPEDELIQVTVTAVAITFDKNQALQTTKTPVEKSLQRASTDNEELLQFPLELCSDSLPSHPFPPAKAMTVEKASPVGDGNFRNRSAPPCANSTVGVVKMTPLSFIPGAEGGVSGFLHAFIAEVFAMVRAHVAALGGNAVVSYIMKQCVFMENPNKNQAQCLINVSGDAVVFVRESDLEVVSSQQPTTNCQSSCTEGEVTT

SEQ ID NO: 889487 - protein, 979 aa, Homo sapiens
MPGKLKVKIVAGRHLPVMDRASDLTDAFVEVKFGNTTFKTDVYLKSLNPQWNSEWFKFEVDDEDLQDEPLQITVLDHDTYSANDAIGKVYIDIDPLLYSEAATVISGWFPIYDTIHGIRGEINVVVKVDLFNDLNRFRQSSCGVKFFCTTSIPKCYRAVIIHGFVEELVVNEDPEYQWIDRIRTPRASNEARQRLISLMSGELQRKIGLKVLEMRGNAVVGYLQCFDLEGESGLVVRAIGTACTLDKLSSPAAFLPACNSPSKEMKEIPFNEDPNPNTHSSGPSTPLKNQTYSFSPSKSYSRQSSSSDTDLSLTPKTGMGSGSAGKEGGPFKALLRQQTQSALEQREFPFFTLTAFPPGFLVHVGGVVSARSVKLLDRIHNPDEPETRDAWWAEIRQEIKSHAKALGCHAVVGYSESTSICEEVCILSASGTAAVLNPRFLQDGTVEGCLEQRLEENLPTRCGFCHIPYDELNMPFPAHLTYCYNCRKQKVPDVLFTTIDLPTDATVIGKGCLIQARLCRLKKKAQAEANATAISNLLPFMEYEVHTQLMNKLKLKGMNALFGLRIQITVGENMLMGLASATGVYLAALPTPGGIQIAGKTPNDGSYEQHISHMQKKINDTIAKNKELYEINPPEISEEIIGSPIPEPRQRSRLLRSQSESSDEVTELDLSHGKKDAFVLEIDDTDAMEDVHSLLTDVPPPSGFYSCNTEIMPGINNWTSEIQMFTSVRVIRLSSLNLTNQALNKNFNDLCENLLKSLYFKLRSMIPCCLCHVNFTVSLPEDELIQVTVTAVAITFDKNQALQTTKTPVEKSLQRASTDNEELLQFPLELCSDSLPSHPFPPAKAMTVEKASPVGDGNFRNRSAPPCANSTVGVVKMTPLSFIPGAKITKYLGIINMFFIRETTSLREEGGVSGFLHAFIAEVFAMVRAHVAALGGNAVVSYVSGDAVVFVRESDLEVVSSQQPTTNCQSSCTEGEVTT

SEQ ID NO: 889488 - protein, 289 aa, Homo sapiens [sequence omitted]

SEQ ID NO: 889489 - protein, 271 aa, Homo sapiens
MPGINNWTSEIQMFTSVRVIRLSSLNLTNQALNKNFNDLCENLLKSLYFKLRSMIPCCLCHVNFTVSLPEDELIQVTVTAVAITFDKNQALQTTKTPVVELCSDSLPSHPFPPAKAMTVEKASPVGDGNFRNRSAPPCANSTVGVVKMTPLSFIPGAKITKYLGIINMFFIRETTSLREEGGVSGFLHAFIAEVFAMVRAHVAALGGNAVVSYIMKQCVFMENPNKNQAQCLINVSGDAVVFVRESDLEVVSSQQPTTNCQSSCTEGEVTT

SEQ ID NO: 889490 - protein, 1000 aa, Homo sapiens; identical to SEQ ID NO: 889485

SEQ ID NO: 889491 - protein, 556 aa, Homo sapiens
RPPPATAHRLPAPARPPPPRALRPPRSLALRHDEQMSASEGMKFKFHSGEKVLCFEPDPTKARVLYDAKIVDVIVGKDEKGRKIPEYLIHFNGWNRSWDRWAAEDHVLRDTDENRRLQRKLARKAVARLRSTGRKKKRCRLPGVDSVLKGLPTEEKDENDENSLSSSSDCSENKDEEISEESDIEEKTEVKEEPELQTRREMEERTITIEIPEVLKKQLEDDCYYINRRKRLVKLPCQTNIITILESYVKHFAINAAFSANERPRHHHVMPHANMNVHYIPAEKNVDLCKEMVDGLRITFDYTLPLVLLYPYEQAQYKKVTSSKFFLPIKESATSTNRSQEELSPSPPLLNPSTPQSTESQPTTGEPATPKRRKAEPEALQSLRRSTRHSANCDRLSESSASPQPKRRQQDTSASMPKLFLHLEKKTPVHSRSSSPIPLTPSKEGSAVFAGFEGRRTNEINEVLSWKLVPDNYPPGDQPPPPSYIYGAQHLLRLFVKLPEILGKMSFSEKNLKALLKHFDLFLRFLAEYHDDFFPESAYVAACEAHYSTKNPRAIY

SEQ ID NO: 889492 - protein, 451 aa, Homo sapiens
RPPPATAHRLPAPARPPPPRALRPPRSLALRHDEQMSASEGMKFKFHSGEKVLCFEPDPTKARVLYDAKIVDVIVGKDEKGRKIPEYLIHFNGWNRSWDRWAAEDHVLRDTDENRRLQRKLARKAVARLRSTGRKKKRCRLPGVDSVLKGLPTEEKDENDENSLSSSSDCSENKDEEISEESDIEEKTEVKEEPELQTRREMEERTITIEIPEVLKKQLEDDCYYINRRKRLVKLPCQTNIITILESYVKHFAINAAFSANERPRHHHVMPHANMNVHYIPAEKNVDLCKEMVDGLRITFDYTLPLVLLYPYEQAQYKKVTSSKFFLPIKESATSTNRSQEELSPSPPLLNPSTPQSTESQPTTGEPATPKRRKAEPEALQSLRRSTRHSANCDRLSESSASPQPKRRQQDTSASMPKLFLHLEKSRFILGCPRPGRASVYFVFSQCQAWC

SEQ ID NO: 889493 - protein, 509 aa, Homo sapiens
MSPSVRPGAGWAPVGRPGRPIQIVDVIVGKDEKGRKIPEYLIHFNGWNRSWDRWAAEDHVLRDTDENRRLQRKLARKAVARLRSTGRKKKRCRLPGVDSVLKGLPTEEKDENDENSLSSSSDCSENKDEEISEESDIEEKTEVKEEPELQTRREMEERTITIEIPEVLKKQLEDDCYYINRRKRLVKLPCQTNIITILESYVKHFAINAAFSANERPRHHHVMPHANMNVHYIPAEKNVDLCKEMVDGLRITFDYTLPLVLLYPYEQAQYKKVTSSKFFLPIKESATSTNRSQEELSPSPPLLNPSTPQSTESQPTTGEPATPKRRKAEPEALQSLRRSTRHSANCDRLSESSASPQPKRRQQDTSASMPKLFLHLEKKTPVHSRSSSPIPLTPSKEGSAVFAGFEGRRTNEINEVLSWKLVPDNYPPGDQPPPPSYIYGAQHLLRLFVKLPEILGKMSFSEKNLKALLKHFDLFLRFLAEYHDDFFPESAYVAACEAHYSTKNPRAIY

SEQ ID NO: 889494 - protein, 346 aa, Homo sapiens
RPPPATAHRLPAPARPPPPRALRPPRSLALRHDEQMSASEGMKFKFHSGEKVLCFEPDPTKARVLYDAKIVDVIVGKDEKGRKIPEYLIHFNGWNRSWDRWAAEDHVLRDTDENRRLQRKLARKAVARLRSTGRKKKRCRLPGVDSVLKGLPTEEKDENDENSLSSSSDCSENKDEEISEESDIEEKTEVKEEPELQTRREMEERTITIEIPEVLKKQLEDDCYYINRRKRLVKLPCQTNIITILESYVKHFAINAAFSANERPRHHHVMPHANMNVHYIPAEKNVDLCKEMVDGLRITFDYTLPLVLLYPYEQAQYKKEPGGTLSQSAFVESIHATVHRESADHR

SEQ ID NO: 889495 - protein, 100 aa, Homo sapiens
AAARELVLDRERPPAIYNSKRRKAEPEALQSLRRSTRHSANCDRLSESSASPQPKRRQQDTSASMPKLFLHLEKSRFILGCPRPGRASVYFVFSQCQAWC

SEQ ID NO: 889496 - protein, 451 aa, Homo sapiens; identical to SEQ ID NO: 889492

SEQ ID NO: 889497 - protein, 451 aa, Homo sapiens; identical to SEQ ID NO: 889492

SEQ ID NO: 889498 - protein, 290 aa, Homo sapiens
RPPPATAHRLPAPARPPPPRALRPPRSLALRHDEQMSASEGMKFKFHSGEKVLCFEPDPTKARVLYDAKIVDVIVGKDEKGRKIPEYLIHFNGWNRSWDRWAAEDHVLRDTDENRRLQRKLARKAVARLRSTGRKKKRCRLPGVDSVLKGLPTEEKDENDENSLSSSSDCSENKDEEISEESDIEEKTEVKEEPELQTRREMEERTITIEIPEVLKKQLEDDCYYINRRKRLVKLPCQTNIITILESYVKHFAINAAFSANERPRHHHVMPHANMNVHYIPAEKKSIFFS

SEQ ID NO: 889499 - protein, 355 aa, Homo sapiens
MEERTITIEIPEVLKKQLEDDCYYINRRKRLVKLPCQTNIITILESYVKHFAINAAFSANERPRHHHVMPHANMNVHYIPAEKNVDLCKEMVDGLRITFDYTLPLVLLYPYEQAQYKKVTSSKFFLPIKESATSTNRSQEELSPSPPLLNPSTPQSTESQPTTGEPATPKRRKAEPEALQSLRRSTRHSANCDRLSESSASPQPKRRQQDTSASMPKLFLHLEKKTPVHSRSSSPIPLTPSKEGSAVFAGFEGRRTNEINEVLSWKLVPDNYPPGDQPPPPSYIYGAQHLLRLFVKLPEILGKMSFSEKNLKALLKHFDLFLRFLAEYHDDFFPESAYVAACEAHYSTKNPRAIY

SEQ ID NO: 889500 - protein, 355 aa, Homo sapiens; identical to SEQ ID NO: 889499

SEQ ID NO: 889501 - protein, 457 aa, Homo sapiens
RPPPATAHRLPAPARPPPPRALRPPRSLALRHDEQMSASEGMKFKFHSGEKVLCFEPDPTKARVLYDAKIVDVIVGKDEKGRKIPEYLIHFNGWNRSWDRWAAEDHVLRDTDENRRLQRKLARKAVARLRSTGRKKKRCRLPGVDSVLKGLPTEEKDENDENSLSSSSDCSENKDEEISEESDIEEKTEVKEEPELQTRREMEERTITIEIPEVLKKQLEDDCYYINRRKRESATSTNRSQEELSPSPPLLNPSTPQSTESQPTTGEPATPKRRKAEPEALQSLRRSTRHSANCDRLSESSASPQPKRRQQDTSASMPKLFLHLEKKTPVHSRSSSPIPLTPSKEGSAVFAGFEGRRTNEINEVLSWKLVPDNYPPGDQPPPPSYIYGAQHLLRLFVKLPEILGKMSFSEKNLKALLKHFDLFLRFLAEYHDDFFPESAYVAACEAHYSTKNPRAIY

SEQ ID NO: 889502 - protein, 451 aa, Homo sapiens; identical to SEQ ID NO: 889492

SEQ ID NO: 889503 - protein, 364 aa, Homo sapiens
RPPPATAHRLPAPARPPPPRALRPPRSLALRHDEQMSASEGMKFKFHSGEKVLCFEPDPTKARVLYDAKIVDVIVGKDEKGRKIPEYLIHFNGWNRSWDRWAAEDHVLRDTDENRRLQRKLARKAVARLRSTGRKKKRCRLPGVDSVLKGLPTEEKDENDENSLSSSSDCSENKDEEISEESDIEEKTEVKEEPELQTRREMEERTITIEIPEVLKKQLEDDCYYINRRKRLVKLPCQTNIITILESYVKHFAINAAFSANERPRHHHVMPHANMNVHYIPAEKNVDLCKEMVDGLRITFDYTLPLVLLYPYEQAQYKKVTSSKFFLPIKESATSTNSPQRVSRPPVNQPPPKGAKLSQKHCSL

SEQ ID NO: 889504 - protein, 725 aa, Homo sapiens
RPFRLTQRRHLEGRAPAMERTAGKELALAPLQDWGEETEDGAVYSVSLRRQRSQRRSPAEGPGGSQAPSPIANTFLHYRTSKVRVLRAARLERLVGELVFGDREQDPSFMPAFLATYRTFVPTACLLGFLLPPMPPPPPPGVEIKKTAVQDLSFNKNLRCVSAGLLAAGPPSGFPRPPCPFGPGQCPNLSGLGGPGSAEAQKAEKLLEDFLEEAEREQEEEPPQVWTGPPRVAQTSDPDSSEACAEEEEGLMPQGPQLLDFSVDEVAEQLTLIDLELFSKVRLYECLGSVWSQRDRPGAAGASPTVRATVAQFNTVTGCVLGSVLGAPGLAAPQRAQRLEKWIRIAQRCRELRNFSSLRAILSALQSNPIYRLKRSWGAVSREPLSTFRKLSQIFSDENNHLSSREILFQEEATEGSQEEDNTPGSLPSKPPPGPVPYLGTFLTDLVMLDTALPDMLEGDLINFEKRRKEWEILARIQQLQRRCQSYTLSPHPPILAALHAQNQLTEEQSYRLSRVIEPPAASCPSSPRIRRRISLTKRLSAKLAREKSSSPSGSPGDPSSPTSSVSPGSPPSSPRSRDAPAGSPPASPGPQGPSTKLPLSLDLPSPRPFALPLGSPRIPLPAQQSSEARVIRVSIDNDHGNLYRSILLTSQDKAPSVVRRALQKHNVPQPWACDYQLFQVLPGDRVLLIPDNANVFYAMSPVAPRDFMLRRKEGTRNTLSVSPS

SEQ ID NO: 889505 - protein, 782 aa, Homo sapiens
RPFRLTQRRHLEGRAPAMERTAGKELALAPLQDWGEETEDGAVYSVSLRRQRSQRRSPAEGPGGSQAPSPIANTFLHYRTSKVRVLRAARLERLVGELVFGDREQDPSFMPAFLATYRTFVPTACLLGFLLPPMPPPPPPGSVANHNLRILHPRTPTGHPPPPPQVWNLETPPRPRALFLSPLLGSPFFTCWGASSQGRDQEDSGTRSELQQEPEVVSVLGSWLQDHPQDFRDPPAHSDLGSVRTFLGWAAPGSAEAQKAEKLLEDFLEEAEREQEEEPPQVWTGPPRVAQTSDPDSSEACAEEEEGLMPQGPQLLDFSVDEVAEQLTLIDLELFSKVRLYECLGSVWSQRDRPGAAGASPTVRATVAQFNTVTGCVLGSVLGAPGLAAPQRAQRLEKWIRIAQRCRELRNFSSLRAILSALQSNPIYRLKRSWGAVSREPLSTFRKLSQIFSDENNHLSSREILFQEEATEGSQEEDNTPGSLPSKPPPGPVPYLGTFLTDLVMLDTALPDMLEGDLINFEKRRKEWEILARIQQLQRRCQSYTLSPHPPILAALHAQNQLTEEQSYRLSRVIEPPAASCPSSPRIRRRISLTKRLSAKLAREKSSSPSGSPGDPSSPTSSVSPGSPPSSPRSRDAPAGSPPASPGPQGPSTKLPLSLDLPSPRPFALPLGSPRIPLPAQQSSEARVIRVSIDNDHGNLYRSILLTSQDKAPSVVRRALQKHNVPQPWACDYQLFQVLPGDRVLLIPDNANVFYAMSPVAPRDFMLRRKEGTRNTLSVSPS

SEQ ID NO: 889506 - protein, 690 aa, Homo sapiens
RPFRLTQRRHLEGRAPAMERTAGKELALAPLQDWGEETEDGAVYSVSLRRQRSQRRSPAEGPGGSQAPSPIANTFLHYRTSKVRVLRAARLERLVGELVFGDREQDPSFMPAFLATYRTFVPTACLLGFLLPPMPPPPPPGVEIKKTAVQDLSFNKNLRCVSAGLLAAGPPSGFPRPPCPFGPGQCPNLSGLGGPGSAEAQKAEKLLEDFLEEAEREQEEEPPQVWTGPPRVAQTSDPDSSEACAEEEEGLMPQGPQLLDFSVDEVAEQLTLIDLELFSKVRLYECLGSVWSQRDRPGAAGASPTVRATVAQFNTVTGCVLGSVLGAPGLAAPQRAQRWRSGSASPREPLSTFRKLSQIFSDENNHLSSREILFQEEATEGSQEEDNTPGSLPSKPPPGPVPYLGTFLTDLVMLDTALPDMLEGDLINFEKRRKEWEILARIQQLQRRCQSYTLSPHPPILAALHAQNQLTEEQSYRLSRVIEPPAASCPSSPRIRRRISLTKRLSAKLAREKSSSPSGSPGDPSSPTSSVSPGSPPSSPRSRDAPAGSPPASPGPQGPSTKLPLSLDLPSPRPFALPLGSPRIPLPAQQSSEARVIRVSIDNDHGNLYRSILLTSQDKAPSVVRRALQKHNVPQPWACDYQLFQVLPGDRVLLIPDNANVFYAMSPVAPRDFMLRRKEGTRNTLSVSPS

SEQ ID NO: 889507 - protein, 689 aa, Homo sapiens
RPFRLTQRRHLEGRAPAMERTAGKELALAPLQDWGEETEDGAVYSVSLRRQRSQRRSPAEGPGGSQAPSPIANTFLHYRTSKVRVLRAARLERLVGELVFGDREQDPSFMPAFLATYRTFVPTACLLGFLLPPMPPPPPPGVEIKKTAVQDLSFNKNLRCVSAGLLAAGPPSGFPRPPCPFGPGQCPNLSGLGGPGSAEAQKAEKLLEDFLEEAEREQEEEPPQVWTGPPRVAQTSDPDSSEACAEEEEGLMPQGPQLLDFSVDEVAEQLTLIDLELFSKVRLYECLGSVWSQRDRPGAAGASPTVRATVAQFNTVTGCVLGSVLGAPGLAAPQRAQRLEKWIRIAQRCRELRNFSSLRAILSALQSNPIYRLKRSWGAVSREPLSTFRKLSQIFSDENNHLSSREILFQEEATEGSQEEDNTPGSLPSKPPPGPVPYLGTFLTDLVMLDTALPDMLEGDLINFEKRRKEWEILARIQQLQRRCQSYTLSPHPPILAALHAQNQLTEEQSYRLSRVIEPPAASCPSSPRIRRRISLTKRLSAKLAREKSSSPSGSPGDPSSPTSSVSPGSPPSSPRSRDAPAGSPPASPGPQGPSTKLPLSLDLPSPRPFALPLGSPRIPLPAQQSSEARVIRVSIDNDHGNLYRSILLTSQDKAPSVVRRALQKHNVPQPWACDYQLFQVLPGDRGSQ

SEQ ID NO: 889508 - protein, 709 aa, Homo sapiens
RPFRLTQRRHLEGRAPAMERTAGKELALAPLQDWGEETEDGAVYSVSLRRQRSQRRSPAEGPGGSQAPSPIANTFLHYRTSKVRVLRAARLERLVGELVFGDREQDPSFMPAFLATYRTFVPTACLLGFLLPPMPPPPPPGVEIKKTAVQDLSFNKNLRCVSAGLLAAGPPSGFPRPPCPFGPGQCPNLSGLGGPGSAEAQKAEKLLEDFLEEAEREQEEEPPQVWTGPPRVAQTSDPDSSEACAEEEEGLMPQGPQLLDFSVDEVAEQLTLIDLELFSKVRLYECLGSVWSQRDRPGAAGASPTVRATVAQFNTVTGCVLGSVLGAPGLAAPQRAQRLEKWIRIAQRCRELRNFSSLRAILSALQSNPIYRLKRSWGAVSREPLSTFRKLSQIFSDENNHLSSREILFQEEATEGSQEEDNTPGSLPSKPPPGPVPYLGTFLTDLVMLDTALPDMLEGDLINFEKRRKEWEILARIQQLQRRCQSYTLSPHPPILAALHAQNQLTEEQSYRLSRVIEPPAASCPSSPRIRRRISLTKRLSAKLAREKSSSPSGSPGDPSSPTSSVSPGSPPSSPRSRDAPAGSPPASPGPQGPSTKLPLSLDLPSPRPFALPLGSPRIPLPAQQSSEARVIRVSIDNDHGNLYRSILLTSQDKAPSVVRRALQKHNVPQPWACDYQLFQVLPGDRVAPRDFMLRRKEGTRNTLSVSPS

SEQ ID NO: 889509 - protein, 715 aa, Homo sapiens
RPFRLTQRRHLEGRAPAMERTAGKELALAPLQDWGEETEDGAVYSVSLRRQRSQRRSPAEGPGGSQAPSPIANTFLHYRTSKVRVLRAARLERLVGELVFGDREQDPSFMPAFLATYRTFVPTACLLGFLLPPMPPPPPPGVEIKKTAVQDLSFNKNLRCVSAGLLAAGPPSGFPRPPCPFGPGQCPNLSGLGGPGSAEAQKAEKLLEDFLEEAEREQEEEPPQVWTGPPRVAQTSDPDSSEACAEEEEGLMPQGPQLLDFSVDEVAEQLTLIDLELFSKVRLYECLGSVWSQRDRPGAAGASPTVRATVAQFNTVTGCVLGSVLGAPGLAAPQRAQRLEKWIRIAQRCRELRNFSSLRAILSALQSNPIYRLKRSWGAVSREPLSTFRKLSQIFSDENNHLSSREILFQEEATEGSQEEDNTPGSLPSKPPPGPVPYLGTFLTDLVMLDTALPDMLEGDLINFEKRRKEWEILARIQQLQRRCQSYTLSPHPPILAALHAQNQLTEEQSYRLSRVIEPPAASCPSSPRIRRRISLTKRLSAKLAREKSSSPSGSPGDPSSPTSSVSPGSPPSSPRSRDAPAGSPPASPGPQGPSTKLPLSLDLPSPRPFALPLGSPRIPLPAQQSSEARVIRVSIDNDHGNLYRSILLTSQDKAPSVVRRALQKHNVPQPWACDYQLFQVLPGDRGWEEMLISAIKSVGTFFGMFAMCQARFYR

SEQ ID NO: 889510 - protein, 724 aa, Homo sapiens
RPFRLTQRRHLEGRAPAMERTAGKELALAPLQDWGEETEDGAVYSVSLRRQRSQRRSPAEGPGGSQAPSPIANTFLHYRTSKVRVLRAARLERLVGELVFGDREQDPSFMPAFLATYRTFVPTACLLGFLLPPMPPPPPPGVEIKKTAVQDLSFNKNLRCVSAGLLAAGPPSGFPRPPCPFGPGQCPNLSGLGGPGSAEAQKAEKLLEDFLEEAEREQEEEPPQVWTGPPRVAQTSDPDSSEACAEEEEGLMPQGPQLLDFSVDEVAEQLTLIDLELFSKVRLYECLGSVWSQRDRPGAAGASPTVRATVAQFNTVTGCVLGSVLGAPGLAAPQRAQRLEKWIRIAQRCRELRNFSSLRAILSALQSNPIYRLKRSWGAVSREPLSTFRKLSQIFSDENNHLSSREILFQEEATEGSQEEDNTPGSLPSKPPPGPVPYLGTFLTDLVMLDTALPDMLEGDLINFEKRRKEWEILARIQQLQRRCQSYTLSPHPPILAALHAQNQLTEEQSYRLSRVIEPPAASCPSSPRIRRRISLTKRLSAKLAREKSSSPSGSPGDPSSPTSSVSPGSPPSSPRSRDAPAGSPPASPGPQGPSTKLPLSLDLPSPRPFALPLGSPRIPLPAQQSSEARVIRVSIDNDHGNLYRSILLTSQDKAPSVVRRALQKHNVPQPWACDYQLFQVLPGDRGWEEMLISAIKSVGTFFGMFAMCQARFYRWEKTAPLHV

SEQ ID NO: 889511 - protein, 198 aa, Homo sapiens
RPFRLTQRRHLEGRAPAMERTAGKELALAPLQDWGEETEDGAVYSVSLRRQRSQRRSPAEGPGGSQAPSPIANTFLHYRTSKVRVLRAARLERLVGELVFGDREQDPSFMPAFLATYRTFVPTACLLGFLLPPMPPPPPPGSVANHNLRILHPRTPTWAPPSTSSGVEPGNTSQTQSPLPKPPSRFPLLHLLGGLFPG

SEQ ID NO: 889512 - protein, 459 aa, Homo sapiens
RPFRLTQRRHLEGRAPAMERTAGKELALAPLQDWGEETEDGAVYSVSLRRQRSQRRSPAEGPGGSQAPSPIANTFLHYRTSKVRVLRAARLERLVGELVFGDREQDPSFMPAFLATYRTFVPTACLLGFLLPPMPPPPPPGVEIKKTAVQDLSFNKNLRCVSAGLLAAGPPSGFPRPPCPFGPGQCPNLSGLGGPGSAEAQKAEKLLEDFLEEAEREQEEEPPQVWTGPPRVAQTSDPDSSEACAEEEEGLMPQGPQLLDFSVDEVAEQLTLIDLELFSKVRLYECLGSVWSQRDRPGAAGASPTVRATVAQFNTVTGCVLGSVLGAPGLAAPQRAQRLEKWIRIAQRCRELRNFSSLRAILSALQSNPIYRLKRSWGAVSREPLSTFRKLSQIFSDENNHLSSREILFQEEATEGSQEEDNTPGSLPSKPPPGPVPYLGTFLTDLVMLDTALPDMLEV

SEQ ID NO: 889513 - protein, 231 aa, Homo sapiens
RPFRLTQRRHLEGRAPAMERTAGKELALAPLQDWGEETEDGAVYSVSLRRQRSQRRSPAEGPGGSQAPSPIANTFLHYRTSKVRVLRAARLERLVGELVFGDREQDPSFMPAFLATYRTFVPTACLLGFLLPPMPPPPPPGSVANHNLRILHPRTPTGHPPPPPQGRDQEDSGTRSELQQEPEVAVVSVLGSWLQDHPQDFRDHPAHSDLGSVRTFLGWAAPGSAEAQKAE

SEQ ID NO: 889514 - protein, 978 aa, Homo sapiens
NSEKAGQRACSSWSSGRPGNLTLPSSCVVFVTALPLLLALKMEKMLAGCFLLILGQIVLLPAEARERSRGRSISRGRHARTHPQTALLESSCENKRADLVFIIDSSRSVNTHDYAKVKEFIVDILQFLDIGPDVTRVGLLQYGSTVKNEFSLKTFKRKSEVERAVKRMRHLSTGTMTGLAIQYALNIAFSEAEGARPLRENVPRVIMIVTDGRPQDSVAEVAAKARDTGILIFAIGVGQVDFNTLKSIGSEPHEDHVFLVANFSQIETLTSVFQKKLCTAHMCSTLEHNCAHFCINIPGSYVCRCKQGYILNSDQTTCRIQDLCAMEDHNCEQLCVNVPGSFVCQCYSGYALAEDGKRCVAVDYCASENHGCEHECVNADGSYLCQCHEGFALNPDEKTCTKIDYCASSNHGCQHECVNTDDSYSCHCLKGFTLNPDKKTCRRINYCALNKPGCEHECVNMEESYYCRCHRGYTLDPNGKTCSRVDHCAQQDHGCEQLCLNTEDSFVCQCSEGFLINEDLKTCSRVDYCLLSDHGCEYSCVNMDRSFACQCPEGHVLRSDGKTCAKLDSCALGDHGCEHSCVSSEDSFVCQCFEGYILREDGKTCRRKDVCQAIDHGCEHICVNSDDSYTCECLEGFRLAEDGKRCRRKDVCKSTHHGCEHICVNNGNSYICKCSEGFVLAEDGRRCKKCTEGPIDLVFVIDGSKSLGEENFEVVKQFVTGIIDSLTISPKAARVGLLQYSTQVHTEFTLRNFNSAKDMKKAVAHMKYMGKGSMTGLALKHMFERSFTQGEGARPLSTRVPRAAIVFTDGRAQDDVSEWASKAKANGITMYAVGVGKAIEEELQEIASEPTNKHLFYAEDFSTMDEISEKLKKGICEALEDSDGRQDSPAGELPKTVQQPTVQHRYLFEEDNLLRSTQKLSHSTKPSGSPLEEKHDQCKCENLIMFQNLANEEVRKLTQRLEEMTQRMEALENRLRYR

SEQ ID NO: 889515 - protein, 785 aa, Homo sapiens
HASPTRRTSSRSRAALAQAASERRERSGMGLGASGGGGDRGRGRSWGSVLASHERSPRRAAALGEAKRPTRKTLEHNCAHFCINIPGSYVCRCKQGYILNSDQTTCRIQDLCAMEDHNCEQLCVNVPGSFVCQCYSGYALAEDGKRCVAVDYCASENHGCEHECVNADGSYLCQCHEGFALNPDEKTCTKIDYCASSNHGCQHECVNTDDSYSCHCLKGFTLNPDKKTCRRINYCALNKPGCEHECVNMEESYYCRCHRGYTLDPNGKTCSRVDHCAQQDHGCEQLCLNTEDSFVCQCSEGFLINEDLKTCSRVDYCLLSDHGCEYSCVNMDRSFACQCPEGHVLRSDGKTCAKLDSCALGDHGCEHSCVSSEDSFVCQCFEGYILREDGKTCRRKDVCQAIDHGCEHICVNSDDSYTCECLEGFRLAEDGKRCRRKDVCKSTHHGCEHICVNNGNSYICKCSEGFVLAEDGRRCKKCTEGPIDLVFVIDGSKSLGEENFEVVKQFVTGIIDSLTISPKAARVGLLQYSTQVHTEFTLRNFNSAKDMKKAVAHMKYMGKGSMTGLALKHMFERSFTQGEGARPLSTRVPRAAIVFTDGRAQDDVSEWASKAKANGITMYAVGVGKAIEEELQEIASEPTNKHLFYAEDFSTMDEISEKLKKGICEALEDSDGRQDSPAGELPKTVQQPTESEPVTINIQDLLSCSNFAVQHRYLFEEDNLLRSTQKLSHSTKPSGSPLEEKHDQCKCENLIMFQNLANEEVRKLTQRLEEMTQRMEALENRLRYR

SEQ ID NO: 889516 - protein, 691 aa, Homo sapiens
MESWREKASVESEVQDLCAMEDHNCEQLCVNVPGSFVCQCYSGYALAEDGKRCVAVDYCASENHGCEHECVNADGSYLCQCHEGFALNPDEKTCTKIDYCASSNHGCQHECVNTDDSYSCHCLKGFTLNPDKKTCRRINYCALNKPGCEHECVNMEESYYCRCHRGYTLDPNGKTCSRVDHCAQQDHGCEQLCLNTEDSFVCQCSEGFLINEDLKTCSRVDYCLLSDHGCEYSCVNMDRSFACQCPEGHVLRSDGKTCAKLDSCALGDHGCEHSCVSSEDSFVCQCFEGYILREDGKTCRRKDVCQAIDHGCEHICVNSDDSYTCECLEGFRLAEDGKRCRRKDVCKSTHHGCEHICVNNGNSYICKCSEGFVLAEDGRRCKKCTEGPIDLVFVIDGSKSLGEENFEVVKQFVTGIIDSLTISPKAARVGLLQYSTQVHTEFTLRNFNSAKDMKKAVAHMKYMGKGSMTGLALKHMFERSFTQGEGARPLSTRVPRAAIVFTDGRAQDDVSEWASKAKANGITMYAVGVGKAIEEELQEIASEPTNKHLFYAEDFSTMDEISEKLKKGICEALEDSDGRQDSPAGELPKTVQQPTESEPVTINIQDLLSCSNFAVQHRYLFEEDNLLRSTQKLSHSTKPSGSPLEEKHDQCKCENLIMFQNLANEEVRKLTQRLEEMTQRMEALENRLRYR

SEQ ID NO: 889517 - protein, 1053 aa, Homo sapiens
MRRPRVGLVLDRERPSRRQPASEGSALGWDLEQAAAAETEAEAEAGAPSSPPTSDPRGEPRPSARRRGRRGRPGWLRPCLASQAPAAAALPLLLALKMEKMLAGCFLLILGQIVLLPAEARERSRGRSISRGRHARTHPQTALLESSCENKRADLVFIIDSSRSVNTHDYAKVKEFIVDILQFLDIGPDVTRVGLLQYGSTVKNEFSLKTFKRKSEVERAVKRMRHLSTGTMTGLAIQYALNIAFSEAEGARPLRENVPRVIMIVTDGRPQDSVAEVAAKARDTGILIFAIGVGQVDFNTLKSIGSEPHEDHVFLVANFSQIETLTSVFQKKLCTAHMCSTLEHNCAHFCINIPGSYVCRCKQGYILNSDQTTCRIQDLCAMEDHNCEQLCVNVPGSFVCQCYSGYALAEDGKRCVAVDYCASENHGCEHECVNADGSYLCQCHEGFALNPDEKTCTKIDYCASSNHGCQHECVNTDDSYSCHCLKGFTLNPDKKTCRRINYCALNKPGCEHECVNMEESYYCRCHRGYTLDPNGKTCSRVDHCAQQDHGCEQLCLNTEDSFVCQCSEGFLINEDLKTCSRVDYCLLSDHGCEYSCVNMDRSFACQCPEGHVLRSDGKTCAKLDSCALGDHGCEHSCVSSEDSFVCQCFEGYILREDGKTCRRKDVCQAIDHGCEHICVNSDDSYTCECLEGFRLAEDGKRCRRKDVCKSTHHGCEHICVNNGNSYICKCSEGFVLAEDGRRCKKCTEGPIDLVFVIDGSKSLGEENFEVVKQFVTGIIDSLTISPKAARVGLLQYSTQVHTEFTLRNFNSAKDMKKAVAHMKYMGKGSMTGLALKHMFERSFTQGEGARPLSTRVPRAAIVFTDGRAQDDVSEWASKAKANGITMYAVGVGKAIEEELQEIASEPTNKHLFYAEDFSTMDEISEKLKKGICEALEDSDGRQDSPAGELPKTVQQPTESEPVTINIQDLLSCSNFAVQHRYLFEEDNLLRSTQKLSHSTKPSGSPLEEKHDQCKCENLIMFQNLANEEVRKLTQRLEEMTQRMEALENRLRYR

SEQ ID NO: 889518 - protein, 597 aa, Homo sapiens
MRRPRVGLVLDRERPSRRQPASEGSALGWDLEQAAAAETEAEAEAGAPSSPPTSDPRGEPRPSARRRGRRGRPGWLRPCLASQAPAAAALPLLLALKMEKMLAGCFLLILGQIVLLPAEARERSRGRSISRGRHARTHPQTALLESSCENKRADLVFIIDSSRSVNTHDYAKVKEFIVDILQFLDIGPDVTRVGLLQYGSTVKNEFSLKTFKRKSEVERAVKRMRHLSTGTMTGLAIQYALNIAFSEAEGARPLRENVPRVIMIVTDGRPQDSVAEVAAKARDTGILIFAIGVGQVDFNTLKSIGSEPHEDHVFLVANFSQIETLTSVFQKKLCTAHMCSTLEHNCAHFCINIPGSYVCRCKQGYILNSDQTTCRIQDLCAMEDHNCEQLCVNVPGSFVCQCYSGYALAEDGKRCVAVDYCASENHGCEHECVNADGSYLCQCHEGFALNPDEKTCTKIDYCASSNHGCQHECVNTDDSYSCHCLKGFTLNPDKKTCRRINYCALNKPGCEHECVNMEESYYCRCHRGYTLDPNGKTCSRVDNVHNRNMAWSICVLTRGIPLSQLLGFLITRALRTGSRWFTVLSRYHGGTLWCWLF

SEQ ID NO: 889519 - protein, 997 aa, Homo sapiens
NSEKAGQRACSSWSSGRPGNLTLPSSCVVFVTALPLLLALKMEKMLAGCFLLILGQIVLLPAEARERSRGRSISRGRHARTHPQTALLESSCENKRADLVFIIDSSRSVNTHDYAKVKEFIVDILQFLDIGPDVTRVGLLQYGSTVKNEFSLKTFKRKSEVERAVKRMRHLSTGTMTGLAIQYALNIAFSEAEGARPLRENVPRVIMIVTDGRPQDSVAEVAAKARDTGILIFAIGVGQVDFNTLKSIGSEPHEDHVFLVANFSQIETLTSVFQKKLCTAHMCSTLEHNCAHFCINIPGSYVCRCKQGYILNSDQTTCRIQDLCAMEDHNCEQLCVNVPGSFVCQCYSGYALAEDGKRCVAVDYCASENHGCEHECVNADGSYLCQCHEGFALNPDEKTCTKIDYCASSNHGCQHECVNTDDSYSCHCLKGFTLNPDKKTCRRINYCALNKPGCEHECVNMEESYYCRCHRGYTLDPNGKTCSRVDHCAQQDHGCEQLCLNTEDSFVCQCSEGFLINEDLKTCSRVDYCLLSDHGCEYSCVNMDRSFACQCPEGHVLRSDGKTCAKLDSCALGDHGCEHSCVSSEDSFVCQCFEGYILREDGKTCRRKDVCQAIDHGCEHICVNSDDSYTCECLEGFRLAEDGKRCRRKDVCKSTHHGCEHICVNNGNSYICKCSEGFVLAEDGRRCKKCTEGPIDLVFVIDGSKSLGEENFEVVKQFVTGIIDSLTISPKAARVGLLQYSTQVHTEFTLRNFNSAKDMKKAVAHMKYMGKGSMTGLALKHMFERSFTQGEGARPLSTRVPRAAIVFTDGRAQDDVSEWASKAKANGITMYAVGVGKAIEEELQEIASEPTNKHLFYAEDFSTMDEISEKLKKGICEALEDSDGRQDSPAGELPKTVQQPTESEPVTINIQDLLSCSNFAVQHRYLFEEDNLLRSTQKLSHSTKPSGSPLEEKHDQCKCENLIMFQNLANEEVRKLTQRLEEMTQRMEALENRLRYR

SEQ ID NO: 889520 - protein, 1034 aa, Homo sapiens
MRRPRVGLVLDRERPSRRQPASEGSALGWDLEQAAAAETEAEAEAGAPSSPPTSDPRGEPRPSARRRGRRGRPGWLRPCLASQAPAAAALPLLLALKMEKMLAGCFLLILGQIVLLPAEARERSRGRSISRGRHARTHPQTALLESSCENKRADLVFIIDSSRSVNTHDYAKVKEFIVDILQFLDIGPDVTRVGLLQYGSTVKNEFSLKTFKRKSEVERAVKRMRHLSTGTMTGLAIQYALNIAFSEAEGARPLRENVPRVIMIVTDGRPQDSVAEVAAKARDTGILIFAIGVGQVDFNTLKSIGSEPHEDHVFLVANFSQIETLTSVFQKKLCTAHMCSTLEHNCAHFCINIPGSYVCRCKQGYILNSDQTTCRIQDLCAMEDHNCEQLCVNVPGSFVCQCYSGYALAEDGKRCVAVDYCASENHGCEHECVNADGSYLCQCHEGFALNPDEKTCTKIDYCASSNHGCQHECVNTDDSYSCHCLKGFTLNPDKKTCRRINYCALNKPGCEHECVNMEESYYCRCHRGYTLDPNGKTCSRVDHCAQQDHGCEQLCLNTEDSFVCQCSEGFLINEDLKTCSRVDYCLLSDHGCEYSCVNMDRSFACQCPEGHVLRSDGKTCAKLDSCALGDHGCEHSCVSSEDSFVCQCFEGYILREDGKTCRRKDVCQAIDHGCEHICVNSDDSYTCECLEGFRLAEDGKRCRRKDVCKSTHHGCEHICVNNGNSYICKCSEGFVLAEDGRRCKKCTEGPIDLVFVIDGSKSLGEENFEVVKQFVTGIIDSLTISPKAARVGLLQYSTQVHTEFTLRNFNSAKDMKKAVAHMKYMGKGSMTGLALKHMFERSFTQGEGARPLSTRVPRAAIVFTDGRAQDDVSEWASKAKANGITMYAVGVGKAIEEELQEIASEPTNKHLFYAEDFSTMDEISEKLKKGICEALEDSDGRQDSPAGELPKTVQQPTVQHRYLFEEDNLLRSTQKLSHSTKPSGSPLEEKHDQCKCENLIMFQNLANEEVRKLTQRLEEMTQRMEALENRLRYR

SEQ ID NO: 889521 - protein, 658 aa, Homo sapiens
GLEERVLVVVGTEAEEGKRCVAVDYCASENHGCEHECVNADGSYLCQCHEGFALNPDEKTCTKIDYCASSNHGCQHECVNTDDSYSCHCLKGFTLNPDKKTCRRINYCALNKPGCEHECVNMEESYYCRCHRGYTLDPNGKTCSRVDHCAQQDHGCEQLCLNTEDSFVCQCSEGFLINEDLKTCSRVDYCLLSDHGCEYSCVNMDRSFACQCPEGHVLRSDGKTCAKLDSCALGDHGCEHSCVSSEDSFVCQCFEGYILREDGKTCRRKDVCQAIDHGCEHICVNSDDSYTCECLEGFRLAEDGKRCRRKDVCKSTHHGCEHICVNNGNSYICKCSEGFVLAEDGRRCKKCTEGPIDLVFVIDGSKSLGEENFEVVKQFVTGIIDSLTISPKAARVGLLQYSTQVHTEFTLRNFNSAKDMKKAVAHMKYMGKGSMTGLALKHMFERSFTQGEGARPLSTRVPRAAIVFTDGRAQDDVSEWASKAKANGITMYAVGVGKAIEEELQEIASEPTNKHLFYAEDFSTMDEISEKLKKGICEALEDSDGRQDSPAGELPKTVQQPTESEPVTINIQDLLSCSNFAVQHRYLFEEDNLLRSTQKLSHSTKPSGSPLEEKHDQCKCENLIMFQNLANEEVRKLTQRLEEMTQRMEALENRLRYR

SEQ ID NO: 889522 - protein, 1005 aa, Homo sapiens
MRRPRVGLVLDRERPSRRQPASEGSALGWDLEQAAAAETEAEAEAGAPSSPPTSDPRGEPRPSARRRGRRGRPGWLRPCLASQAPAAAALPLLLALKMEKMLAGCFLLILGQIVLLPAEARERSRGRSISRGRHARTHPQTALLESSCENKRADLVFIIDSSRSVNTHDYAKVKEFIVDILQFLDIGPDVTRVGLLQYGSTVKNEFSLKTFKRKSEVERAVKRMRHLSTGTMTGLAIQYALNIAFSEAEGARPLRENVPRVIMIVTDGRPQDSVAEVAAKARDTGILIFAIGVGQVDFNTLKSIGSEPHEDHVFLVANFSQIETLTSVFQKKLCTAHMCSTLEHNCAHFCINIPGSYVCRCKQGYILNSDQTTCRIQDLCAMEDHNCEQLCVNVPGSFVCQCYSGYALAEDGKRCVAVDYCASENHGCEHECVNADGSYLCQCHEGFALNPDEKTCTKIDYCASSNHGCQHECVNTDDSYSCHCLKGFTLNPDKKTCRRINYCALNKPGCEHECVNMEESYYCRCHRGYTLDPNGKTCSRVDHCAQQDHGCEQLCLNTEDSFVCQCSEGFLINEDLKTCSRVDYCLLSDHGCEYSCVNMDRSFACQCPEGHVLRSDGKTCAKLDSCALGDHGCEHSCVSSEDSFVCQCFEGYILREDGKTCRRKDVCQAIDHGCEHICVNSDDSYTCECLEGFRLAEDGKRCRRKDVCKSTHHGCEHICVNNGNSYICKCSEGFVLAEDGRRCKKCTEGPIDLVFVIDGSKSLGEENFEVVKQFVTGIIDSLTISPKAARVGLLQYSTQVHTEFTLRNFNSAKDMKKAVAHMKYMGKGSMTGLALKHMFERSFTQGEGARPLSTRVPRAAIVFTDGRAQDDVSEWASKAKANGITMYAVGVGKAIEEELQEIASEPTNKHLFYAEDFSTMDEISEKLKKGICEALEDSDGRQDSPAGELPKTVQQPTESEPVTINIQDLLSCSNFAVQHRYLFEEDNLLRSTHLEFKKTGLEKNH

SEQ ID NO: 889523 - protein, 403 aa, Homo sapiens [sequence omitted]

SEQ ID NO: 889524 - protein, 458 aa, Homo sapiens
EEAGILTAELLEDLGPWVRDGLECNGVISAHCNLCFLGLSDSPASASRVAGITGIMDRSKENCISGPVKATAPVGGPKRVLVTQQFPCQNPLPVNSGQAQRVLCPSNSSQRVPLQAQKLVSSHKPVQNQKQKQLQATSVPHPVSRPLNNTQKSKQPLPSAPENNPEEELASKQKNEESKKRQWALEDFEIGRPLGKGKFGNVYLAREKQSKFILALKVLFKAQLEKAGVEHQLRREVEIQSHLRHPNILRLYGYFHDATRVYLILEYAPLGTVYRELQKLSKFDEQRTATYITELANALSYCHSKRVIHRDIKPENLLLGSAGELKIADFGWSVHAPSSRRTTLCGTLDYLPPEMIEGRMHDEKVDLWSLGVLCYEFLVGKPPFEANTYQETYKRISRVEFTFPDFVTEGARDLISRLLKHNPSQRPMLREVLEHPWITANSSKPSNCQNKESASKQS

SEQ ID NO: 889525 - protein, 403 aa, Homo sapiens [sequence omitted]

SEQ ID NO: 889526 - protein, 403 aa, Homo sapiens [sequence omitted]

SEQ ID NO: 889527 - protein, 403 aa, Homo sapiens [sequence omitted]

SEQ ID NO: 889528 - protein, 403 aa, Homo sapiens [sequence omitted]

SEQ ID NO: 889529 - protein, 403 aa, Homo sapiens [sequence omitted]

SEQ ID NO: 889530 - protein, 403 aa, Homo sapiens [sequence omitted]

SEQ ID NO: 889531 - protein, 403 aa, Homo sapiens [sequence omitted]

SEQ ID NO: 889532 - protein, 403 aa, Homo sapiens [sequence omitted]

SEQ ID NO: 889533 - protein, 403 aa, Homo sapiens [sequence omitted]

SEQ ID NO: 889534 - protein, 403 aa, Homo sapiens [sequence omitted]

SEQ ID NO: 889535 - protein, 403 aa, Homo sapiens [sequence omitted]

SEQ ID NO: 889536 - protein, 124 aa, Homo sapiens
PPSVFRRTTLCGTLDYLPPEMIEGRMHDEKVDLWSLGVLCYEFLVGKPPFEANTYQETYKRISRVEFTFPDFVTEGARDLISRLLKHNPSQRPMLREVLEHPWITANSSKPSNCQNKESASKQS

SEQ ID NO: 889537 - protein, 361 aa, Homo sapiens
MDRSKENCISGPVKATAPVGGPKRVLVTQQFPCQNPLPVNSGQAQRVLCPSNSSQRVPLQAQKLVSSHKPVQNQKQKQLQATSVPHPVSRPLNNTQKSKQPLPSAPENNPEEELASKQKNEESKKRQWALEDFEIGRPLGKGKFGNVYLAREKQSKFILALKVLFKAQLEKAGVEHQLRREVEIQSHLRHPNILRLYGYFHDATRVYLILEYAPLGTVYRELQKLSKFDEQRTATYITELANALSYCHSKRVIHRDIKPENLLLGSAGELKIADFGWSVHAPSSRRTTLCGTLDYLPPEMIEGELRKGTRAEEEQEKGSPWDTPDTRYGDTRWQGEPKGNPQAKIPENTTNDGEGAKRHNA

SEQ ID NO: 889538 - protein, 195 aa, Homo sapiens
MAAPPGEYFSVGSQVSCRTCQEQRLQGEVVAFDYQSKMLALKCPSSSGKPNHADILLINLQYVSEVEIINDRTETPPPLASLNVSKLASKARTEKEEKLSQAYAISAGVSLEGQQLFQTIHKTIKDCKWQEKNIVVMEEVVITPPYQVENCKGKEGSALSHVRKIVEKHFRDVESQKILQRSQAQQPQKEAALSS

SEQ ID NO: 889539 - protein, 195 aa, Homo sapiens; identical to SEQ ID NO: 889538

SEQ ID NO: 889540 - protein, 115 aa, Homo sapiens
MAAPPGEYFSVGSQVSCRTCQEQRLQGEVVAFDYQSKMLALKCPSSSGKPNHADILLINLQYVSEVEIINDRTETPPPLASLNVSKVLGNARMIKTPLLPSRISHLLGVVRDSSI

SEQ ID NO: 889541 - protein, 195 aa, Homo sapiens; identical to SEQ ID NO: 889538

SEQ ID NO: 889542 - protein, 186 aa, Homo sapiens
MAAPPGEYFSVGSQVSCRTCQEQRLQGEVVAFDYQSKMLALKCPSSSGKPNHADILLINLQYVSEVEIINDRTETPPPLASLNVSKLASKARTEKEEKLSQAYAISAGVSLEGQQLFQTIHKTIKDCKWQEKNIVVMEEVVITPPYQVENCKGKEGSALSHVRKIVERTFYETWKAEEILNITLQT

SEQ ID NO: 889543 - protein, 517 aa, Homo sapiens
MDFRTACEETKTGICLLQDGNQEPFKVRLHLAKDILMIQEQDVICVSGEPFYSGERTVTIRRQTVGGFGLSIKGGAEHNIPVVVSKISKEQRAELSGLLFIGDAILQINGINVRKCRHEEVVQVLRNAGEEVTLTVSFLKRAPAFLKLPLNEDCACAPSDQSSGTSSPLCDSGLHLNYHPNNTDTLSCSSWPTSPGLRWEKRWCDLRLIPLLHSRFSQYVPGTDLSRQNAFQVIAVDGVCTGIIQCLSAEDCVDWLQAIATNISNLTKHNIKKINRNFPVNQQIVYMGWCEAREQDPLQDRVYSPTFLALRGSCLYKFLAPPVTTWDWTRAEKTFSVYEIMCKILKDSDLLDRRKQCFTVQSESGEDLYFSVELESDLAQWERAFQTATFLEVERIQCKTYACVLESHLMGLTIDFSTGFICFDAATKAVLWRYKFSQLKGSSDDGKSKIKFLFQNPDTKQIEAKELEFSNLFAVLHCIHSFFAAKVACLDPLFLGNQATASTAASSATTSKAKYTT

SEQ ID NO: 889544 - protein, 480 aa, Homo sapiens
MDFRTACEETKTGICLLQDGNQEPFKVRLHLAKDILMIQEQDVICVSGEPFYSGERTVTIRRQTVGGFGLSIKGGAEHNIPVVVSKISKEQRAELSGLLFIGDAILQINGINVRKCRHEEVVQVLRNAGEEVTLTVSFLKRAPAFLKLPLNEDCACAPSDQSSGTSSPLCDSGLHLNYHPNNTDTLSCSSWPTSPGLRWEKRWCDLRLIPLLHSRFSQYVPGTDLSRQNAFQVIAVDGVCTGIIQCLSAEDCVDWLQAIATNISNLTKHNIKKINRNFPVNQQIVYMGWCEAREQDPLQDRVYSPTFLALRGSCLYKFLAPPVTTWDWTRAEKTFSVYEIMCKILKDSDLLDRRKQCFTVQSESGEDLYFSVELESDLAQWERAFQTATFLEVERIQCKTYACVLESHLMGLTIDFSTGFICFDAATKELEFSNLFAVLHCIHSFFAAKVACLDPLFLGNQATASTAASSATTSKAKYTT

SEQ ID NO: 889545 - protein, 102 aa, Homo sapiens
  misc_feature (11)..(11): Xaa can be any naturally occurring amino acid
MISVPFMYQRXLTDSDLLDRRKQCFTVQSESGEDLYFSVELESDLAQWERAFQTATFLEVERIQCKTYACVLESHLMGLTIDFSTGFICFDAATKVMCSGQL

SEQ ID NO: 889546 - protein, 435 aa, Homo sapiens
MDFRTACEETKTGICLLQDGNQEPFKVRLHLAKDILMIQEQDVICVSGEPFYSGERTVTIRRQTVGGFGLSIKGGAEHNIPVVVSKISKEQRAELSGLLFIGDAILQINGINVRKCRHEEVVQVLRNAGEEVTLTVSFLKRAPAFLKLPLNEDCACAPSDQSSGTSSPLCDSGLHLNYHPNNTDTLSCSSWPTSPGLRWEKRWCDLRLIPLLHSRFSQYVPGTDLSRQNAFQVIAVDGVCTGIIQCLSAEDCVDWLQAIATNISNLTKHNIKKINRNFPVNQQIVYMGWCEAREQDPLQDRVYSPTFLALRGSCLYKFLAPPVTTWDWTRAEKTFSVYEIMCKILKDSDLLDRRKQCFTVQSESGEDLYFSVELESDLAQWERAFQTATFLEVERIQCKTYACVLESHLMGLTIDFSTGFICFDAATKVMCSGQL

SEQ ID NO: 889547 - protein, 215 aa, Homo sapiens
FVLNICRQNAFQVIAVDGVCTGIIQCLSAEDCVDWLQAIATNISNLTKHNIKKINRNFPVNQQIVYMGWCEAREQDPLQDRVYSPTFLALRGSCLYKFLAPPVTTWDWTRAEKTFSVYEIMCKILKDSDLLDRRKQCFTVQSESGEDLYFSVELESDLAQWERAFQTATFLEVERIQCKTYACVLESHLMGLTIDFSTGFICFDAATKVMCSGQL

SEQ ID NO: 889548 - protein, 648 aa, Homo sapiens
MATAVEPEDQDLWEEEGILMVKLEDDFTCRPESVLQRDDPVLETSHQNFRRFRYQEAASPREALIRLRELCHQWLRPERRTKEQILELLVLEQFLTVLPGELQSWVRGQRPESGEEAVTLVEGLQKQPRRPRRWVTVHVHGQEVLSEETVHLGAEPESPNELQDPVQSSTPEQSPEETTQSPDLGAPAEQRPHQEEELQTLQESEVPVPEDPDLPAERSSGDSEMVALLTALSQGLVTFKDVAVCFSQDQWSDLDPTQKEFYGEYVLEEDCGIVVSLSFPIPRPDEISQVREEEPWVPDIQEPQETQEPEILSFTYTGDRSKDEEECLEQEDLSLEDIHRPVLGEPEIHQTPDWEIVFEDNPGRLNERRFGTNISQVNSFVNLRETTPVHPLLGRHHDCSVCGKSFTCNSHLVRHLRTHTGEKPYKCMECGKSYTRSSHLARHQKVHKMNAPYKYPLNRKNLEETSPVTQAERTPSVEKPYRCDDCGKHFRWTSDLVRHQRTHTGEKPFFCTICGKSFSQKSVLTTHQRIHLGGKPYLCGECGEDFSEHRRYLAHRKTHAAEELYLCSECGRCFTHSAAFAKHLRGHASVRPCRCNECGKSFSRRDHLVRHQRTHTGEKPFTCPTCGKSFSRGYHLIRHQRTHSEKTS

SEQ ID NO: 889549 - protein, 648 aa, Homo sapiens; identical to SEQ ID NO: 889548

SEQ ID NO: 889550 - protein, 67 aa, Homo sapiens
RPARPRAARIRRRCFGREWVGEKPGQGRSRRSCRSRDTQGSYTQKPQGMLVEPLIPPSFSSKLPRGA

SEQ ID NO: 889551 - protein, 648 aa, Homo sapiens; identical to SEQ ID NO: 889548

SEQ ID NO: 889552 - protein, 648 aa, Homo sapiens; identical to SEQ ID NO: 889548

SEQ ID NO: 889553 - protein, 648 aa, Homo sapiens; identical to SEQ ID NO: 889548

SEQ ID NO: 889554 - protein, 648 aa, Homo sapiens; identical to SEQ ID NO: 889548

SEQ ID NO: 889555 - protein, 648 aa, Homo sapiens; identical to SEQ ID NO: 889548

SEQ ID NO: 889556 - protein, 67 aa, Homo sapiens; identical to SEQ ID NO: 889550

SEQ ID NO: 889557 - protein, 551 aa, Homo sapiens
MSRQNLVALTVTTLLGVAVGGFVLWKGIQRRRRSKTSPVTQQPQQKVLGSRELPPPEDDQLHSSAPRSSWKERILKAKVVTVSQEAEWDQIEPLLRSELEDFPVLGIDCEWVNLEGKASPLSLLQMASPSGLCVLVRLPKLICGGKTLPRTLLDILADGTILKVGVGCSEDASKLLQDYGLVVRGCLDLRYLAMRQRNNLLCNGLSLKSLAETVLNFPLDKSLLLRCSNWDAETLTEDQVIYAARDAQISVALFLHLLGYPFSRNSPGEKNDDHSSWRKVLEKCQGVVDIPFRSKGMSRLGEEVNGEATESQQKPRNKKSKMDGMVPGNHQGRDPRKHKRKPLGVGYSARKSPLYDNCFLHAPDGQPLCTCDRRKAQWYLDKGIGELVSEEPFVVKLRFEPAGRPESPGDYYLMVKENLCVVCGKRDSYIRKNVIPHEYRKHFPIEMKDHNSHDVLLLCTSCHAISNYYDNHLKQQLAKEFQAPIGSEEGLRLLEDPERRQVRSGARALLNAESLPTQRKEELLQALREFYNTDVVTEEMLQEAASLETSQ

SEQ ID NO: 889558 - protein, 551 aa, Homo sapiens; identical to SEQ ID NO: 889557

SEQ ID NO: 889559 - protein, 426 aa, Homo sapiens
MASPSGLCVLVRLPKLICGGKTLPRTLLDILADGTILKVGVGCSEDASKLLQDYGLVVRGCLDLRYLAMRQRNNLLCNGLSLKSLAETVLNFPLDKSLLLRCSNWDAETLTEDQVIYAARDAQISVALFLHLLGYPFSRNSPGEKNDDHSSWRKVLEKCQGVVDIPFRSKGMSRLGEEVNGEATESQQKPRNKKSKMDGMVPGNHQGRDPRKHKRKPLGVGYSARKSPLYDNCFLHAPDGQPLCTCDRRKAQWYLDKGIGELVSEEPFVVKLRFEPAGRPESPGDYYLMVKENLCVVCGKRDSYIRKNVIPHEYRKHFPIEMKDHNSHDVLLLCTSCHAISNYYDNHLKQQLAKEFQAPIGSEEGLRLLEDPERRQVRSGARALLNAESLPTQRKEELLQALREFYNTDVVTEEMLQEAASLETSQ

SEQ ID NO: 889560 - protein, 238 aa, Homo sapiens
AFLYTSRTKQQLPATHFHPITGRKHKRKPLGVGYSARKSPLYDNCFLHAPDGQPLCTCDRRKAQWYLDKGIGELVSEEPFVVKLRFEPAGRPESPGDYYLMVKENLCVVCGKRDSYIRKNVIPHEYRKHFPIEMKDHNSHDVLLLCTSCHAISNYYDNHLKQQLAKEFQAPIGSEEGLRLLEDPERRQVRSGARALLNAESLPTQRKEELLQALREFYNTDVVTEEMLQEAASLETSQ

SEQ ID NO: 889561 - protein, 551 aa, Homo sapiens; identical to SEQ ID NO: 889557

SEQ ID NO: 889562 - protein, 155 aa, Homo sapiens
APRRDPLAPVAHGGAVQHPGAQGGPHPCPRPPTPSLGLSFRPPYPLPGRLYQTFEAACPSQLKRRPRPRHLVAPRALRVRRGNSSCFLSWIRVSRHPRYHPCPPRPHPALGLAGSHLFGFSHPWDGSKLRTLIIIYYKIDICSLKYKQTNPPISF

SEQ ID NO: 889563 - protein, 551 aa, Homo sapiens; identical to SEQ ID NO: 889557

SEQ ID NO: 889564 - protein, 436 aa, Homo sapiens
MASPSGLCVLVRLPKLICGGKTLPRTLLDILADGTILKVGVGCSEDASKLLQDYGLVVRGCLDLRYLAMRQRNNLLCNGLSLKSLAETVLNFPLDKSLLLRCSNWDAETLTEDQIPLISDFSLQVIYAARDAQISVALFLHLLGYPFSRNSPGEKNDDHSSWRKVLEKCQGVVDIPFRSKGMSRLGEEVNGEATESQQKPRNKKSKMDGMVPGNHQGRDPRKHKRKPLGVGYSARKSPLYDNCFLHAPDGQPLCTCDRRKAQWYLDKGIGELVSEEPFVVKLRFEPAGRPESPGDYYLMVKENLCVVCGKRDSYIRKNVIPHEYRKHFPIEMKDHNSHDVLLLCTSCHAISNYYDNHLKQQLAKEFQAPIGSEEGLRLLEDPERRQVRSGARALLNAESLPTQRKEELLQALREFYNTDVVTEEMLQEAASLETSQ

SEQ ID NO: 889565 - protein, 215 aa, Homo sapiens
MSRQNLVALTVTTLLGVAVGGFVLWKGIQRRRRSKTSPVTQQPQQKVLGSRELPPPEDDQLHSSAPRSSWKERILKAKVVTVSQEAEWDQIEPLLRSELEDFPVLGIDCEWVNLEGKASPLSLLQMASPSGLCVLVRLPKLICGGKTLPRFLASPLSESNVIFYQNQYQFPCILCFIEFARLTSFKHLIHSQSHLVRLQYEDFSVSSEAWDTELT

SEQ ID NO: 889566 - protein, 341 aa, Homo sapiens
MSRQNLVALTVTTLLGVAVGGFVLWKGIQRRRRSKTSPVTQQPQQKVLGSRELPPPEDDQLHSSAPRSSWKERILKAKVVTVSQEAEWDQIEPLLRSELEDFPVLGIDCEWVNLEGKASPLSLLQMASPSGLCVLVRLPKLICGGKTLPRTLLDILADGTILKVGVGCSEDASKLLQDYGLVVRGCLDLRYLAMRQRNNLLCNGLSLKSLAETVLNFPLDKSLLLRCSNWDAETLTEDQIYAARDAQISVASINIGVYRCHYNLCHPGSSDCLASASLVTGTTGAHHHARLFSFLNFLFLVETGLVSTKCCPGWSQTPGLKRSTLLGLPKCLGLQEWHSDK

SEQ ID NO: 889567 - protein, 495 aa, Homo sapiens
MSESGHSQPGLYGIERRRRWKEPGSGGPQNLSGPGGRERDYIAPWERERRDASEETSTSVMQKTPIILSKPPAERSKQPPPPTAPAAPPAPAPLEKPIVLMKPREEGKGPVAVTGASTPEGTAPPPPAAPAPPKGEKEGQRPTQPVYQIQNRGMGTAAPAAMDPVVGQAKLLPPERMKHSIKLVDDQMNWCDSAIEYLLDQTDVLVVGVLGLQGTGKSMVMSLLSANTPEEDQRTYVFRAQSAEMKERGGNQTSGIDFFITQERIVFLDTQPILSPSILDHLINNDRKLPPEYNLPHTYVEMQSLQIAAFLFTVCHVVIVVQDWFTDLSLYRFLQTAEMVKPSTPSPSHESSSSSGSDEGTEYYPHLVFLQNKARREDFCPRKLRQMHLMIDQLMAHSHLRYKGTLSMLQCNVFPGLPPDFLDSEVNLFLVPFMDSEAESENPPRAGPGSSPLFSLLPGYRGHPSFQSLVSKLRSQVMSMARPQLSHTILTEKNW

SEQ ID NO: 889568 - protein, 520 aa, Homo sapiens
MSESGHSQPGLYGIERRRRWKEPGSGGPQNLSGPGGRERDYIAPWERERRDASEETSTSVMQKTPIILSKPPAERSKQPPPPTAPAAPPAPAPLEKPIVLMKPREEGKGPVAVTGASTPEGTAPPPPAAPAPPKGEKEGQRPTQPVYQIQNRGMGTAAPAAMDPVVGQAKLLPPERMKHSIKLVDDQMNWCDSAIEYLLDQTDVLVVGVLGLQGTGKSMVMSLLSANTPEEDQRTYVFRAQSAEMKERGGNQTSGIDFFITQERIVFLDTQPILSPSILDHLINNDRKLPPEYNLPHTYVEMQSLQIAAFLFTVCHVVIVVQDWFTDLSLYRFLQTAEMVKPSTPSPSHESSSSSGSDEGTEYYPHLVFLQNKARREDFCPRKLRQMHLMIDQLMAHSHLRYKGTLSMLQCNVFPGLPPDFLDSEVNLFLVPFMDSEAESENPPRAGPGSSPLFSLLPGYRGHPSFQSLVSKLRSQVMSMARPQLSHTILTEKNWFHYAARIWDGVRKSSALAEYSRLLA

SEQ ID NO: 889569 - protein, 520 aa, Homo sapiens; identical to SEQ ID NO: 889568

SEQ ID NO: 889570 - protein, 520 aa, Homo sapiens; identical to SEQ ID NO: 889568

SEQ ID NO: 889571 - protein, 301 aa, Homo sapiens
  misc_feature (2)..(2): Xaa can be any naturally occurring amino acid
  misc_feature (7)..(8): Xaa can be any naturally occurring amino acid
SXNFGSXXTPEEDQRTYVFRAQSAEMKERGGNQTSGIDFFITQERIVFLDTQPILSPSILDHLINNDRKLPPEYNLPHTYVEMQSLQIAAFLFTVCHVVIVVQDWFTDLSLYRFLQTAEMVKPSTPSPSHESSSSSGSDEGTEYYPHLVFLQNKARREDFCPRKLRQMHLMIDQLMAHSHLRYKGTLSMLQCNVFPGLPPDFLDSEVNLFLVPFMDSEAESENPPRAGPGSSPLFSLLPGYRGHPSFQSLVSKLRSQVMSMARPQLSHTILTEKNWFHYAARIWDGVRKSSALAEYSRLLA

SEQ ID NO: 889572 - protein, 476 aa, Homo sapiens
MSESGHSQPGLYGIERRRRWKEPGSGGPQNLSGPGGRERDYIAPWERERRDASEETSTSVMQKTPIILSKPPAERSKQPPPPTAPAAPPAPAPLEKPIVLMKPREEGKGPVAVTGASTPEGTAPPPPAAPAPPKGEKEGQRPTQPVYQIQNRGMGTAAPAAMDPVVGQAKLLPPERMKHSIKLVDDQMNWCDSAIEYLLDQTDVLVVGVLGLQGTGKSMVMSLLSANTPEEDQRTYVFRAQSAEMKERGGNQTSGIDFFITQERIVFLDTQPILSPSILDHLINNDRKLPPEYNLPHTYVEMQSLQIAAFLFTVCHVVIVVQDWFTDLSLYRFLQTAEMVKPSTPSPSHESSSSSGSDEGTEYYPHLVFLQNKARREDFCPRKLRQMHLMIVASRPRDMRCPGPGPPPSVGAVPGVTVSDPTPNLRWGSPSCVLHRDKQWEESEWSPGSPGSILTSFFRDRSNRPLFPDSKPFPVR

SEQ ID NO: 889573 - protein, 145 aa, Homo sapiens
QPGLNSQVLLEAQDAVNWEKDPGSLSLLPSLPQLSRTWFQPTLLPAAWVSWPPQFPVLGEQAPEPSDVHGPATAVTHDPHREELVPLRCPDLGWGEKVLCSGRVQPPAGLRPRRGMSCRGPPGSAVYCEGAQMSIPRWGGERQQA

SEQ ID NO: 889574 - protein, 520 aa, Homo sapiens; identical to SEQ ID NO: 889568

SEQ ID NO: 889575 - protein, 420 aa, Homo sapiens [sequence omitted]

SEQ ID NO: 889576 - protein, 528 aa, Homo sapiens
MAAIDEEGGREIGDEVNILVKEQTQLGVKTLMRLLKEPEKERDSDSDFSPLQQTEGCQRRDKHFRHAENPHHPLKTSSRAAPLEKPIVLMKPREEGKGPVAVTGASTPEGTAPPPPAAPAPPKGEKEGQRPTQPVYQIQNRGMGTAAPAAMDPVVGQAKLLPPERMKHSIKLVDDQMNWCDSAIEYLLDQTDVLVVGVLGLQGTGKSMVMSLLSANTPEEDQRTYVFRAQSAEMKERGGNQTSGIDFFITQERIVFLDTQPILSPSILDHLINNDRKLPPEYNLPHTYVEMQSLQIAAFLFTVCHVVIVVQDWFTDLSLYRLWDLGCKCKSNSHSPQTPRFLQTAEMVKPSTPSPSHESSSSSGSDEGTEYYPHLVFLQNKARREDFCPRKLRQMHLMIDQLMAHSHLRYKGTLSMLQCNVFPGLPPDFLDSEVNLFLVPFMDSEAESENPPRAGPGSSPLFSLLPGYRGHPSFQSLVSKLRSQVMSMARPQLSHTILTEKNWFHYAARIWDGVRKSSALAEYSRLLA

SEQ ID NO: 889577 - protein, 286 aa, Homo sapiens
MSESGHSQPGLYGIERRRRWKEPGSGGPQNLSGPGGRERDYIAPWERERRDASEETSTSVMQKTPIILSKPPAERSKQPPPPTAPAAPPAPAPLEKPIVLMKPREEGKGPVAVTGASTPEGTAPPPPAAPAPPKGEKEGQRPTQPVYQIQNRGMGTAAPAAMDPVVGQAKLLPPERMKHSIKLVDDQMNWCDSAIEYLLDQTDVLVVGVLGLQGTGKSMVMSLLSANTPEEDQRTYVFRAQSAEMKERGGNQTSGIDFFITQERIVFLDTQVPAPPAFAPPCHILH

SEQ ID NO: 889578 - protein, 186 aa, Homo sapiens
MDADSDVALDILITNVVCVFRTRCHLNLRKIALEGANVIYKRDVGKVLMKLRKPRITATIWSSGKIICTGATSEEEAKFGARRLARSLQKLGFQVIFTDFKVVNVLAVCNMPFEIRLPEFTKNNRPHASYEPELHPAVCYRIKSLRATLQIFSTGSITVTGPNVKAVATAVEQIYPFVFESRKEIL

SEQ ID NO: 889579 - protein, 186 aa, Homo sapiens; identical to SEQ ID NO: 889578

SEQ ID NO: 889580 - protein, 186 aa, Homo sapiens; identical to SEQ ID NO: 889578

SEQ ID NO: 889581 - protein, 186 aa, Homo sapiens; identical to SEQ ID NO: 889578

SEQ ID NO: 889582 - protein, 178 aa, Homo sapiens
MDADSDVALDILITNVVCVFRTRCHLNLRKIALEGANVIYKRDVGKVLMKLRKPRITATIWSSGKIICTGATSEEEAKFGARRLARSLQKLGFQVIFTDFKVVNVLAVCNMPFEIRLPEFTKNNRPHASYEPELHPAVCYRIKSLRATLQIFSTGSITVTALCFYTLEHGCLRSHKAY

SEQ ID NO: 889583 - protein, 186 aa, Homo sapiens; identical to SEQ ID NO: 889578

SEQ ID NO: 889584 - protein, 163 aa, Homo sapiens
MDADSDVALDILITNVVCVFRTRCHLNLRKIALEGANVIYKRDVGKVLMKLRKPRITATIWSSGKIICTGATSEEEAKFGARRLARSLQKLGFQVIFTDFKVVNVLAVCNMPFEIRLPEFTKNNRPHASYEPELHPAVCYRIKSLRATLQIFSTGSITVTGIL

SEQ ID NO: 889585 - protein, 97 aa, Homo sapiens
AVTRFSLPRAAPLRPLPRDPEDALGPQGDGSNGPLCAPGVPRPLQGYLGAEPRRVSVPRGPPIPGCLSPRQHPPSPTPILPGSASRFPRDSPDRKPT

SEQ ID NO: 889586 - protein, 198 aa, Homo sapiens
MARLFSPRPPPSEDLFYETYYSLSQQYPLLLLLLGIVLCALAALLAVAWASGRELTSDPSFLTTVLCALGGFSLLLGLASREQRLQRWTRPLSGLVWVALLALGHAFLFTGGVVSAWDQVSYFLFVIFTAYAMLPLGMRDAAVAGLASSLSHLLVLGLYLGPQPDSRPALLPQVSTQVAQAALRTALPRASRLLLGGC

SEQ ID NO: 889587 - protein, 518 aa, Homo sapiens
MSCVKLWPSGAPAPLVSIEELENQELVGKGGFGTVFRAQHRKWGYDVAVKIVNSKAISREVKAMASLDNEFVLRLEGVIEKVNWDQDPKPALVTKFMENGSLSGLLQSQCPRPWPLLCRLLKEVVLGMFYLHDQNPVLLHRDLKPSNVLLDPELHVKLADFGLSTFQGGSQSGTGSGEPGGTLGYLAPELFVNVNRKASTASDVYSFGILMWAVLAGREVELPTEPSLVYEAVCNRQNRPSLAELPQAGPETPGLEGLKELMQLCWSSEPKDRPSFQECLPKTDEVFQMVENNMNAAVSTVKDFLSQLRSSNRRFSIPESGQGGTEMDGFRRTIENQHSRNDVMVSEWLNKLNLEEPPSSVPKKCPSLTKRSRAQEEQVPQAWTAGTSSDSMAQPPQTPETSTFRNQMPSPTSTGTPSPGPRGNQGAERQGMNWSCRTPEPNPVTGRPLVNIYNCSGVQVGDNNYLTMQQTTALPTWGLAPSGKGRGLQHPPPVGSQEGPKDPEAWSRPQGWYNHSGK

SEQ ID NO: 889588 - protein, 582 aa, Homo sapiens
MSCVKLWPSGAPAPLVSIEELENQELVGKGGFGTVFRAQHRKWGYDVAVKIVNSKAISREVKAMASLDNEFVLRLEGVIEKVNWDQDPKPALVTKFMENGSLSGLLQSQCPRPWPLLCRLLKEVVLGMFYLHDQNPVLLHRDLKPSNVLLDPELHVKLADFGLSTFQGGSQSGTGSGEPGGTLGYLAPELFVNVNRKASTASDVYSFGILMWAVLAGREVELPTEPSLVYEAVCNRQNRPSLAELPQAGPETPGLEGLKELMQLCWSSEPKDRPSFQECLPKTDEVFQMVENNMNAAVSTVKDFLSQLRSSNRRFSIPESGQGGTEMDGFRRTIENQHSRNDVMVSEWLNKLNLEEPPSSVPKKCPSLTKRSRAQEEQVPQAWTAGTSSDSMAQPPQTPETSTFRNQMPSPTSTGTPSPGPRGNQGAERQGMNWSCRTPEPNPVTGADLRPELPDHCAVRAGRLLAAAGPRFPGAATAALDASPVRLGMGRAASARPRLPVHRGRGERLGPGVLFSLRHLHGVCHAALGHAGRRRRGPRLLTLASAGPRAVSWATAGLTACTAAAGEHASSTGCAQDGSATC

SEQ ID NO: 889589 - protein, 567 aa, Homo sapiens
MASLDNEFVLRLEGVIEKVNWDQDPKPALVTKFMENGSLSGLLQSQCPRPWPLLCRLLKEVVLGMFYLHDQNPVLLHRDLKPSNVLLDPELHVKLADFGLSTFQGGSQSGTGSGEPGGTLGYLAPELFVNVNRKASTASDVYRKDPGPNTQPGFLHFSGPSQGMMYRKGVLPVIGPILSFVSPGSFGILMWAVLAGREVECKTLGGFWDPYTPGALLLKAPRLPLPAHLLRLPSSLLVPPHYSSLPLSMMKQIIPFYPECLLFSPSSPTPVPTEPSLVYEAVCNRQNRPSLAELPQAGPETPGLEGLKELMQLCWSSEPKDRPSFQECLPKTDEVFQMVENNMNAAVSTVKDFLSQLRSSNRRFSIPESGQGGTEMDGFRRTIENQHSRNDVMVSEWLNKLNLEEPPSSVPKKCPSLTKRSRAQEEQVPQAWTAGTSSDSMAQPPQTPETSTFRNQMPSPTSTGTPSPGPRGNQGAERQGMNWSCRTPEPNPVTGRPLVNIYNCSGVQVGDNNYLTMQQTTALPTWGLAPSGKGRGLQHPPPVGSQEGPKDPEAWSRPQGWYNHSGK

SEQ ID NO: 889590 - protein, 244 aa, Homo sapiens [sequence omitted]

SEQ ID NO: 889591 - protein, 133 aa, Homo sapiens
MDRETTPLGLLWLIQVIPSKLLPSLQVKDFLSQLRSSNRRFSIPESGQGGTEMDGFRRTIENQHSRNDVMVSEWLNKLNLEEPPSSVPKKCPSLTKRSRAQEEQVPQAWTAGTSSDSMAQPPQTPETGLRDKA

SEQ ID NO: 889592 - protein, 128 aa, Homo sapiens
MARLFSPRPPPSEDLFYETYYSLSQQYPLLLLLLGIVLCALAALLAVAWASGRVTEPLLREGLYLGSIFGVGVCGVFFSMCFRCWEQRKKGPLSLARNCSDPGQVTLPFWVCSGRKLSPGCFSFLSGF

SEQ ID NO: 889593 - protein, 181 aa, Homo sapiens
MSCVKLWPSGAPAPLVSIEELENQELVGKGGFGTVFRAQHRKWGYDVAVKIVNSKAISREVKAMASLDNEFVLRLEGVIEKVNWDQDPKPALVTKFMENGSLSGLLQSQCPRPWPLLCRLLKEVVLGMFYLHDQNPVLLHRDLKPSNVLLDPELHVKVSWSTPLSASRQGPRAAPARPAGH

SEQ ID NO: 889594 - protein, 518 aa, Homo sapiens; identical to SEQ ID NO: 889587

SEQ ID NO: 889595 - protein, 597 aa, Homo sapiens
MAKGGIFPRPRCDSSSLLECRKAISREVKAMASLDNEFVLRLEGVIEKVNWDQDPKPALVTKFMENGSLSGLLQSQCPRPWPLLCRLLKEVVLGMFYLHDQNPVLLHRDLKPSNVLLDPELHVKLADFGLSTFQGGSQSGTGSGEPGGTLGYLAPELFVNVNRKASTASDVYRKDPGPNTQPGFLHFSGPSQGMMYRKGVLPVIGPILSFVSPGSFGILMWAVLAGREVECKTLGGFWDPYTPGALLLKAPRLPLPAHLLRLPSSLLVPPHYTSLPLSMMKQIIPFYPECLLFSPSSPTPVPTEPSLVYEAVCNRQNRPSLAELPQAGPETPGLEGLKELMQLCWSSEPKDRPSFQECLPKTDEVFQMVENNMNAAVSTVKDFLSQLRSSNRRFSIPESGQGGTEMDGFRRTIENQHSRNDVMVSEWLNKLNLEEPPSSVPKKCPSLTKRSRAQEEQVPQAWTAGTSSDSMAQPPQTPETSTFRNQMPSPTSTGTPSPGPRGNQGAERQGMNWSCRTPEPNPVTGRPLVNIYNCSGVQVGDNNYLTMQQTTALPTWGLAPSGKGRGLQHPPPVGSQEGPKDPEAWSRPQGWYNHSGK

SEQ ID NO: 889596 - protein, 318 aa, Homo sapiens [sequence omitted]

SEQ ID NO: 889597 - protein, 156 aa, Homo sapiens
MQAKMNSDNGNAGPDQDSELLSDNHILTTIGDIFGAGVETTTSVVKWTLAFLLHNASEKLYEEIDQNVGFSRTPTISDRNRLLLLEATIREVLRLRPVAPMLIPHKANVDIQEFAVDKGTEVIINLWALHHNEKEWHQPDQFMPERFLNPAGTQLI

SEQ ID NO: 889598 - protein, 97 aa, Homo sapiens
MRLSKEGSTKSQTHFSSSTLEQHRSSVSYLPFGAGPRSCIGEILARQELFLIMAWLLQRFDLEVPDDGQLPSLEGIPKVVFLIDSFKVKIKVRQAWR

SEQ ID NO: 889599 - protein, 73 aa, Homo sapiens
MRGHEAEARKGVRSPRPTFPLPLWSSIGEFAVDKGTEVIINLWALHHNEKEWHQPDQFMPERFLNPAGTQLIS

SEQ ID NO: 889600 - protein, 1594 aa, Homo sapiens
MPKIIQTVGGGAVQERAPELDGGGPTEQDKSHSNSSTLSDRRLSNSSLCSIEEEHRMVYEMVQRILLSTRGYVNFVNEVFHQAFLLPSCEIAVTRKVVQVYRKWILQDKPVFMEEPDRKDVAQEDAEKLGFSETDSKEASSESSGHKRSSSWGRTYSFTSAMSRGCVTEEENTNVKAGVQALLQVFLTNSANIFLLEPCAEVPVLLKEQVDACKAVLIIFRRMIMELTMNKKTWEQMLQILLRITEAVMQKPKDKRIKDLFAQSLAGLLFRTLMVAWIRANLCVYISRELWDDFLGVLSSLTEWEELINEWANIMDSLTAVLARTVYGVEMTNLPLDKLSEQKEKKQRGKGCVLDPQKGTTVGRSFSLSWRSHPDVTEPMRFRSATTSGAPGVEKARNIVRQKATEVEECQQSENAPAAGSGHLTVGQQQQVLRSSSTSDIPEPLCSDSSQGQKAENTQNSSSSEPQPIQENKGHVKREHEGITILVRRSSSPAELDLKDDLQQTQGKCRERQKSESTNSDTTLGCTNEAELSMGPWQTCEEDPELNTPTDVVADADARHWLQLSPTDASNLTDSSECLTDDCSIIAGGSLTGWHPDSAAVLWRRVLGILGDVNNIQSPKIHARVFCYLYELWYKLAKIRDNLAISLDNQSSPSPPVLIPPLRMFASWLFKAATLPNEYKEGKLQAYRLICAMMTRRQDVLPNSDFLVHFYLVMHLGLTSEDQDILNTIIRHCPPRFFSLGFPGFSMLVGDFITAAARVLSTDILTAPRSEAVTVLGSLVCFPNTYQEIPLLQSVPEVNEAITGTEDVKHYLINILLKNATEEPNEYARCIAVCSLGVWICEELAQCTSHPQVKEAINVIGVTLKFPNKIVAQVACDVLQLLVSYWEKLQMFETSLPRKMAEILVATVAFLLPSAEYSSVETDKKFIVSLLLCLLDWCMALPVSVLLHPVSTAVLEEQHSARAPLLDYIYRVLHCCVCGSSTYTQQSHYILTLADLSSTDYDPFLPLANVKSSEPVQYHSSAELGNLLTVEEEKKRRSLELIPLTARMVMAHLVNHLGHYPLSGGPAILHSLVSENHDNAHVEGSELSFEVFRSPNLQLFVFNDSTLISYLQTPTEGPVGGSPVGSLSDVRVIVRDISGKYSWDGKVLYGPLEGCLAPNGRNPSFLISSWHRDTFGPQKDSSQVEEGDDVLDKLLENIGHTSPECLLPSQLNLNEPSLTPCGMNYDQEKEIIEVILRQNAQEDEYIQSHNFDSAMKVTSQGQPSPVEPRGPFYFCRLLLDDLGMNSWDRRKNFHLLKKNSKLLRELKNLDSRQCRETHKIAVFYIAEGQEDKCSILSNERGSQAYEDFVAGLGWEVDLSTHCGFMGGLQRNGSTGQTAPYYATSTVEVIFHVSTRMPSDSDDSLTKKLRHLGNDEVHIVWSEHSRDYRRGIIPTAFGDVSIIIYPMKNHMFFIAITKKPEVPFFGPLFDGAIVSGKLLPSLVCATCINASRAVKCLIPLYQSFYEERALYLEAIIQNHREVMTFEDFAAQVFSPSPSYSLSGTGALASSLSADLEEPLSEEETEHPLLPLPRATKPRISRKFRCCTSALSRSSH

SEQ ID NO: 889601 - protein, 1506 aa, Homo sapiens
MPKIIQTVGGGAVQERAPELDGGGPTEQDKSHSNSSTLSDRRLSNSSLCSIEEEHRMVYEMVQRILLSTRGYVNFVNEVFHQAFLLPSCEIAVTRKVVQVYRKWILQDKPVFMEEPDRKDVAQEDAEKLGFSETDSKEASSESSGHKRSSSWGRTYSFTSAMSRGCVTEEENTNVKAGVQALLQVFLTNSANIFLLEPCAEVPVLLKEQVDACKAVLIIFRRMIMELTMNKKTWEQMLQILLRITEAVMQKPKDKRIKDLFAQSLAGLLFRTLMVAWIRANLCVYISRELWDDFLGVLSSLTEWEELINEWANIMDSLTAVLARTVYGVEMTNLPLDKLSEQKEKKQRGKGCVLDPQKGTTVGRSFSLSWRSHPDVTEPMRFRSATTSGAPGVEKARNIVRQKATEVEECQQSENAPAAGSGHLTVGQQQQVLRSSSTSDIPEPLCSDSSQGQKAENTQNSSSSEPQPIQENKGHVKREHEGITILVRRSSSPAELDLKDDLQQTQGKCRERQKSESTNSDTTLGCTNEAELSMGPWQTCEEDPELNTPTDVVADADARHWLQLSPTDASNLTDSSECLTDDCSIIAGGSLTGWHPDSAAVLWRRVLGILGDVNNIQSPKIHARVFCYLYELWYKLAKIRDNLAISLDNQSSPSPPVLIPPLRMFASWLFKAATLPNEYKEGKLQAYRLICAMMTRRQDVLPNSDFLVHFYLVMHLGLTSEDQDILNTIIRHCPPRFFSLGFPGFSMLVGDFITAAARVLSTDILTAPRSEAVTVLGSLVCFPNTYQEIPLLQSVPEVNEAITGTEDVKHYLINILLKNATEEPNEYARCIAVCSLGVWICEELAQCTSHPQVKEAINVIGVTLKFPNKIVAQVACDVLQLLVSYWEKLQMFETSLPRKMAEILVATVAFLLPSAEYSSVETDKKFIVSLLLCLLDWCMALPVSVLLHPVSTAVLEEQHSARAPLLDYIYRVLHCCVCGSSTYTQQSHYILTLADLSSTDYDPFLPLANVKSSEPVQYHSSAELGNLLTVEEEKKRRSLELIPLTARMVMAHLVNHLGHYPLSGGPAILHSLVSENHDNAHVEGSELSFEVFRSPNLQLFVFNDSTLISYLQTPTEGPVGGSPVGSLSDVRVIVRDISGKYSWDGKVLYGPLEGCLAPNGRNPSFLISSWHRDTFGPQKDSSQVEEGDDVLDKLLENIGHTSPECLLPSQLNLNEPSLTPCGMNYDQEKEIIEVILRQNAQEDEYIQSHNFDSAMKVTSQGQPSPVEPRGPFYFCRLLLDDLGMNSWDRRKNFHLLKKNSKLLRELKNLDSRQCRETHKIAVFYIAEGQEDKCSILSNERGSQAYEDFVAGLGWEVDLSTHCGFMGGLQRNGSTGQTAPYYATSTVEVIFHVSTRMPSDSDDSLTKKLRHLGNDEVHIVWSEHSRDYRRGIIPTAFGDVSIIIYPMKNHMFFIAITKKPEVPFFGPLFDGAIVSGKLLPSLVCATCINASRAVKCLIPLYQSLRVR

SEQ ID NO: 889602 - protein, 1544 aa, Homo sapiens
MPKIIQTVGGGAVQERAPELDGGGPTEQDKSHSNSSTLSDRRLSNSSLCSIEEEHRMVYEMVQRILLSTRGYVNFVNEVFHQAFLLPSCEIAVTRKVVQVYRKWILQDKPVFMEEPDRKDVAQEDAEKLGFSETDSKEASSESSGHKRSSSWGRTYSFTSAMSRGCVTEEENTNVKAGVQALLQVFLTNSANIFLLEPCAEVPVLLKEQVDACKAVLIIFRRMIMELTMNKKTWEQMLQILLRITEAVMQKPKDKRIKDLFAQSLAGLLFRTLMVAWIRANLCVYISRELWDDFLGVLSSLTEWEELINEWANIMDSLTAVLARTVYGVEMTNLPLDKLSEQKEKKQRGKGCVLDPQKGTTVGRSFSLSWRSHPDVTEPMRFRSATTSGAPGVEKARNIVRQKATEVEECQQSENAPAAGSGHLTVGQQQQVLRSSSTSDIPEPLCSDSSQGQKAENTQNSSSSEPQPIQENKGHVKREHEGITILVRRSSSPAELDLKDDLQQTQGKCRERQKSESTNSDTTLGCTNEAELSMGPWQTCEEDPELNTPTDVVADADARHWLQLSPTDASNLTDSSECLTDDCSIIAGGSLTGWHPDSAAVLWRRVLGILGDVNNIQSPKIHARVFCYLYELWYKLAKIRDNLAISLDNQSSPSPPVLIPPLRMFASWLFKAATLPNEYKEGKLQAYRLICAMMTRRQDVLPNSDFLVHFYLVMHLGLTSEDQDILNTIIRHCPPRFFSLGFPGFSMLVGDFITAAARVLSTDILTAPRSEAVTVLGSLVCFPNTYQEIPLLQSVPEVNEAITGTEDVKHYLINILLKNATEEPNEYARCIAVCSLGVWICEELAQCTSHPQVKEAINVIGVTLKFPNKIVAQVACDVLQLLVSYWEKLQMFETSLPRKMAEILVATVAFLLPSAEYSSVETDKKFIVSLLLCLLDWCMALPVSVLLHPVSTAVLEEQHSARAPLLDYIYRVLHCCVCGSSTYTQQSHYILTLADLSSTDYDPFLPLANVKSSEPVQYHSSAELGNLLTVEEEKKRRSLELIPLTARMVMAHLVNHLGHYPLSGGPAILHSLVSENHDNAHVEGSELSFEVFRSPNLQLFVFNDSTLISYLQTPTEGPVGGSPVGSLSDVRVIVRDISGKYSWDGKVLYGPLEGCLAPNGRNPSFLISSWHRDTFGPQKDSSQVEEGDDVLDKLLENIGHTSPECLLPSQLNLNEPSLTPCGMNYDQEKEIIEVILRQNAQEDEYIQSHNFDSAMKVTSQGQPSPVEPRGPFYFCRLLLDDLGMNSWDRRKNFHLLKKNSKLLRELKNLDSRQCRETHKIAVFYIAEGQEDKCSILSNERGSQAYEDFVAGLGWEVDLSTHCGFMGGLQRNGSTGQTAPYYATSTVEVIFHVSTRMPSDSDDSLTKKLRHLGNDEVHIVWSEHSRDYRRGIIPTAFGDVSIIIYPMKNHMFFIAITKKPEVPFFGPLFDGAIVSGKLLPSLVCATCINASRAVKCLIPLYQSFYEERALYLEAIIQNHREVMTFEDFAAQVFSPSPSYSLSGTD

SEQ ID NO: 889603 - protein, 1510 aa, Homo sapiens
MPKIIQTVGGGAVQERAPELDGGGPTEQDKSHSNSSTLSDRRLSNSSLCSIEEEHRMVYEMVQRILLSTRGYVNFVNEVFHQAFLLPSCEIAVTRKVVQVYRKWILQDKPVFMEEPDRKDVAQEDAEKLGFSETDSKEASSESSGHKRSSSWGRTYSFTSAMSRGCVTEEENTNVKAGVQALLQVFLTNSANIFLLEPCAEVPVLLKEQVDACKAVLIIFRRMIMELTMNKKTWEQMLQILLRITEAVMQKPKDKRIKDLFAQSLAGLLFRTLMVAWIRANLCVYISRELWDDFLGVLSSLTEWEELINEWANIMDSLTAVLARTVYGVEMTNLPLDKLSEQKEKKQRGKGCVLDPQKGTTVGRSFSLSWRSHPDVTEPMRFRSATTSGAPGVEKARNIVRQKATEVEECQQSENAPAAGSGHLTVGQQQQVLRSSSTSDIPEPLCSDSSQGQKAENTQNSSSSEPQPIQENKGHVKREHEGITILVRRSSSPAELDLKDDLQQTQGKCRERQKSESTNSDTTLGCTNEAELSMGPWQTCEEDPELNTPTDVVADADARHWLQLSPTDASNLTDSSECLTDDCSIIAGGSLTGWHPDSAAVLWRRVLGILGDVNNIQSPKIHARVFCYLYELWYKLAKIRDNLAISLDNQSSPSPPVLIPPLRMFASWLFKAATLPNEYKEGKLQAYRLICAMMTRRQDVLPNSDFLVHFYLVMHLGLTSEDQDILNTIIRHCPPRFFSLGFPGFSMLVGDFITAAARVLSTDILTAPRSEAVTVLGSLVCFPNTYQEIPLLQSVPEVNEAITGTEDVKHYLINILLKNATEEPNEYARCIAVCSLGVWICEELAQCTSHPQVKEAINVIGVTLKFPNKIVAQVACDVLQLLVSYWEKLQMFETSLPRKMAEILVATVAFLLPSAEYSSVETDKKFIVSLLLCLLDWCMALPVSVLLHPVSTAVLEEQHSARAPLLDYIYRVLHCCVCGSSTYTQQSHYILTLADLSSTDYDPFLPLANVKSSEPVQYHSSAELGNLLTVEEEKKRRSLELIPLTARMVMAHLVNHLGHYPLSGGPAILHSLVSENHDNAHVEGSELSFEVFRSPNLQLFVFNDSTLISYLQTPTEGPVGGSPVGSLSDVRVIVRDISGKYSWDGKVLYGPLEGCLAPNGRNPSFLISSWHRDTFGPQKDSSQVEEGDDVLDKLLENIGHTSPECLLPSQLNLNEPSLTPCGMNYDQEKEIIEVILRQNAQEDEYIQSHNFDSAMKVTSQGQPSPVEPRGPFYFCRLLLDDLGMNSWDRRKNFHLLKKNSKLLRELKNLDSRQCRETHKIAVFYIAEGQEDKCSILSNERGSQAYEDFVAGLGWEVDLSTHCGFMGGLQRNGSTGQTAPYYATSTVEVIFHVSTRMPSDSDDSLTKKLRHLGNDEVHIVWSEHSRDYRRGIIPTAFGDVSIIIYPMKNHMFFIAITKKPEVPFFGPLFDGAIVSGKLLPSLVCATCINASRAVKCLIPLYQSLYLFALNV

SEQ ID NO: 889604 - protein, 1476 aa, Homo sapiens
MPKIIQTVGGGAVQERAPELDGGGPTEQDKSHSNSSTLSDRRLSNSSLCSIEEEHRMVYEMVQRILLSTRGYVNFVNEVFHQAFLLPSCEIAVTRKVVQVYRKWILQDKPVFMEEPDRKDVAQEDAEKLGFSETDSKEASSESSGHKRSSSWGRTYSFTSAMSRGCVTEEENTNVKAGVQALLQVFLTNSANIFLLEPCAEVPVLLKEQVDACKAVLIIFRRMIMELTMNKKTWEQMLQILLRITEAVMQKPKDKRIKDLFAQSLAGLLFRTLMVAWIRANLCVYISRELWDDFLGVLSSLTEWEELINEWANIMDSLTAVLARTVYGVEMTNLPLDKLSEQKEKKQRGKGCVLDPQKGTTVGRSFSLSWRSHPDVTEPMRFRSATTSGAPGVEKARNIVRQKATEVEECQQSENAPAAGSGHLTVGQQQQVLRSSSTSDIPEPLCSDSSQGQKAENTQNSSSSEPQPIQENKGHVKREHEGITILVRRSSSPAELDLKDDLQQTQGKCRERQKSESTNSDTTLGCTNEAELSMGPWQTCEEDPELNTPTDVVADADARHWLQLSPTDASNLTDSSECLTDDCSIIAGGSLTGWHPDSAAVLWRRVLGILGDVNNIQSPKIHARVFCYLYELWYKLAKIRDNLAISLDNQSSPSPPVLIPPLRMFASWLFKAATLPNEYKEGKLQAYRLICAMMTRRQDVLPNSDFLVHFYLVMHLGLTSEDQDILNTIIRHCPPRFFSLGFPGFSMLVGDFITAAARVLSTDILTAPRSEAVTVLGSLVCFPNTYQEIPLLQSVPEVNEAITGTEDVKHYLINILLKNATEEPNEYARCIAVCSLGVWICEELAQCTSHPQVKEAINVIGVTLKFPNKIVAQVACDVLQLLVSYWEKLQMFETSLPRKMAEILVATVAFLLPSAEYSSVETDKKFIVSLLLCLLDWCMALPVSVLLHPVSTAVLEEQHSARAPLLDYIYRVLHCCVCGSSTYTQQSHYILTLADLSSTDYDPFLPLANVKSSEPVQYHSSAELGNLLTVEEEKKRRSLELIPLTARMVMAHLVNHLGHYPLSGGPAILHSLVSENHDNAHVEGSELSFEVFRSPNLQLFVFNDSTLISYLQTPTEGPVGGSPVGSLSDVRVIVRDISGKYSWDGKVLYGPLEGCLAPNGRNPSFLISSWHRDTFGPQKDSSQVEEGDDVLDKLLENIGHTSPECLLPSQLNLNEPSLTPCGMNYDQEKEIIEVILRQNAQEDEYIQSHNFDSAMKVTSQGQPSPVEPRGPFYFCRLLLDDLGMNSWDRRKNFHLLKKNSKLLRELKNLDSRQCRETHKIAVFYIAEGQEDKCSILSNERGSQAYEDFVAGLGWEVDLSTHCGFMGGLQRNGSTGQTAPYYATSTVEVIFHVSTRMPSDSDDSLTKKLRHLGNDEVHIVWSEHSRDYRRGIIPTAFGDVSIIIYPMKNHMFFIAITKKPEVRFHCIVVLTHKAFAM

SEQ ID NO: 889605 - protein, 357 aa, Homo sapiens
MPKIIQTVGGGAVQERAPELDGGGPTEQDKSHSNSSTLSDRRLSNSSLCSIEEEHRMVYEMVQRILLSTRGYVNFVNEVFHQAFLLPSCEIAVTRKVVQVYRKWILQDKPVFMEEPDRKDVAQEDAEKLGFSETDSKEASSESSGHKRSSSWGRTYSFTSAMSRGCVTEEENTNVKAGVQALLQVFLTNSANIFLLEPCAEVPVLLKEQVDACKAVLIIFRRMIMELTMNKKTWEQMLQILLRITEAVMQKPKDKRIKDLFAQSLAGLLFRTLMVAWIRANLCVYISRELWDDFLGVLSSLTEWEELINEWANIMDSLTAVLARTVYGVEMTNLPLDKLSEQKEKKQRGKGISTLPG

SEQ ID NO: 889606 - protein, 626 aa, Homo sapiens
AGRLVAPLSYGGQVGRRGGGSGGPEAKERPGARRAGSDINKAAERRNMNTAPSRPSPTRRDPYGFGDSRDSRRDRSPIRGSPRREPRDGRNGRDARDSRDIRDPRDLRDHRHSRDLRDHRDSRSVRDVRDVRDLRDFRDLRDSRDFRDQRDPMYDRYRDMRDSRDPMYRREGSYDRYLRMDDYCRRKDDSYFDRYRDSFDGRGPPGPESQSRAKERLKREERRREELYRQYFEEIQRRFDAERPVDCSVIVVNKQTKDYAESVGRKVRDLGMVVDLIFLNTEVSLSQALEDVSRGGSPFAIVITQQHQIHRSCTVNIMFGTPQEHRNMPQADAMVLVARNYERYKNECREKEREEIARQAAKMADEAILQERERGGPEEGVRGGHPPAIQSLINLLADNRYLTAEETDKIINYLRERKERLMRSSTDSLPGPISRQPLGATSGASLKTQPSSQPLQSGQVLPSATPTPSAPPTSQQELQAKILSLFNSGTVTANSSSASPSVAAGNTPNQNFSTAANSQPQQRSQASGNQPPSILGQGGSAQNMGPRPGAPSQGLFGQPSSRLAPASNMTSQRPVSSTGINFDNPSVQKALDTLIQSGPALSHLVSQTTAQMGQPQAPMGSYQRHY

SEQ ID NO: 889607 - protein, 626 aa, Homo sapiens; identical to SEQ ID NO: 889606

SEQ ID NO: 889608 - protein, 474 aa, Homo sapiens
MYDRYRDMRDSRDPMYRREGSYDRYLRMDDYCRRKDDSYFDRYRDSFDGRGPPGPESQSRAKERLKREERRREELYRQYFEEIQRRFDAERPVDCSVIVVNKQTKDYAESVGRKVRDLGMVVDLIFLNTEVSLSQALEDVSRGGSPFAIVITQQHQIHRSCTVNIMFGTPQEHRNMPQADAMVLVARNYERYKNECREKEREEIARQAAKMADEAILQERERGGPEEGVRGGHPPAIQSLINLLADNRYLTAEETDKIINYLRERKERLMRSSTDSLPGPISRQPLGATSGASLKTQPSSQPLQSGQVLPSATPTPSAPPTSQQELQAKILSLFNSGTVTANSSSASPSVAAGNTPNQNFSTAANSQPQQRSQASGNQPPSILGQGGSAQNMGPRPGAPSQGLFGQPSSRLAPASNMTSQRPVSSTGINFDNPSVQKALDTLIQSGPALSHLVSQTTAQMGQPQAPMGSYQRHY

SEQ ID NO: 889609 - protein, 441 aa, Homo sapiens
AGRLVAPLSYGGQVGRRGGGSGGPEAKERPGARRAGSDINKAAERRNMNTAPSRPSPTRRDPYGFGDSRDSRRDRSPIRGSPRREPRDGRNGRDARDSRDIRDPRDLRDHRHSRDLRDHRDSRSVRDVRDVRDLRDFRDLRDSRDFRDQRDPMYDRYRDMRDSRDPMYRREGSYDRYLRMDDYCRRKDDSYFDRYRDSFDGRGPPGPESQSRAKERLKREERRREELYRQYFEEIQRRFDAERPVDCSVIVVNKQTKDYAESVGRKVRDLGMVVDLIFLNTEVSLSQALEDVSRGGSPFAIVITQQHQIHRSCTVNIMFGTPQEHRNMPQADAMVLVARNYERYKNECREKEREEIARQAAKMADEAILQERERGGPEEGVRGGHPPAIQSLINLLADNRYLTAEETDKIINYLRERKERLMRSSTDSLPGELRGRAEVKF

SEQ ID NO: 889610 - protein, 385 aa, Homo sapiens
AGRLVAPLSYGGQVGRRGGGSGGPEAKERPGARRAGSDINKAAERRNMNTAPSRPSPTRRDPYGFGDSRDSRRDRSPIRGSPRREPRDGRNGRDARDSRDIRDPRDLRDHRHSRDLRDHRDSRSVRDVRDVRDLRDFRDLRDSRDFRDQRDPMYDRYRDMRDSRDPMYRREGSYDRYLRMDDYCRRKDDSYFDRYRDSFDGRGPPGPESQSRAKERLKREERRREELYRQYFEEIQRRFDAERPVDCSVIVVNKQTKDYAESVGRKVRDLGMVVDLIFLNTEVSLSQALEDVSRGGSPFAIVITQQHQIHRSCTVRNVRRLPDRQPRWPMKPSCRKEREEALRRECVGATLQPSRASSTCWQTTGTSLLKRLTRSSTTCESGRSG

SEQ ID NO: 889611 - protein, 427 aa, Homo sapiens
AGRLVAPLSYGGQVGRRGGGSGGPEAKERPGARRAGSDINKAAERRNMNTAPSRPSPTRRDPYGFGDSRDSRRDRSPIRGSPRREPRDGRNGRDARDSRDIRDPRDLRDHRHSRDLRDHRDSRSVRDVRDVRDLRDFRDLRDSRDFRDQRDPMYDRYRDMRDSRDPMYRREGSYDRYLRMDDYCRRKDDSYFDRYRDSFDGRGPPGPESQSRAKERLKREERRREELYRQYFEEIQRRFDAERPVDCSVIVVNKQTKDYAESVGRKVRDLGMVVDLIFLNTEVSLSQALEDVSRGGSPFAIVITQQHQIHRSCTVNIMFGTPQEHRNMPQADAMVLVARNYERYKNECREKEREEIARQAAKMADEAILQERERGGPEEGVRGGHPPAIQSLINLLADNRYLTAEETDKIINLPSPLIPWPPPTYLF

SEQ ID NO: 889612 - protein, 72 aa, Homo sapiens
GVEREWGGIWFKVPPKGRRLAAKGRTTITEYTSIIQYTDDNINYLRERKERLMRSSTDSLPGELRGRAEVKF

SEQ ID NO: 889613 - protein, 225 aa, Homo sapiens
AGRLVAPLSYGGQVGRRGGGSGGPEAKERPGARRAGSDINKAAERRNMNTAPSRPSPTRRDPYGFGDSRDSRRDRSPIRGSPRREPRDGRNGRDARDSRDIRDPRDLRDHRHSRDLRDHRDSRSVRDVRDVRDLRDFRDLRDSRDFRDQRDPMYDRYRDMRDSRDPMYRREGSYDRYLRMDDYCRRKDDSYFDRYRDSFDGRGPPGPESQSRAKGKVAETVYSYY

SEQ ID NO: 889614 - protein, 138 aa, Homo sapiens
RRLVSLAAALHPSPPWRQAPRPRGGGSHFEEVKFCAPPPPCPPPAASCAPPSWRMELRSGSVGSQAVARRMDGDSRDGGGGKDATGSEDYENLPTSASVSTHMTAGAMAGILEHSVMYPVDSVKVMWTVELCAGHFQP

SEQ ID NO: 889615 - protein, 155 aa, Homo sapiens
MELRSGSVGSQAVARRMDGDSRDGGGGKDATGSEDYENLPTSASVSTHMTAGAMAGILEHSVMYPVDSVKTRMQSLSPDPKAQYTSIYGALKKIMRTEGFWRPLRGVNVMIMGAGPAHAMYFACYENMKRTLNDVFHHQGNSHLANGILKAFVWS

SEQ ID NO: 889616 - protein, 155 aa, Homo sapiens; identical to SEQ ID NO: 889615

SEQ ID NO: 889617 - protein, 155 aa, Homo sapiens; identical to SEQ ID NO: 889615

SEQ ID NO: 889618 - protein, 300 aa, Homo sapiens
MATLLHDAVMNPAEVVKQRLQMYNSQHRSAISCIRTVWRTEGLGAFYRSYTTQLTMNIPFQSIHFITYEFLQEQVNPHRTYNPQSHIISGGLAGALAAAATTPLDVCKTLLNTQENVALSLANISGRLSGMANAFRTVYQLNGLAGYFKGIQARVIYQMPSTAISWSVYEFFKYFLTKRQLGKSSSILKEGIIESFLKVILCLHPAPCPLLTRRSFFFLQGAAYGPSAPQCLRERRGRHGRSPEGCVRGHPRWWWTGRTWEGEREIAFSLPPWAECSFSASLWQPPPWILRSQRREENLQ

SEQ ID NO: 889619 - protein, 279 aa, Homo sapiens
MYNSQHRSAISCIRTVWRTEGLGAFYRSYTTQLTMNIPFQSIHFITYEFLQEQVNPHRTYNPQSHIISGGLAGALAAAATTPLDVCKTLLNTQENVALSLANISGRLSGMANAFRTVYQLNGLAGYFKGIQARVIYQMPSTAISWSVYEFFKYFLTKRQLGKSSSILKEGIIESFLKVILCLHPAPCPLLTRRSFFFLQGAAYGPSAPQCLRERRGRHGRSPEGCVRGHPRWWWTGRTWEGEREIAFSLPPWAECSFSASLWQPPPWILRSQRREENLQ

SEQ ID NO: 889620 - protein, 155 aa, Homo sapiens; identical to SEQ ID NO: 889615

SEQ ID NO: 889621 - protein, 451 aa, Homo sapiens
MELRSGSVGSQAVARRMDGDSRDGGGGKDATGSEDYENLPTSASVSTHMTAGAMAGILEHSVMYPVDSVKTRMQSLSPDPKAQYTSIYGALKKIMRTEGFWRPLRGVNVMIMGAGPAHAMYFACYENMKRTLNDVFHHQGNSHLANGIAGSMATLLHDAVMNPAEVVKQRLQMYNSQHRSAISCIRTVWRTEGLGAFYRSYTTQLTMNIPFQSIHFITYEFLQEQVNPHRTYNPQSHIISGGLAGALAAAATTPLDVCKTLLNTQENVALSLANISGRLSGMANAFRTVYQLNGLAGYFKGIQARVIYQMPSTAISWSVYEFFKYFLTKRQLGKSSSILKEGIIESFLKVILCLHPAPCPLLTRRSFFFLQGAAYGPSAPQCLRERRGRHGRSPEGCVRGHPRWWWTGRTWEGEREIAFSLPPWAECSFSASLWQPPPWILRSQRREENLQ

SEQ ID NO: 889622 - protein, 279 aa, Homo sapiens; identical to SEQ ID NO: 889619

SEQ ID NO: 889623 - protein, 300 aa, Homo sapiens; identical to SEQ ID NO: 889618

SEQ ID NO: 889624 - protein, 300 aa, Homo sapiens; identical to SEQ ID NO: 889618

SEQ ID NO: 889625 - protein, 300 aa, Homo sapiens; identical to SEQ ID NO: 889618

SEQ ID NO: 889626 - protein, 283 aa, Homo sapiens
MATLLHDAVMNPAEVVKQRLQMYNSQHRSAISCIRTVWRTEGLGAFYRSYTTQLTMNIPFQSIHFITYEFLQEQVNPHRTYNPQSHIISGGLAGALAAAATTPLDVCKTLLNTQENVALSLANISGRLSGMANAFRTVYQLNGLAGYFKGIQARVIYQMPSTAISWSVYEFFKYFLTKRQLVSACIQPLALSSHVDHFFFCRVLPMGPLLPNALERGGDGTAAHRKAVCGDIRGGGGQEGLGKGSEKLLFLFLPGQNVAFLLHCGSLLPGSLDPRGGKKICSD

SEQ ID NO: 889627 - protein, 493 aa, Homo sapiens
MELRSGSVGSQAVARRMDGDSRDGGGGKDATGSEDYENLPTSASVSTHMTAGAMAGILEHSVMYPVDSVKRQGLALSPRLECSVEIIVYCSLELLGYKESSLLSLLSELGLQTRMQSLSPDPKAQYTSIYGALKKIMRTEGFWRPLRGVNVMIMGAGPAHAMYFACYENMKRTLNDVFHHQGNSHLANGIAGSMATLLHDAVMNPAEVVKQRLQMYNSQHRSAISCIRTVWRTEGLGAFYRSYTTQLTMNIPFQSIHFITYEFLQEQVNPHRTYNPQSHIISGGLAGALAAAATTPLDVCKTLLNTQENVALSLANISGRLSGMANAFRTVYQLNGLAGYFKGIQARVIYQMPSTAISWSVYEFFKYFLTKRQLGKSSSILKEGIIESFLKVILCLHPAPCPLLTRRSFFFLQGAAYGPSAPQCLRERRGRHGRSPEGCVRGHPRWWWTGRTWEGEREIAFSLPPWAECSFSASLWQPPPWILRSQRREENLQ

SEQ ID NO: 889628 - protein, 435 aa, Homo sapiens
MELRSGSVGSQAVARRMDGDSRDGGGGKDATGSEDYENLPTSASVSTHMTAGAMAGILEHSVMYPVDSVKTRMQSLSPDPKAQYTSIYGALKKIMRTEGFWRPLRGVNVMIMGAGPAHAMYFACYENMKRTLNDVFHHQGNSHLANGIAGSMATLLHDAVMNPAEVVKQRLQMYNSQHRSAISCIRTVWRTEGLGAFYRSYTTQFLQEQVNPHRTYNPQSHIISGGLAGALAAAATTPLDVCKTLLNTQENVALSLANISGRLSGMANAFRTVYQLNGLAGYFKGIQARVIYQMPSTAISWSVYEFFKYFLTKRQLGKSSSILKEGIIESFLKVILCLHPAPCPLLTRRSFFFLQGAAYGPSAPQCLRERRGRHGRSPEGCVRGHPRWWWTGRTWEGEREIAFSLPPWAECSFSASLWQPPPWILRSQRREENLQ

SEQ ID NO: 889629 - protein, 155 aa, Homo sapiens; identical to SEQ ID NO: 889615

SEQ ID NO: 889630 - protein, 183 aa, Homo sapiens
RSRTLRQNKMADAAATAGAGGSGTRSGSKQSTNPADNYHLARRRTLQVVVSSLLTEAGFESAEKASVETLTEMLQSYISEIGRSAKSYCEHTARTQPTLSDIVVTLVEMGFNVDTLPAYAKRSQRMVITAPPVTNQPVTPKALTAGQNRPHPPHIPSHFPEFPDPHTYIKTPVSDEALGLRVV

SEQ ID NO: 889631 - protein, 320 aa, Homo sapiens
RSRTLRQNKMADAAATAGAGGSGTRSGSKQSTNPADNYHLARRRTLQVVVSSLLTEAGFESAEKASVETLTEMLQSYISEIGRSAKSYCEHTARTQPTLSDIVVTLVEMGFNVDTLPAYAKRSQRMVITAPPVTNQPVTPKALTAGQNRPHPPHIPSHFPEFPDPHTYIKTPVRTVEPVSDYQVLREKAASQRRDVERALTRFMAKTGETQSLFKDDVSTFPLIAARPFTIPYLTALLPSELEMQQMEETDSSEQDEQTDTENLALHISMEDSGAEKENTSVLQQNPSLSGSRNGEENIIDNPYLRPVKKPKIRRKKSLS

SEQ ID NO: 889632 - protein, 361 aa, Homo sapiens
RSRTLRQNKMADAAATAGAGGSGTRSGSKQSTNPADNYHLARRRTLQVVVSSLLTEAGFESAEKASVETLTEMLQSYISEIGRSAKSYCEHTARTQPTLSDIVVTLVEMGFNVDTLPAYAKRSQRMVITAPPVTNQPVTPKALTAGQNRPHPPHIPSHFPEFPDPHTYIKTPVRTVEPVSDYQVLREKAASQRRDVERALTRFMAKTGETQSLFKDDVSTFPLIAARPFTIPYLTALLPSELEMQQMEETDSSEQDEQTDTENLALHISMIESRSVTQAGVQWQDLGSLQPPPPGFKRFSSLSLLSELELQEDSGAEKENTSVLQQNPSLSGSRNGEENIIDNPYLRPVKKPKIRRKKSLS

SEQ ID NO: 889633 - protein, 198 aa, Homo sapiens
RSRTLRQNKMADAAATAGAGGSGTRSGSKQSTNPADNYHLARRRTLQVVVSSLLTEAGFESAEKASVETLTEMLQSYISEIGRSAKSYCEHTARTQPTLSDIVVTLVEMGFNVDTLPAYAKRSQRMVITAPPVTNQPVTPKALTAGQNRPHPPHIPSHFPEFPDPHTYIKTPVEPRCPAHLLVFHSLGEFGNLKNLGT

SEQ ID NO: 889634 - protein, 118 aa, Homo sapiens
MQQMEETDSSEQDEQTDTENLALHISMIESRSVTQAGVQWQDLGSLQPPPPGFKRFSSLSLLSELELQEDSGAEKENTSVLQQNPSLSGSRNGEENIIDNPYLRPVKKPKIRRKKSLS

SEQ ID NO: 889635 - protein, 336 aa, Homo sapiens
MSQAVQTNGTQPLSKTWELSLYELQRTPQEAITDGLEIVVSPRSLHSELMCPICLDMLKNTMTTKECLHRFCADCIITALRSGNKECPTCRKKLVSKRSLRPDPNFDALISKIYPSRDEYEAHQERVLARINKHNNQQALSHSIEEGLKIQAMNRLQRGKKQQIENGSGAEDNGDSSHCSNASTHSNQEAGPSNKRTKTSDDSGLELDNNNAAMAIDPVMDGASEIELVFRPHPTLMEKDDSAQTRYIKTSGNATVDHLSKYLAVRLALEELRSKGESNQMNLDTASEKQYTIYIATASGQFTVLNGSFSLELVSEKYWKVNKPMELYYAPTKEHK

SEQ ID NO: 889636 - protein, 336 aa, Homo sapiens; identical to SEQ ID NO: 889635

SEQ ID NO: 889637 - protein, 336 aa, Homo sapiens; identical to SEQ ID NO: 889635

SEQ ID NO: 889638 - protein, 364 aa, Homo sapiens
PQGAVPGVLRGGAEGAGVSSAGGCRGTMAAPRDNVTLLFKLYCLAVMTLMAAVYTIALRYTRTSDKELYFSTTAVCITEVIKLLLSVGILAKETGSLGRFKASLRENVLGSPKELLKLSVPSLVYAVQNNMAFLALSNLDAAVYQVTYQLKIPCTALCTVLMLNRTLSKLQWVSVFMLCAGVTLVQWKPAQATKVVVEQNPLLGFGAIAIAVLCSGFAGVYFEKVLKSSDTSLWVRNIQMYLSGIIVTLAGVYLSDGAEIKEKGFFYGYTYYVWFVIFLASVGGLYTSVVVKYTDNIMKGFSAAAAIVLSTIASVMLFGLQITLTFALGTLLVCVSIYLYGLPRQDTTSIQQGETASKERVIGV

SEQ ID NO: 889639 - protein, 364 aa, Homo sapiens; identical to SEQ ID NO: 889638

SEQ ID NO: 889640 - protein, 201 aa, Homo sapiens
SHQAPPPTLRITIQHHIWAGTNTHFISEGINNVTLLFKLYCLAVMTLMAAVYTIALRYTRTSDKELYFSTTAVCITEVIKLLLSVGILAKETGSLGRFKASLRENVLGSPKELLKLSVPSLVYAVQNNMAFLALSNLDAAVYQVTYQLKIPCTALCTVLMLNRTLSKLQWVSVFMLCAGVTLVQWKPAQATKVVEYILKKF

SEQ ID NO: 889641 - protein, 98 aa, Homo sapiens
PQGAVPGVLRGGAEGAGVSSAGGCRGTMAAPRDNVTLLFKLYCLAVMTLMAAVYTIALRYTRTSDKELYFSTTAVCITEVIKLLLSVGILAKSKFLSY

SEQ ID NO: 889642 - protein, 119 aa, Homo sapiens
MAFLALSNLDAAVYQVTYQLKIPCTALCTVLMLNRTLSKLQWVSVFMLCAGVTLVQWKPAQATKVVVEQNPLLGFGAIAIAVLCSGFAEYIRKSYRVQILLLDCILSGSKSCKCSGLYT

SEQ ID NO: 889643 - protein, 364 aa, Homo sapiens; identical to SEQ ID NO: 889638

SEQ ID NO: 889644 - protein, 285 aa, Homo sapiens
PQGAVPGVLRGGAEGAGVSSAGGCRGTMAAPRDNVTLLFKLYCLAVMTLMAAVYTIALRYTRTSDKELYFSTTAVCITEVIKLLLSVGILAKETGSLGRFKASLRENVLGSPKELLKLSVPSLVYAVQNNMAFLALSNLDAAVYQVTYQLKIPCTALCTVLMLNRTLSKLQWVSVFMLCAGVTLVQWKPAQATKVVVEQNPLLGFGAIAIAVLCSGFAGVYFEKVLKSSDTSLWVRNIQMYLSGIIVTLAGVYLSDGAEIKEKGFFYGYTYYVWFVICKVWHLWG

SEQ ID NO: 889645 - protein, 124 aa, Homo sapiens [sequence omitted]

SEQ ID NO: 889646 - protein, 379 aa, Homo sapiens
PQGAVPGVLRGGAEGAGVSSAGGCRGTMAAPRDNVTLLFKLYCLAVMTLMAAVYTIALRYTRTSDKELYFSTTAVCITEVIKLLLSVGILAKKNRFGGKRYQQFDFGETGSLGRFKASLRENVLGSPKELLKLSVPSLVYAVQNNMAFLALSNLDAAVYQVTYQLKIPCTALCTVLMLNRTLSKLQWVSVFMLCAGVTLVQWKPAQATKVVVEQNPLLGFGAIAIAVLCSGFAGVYFEKVLKSSDTSLWVRNIQMYLSGIIVTLAGVYLSDGAEIKEKGFFYGYTYYVWFVIFLASVGGLYTSVVVKYTDNIMKGFSAAAAIVLSTIASVMLFGLQITLTFALGTLLVCVSIYLYGLPRQDTTSIQQGETASKERVIGV

SEQ ID NO: 889647 - protein, 364 aa, Homo sapiens; identical to SEQ ID NO: 889638

SEQ ID NO: 889648 - protein, 173 aa, Homo sapiens
HKGRSPVSCAGARRGRASVPRGAVGEPWLPREVTYQLKIPCTALCTVLMLNRTLSKLQWVSVFMLCAGVTLVQWKPAQATKVVVEQNPLLGFGAIAIAVLCSGFAGVYFEKVLKSSDTSLWVRNIQMYLSGIIVTLAGVYLSDGAEIKEKGFFYGYTYYVWFVICKYPGIKGS

SEQ ID NO: 889649 - protein, 124 aa, Homo sapiens [sequence omitted]

SEQ ID NO: 889650 - protein, 124 aa, Homo sapiens [sequence omitted]

SEQ ID NO: 889651 - protein, 124 aa, Homo sapiens [sequence omitted]

SEQ ID NO: 889652 - protein, 286 aa, Homo sapiens
PQGAVPGVLRGGAEGAGVSSAGGCRGTMAAPRDNVTLLFKLYCLAVMTLMAAVYTIALRYTRTSDKELYFSTTAVCITEVIKLLLSVGILAKETGSLGRFKASLRENVLGSPKELLKLSVPSLVYAVQNNMAFLALSNLDAAVYQVTYQLKIPCTALCTVLMLNRTLSKLQWVSVFMLCAGVTLVQWKPAQATKVVVEQNPLLGFGAIAIAVLCSGFAGVYFEKVLKSSDTSLWVRNIQMYLSGIIVTLAGVYLSDGAEIKEKGFFYGYTYYVWFVICKYPGIKGS

SEQ ID NO: 889653 - protein, 318 aa, Homo sapiens
MTLMAAVYTIALRYTRTSDKELYFSTTAVCITEVIKLLLSVGILAKETGSLGRFKASLRENVLGSPKELLKLSVPSLVYAVQNNMAFLALSNLDAAVYQVTYQLKIPCTALCTVLMLNRTLSKLQWVSVFMLCAGVTLVQWKPAQATKVVVEQNPLLGFGAIAIAVLCSGFAGVYFEKVLKSSDTSLWVRNIQMYLSGIIVTLAGVYLSDGAEIKEKGFFYGYTYYVWFVIFLASVGGLYTSVVVKYTDNIMKGFSAAAAIVLSTIASVMLFGLQITLTFALGTLLVCVSIYLYGLPRQDTTSIQQGETASKERVIGV

SEQ ID NO: 889654 - protein, 407 aa, Homo sapiens
PQGAVPGVLRGGAEGAGVSSAGGCRGTMAAPRDNVTLLFKLYCLAVMTLMAAVYTIALRYTRTSDKELYFSTTAVCITEVIKLLLSVGILAKDRVSPCKSGWSRSPDLVIRPPQPPRVLGLRREPPCLANQSLFRETGSLGRFKASLRENVLGSPKELLKLSVPSLVYAVQNNMAFLALSNLDAAVYQVTYQLKIPCTALCTVLMLNRTLSKLQWVSVFMLCAGVTLVQWKPAQATKVVVEQNPLLGFGAIAIAVLCSGFAGVYFEKVLKSSDTSLWVRNIQMYLSGIIVTLAGVYLSDGAEIKEKGFFYGYTYYVWFVIFLASVGGLYTSVVVKYTDNIMKGFSAAAAIVLSTIASVMLFGLQITLTFALGTLLVCVSIYLYGLPRQDTTSIQQGETASKERVIGV

SEQ ID NO: 889655 - protein, 124 aa, Homo sapiens [sequence omitted]

SEQ ID NO: 889656 - protein, 124 aa, Homo sapiens [sequence omitted]

SEQ ID NO: 889657 - protein, 219 aa, Homo sapiens
PQGAVPGVLRGGAEGAGVSSAGGCRGTMAAPRDNVTLLFKLYCLAVMTLMAAVYTIALRYTRTSDKELYFSTTAVCITEVIKLLLSVGILAKETGSLGRFKASLRENVLGSPKELLKLSVPSLVYAVQNNMAFLALSNLDAAVYQVTYQLKIPCTALCTVLMLNRTLSKLQWVSVFMLCAGVTLVQWKPAQATKVVVEQNPLLGFGAIAIAVLCSGFAG

SEQ ID NO: 889658 - protein, 125 aa, Homo sapiens
FTTDSLESLGAEFRKIPTSMKAKRSHQAIIMSTSLRVSPSIHGYHFDTASRKKAVGNIFENTDQESLERLFRNSGDKKAEERAKIIFAIDQDVEEKTRALMALKKRTKDKLFQFLKLRKYSIKVH

SEQ ID NO: 889659 - protein, 125 aa, Homo sapiens; identical to SEQ ID NO: 889658

SEQ ID NO: 889660 - protein, 125 aa, Homo sapiens; identical to SEQ ID NO: 889658

SEQ ID NO: 889661 - protein, 125 aa, Homo sapiens; identical to SEQ ID NO: 889658

SEQ ID NO: 889662 - protein, 125 aa, Homo sapiens
FTTDSLESLGAEFRKIPTSMKAKRSHQAIIMSTSLRVSPSIHGYHFDTASRKKAVGNIFENTDQESLERLFRNSGDKKAEERAKIIFAIDQDVEEKTRALMALKKRMKRRGWIRTLSKNGHSKTK

SEQ ID NO: 889663 - protein, 156 aa, Homo sapiens
FTTDSLESLGAEFRKIPTSMKAKRSHQAIIMSTSLRVSPSIHGYHFDTASRKKAVGNIFENTDQESLERLFRNSGDKKAEERAKIIFAIDQDVEEKTRALMALKKRKQNAFSKDLKTLPSLQERIDADRRAWTDVMRTKENRWLEMTFIQGHFVRP

SEQ ID NO: 889664 - protein, 98 aa, Homo sapiens
KERPCFTPNLAGEERTRGSRVKKKPPIPAGGDSSGTGPRSCVGSRHTHPSTGTRPEPEPGPGQSAAVHPAWSLLSQPCLGLPPAQLCLGPSGHAAAVA

SEQ ID NO: 889665 - protein, 98 aa, Homo sapiens; identical to SEQ ID NO: 889664

SEQ ID NO: 889666 - protein, 114 aa, Homo sapiens
MWRAVQAQTNSFICPVPANCGSRRRRRNSRAATASPRSMGLPRRAGDAAELRKSLKPLLEKRRRARINQSLSQLKGLILPLLGREDASGWHTWLPLHAQNCFLLYIQAPEQPPA

SEQ ID NO: 889667 - protein, 638 aa, Homo sapiens
MKGGCVSQWKAAAGFLFCVMVFASAERPVFTNHFLVELHKGGEDKARQVAAEHGFGVRKLPFAEGLYHFYHNGLAKAKRRRSLHHKQQLERDPRVKMALQQEGFDRKKRGYRDINEIDINMNDPLFTKQWYLINTGQADGTPGLDLNVAEAWELGYTGKGVTIGIMDDGIDYLHPDLASNYNAEASYDFSSNDPYPYPRYTDDWFNSHGTRCAGEVSAAANNNICGVGVAYNSKVAGIRMLDQPFMTDIIEASSISHMPQLIDIYSASWGPTDNGKTVDGPRELTLQAMADGVNKGRGGKGSIYVWASGDGGSYDDCNCDGYASSMWTISINSAINDGRTALYDESCSSTLASTFSNGRKRNPEAGVATTDLYGNCTLRHSGTSAAAPEAAGVFALALEANLGLTWRDMQHLTVLTSKRNQLHDEVHQWRRNGVGLEFNHLFGYGVLDAGAMVKMAKDWKTVPERFHCVGGSVQDPEKIPSTGKLVLTLTTDACEGKENFVRYLEHVQAVITVNATRRGDLNINMTSPMGTKSILLSRRPRDDDSKVGFDKWPFMTTHTWGEDARGTWTLELGFVGSAPQKGVLKEWTLMLHGTQSAPYIDQVVRDYQSKLAMSKKEELEEELDEAVERSLKSILNKN

SEQ ID NO: 889668 - protein, 722 aa, Homo sapiens
PTSTLAVLVQWNVPRSENAPPAVSTPAASLLKADLGGAARTPRGASSSHHRGWGEPGLLLGFPAASLRTCLEPTKNKGSSLHSRPPWITPEKWKAAAGFLFCVMVFASAERPVFTNHFLVELHKGGEDKARQVAAEHGFGVRKLPFAEGLYHFYHNGLAKAKRRRSLHHKQQLERDPRVKMALQQEGFDRKKRGYRDINEIDINMNDPLFTKQWYLINTGQADGTPGLDLNVAEAWELGYTGKGVTIGIMDDGIDYLHPDLASNYNAEASYDFSSNDPYPYPRYTDDWFNSHGTRCAGEVSAAANNNICGVGVAYNSKVAGIRMLDQPFMTDIIEASSISHMPQLIDIYSASWGPTDNGKTVDGPRELTLQAMADGVNKGRGGKGSIYVWASGDGGSYDDCNCDGYASSMWTISINSAINDGRTALYDESCSSTLASTFSNGRKRNPEAGVATTDLYGNCTLRHSGTSAAAPEAAGVFALALEANLGLTWRDMQHLTVLTSKRNQLHDEVHQWRRNGVGLEFNHLFGYGVLDAGAMVKMAKDWKTVPERFHCVGGSVQDPEKIPSTGKLVLTLTTDACEGKENFVRYLEHVQAVITVNATRRGDLNINMTSPMGTKSILLSRRPRDDDSKVGFDKWPFMTTHTWGEDARGTWTLELGFVGSAPQKGVLKEWTLMLHGTQSAPYIDQVVRDYQSKLAMSKKEELEEELDEAVERSLKSILNKN

SEQ ID NO: 889669 - protein, 399 aa, Homo sapiens
MLDQPFMTDIIEASSISHMPQLIDIYSASWGPTDNGKTVDGPRELTLQAMADGVNKGRGGKGSIYVWASGDGGSYDDCNCDGYASSMWTISINSAINDGRTALYDESCSSTLASTFSNGRKRNPEAGVATTDLYGNCTLRHSGTSAAAPEAAGVFALALEANLGLTWRDMQHLTVLTSKRNQLHDEVHQWRRNGVGLEFNHLFGYGVLDAGAMVKMAKDWKTVPERFHCVGGSVQDPEKIPSTGKLVLTLTTDACEGKENFVRYLEHVQAVITVNATRRGDLNINMTSPMGTKSILLSRRPRDDDSKVGFDKWPFMTTHTWGEDARGTWTLELGFVGSAPQKGVLKEWTLMLHGTQSAPYIDQVVRDYQSKLAMSKKEELEEELDEAVERSLKSILNKN

SEQ ID NO: 889670 - protein, 638 aa, Homo sapiens; identical to SEQ ID NO: 889667

SEQ ID NO: 889671 - protein, 568 aa, Homo sapiens
MKGGCVSQWKAAAGFLFCVMVFASAERPVFTNHFLVELHKGGEDKARQVAAEHGFGVRKLPFAEGLYHFYHNGLDLNVAEAWELGYTGKGVTIGIMDDGIDYLHPDLASNYNAEASYDFSSNDPYPYPRYTDDWFNSHGTRCAGEVSAAANNNICGVGVAYNSKVAGIRMLDQPFMTDIIEASSISHMPQLIDIYSASWGPTDNGKTVDGPRELTLQAMADGVNKGRGGKGSIYVWASGDGGSYDDCNCDGYASSMWTISINSAINDGRTALYDESCSSTLASTFSNGRKRNPEAGVATTDLYGNCTLRHSGTSAAAPEAAGVFALALEANLGLTWRDMQHLTVLTSKRNQLHDEVHQWRRNGVGLEFNHLFGYGVLDAGAMVKMAKDWKTVPERFHCVGGSVQDPEKIPSTGKLVLTLTTDACEGKENFVRYLEHVQAVITVNATRRGDLNINMTSPMGTKSILLSRRPRDDDSKVGFDKWPFMTTHTWGEDARGTWTLELGFVGSAPQKGVLKEWTLMLHGTQSAPYIDQVVRDYQSKLAMSKKEELEEELDEAVERSLKSILNKN

SEQ ID NO: 889672 - protein, 243 aa, Homo sapiens
GQVGKPWCRPSSRFIYRLVVSSKRNQLHDEVHQWRRNGVGLEFNHLFGYGVLDAGAMVKMAKDWKTVPERFHCVGGSVQDPEKIPSTGKLVLTLTTDACEGKENFVRYLEHVQAVITVNATRRGDLNINMTSPMGTKSILLSRRPRDDDSKVGFDKWPFMTTHTWGEDARGTWTLELGFVGSAPQKGVLKEWTLMLHGTQSAPYIDQVVRDYQSKLAMSKKEELEEELDEAVERSLKSILNKN

SEQ ID NO: 889673 - protein, 894 aa, Homo sapiens
MLVQKLEDKISLLNSEKWSLMEQIRRLKSEMDFLKNEHFAIPAVCDSVQPPLDQLPHKDSEDSGQHPDVNSSDKGKNTDIHLSISDEADSTIPKENSPNSFPRREREGMPPSSLSSKKTVHFDKPNRKLSPAFHQALLSFCRMSADSRLGYEVSRIADSEKSVMLMLGRCLPHIVPNVLLAKREELIPLILCTACLHPEPKERDQLLHILFNLIKRPDDEQRQMILTGCVAFARHVGPTRVEAELLPQCWEQINHKYPERRLLVAESCGALAPYLPKEIRSSLVLSMLQQMLMEDKADLVREAVIKSLGIIMGYIDDPDKYHQGFELLLSALGDPSERVVSATHQVFLPAYAAWTTELGNLQSHLILTLLNKIEKLLREGEHGLDEHKLHMYLSALQSLIPSLFALVLQNAPFSSKAKLHGEVPQIEVTRFPRPMSPLQDVSTIIGSREQLAVLLQLYDYQLEQEGTTGWESLLWVVNQLLPQLIEIVGKINVTSTACVHEFSRFFWRLCRTFGKIFTNTKVKPQFQEILRLSEENIDSSAGNGVLTKATVPIYATGVLTCYIQIKEYLHIHNEISWEWDPSLNTKCVSYTHYTHSLKEEDRKLLVGFLEDVMTLLSLSHAPLDSLKASFVELGANPAYHELLLTVLWYGVVHTSALVRCTAARMFELLVKGVNETLVAQRVVPALITLSSDPEISVRIATIPAFGTIMETVIQRELLERVKMQLASFLEDPQYQDQHSLHTEIIKTFGRVGPNAEPRFRDEFVIPHLHKLALVNNLQIVDSKRLDIATHLFEAYSALSCCFISEDLMVNHFLPGLRCLRTDMEHLSPEHEVILSSMIKECEQKVENKTVQEPQGSMSIAASLVSEDTKTKFLNKMGQLTTSGAMLANVFQRKK

SEQ ID NO: 889674 - protein, 1004 aa, Homo sapiens
KAKETIQALRANLTKAAEHEVPLQERKNYKSSPEIQEPIKPLEKRALNFLVNEFLLKNNYKLTSITFSDENDDQDFELWDDVGLNIPKPPDLLQLYRDFGNHQVTGKDLVDVASGVEEDELEALTPIISNLPPTLETPQPAENSMLVQKLEDKISLLNSEKWSLMEQIRRLKSEMDFLKNEHFAIPAVCDSVQPPLDQLPHKDSEDSGQHPDVNSSDKGKNTDIHLSISDEADSTIPKENSPNSFPRREREGMPPSSLSSKKTVHFDKPNRKLSPAFHQALLSFCRMSADSRLGYEVSRIADSEKSVMLMLGRCLPHIVPNVLLAKREELIPLILCTACLHPEPKERDQLLHILFNLIKRPDDEQRQMILTGCVAFARHVGPTRVEAELLPQCWEQINHKYPERRLLVAESCGALAPYLPKEIRSSLVLSMLQQMLMEDKADLVREAVIKSLGIIMGYIDDPDKYHQGFELLLSALGDPSERVVSATHQVFLPAYAAWTTELGNLQSHLILTLLNKIEKLLREGEHGLDEHKLHMYLSALQSLIPSLFALVLQNAPFSSKAKLHGEVPQIEVTRFPRPMSPLQDVSTIIGSREQLAVLLQLYDYQLEQEGTTGWESLLWVVNQLLPQLIEIVGKINVTSTACVHEFSRFFWRLCRTFGKIFTNTKVKPQFQEILRLSEENIDSSAGNGVLTKATVPIYATGVLTCYIQEEDRKLLVGFLEDVMTLLSLSHAPLDSLKASFVELGANPAYHELLLTVLWYGVVHTSALVRCTAARMFELLVKGVNETLVAQRVVPALITLSSDPEISVRIATIPAFGTIMETVIQRELLERVKMQLASFLEDPQYQDQHSLHTEIIKTFGRVGPNAEPRFRDEFVIPHLHKLALVNNLQIVDSKRLDIATHLFEAYSALSCCFISEDLMVNHFLPGLRCLRTDMEHLSPEHEVILSSMIKECEQKVENKTVQEPQGSMSIAASLVSEDTKTKFLNKMGQLTTSGAMLANVFQRKK

SEQ ID NO: 889675 - protein, 1004 aa, Homo sapiens
KAKETIQALRANLTKAAEHEVPLQERKNYKSSPEIQEPIKPLEKRALNFLVNEFLLKNNYKLTSITFSDENDDQDFELWDDVGLNIPKPPDLLQLYRDFGNHQVTGKDLVDVASGVEEDELEALTPIISNLPPTLETPQPAENSMLVQKLEDKISLLNSEKWSLMEQIRRLKSEMDFLKNEHFAIPAVCDSVQPPLDQLPHKDSEDSGQHPDVNSSDKGKNTDIHLSISDEADSTIPKENSPNSFPRREREGMPPSSLSSKKTVHFDKPNRKLSPAFHQALLSFCRMSADSRLGYEVSRIADSEKSVMLMLGRCLPHIVPNVLLAKREELIPLILCTACLHPEPKERDQLLHILFNLIKRPDDEQRQMILTGCVAFARHVGPTRVEAELLPQCWEQINHKYPERRLLVAESCGALAPYLPKEIRSSLVLSMLQQMLMEDKADLVREAVIKSLGIIMGYIDDPDKYHQGFELLLSALGDPSERVVSATHQVFLPAYAAWTTELGNLQSHLILTLLNKIEKLLREGEHGLDEHKLHMYLSALQSLIPSLFALVLQNAPFSSKAKLHGEVPQIEVTRFPRPMSPLQDVSTIIGSREQLAVLLQLYDYQLEQEGTTGWESLLWVVNQLLPQLIEIVGKINVTSTACVHEFSRFFWRLCRTFGKIFTNTKVKPQFQEILRLSEENIDSSAGNGVLTKATVPIYATGVLTCYIQEEDRKLLVGFLEDVMTLLSLSHAPLDSLKASFVELGANPAYHELLLTVLWYGVVHTSALVRCTAARMFELTLRGMSEALVDKRVAPALVTLSSDPEFSVRIATIPAFGTIMETVIQRELLERVKMQLASFLEDPQYQDQHSLHTEIIKTFGRVGPNAEPRFRDEFVIPHLHKLALVNNLQIVDSKRLDIATHLFEAYSALSCCFISEDLMVNHFLPGLRCLRTDMEHLSPEHEVILSSMIKECEQKVENKTVQEPQGSMSIAASLVSEDTKTKFLNKMGQLTTSGAMLANVFQRKK

SEQ ID NO: 889676 - protein, 1004 aa, Homo sapiens; identical to SEQ ID NO: 889675

SEQ ID NO: 889677 - protein, 470 aa, Homo sapiens
MYLSALQSLIPSLFALVLQNAPFSSKAKLHGEVPQIEVTRFPRPMSPLQDVSTIIGSREQLAVLLQLYDYQLEQEGTTGWESLLWVVNQLLPQLIEIVGKINVTSTACVHEFSRFFWRLCRTFGKIFTNTKVKPQFQEILRLSEENIDSSAGNGVLTKATVPIYATGVLTCYIQEEDRKLLVGFLEDVMTLLSLSHAPLDSLKASFVELGANPAYHELLLTVLWYGVVHTSALVRCTAARMFELLVKGVNETLVAQRVVPALITLSSDPEISVRIATIPAFGTIMETVIQRELLERVKMQLASFLEDPQYQDQHSLHTEIIKTFGRVGPNAEPRFRDEFVIPHLHKLALVNNLQIVDSKRLDIATHLFEAYSALSCCFISEDLMVNHFLPGLRCLRTDMEHLSPEHEVILSSMIKECEQKVENKTVQEPQGSMSIAASLVSEDTKTKFLNKMGQLTTSGAMLANVFQRKK

SEQ ID NO: 889678 - protein, 238 aa, Homo sapiens
TIFYCMLTGLQLTLRGMSEALVDKRVAPALVTLSSDPEFSVRIATIPAFGTIMETVIQRELLERVKMQLASFLEDPQYQDQHSLHTEIIKTFGRVGPNAEPRFRDEFVIPHLHKLALVNNLQIVDSKRLDIATHLFEAYSALSCCFISEDLMVNHFLPGLRCLRTDMEHLSPEHEVILSSMIKECEQKVENKTVQEPQGSMSIAASLVSEDTKTKFLNKMGQLTTSGAMLANVFQRKK

SEQ ID NO: 889679 - protein, 1004 aa, Homo sapiens; identical to SEQ ID NO: 889674

SEQ ID NO: 889680 - protein, 1004 aa, Homo sapiens; identical to SEQ ID NO: 889674

SEQ ID NO: 889681 - protein, 875 aa, Homo sapiens
KAKETIQALRANLTKAAEHEVPLQERKNYKSSPEIQEPIKPLEKRALNFLVNEFLLKNNYKLTSITFSDENDDQDFELWDDVGLNIPKPPDLLQLYRDFGNHQVTGKDLVDVASGVEEDELEALTPIISNLPPTLETPQPAENSMLVQKLEDKISLLNSEKWSLMEQIRRLKSEMDFLKNEHFAIPAVCDSVQPPLDQLPHKDSEDSGQHPDVNSSDKGKNTDIHLSISDEADSTIPKENSPNSFPRREREGMPPSSLSSKKTVHFDKPNRKLSPAFHQALLSFCRMSADSRLGYEVSRIADSEKSVMLMLGRCLPHIVPNVLLAKREELIPLILCTACLHPEPKERDQLLHILFNLIKRPDDEQRQMILTGCVAFARHVGPTRVEAELLPQCWEQINHKYPERRLLVAESCGALAPYLPKEIRSSLVLSMLQQMLMEDKADLVREAVIKSLGIIMGYIDDPDKYHQGFELLLSALGDPSERVVSATHQVFLPAYAAWTTELGNLQSHLILTLLNKIEKLLREGEHGLDEHKLHMYLSALQSLIPSLFALVLQNAPFSSKAKLHGEVPQIEVTRFPRPMSPLQDVSTIIGSREQLAVLLQLYDYQLEQEGTTGWESLLWVVNQLLPQLIEIVGKINVTSTACVHEFSRFFWRLCRTFGKIFTNTKVKPQFQEILRLSEENIDSSAGNGVLTKATVPIYATGVLTCYIQEEDRKLLVGFLEDVMTLLSLSHAPLDSLKASFVELGANPAYHELLLTVLWYGVVHTSALVRCTAARMFELLVKGVNETLVAQRVVPALITLSSDPEISVRIATIPAFGTIMETVIQRELLERVKMQLASFLEDPQYQDQHSLHTEIIKTFGRVGPNAEPRFRDEFLL

SEQ ID NO: 889682 - protein, 567 aa, Homo sapiens
ASTPDGVTRPTRAPRFASAASWPKGGDRGGWRGAARTRSPGAGPVRTAREGRSVGRSRPRDSISARSDNSPFPWRSLRAWHPAGRLKTVVSSIASLDLATISEMSSRSTKDLIKSKWGSKPSNSKSETTLEKLKGEIAHLKTSVDEITSGKGKLTDKERHRLLEKIRVLEAEKEKNAYQLTEKDKEIQRLRDQLKARYSTTALLEQLEETTREGERREQVLKALSEEKDVLKQQLSAATSRIAELESKTNTLRLSQTVAPNCFNSSINNIHEMEIQLKDALEKNQQWLVYDQQREVYVKGLLAKIFELEKKTETAAHSLPQQTKKPESEGYLQEEKQKCYNDLLASAKKDLEVERQTITQLSFELSEFRRKYEETQKEVHNLNQLLYSQRRADVQHLEDDRHKTEKIQKLREENDIARGKLEEEKKRSEELLSQVQFLYTSLLKQQEEQTRVALLEQQMQACTLDFENEKLDRQHVQHQLLVILKELRKARNQITQLESLKQLHEFAITEPLVTFQGETENREKVAASPKSPTAALNESLVECPKCNIQYPATEHRDLLVHVEYCSK

SEQ ID NO: 889683 - protein, 504 aa, Homo sapiens
ASTPDGVTRPTRAPRFASAASWPKGGDRGGWRGAARTRSPGAGPVRTAREGRSVGRSRPRDSISARSDNSPFPWRSLRAWHPAGRLKTVVSSIASLDLATISEMSSRSTKDLIKSKWGSKPSNSKSETTLEKLKGEIAHLKTSVDEITSGKGKLTDKERHRLLEKIRVLEAEKEKNAYQLTEKDKEIQRLRDQLKARYSTTALLEQLEETTREGERREQVLKALSEEKDVLKQQLSAATSRIAELESKTNTLRLSQTVAPNCFNSSINNIHEMEIQLKDALEKNQQWLVYDQQREVYVKGLLAKIFELEKKTETAAHSLPQQTKKPESEGYLQEEKQKCYNDLLASAKKDLEVERQTITQLSFELSEFRRKYEETQKEVHNLNQLLYSQRRADVQHLEDDRHKTEKIQKLREENDIARGKLEEEKKRSEELLSQVQFLYTSLLKQQEEQTRVALLEQQMQACTLDFENEKLDRQHVQHQLLVILKELRKARNQITQLESLVSLE

SEQ ID NO: 889684 - protein, 295 aa, Homo sapiens
MEIQLKDALEKNQQWLVYDQQREVYVKGLLAKIFELEKKTETAAHSLPQQTKKPESEGYLQEEKQKCYNDLLASAKKDLEVERQTITQLSFELSEFRRKYEETQKEVHNLNQLLYSQRRADVQHLEDDRHKTEKIQKLREENDIARGKLEEEKKRSEELLSQVQFLYTSLLKQQEEQTRVALLEQQMQACTLDFENEKLDRQHVQHQLLVILKELRKARNQITQLESLKQLHEFAITEPLVTFQGETENREKVAASPKSPTAALNESLVECPKCNIQYPATEHRDLLVHVEYCSK

SEQ ID NO: 889685 - protein, 578 aa, Homo sapiens
PSVPPSPGRLRQGEESKISAMDASPRNISPGLQNGEKEDRFLTTLSSQSSTSSTHLQLPTPPEVMSEQSVGGPPELDTASSSEDVFDGHLLGSTDSQVKEKSTMKAIFANLLPGNSYNPIPFPFDPDKHYLMYEHERVPIAVCEKEPSSIIAFALSCKEYRNALEELSKATQWNSAEEGLPTNSTSDSRPKSSSPIRLPEMSGGQTNRTTETEPQPTKKASGMLSFFRGTAGKSPDLSSQKRETLRGADSAYYQVGQTGKEGTENQGVEPQDEVDGGDTQKKQLINPHVELQFSDANAKFYCRLYYAGEFHKMREVILDSSEEDFIRSLSHSSPWQARGGKSGAAFYATEDDRFILKQMPRLEVQSFLDFAPHYFNYITNAVQQKRPTALAKILGVYRIGYKNSQNNTEKKLDLLVMENLFYGRKMAQVFDLKGSLRNRNVKTDTGKESCDVVLLDENLLKMVRDNPLYIRSHSKAVLRTSIHSDSHFLSSHLIIDYSLLVGRDDTSNELVVGIIDYIRTFTWDKKLEMVVKSTGILGGQGKMPTVVSPELYRTRFCEAMDKYFLMVPDHWTGLGLNC

SEQ ID NO: 889686 - protein, 119 aa, Homo sapiens
MYFKNLHSDPDKHYLMYEHERVPIAVCEKEPSSIIAFALSCKEYRNALEELSKATQWNSAEEGLPTNSTSDSRPKSSSPIRLPEMSGGQTNRTTETEPQPSKITHGGIFIIRFTYNYGL

SEQ ID NO: 889687 - protein, 356 aa, Homo sapiens [sequence omitted]

SEQ ID NO: 889688 - protein, 356 aa, Homo sapiens [sequence omitted]

SEQ ID NO: 889689 - protein, 356 aa, Homo sapiens [sequence omitted]

SEQ ID NO: 889690 - protein, 284 aa, Homo sapiens
RHEAGWPPAPGPGSPGPGPRLGCAALRNVSGAQYMGSGYTKAVYRVRLPGGAAVALKAVDFSGHDLGSCVREFGVRRGCYRLAAHKLLKEMVLLERLRHPNVLQLYGYCYQDSEDIPDTLTTITELGAPVEMIQLLQTSWEDRFRICLSLGRLLHHLAHSPLGSVTLLDFRPRQFVLVDGELKVTDLDDARVEETPCAGSTDCILEFPARNFTLPCSAQGWCEGMNEKRNLYNAYRFFFTYLLPHSAPPSLRPLLDSIVNATGRLPLLAILPPRELPPFSVQPG

SEQ ID NO: 889691 - protein, 384 aa, Homo sapiens
RHEAGWPPAPGPGSPGPGPRLGCAALRNVSGAQYMGSGYTKAVYRVRLPGGAAVALKAVDFSGHDLGSCVREFGVRRGCYRLAAHKLLKEMVLLERLRHPNVLQLYGYCYQDSEDIPDTLTTITELGAPVEMIQLLQTSWEDRFRICLSLGRLLHHLAHSPLGSVTLLDFRPRQFVLVDGELKVTDLDDARVEETPCAGSTDCILEFPARNFTLPCSAQGWCEGMNEKRNLYNAYRFFFTYLLPHSAPPSLRPLLDSIVNATGELAWGVDETLAQLEKVLHLYRSGQYLQNSTASSSTEYQCIPDSTIPQEDYRCWPSYHHGSCLLSVFNLAEAVDVCESHAQCRAFVVTNQTTWTGRQLVFFKTGWSQVVPDPNKTTYVKASG

SEQ ID NO: 889692 - protein, 384 aa, Homo sapiens; identical to SEQ ID NO: 889691

SEQ ID NO: 889693 - protein, 206 aa, Homo sapiens
RHEAGWPPAPGPGSPGPGPRLGCAALRNVSGAQYMGSGYTKAVYRVRLPGGAAVALKAVDFSGHDLGSCVREFGVRRGCYRLAAHKLLKEMVLLERLRHPNVLQLYGYCYQDSEDIPDTLTTITELGAPVEMIQLLQTSWEDRFRICLSLGRLLHHLAHSPLGSVTLLDFRPRQFVLVDGELKVTDLDDARVMHGLASPKRDRRYL

SEQ ID NO: 889694 - protein, 384 aa, Homo sapiens; identical to SEQ ID NO: 889691

SEQ ID NO: 889695 - protein, 384 aa, Homo sapiens; identical to SEQ ID NO: 889691

SEQ ID NO: 889696 - protein, 384 aa, Homo sapiens; identical to SEQ ID NO: 889691

SEQ ID NO: 889697 - protein, 105 aa, Homo sapiens
PRRKAVSSLFLCPQICLSLGRLLHHLAHSPLGSVTLLDFRPRQFVLVDGELKVTDLDDARVEETPCAGSTDCILEFPARNFTLPCSAQGWCEGMNEKRNLYNAYR

SEQ ID NO: 889698 - protein, 238 aa, Homo sapiens
MYAPGGAGLPGGRRRRSPGGSALPKQPERSLASALPGALSITALCTALAEPAWLHIHGGTCSRQELGVSDVLGYVHPDLLKDFCMNPQTVLLLRVIAAFCFLGILCSLSAFLLDVFGPKHPALKITRRYAFAHILTVLQCATVIGFSYWASELILAQQQQHKKYHGSQVYVTFAVSFYLVAGAGGASILATAANLLRHYPTEEEEQALELLSEMEENEPYPAEYEVINQFQPPPAYTP

SEQ ID NO: 889699 - protein, 154 aa, Homo sapiens
MNPQTVLLLRVIAAFCFLGILCSLSAFLLDVFGPKHPALKITRRYAFAHILTVLQCATVIGFSYWASELILAQQQQHKKYHGSQVYVTFAVSFYLVAGAGGASILATAANLLRHYPTEEEEQALELLSEMEENEPYPAEYEVINQFQPPPAYTP

SEQ ID NO: 889700 - protein, 154 aa, Homo sapiens; identical to SEQ ID NO: 889699

SEQ ID NO: 889701 - protein, 238 aa, Homo sapiens; identical to SEQ ID NO: 889698

SEQ ID NO: 889702 - protein, 238 aa, Homo sapiens; identical to SEQ ID NO: 889698

SEQ ID NO: 889703 - protein, 238 aa, Homo sapiens; identical to SEQ ID NO: 889698

SEQ ID NO: 889704 - protein, 85 aa, Homo sapiens
TCGVAARSGLAYEMAQKRPCPTGAPPREKDRWSPQMPPDNVAAQRQGWGGTLVPMVASTPGVKGFPTEAECRGLAVSPHGPGKAF

SEQ ID NO: 889705 - protein, 238 aa, Homo sapiens; identical to SEQ ID NO: 889698

SEQ ID NO: 889706 - protein, 238 aa, Homo sapiens; identical to SEQ ID NO: 889698

SEQ ID NO: 889707 - protein, 319 aa, Homo sapiens
PQSHSGVSCLRPPNSRSPPRLRQPRVPPPYPLVSTLTAQSRLHLQRTRSVAILHRTVRLCAPRGGRRRPAATAERRRAAPGMYAPGGAGLPGGRRRRSPGGSALPKQPERSLASALPGALSITALCTALAEPAWLHIHGGTCSRQELGVSDVLGYVHPDLLKDFCMNPQTVLLLRVIAAFCFLGILCSLSAFLLDVFGPKHPALKITRRYAFAHILTVLQCATVIGFSYWASELILAQQQQHKKYHGSQVYVTFAVSFYLVAGAGGASILATAANLLRHYPTEEEEQALELLSEMEENEPYPAEYEVINQFQPPPAYTP

SEQ ID NO: 889708 - protein, 154 aa, Homo sapiens; identical to SEQ ID NO: 889699

SEQ ID NO: 889709 - protein, 238 aa, Homo sapiens; identical to SEQ ID NO: 889698

SEQ ID NO: 889710 - protein, 238 aa, Homo sapiens; identical to SEQ ID NO: 889698

SEQ ID NO: 889711 - protein, 238 aa, Homo sapiens; identical to SEQ ID NO: 889698

SEQ ID NO: 889712 - protein, 238 aa, Homo sapiens; identical to SEQ ID NO: 889698

SEQ ID NO: 889713 - protein, 402 aa, Homo sapiens
LQAGGDACAVRSRGCRCPASRRPGLERDGRGGEEGGSVRSGAGPDSDPRGASSPPAGHRGTAASPRPVAAPSRTPAPPHTRARASPGLPSGPAWRRGQWFSRVSGQVSTLMKATVLMRQPGRVQEIVGALRKGGGDRLQVISDFDMTLSRFAYNGKRCPSSYNILDNSKIISEECRKELTALLHHYYPIEIDPHRTVKEKLPHMVEWWTKAHNLLCQQKIQKFQIAQVVRESNAMLREGYKTFFNTLYHNNIPLFIFSAGIGDILEEIIRQMKVFHPNIHIVSNYMDFNEDGFLQGFKGQLIHTYNKNSSVCENCGYFQQLEGKTNVILLGDSIGDLTMADGVPGVQNILKIGFLNDKVEERRERYMDSYDIVLEKDETLDVVNGLLQHILCQGVQLEMQGP

SEQ ID NO: 889714 - protein, 402 aa, Homo sapiens; identical to SEQ ID NO: 889713

SEQ ID NO: 889715 - protein, 402 aa, Homo sapiens; identical to SEQ ID NO: 889713

SEQ ID NO: 889716 - protein, 402 aa, Homo sapiens; identical to SEQ ID NO: 889713

SEQ ID NO: 889717 - protein, 292 aa, Homo sapiens
MKATVLMRQPGRVQEIVGALRKGGGDRLQVISDFDMTLSRFAYNGKRCPSSYNILDNSKIISEECRKELTALLHHYYPIEIDPHRTVKEKLPHMVEWWTKAHNLLCQQKIQKFQIAQVVRESNAMLREGYKTFFNTLYHNNIPLFIFSAGIGDILEEIIRQMKVFHPNIHIVSNYMDFNEDGFLQGFKGQLIHTYNKNSSVCENCGYFQQLEGKTNVILLGDSIGDLTMADGVPGVQNILKIGFLNDKVEERRERYMDSYDIVLEKDETLDVVNGLLQHILCQGVQLEMQGP

SEQ ID NO: 889718 - protein, 257 aa, Homo sapiens
MTLSRFAYNGKRCPSSYNILDNSKIISEECRKELTALLHHYYPIEIDPHRTVKEKLPHMVEWWTKAHNLLCQQKIQKFQIAQVVRESNAMLREGYKTFFNTLYHNNIPLFIFSAGIGDILEEIIRQMKVFHPNIHIVSNYMDFNEDGFLQGFKGQLIHTYNKNSSVCENCGYFQQLEGKTNVILLGDSIGDLTMADGVPGVQNILKIGFLNDKVEERRERYMDSYDIVLEKDETLDVVNGLLQHILCQGVQLEMQGP

SEQ ID NO: 889719 - protein, 257 aa, Homo sapiens; identical to SEQ ID NO: 889718

SEQ ID NO: 889720 - protein, 257 aa, Homo sapiens; identical to SEQ ID NO: 889718

SEQ ID NO: 889721 - protein, 257 aa, Homo sapiens; identical to SEQ ID NO: 889718

SEQ ID NO: 889722 - protein, 199 aa, Homo sapiens [sequence omitted]

SEQ ID NO: 889723 - protein, 246 aa, Homo sapiens
LQAGGDACAVRSRGCRCPASRRPGLERDGRGGEEGGSVRSGAGPDSDPRGASSPPAGHRGTAASPRPVAAPSRTPAPPHTRARASPGLPSGPAWRRGQWFSRVSGQVSTLMKATVLMRQPGRVQEIVGALRKGGGDRLQVISDFDMTLSRFAYNGKRCPSSYNILDNSKIISEECRKELTALLHHYYPIEIDPHRTVKEKLPHMVEWWTKAHNLLCQQKIQKFQIAQVVRESNAMLRVFSRDLRAS

SEQ ID NO: 889724 - protein, 296 aa, Homo sapiens
SRREATPAQCGRGAVVVPRAADQASNGMAEVSTLMKATVLMRQPGRVQEIVGALRKGGGDRLQVISDFDMTLSRFAYNGKRCPSSYNILDNSKIISEECRKELTALLHHYYPIEIDPHRTVKEKLPHMVEWEGYKTFFNTLYHNNIPLFIFSAGIGDILEEIIRQMKVFHPNIHIVSNYMDFNEDGFLQGFKGQLIHTYNKNSSVCENCGYFQQLEGKTNVILLGDSIGDLTMADGVPGVQNILKIGFLNDKVEERRERYMDSYDIVLEKDETLDVVNGLLQHILCQGVQLEMQGP

SEQ ID NO: 889725 - protein, 225 aa, Homo sapiens
MKATVLMRQPGRVQEIVGALRKGGGDRLQVISDFDMTLSRFAYNGKRCPSSYNILDNSKIISEECRKELTALLHHYYPIEIDPHRTVKEKLPHMVEWWTKAHNLLCQQKIQKFQIAQVVRESNAMLREGYKTFFNTLYHNNIPLFIFSAGIGDILEEIIRQMKVFHPNIHIVSNYMDFNEDVEERRERYMDSYDIVLEKDETLDVVNGLLQHILCQGVQLEMQGP

SEQ ID NO: 889726 - protein, 37 aa, Homo sapiens
MWQGTGTVPGEPWTTACQCSRDCLLQGFSSKFLNMGS

SEQ ID NO: 889727 - protein, 292 aa, Homo sapiens; identical to SEQ ID NO: 889717

SEQ ID NO: 889728 - protein, 402 aa, Homo sapiens; identical to SEQ ID NO: 889713

SEQ ID NO: 889729 - protein, 292 aa, Homo sapiens; identical to SEQ ID NO: 889717

SEQ ID NO: 889730 - protein, 257 aa, Homo sapiens; identical to SEQ ID NO: 889718

SEQ ID NO: 889731 - protein, 326 aa, Homo sapiens
SRREATPAQCGRGAVVVPRAADQASNGMAEVSTLMKATVLMRQPGRVQEIVGALRKGGGDRLQVISDFDMTLSRFAYNGKRCPSSYNILDNSKIISEECRKELTALLHHYYPIEIDPHRTVKEKLPHMVEWWTKAHNLLCQQKIQKFQIAQVVRESNAMLREGYKTFFNTLYHNNIPLFIFSAGIGDILEEIIRQMKVFHPNIHIVSNYMDFNEDGFLQGFKGQLIHTYNKNSSVCENCGYFQQLEGKTNVILLGDSIGDLTMADGVPGVQNILKIGFLNDKVEERRERYMDSYDIVLEKDETLDVVNGLLQHILCQGVQLEMQGP

SEQ ID NO: 889732 - protein, 257 aa, Homo sapiens; identical to SEQ ID NO: 889718

SEQ ID NO: 889733 - protein, 297 aa, Homo sapiens
MKESVAVNHQISMVMLGSSSGQKAPTPVPRADYPPSQGPGSDLIPEQVLMERMPFFFNILDNSKIISEECRKELTALLHHYYPIEIDPHRTVKEKLPHMVEWWTKAHNLLCQQKIQKFQIAQVVRESNAMLREGYKTFFNTLYHNNIPLFIFSAGIGDILEEIIRQMKVFHPNIHIVSNYMDFNEDGFLQGFKGQLIHTYNKNSSVCENCGYFQQLEGKTNVILLGDSIGDLTMADGVPGVQNILKIGFLNDKVEERRERYMDSYDIVLEKDETLDVVNGLLQHILCQGVQLEMQGP

SEQ ID NO: 889734 - protein, 234 aa, Homo sapiens
MAFLPIWISQLTALLHHYYPIEIDPHRTVKEKLPHMVEWWTKAHNLLCQQKIQKFQIAQVVRESNAMLREGYKTFFNTLYHNNIPLFIFSAGIGDILEEIIRQMKVFHPNIHIVSNYMDFNEDGFLQGFKGQLIHTYNKNSSVCENCGYFQQLEGKTNVILLGDSIGDLTMADGVPGVQNILKIGFLNDKVEERRERYMDSYDIVLEKDETLDVVNGLLQHILCQGVQLEMQGP

SEQ ID NO: 889735 - protein, 315 aa, Homo sapiens
LQAGGDACAVRSRGCRCPASRRPGLERDGRGGEEGGSVRSGAGPDSDPRGASSPPAGHRGTAASPRPVAAPSRTPAPPHTRARASPGLPSGPAWRRGQWFSRVSGQVSTLMKATVLMRQPGRVQEIVGALRKGGGDRLQVISDFDMTLSRFAYNGKRCPSSYNILDNSKIISEECRKELTALLHHYYPIEIDPHRTVKEKLPHMVEWWTKAHNLLCQQKIQKFQIAQVVRESNAMLREGYKTFFNTLYHNNIPLFIFSAGIGDILEEIIRQMKVFHPNIHIVSNYMDFNEDVSQILFGLGKDEGWGPPARAVNSA

SEQ ID NO: 889736 - protein, 226 aa, Homo sapiens
SRREATPAQCGRGAVVVPRAADQASNGMAEVISDFDMTLSRFAYNGKRCPSSYNILDNSKIISEECRKELTALLHHYYPIEIDPHRTVKEKLPHMVEWWTKAHNLLCQQKIQKFQIAQVVRESNAMLREGYKTFFNTLYHNNIPLFIFSAGIGDILEEIIRQMKVFHPNIHIVSNYMDFNEDVEERRERYMDSYDIVLEKDETLDVVNGLLQHILCQGVQLEMQGP

SEQ ID NO: 889737 - protein, 265 aa, Homo sapiens
MVGAGREAKRRRKTLDAEVVEKPAKEETVVENATPDYAAGLVSTQKLGSLNNEPALPSTSYLPSTPSVVPASSYIPSSETPPAPSSREASRPPEEPSAPSPTLPAQFKQRAPMYNSGLSPATPTPAAPTSPLTPTTPPAVAPTTQTPPVAMVAPQTQAPAQQQPKKNLSLTREQMFAAQEMFKTANKVTRPEKALILGFMAGSRENPCQEQGDVIQIKLSEHTEDLPKADGQGSTTMLVDTVFEMNYATGQWTRFKKYKPMTNVS

SEQ ID NO: 889738 - protein, 128 aa, Homo sapiens
GRMAEAQARHGLALCVSSWEGVYVAEAGPGVDGSGLPGIEGARGAPVSSTHVAHGLPKALASLQIPGPPPGSTSANSQRRPDPGPHQSVGDGGPCPLPVPAWEFCIHLLYSCGHLRQSLGTYFHCKTI

SEQ ID NO: 889739 - protein, 541 aa, Homo sapiens
AGWYWPRVLWSPKMASMRESDTGLWLHNKLGATDELWAPPSIASLLTAAVIDNIRLCFHGLSSAVKLKLLLGTLHLPRRTVDEMKGALMEIIQLASLDSDPWVLMVADILKSFPDTGSLNLELEEQNPNVQDILGELREKVGECEASAMLPLECQYLNKNALTTLAGPLTPPVKHFQLKRKPKSATLRAELLQKSTETAQQLKRSAGVPFHAKGRGLLRKMDTTTPLKGIPKQAPFRSPTAPSVFSPTGNRTPIPPSRTLLRKERGVKLLDISELDMVGAGREAKRRRKTLDAEVVEKPAKEETVVENATPDYAAGLVSTQKLGSLNNEPALPSTSYLPSTPSVVPASSYIPSSETPPAPSSREASRPPEEPSAPSPTLPAQFKQRAPMYNSGLSPATPTPAAPTSPLTPTTPPAVAPTTQTPPVAMVAPQTQAPAQQQPKKNLSLTREQMFAAQEMFKTANKVTRPEKALILGFMAGSRENPCQEQGDVIQIKLSEHTEDLPKADGQGSTTMLVDTVFEMNYATGQWTRFKKYKPMTNVS

SEQ ID NO: 889740 - protein, 321 aa, Homo sapiens
MDTTTPLKGIPKQAPFRSPTAPSVFSPTGNRTPIPPSRTLLRKERGVKLLDISELDMVGAGREAKRRRKTLDAEVVEKPAKEETVVENATPDYAAGLVSTQKLGSLNNEPALPSTSYLPSTPSVVPASSYIPSSETPPAPSSREASRPPEEPSAPSPTLPAQFKQRAPMYNSGLSPATPTPAAPTSPLTPTTPPAVAPTTQTPPVAMVAPQTQAPAQQQPKKNLSLTREQMFAAQEMFKTANKVTRPEKALILGFMAGSRENPCQEQGDVIQIKLSEHTEDLPKADGQGSTTMLVDTVFEMNYATGQWTRFKKYKPMTNVS

SEQ ID NO: 889741 - protein, 428 aa, Homo sapiens
RSCLRSVPRAGRLRPVNSHVPACAFSPVGECEASAMLPLECQYLNKNALTTLAGPLTPPVKHFQLKRKPKSATLRAELLQKSTETAQQLKRSAGVPFHAKGRGLLRKMDTTTPLKGIPKQAPFRSPTAPSVFSPTGNRTPIPPSRTLLRKERGVKLLDISELDMVGAGREAKRRRKTLDAEVVEKPAKEETVVENATPDYAAGLVSTQKLGSLNNEPALPSTSYLPSTPSVVPASSYIPSSETPPAPSSREASRPPEEPSAPSPTLPAQFKQRAPMYNSGLSPATPTPAAPTSPLTPTTPPAVAPTTQTPPVAMVAPQTQAPAQQQPKKNLSLTREQMFAAQEMFKTANKVTRPEKALILGFMAGSRENPCQEQGDVIQIKLSEHTEDLPKADGQGSTTMLVDTVFEMNYATGQWTRFKKYKPMTNVS

SEQ ID NO: 889742 - protein, 455 aa, Homo sapiens
MPGQRRALSPKMASMRESDTGLWLHNKLGATDELWAPPSIASLLTAAVIDNIRLCFHGLSSAVKLKLLLGTLHLPRRTVDEMKGALMEIIQLASLDSDPWVLMVADILKSFPDTGSLNLELEEQNPNVQDILGELREKVGECEASAMLPLECQYLNKNALTTLAGPLTPPVKHFQLKRKPKSATLRAELLQKSTETAQQLKRSAGVPFHAKGRGLLRKMDTTTPLKGIPKQAPFRSPTAPSVFSPTGNRTPIPPSRTLLRKERGVKLLDISELDMVGAGREAKRRRKTLDAEVVEKPAKEETVVENATPDYAAGLVSTQKLGSLNNEPALPSTSYLPSTPSVVPASSYIPSSETPPAPSSREASRPPEEPSAPSPTLPAQFKQRAPMYNSGLSPATPTPAAPTSPLTPTTRPHQSVGDGGPCPLPVPAWEFCIHLLYSCGHLRQSLGTYFHCKTI

SEQ ID NO: 889743 - protein, 348 aa, Homo sapiens
MPGQRRALSPKMASMRESDTGLWLHNKLGATDELWAPPSIASLLTAAVIDNIRLCFHGLSSAVKLKLLLGTLHLPRRTVDEMKGALMEIIQLASLDSDPWVLMVADILKSFPDTGSLNLELEEQNPNVQDILGELREKVGECEASAMLPLECQYLNKNALTTLAGPLTPPVKHFQLKRKPKSATLRAELLQKSTETAQQLKRSAGVPFHAKGRGLLRKMDTTTPLKGIPKQAPFRSPTAPSVFSPTGNRTPIPPSRTLLRKERGVKLLDISELDMVGAGREANGKENPERRWGETATRNALEPTGCSGGHQMAERRRPRNPPGRPQQQTTTGPRPPPPTAHAHTPHTQ

SEQ ID NO: 889744 - protein, 46 aa, Homo sapiens
MLPLECQYLNKNALTTLAGPLTPPVKHFQLKRKPKSATLRAELLQK

SEQ ID NO: 889745 - protein, 539 aa, Homo sapiens
MPGQRRALSPKMASMRESDTGLWLHNKLGATDELWAPPSIASLLTAAVIDNIRLCFHGLSSAVKLKLLLGTLHLPRRTVDEMKGALMEIIQLASLDSDPWVLMVADILKSFPDTGSLNLELEEQNPNVQDILGELREKVGECEASAMLPLECQYLNKNALTTLAGPLTPPVKHFQLKRKPKSATLRAELLQKSTETAQQLKRSAGVPFHAKGRGLLRKMDTTTPLKGIPKQAPFRSPTAPSVFSPTGNRTPIPPSRTLLRKERGVKLLDISELDMVGAGREAKRRRKTLDAEVVEKPAKEETVVENATPDYAAGLVSTQKLGSLNNEPALPSTSYLPSTPSVVPASSYIPSSETPPAPSSREASRPPEEPSAPSPTLPAQFKQRAPMYNSGLSPATPTPAAPTSPLTPTTPPAVAPTTQTPPVAMVAPQTQAPAQQQPKKNLSLTREQMFAAQEMFKTANKVTRPEKALILGFMAGSRENPCQEQGDVIQIKLSEHTEDLPKADGQGSTTMLVDTVFEMNYATGQWTRFKKYKPMTNVS

SEQ ID NO: 889746 - protein, 542 aa, Homo sapiens
GLGRGWCQSAESPKMASMRESDTGLWLHNKLGATDELWAPPSIASLLTAAVIDNIRLCFHGLSSAVKLKLLLGTLHLPRRTVDEMKGALMEIIQLASLDSDPWVLMVADILKSFPDTGSLNLELEEQNPNVQDILGELREKVGECEASAMLPLECQYLNKNALTTLAGPLTPPVKHFQLKRKPKSATLRAELLQKSTETAQQLKRSAGVPFHAKGRGLLRKMDTTTPLKGIPKQAPFRSPTAPSVFSPTGNRTPIPPSRTLLRKERGVKLLDISELDMVGAGREAKRRRKTLDAEVVEKPAKEETVVENATPDYAAGLVSTQKLGSLNNEPALPSTSYLPSTPSVVPASSYIPSSETPPAPSSREASRPPEEPSAPSPTLPAQFKQRAPMYNSGLSPATPTPAAPTSPLTPTTPPAVAPTTQTPPVAMVAPQTQAPAQQQPKKNLSLTREQMFAAQEMFKTANKVTRPEKALILGFMAGSRENPCQEQGDVIQIKLSEHTEDLPKADGQGSTTMLVDTVFEMNYATGQWTRFKKYKPMTNVS

SEQ ID NO: 889747 - protein, 265 aa, Homo sapiens; identical to SEQ ID NO: 889737

SEQ ID NO: 889748 - protein, 429 aa, Homo sapiens
RLVLAPGVMVPQDGVHAGERHGPVAAQQAGGHGRAVGAAQHRVPAHGRGHRQHPSLLPWPLVGSEAQVATRDAAPPAPHGGRATETAQQLKRSAGVPFHAKGRGLLRKMDTTTPLKGIPKQAPFRSPTAPSVFSPTGNRTPIPPSRTLLRKERGVKLLDISELDMVGAGREAKRRRKTLDAEVVEKPAKEETVVENATPDYAAGLVSTQKLGSLNNEPALPSTSYLPSTPSVVPASSYIPSSETPPAPSSREASRPPEEPSAPSPTLPAQFKQRAPMYNSGLSPATPTPAAPTSPLTPTTPPAVAPTTQTPPVAMVAPQTQAPAQQQPKKNLSLTREQMFAAQEMFKTANKVTRPEKALILGFMAGSRENPCQEQGDVIQIKLSEHTEDLPKADGQGSTTMLVDTVFEMNYATGQWTRFKKYKPMTNVS

SEQ ID NO: 889749 - protein, 227 aa, Homo sapiens
MPGQRRALSPKMASMRESDTGLWLHNKLGATDELWAPPSIASLLTAAVIDNIRLCFHGLSSAVKLKLLLGTLHLPRRTVDEMKGALMEIIQLASLDSDPWVLMVADILKSFPDTGSLNLELEEQNPNVQDILGELREKVGECEASAMLPLECQYLNKKAQRPEPHVASAVQAAGAHVQQRPEPCHTHACGAHLASDTHHTSGCRPYHSDTPGCHGGPADPGPCSAAA

SEQ ID NO: 889750 - protein, 143 aa, Homo sapiens
AGWYWPRVLWSPKMASMRESDTGLWLHNKLGATDELWAPPSIASLLTAAVIDNIRLCFHGLSSAVKLKLLLGTLHLPRRTVDETPAVRSALCPFYSFLHAVLRHSNKWVCEGLALSTRLECSGTIVTHCSLDLLTSDLPISAS

SEQ ID NO: 889751 - protein, 84 aa, Homo sapiens
SPQKNRQSDENNLKDPGGSEFDSISKNTWAPAPDTWAPAPDQTEQDQNRLSQNSVNLSPSSHANNLSVVTYSKGLHGPYPFGQS

SEQ ID NO: 889752 - protein, 84 aa, Homo sapiens; identical to SEQ ID NO: 889751

SEQ ID NO: 889753 - protein, 84 aa, Homo sapiens; identical to SEQ ID NO: 889751

SEQ ID NO: 889754 - protein, 84 aa, Homo sapiens; identical to SEQ ID NO: 889751

SEQ ID NO: 889755 - protein, 130 aa, Homo sapiens
MAFCLRASLGPDCCCWYQSPETLPPWSPCMPSCSYCLVALKQHISTVPGRIVGGFTTPAFLTSSSAQHWVPLPSFPAGASWATVSGSGPARVVLLFLLLLGNHTWQVKCPKHLVSLPKNKPFLCTSLEAR

SEQ ID NO: 889756 - protein, 84 aa, Homo sapiens; identical to SEQ ID NO: 889751

SEQ ID NO: 889757 - protein, 84 aa, Homo sapiens; identical to SEQ ID NO: 889751

SEQ ID NO: 889758 - protein, 147 aa, Homo sapiens
MAERPEDLNLPNAVITRIIKEALPDGVNISKEARSAISRAASVFVLYATSCANNFAMKGKRKTLNASDVLSAMEEMEFQRFVTPLKEALEAYRREQKGKKEASEQKKKDKDKKTDSEEQDKSRDEDNDEDEERLEEEEQNEEEEVDN

SEQ ID NO: 889759 - protein, 147 aa, Homo sapiens; identical to SEQ ID NO: 889758

SEQ ID NO: 889760 - protein, 147 aa, Homo sapiens; identical to SEQ ID NO: 889758

SEQ ID NO: 889761 - protein, 147 aa, Homo sapiens; identical to SEQ ID NO: 889758

SEQ ID NO: 889762 - protein, 147 aa, Homo sapiens; identical to SEQ ID NO: 889758

SEQ ID NO: 889763 - protein, 93 aa, Homo sapiens
RTEAPLSQISCEKVPDAAMARSREMDLGRGVRGAVGLDGSLGGPKPLRLQNPDAPVFEAEAGLWGEEGGYGAQSTVGHCRPRGAERKPRRVRP

SEQ ID NO: 889764 - protein, 147 aa, Homo sapiens; identical to SEQ ID NO: 889758

SEQ ID NO: 889765 - protein, 147 aa, Homo sapiens; identical to SEQ ID NO: 889758

SEQ ID NO: 889766 - protein, 176 aa, Homo sapiens
MAERPEDLNLPNAVITRIIKEAVSSSGGADERAGGKQVLERQLCSPPVSSQLPDGVNISKEARSAISRAASVFVLYATSCANNFAMKGKRKTLNASDVLSAMEEMEFQRFVTPLKEALEAYRREQKGKKEASEQKKKDKDKKTDSEEQDKSRDEDNDEDEERLEEEEQNEEEEVDN

SEQ ID NO: 889767 - protein, 147 aa, Homo sapiens; identical to SEQ ID NO: 889758

SEQ ID NO: 889768 - protein, 147 aa, Homo sapiens; identical to SEQ ID NO: 889758

SEQ ID NO: 889769 - protein, 598 aa, Homo sapiens
MAASVTNAVPPHNFKSQEVTPACLDGKSLRAGITEVKEPSVTSPTPSDIQQNKGLPKPEFRFKGQSTKSDSAEDYLLWKRLQGVSAACPAPSSAAHQLEHLSAKLQKIDEQLLAIQNIAENIEQDFPKPEMLDLHCDKIGPVDHIEFSSGPEFKKTLASKTISISEEVRFLTHMDEEDQSDKKETSEPEFSITENYSGQKTCVFPTADSAVSLSSSSDQNTTSPGMNSSDELCESVSVHPLQMTGLTDIADIIDDLIIKDGVSSEELGLTEQAMGTSRIQHYSGRHSQRTDKERREIQAWMKRKRKERMAKYLNELAEKRGQEHDPFCPRSNPLYMTSREIRLRQKMKHEKDRLLLSEHYSRRISQAYGLMNELLSESVQLPTLPQKPLPNKPSPTQSSSCQHCPSPRGENQHGHSFLINRPGKVKYMSKPSYIHKRKSFGQPQGSPWPHGTATFTIQKKAGGAKAAVRKATQSPVTFQKGSNAPCHSLQHTKKHGSAGLAPQTKQVCVEYEREETVVSPWTIPSEIHKILHESHNSLLQDLSPTEEEEPEHPFGVGGVDSVSESTGSILSKLDWNAIEDMVASVEDQGLSVHWALDL

SEQ ID NO: 889770 - protein, 722 aa, Homo sapiens
PGHTNIVVPILWMIRRTFEMLQDDNTSAGLHFMASVKKKAIGSQDASTNTDPEHEPLTAPQLLVPDVYLNLKLSSEMSEKPWSPSIPHTVTNLELPVREEPSNDNVIKQQSDHLAVPSSAELHYMAASVTNAVPPHNFKSQEVTPACLDGKSLRAGITEVKEPSVTSPTPSDIQQNKGLPKPEFRFKGQSTKSDSAEDYLLWKRLQGVSAACPAPSSAAHQLEHLSAKLQKIDEQLLAIQNIAENIEQDFPKPEMLDLHCDKIGPVDHIEFSSGPEFKKTLASKTISISEEVRFLTHMDEEDQSDKKETSEPEFSITENYSGQKTCVFPTADSAVSLSSSSDQNTTSPGMNSSDELCESVSVHPLQMTGLTDIADIIDDLIIKDGVSSEELGLTEQAMGTSRIQHYSGRHSQRTDKERREIQAWMKRKRKERMAKYLNELAEKRGQEHDPFCPRSNPLYMTSREIRLRQKMKHEKDRLLLSEHYSRRISQAYGLMNELLSESVQLPTLPQKPLPNKPSPTQSSSCQHCPSPRGENQHGHSFLINRPGKVKYMSKPSYIHKRKSFGQPQGSPWPHGTATFTIQKKAGGAKAAVRKATQSPVTFQKGSNAPCHSLQHTKKHGSAGLAPQTKQVCVEYEREETVVSPWTIPSEIHKILHESHNSLLQDLSPTEEEEPEHPFGVGGVDSVSESTGSILSKLDWNAIEDMVASVEDQGLSVHWALDL

SEQ ID NO: 889771 - protein, 667 aa, Homo sapiens
MLQDDNTSAGLHFMASVKKKAIGSQDASTNTDPEHEPLTAPQLLVPDVYLNLKLSSEMSEKPWSPSIPHTVTNLELPVREEPSNDNVIKQQSDHLAVPSSAELHYMAASVTNAVPPHNFKSQGLPKPEFRFKGQSTKSDSAEDYLLWKRLQGVSAACPAPSSAAHQLEHLSAKLQKIDEQLLAIQNIAENIEQDFPKPEMLDLHCDKIGPVDHIEFSSGPEFKKTLASKTISISEEVRFLTHMDEEDQSDKKETSEPEFSITENYSGQKTCVFPTADSAVSLSSSSDQNTTSPGMNSSDELCESVSVHPLQMTGLTDIADIIDDLIIKDGVSSEELGLTEQAMGTSRIQHYSGRHSQRTDKERREIQAWMKRKRKERMAKYLNELAEKRGQEHDPFCPRSNPLYMTSREIRLRQKMKHEKDRLLLSEHYSRRISQAYGLMNELLSESVQLPTLPQKPLPNKPSPTQSSSCQHCPSPRGENQHGHSFLINRPGKVKYMSKPSYIHKRKSFGQPQGSPWPHGTATFTIQKKAGGAKAAVRKATQSPVTFQKGSNAPCHSLQHTKKHGSAGLAPQTKQVCVEYEREETVVSPWTIPSEIHKILHESHNSLLQDLSPTEEEEPEHPFGVGGVDSVSESTGSILSKLDWNAIEDMVASVEDQGLSVHWALDL

SEQ ID NO: 889772 - protein, 228 aa, Homo sapiens
MNELLSESVQLPTLPQKPLPNKPSPTQSSSCQHCPSPRGENQHGHSFLINRPGKVKYMSKPSYIHKRKSFGQPQGSPWPHGTATFTIQKKAGGAKAAVRKATQSPVTFQKGSNAPCHSLQHTKKHGSAGLAPQTKQVCVEYEREETVVSPWTIPSEIHKILHESHNSLLQDLSPTEEEEPEHPFGVGGVDSVSESTGSILSKLDWNAIEDMVASVEDQGLSVHWALDL

SEQ ID NO: 889773 - protein, 588 aa, Homo sapiens
MAASVTNAVPPHNFKSQEVTPACLDGKSLRAGITEVKEPSVTSPTPSDIQQNKGLPKPEFRFKGQSTKSDSAEDYLLWKRLQGVSAACPAPSSAAHQLEHLSAKLQKIDEQLLAIQNIAENIEQDFPKPEMLDLHCDKIGPVDHIEFSSGPEFKKTLASKTISISEEVRFLTHMDEEDQSDKKETSEPEFSITENYSGQKTCVFPTADSAVSLSSSSDQNTTSPVFQYIPLQMTGLTDIADIIDDLIIKDGVSSEELGLTEQAMGTSRIQHYSGRHSQRTDKERREIQAWMKRKRKERMAKYLNELAEKRGQEHDPFCPRSNPLYMTSREIRLRQKMKHEKDRLLLSEHYSRRISQAYGLMNELLSESVQLPTLPQKPLPNKPSPTQSSSCQHCPSPRGENQHGHSFLINRPGKVKYMSKPSYIHKRKSFGQPQGSPWPHGTATFTIQKKAGGAKAAVRKATQSPVTFQKGSNAPCHSLQHTKKHGSAGLAPQTKQVCVEYEREETVVSPWTIPSEIHKILHESHNSLLQDLSPTEEEEPEHPFGVGGVDSVSESTGSILSKLDWNAIEDMVASVEDQGLSVHWALDL

SEQ ID NO: 889774 - protein, 598 aa, Homo sapiens; identical to SEQ ID NO: 889769

SEQ ID NO: 889775 - protein, 550 aa, Homo sapiens
MAASVTNAVPPHNFKSQEVTPACLDGKSLRAGITEVKEPSVTSPTPSDIQQNKGLPKPEFRFKGQSTKSDSAEDYLLWKRLQGVSAACPAPSSAAHQLEHLSAKLQKIDEQLLAIQNIAENIEQDFPKPEMLDLHCDKIGPVDHIEFSSGPEFKKTLASKTISISEEVRFLTHMDEEDQSDKKETSEPEFSITENYSGQKTCVFPTADSAVSLSSSSDQNTTSPGMNSSDELCESVSVHPLQMTGLTDIADIIDDLIIKDGVSSEELGLTEQAMGTSRIQHYSGRHSQRTDKERREIQAWMKRKRKERMAKYLNELAEKRGQEHDPFCPRSNPLYMTSREIRLRQKMKHEKDRLLLSEHYSRRISQAYGLMNELLSESVQLPTLPQKPLPNKPSPTQSSSCQHCPSPRGENQHGHSFLINRPGKVKYMSKPSYIHKRKSFGQPQGSPWPHGTATFTIQKKAGGAKAAVRKATQSPVTFQKGSNAPCHSLQHTKKHGSAGLAPQTKQVCVEYEREETVVSPWTIPSEIHKILHESHNSLLQEERINMVTVF

SEQ ID NO: 889776 - protein, 349 aa, Homo sapiens
MAASVTNAVPPHNFKSQEVTPACLDGKSLRAGITEVKEPSVTSPTPSDIQQNKGLPKPEFRFKGQSTKSDSAEDYLLWKRLQGVSAACPAPSSAAHQLEHLSAKLQKIDEQLLAIQNIAENIEQDFPKPEMLDLHCDKIGPVDHIEFSSGPEFKKTLASKTISISEEVRFLTHMDEEDQSDKKETSEPEFSITENYSGQKTCVFPTADSAVSLSSSSDQNTTSPGMNSSDELCESVSVHPLQMTGLTDIADIIDDLIIKDGVSSEELGLTEQAMGTSRIQHYSGRHSQRTDKERREIQAWMKRKRKERMAKYLNELAEKRGQEHDPFCPRSNPVLCHSSISLSYSSALI

SEQ ID NO: 889777 - protein, 320 aa, Homo sapiens
AVVVGHSVGSSSGGARSSRSRLLGGSYGWVCRTGPGLGLGPLVETQVREARTLQLPAFWVSSLFKLLLLASFTGRCPAGELETSDVVTVVLGQDAKLPCFYRGDSGEQVGQVAWARVDAGEGAQELALLHSKYGLHVSPAYEGRVEQPPPPRNPLDGSVLLRNAVQADEGEYECRVSTFPAGSFQARLRLRVLVPPLPSLNPGPALEEGQGLTLAASCTAEGSPAPSVTWDTEVKGTTSSRSFKHSRSAAVTSEFHLVPSRSMNGQPLTCVVSHPGLLQDQRITHILHVSSWGALEGLEQILHGEGLVLLDGPLYWGVGF

SEQ ID NO: 889778 - protein, 510 aa, Homo sapiens
MPLSLGAEMWGPEAWLLLLLLLASFTGRCPAGELETSDVVTVVLGQDAKLPCFYRGDSGEQVGQVAWARVDAGEGAQELALLHSKYGLHVSPAYEGRVEQPPPPRNPLDGSVLLRNAVQADEGEYECRVSTFPAGSFQARLRLRVLVPPLPSLNPGPALEEGQGLTLAASCTAEGSPAPSVTWDTEVKGTTSSRSFKHSRSAAVTSEFHLVPSRSMNGQPLTCVVSHPGLLQDQRITHILHVSFLAEASVRGLEDQNLWHIGREGAMLKCLSEGQPPPSYNWTRLDGPLPSGVRVDGDTLGFPPLTTEHSGIYVCHVSNEFSSRDSQVTVDVLDPQEDSGKQVDLVSASVVVVGVIAALLFCLLVVVVVLMSRYHRRKAQQMTQKYEEELTLTRENSIRRLHSHHTDPRSQPEESVGLRAEGHPDSLKDNSSCSVMSEEPEGRSYSTLTTVREIETQTELLSPGSGRAEEEEDQDEGIKQAMNHFVQENGTLRAKPTGNGIYINGRGHLV

SEQ ID NO: 889779 - protein, 510 aa, Homo sapiens; identical to SEQ ID NO: 889778

SEQ ID NO: 889780 - protein, 98 aa, Homo sapiens
NSLRLWVTSWGWRVESCLDTLGGGGFSPSRWHPSASLSSRLDGPLPSGVRVDGDTLGFPPLTTEHSGIYVCHVSNEFSSRDSQVTVDVLGKHWSRSPW

SEQ ID NO: 889781 - protein, 510 aa, Homo sapiens; identical to SEQ ID NO: 889778

SEQ ID NO: 889782 - protein, 510 aa, Homo sapiens; identical to SEQ ID NO: 889778

SEQ ID NO: 889783 - protein, 35 aa, Homo sapiens
MTQPCPTMCSCPAFVPDLPFALGLQSEEPEGRSYS

SEQ ID NO: 889784 - protein, 462 aa, Homo sapiens
MESTPSRGLNRVHLQCRNLQEFLGGLSPGVLDRLYGHPATCLAVFRELPSLAKNWVMRMLFLEQPLPQAAVALWVKKEFSKAQEESTGLLSGLRIWHTQLLPGGLQGLILNPIFRQNLRIALLGGGKAWSDDTSQLGPDKHARDVPSLDKYAEERWEVVLHFMVGSPSAAVSQDLAQLLSQAGLMKSTEPGEPPCITSAGFQFLLLDTPAQLWYFMLQYLQTAQSRGMDLVEILSFLFQLSFSTLGKDYSVEGMSDSLLNFLQHLREFGLVFQRKRKSRRYYPTRLAINLSSGVSGAGGTVHQPGFIVVETNYRLYAYTESELQIALIALFSEMLYRFPNMVVAQVTRESVQQAIASGITAQQIIHFLRTRAHPVMLKQTPVLPPTITDQIRLWELERDRLRFTEGVLYNQFLSQVDFELLLAHARELGVLVFENSAKRLMVVTPAGHSDVKRFWKRQKHSS

SEQ ID NO: 889785 - protein, 544 aa, Homo sapiens
MESTPSRGLNRVHLQCRNLQEFLGGLSPGVLDRLYGHPATCLAVFRELPSLAKNWVMRMLFLEQPLPQAAVALWVKKEFSKAQEESTGLLSGLRIWHTQLLPGGLQGLILNPIFRQNLRIALLGGGKAWSDDTSQLGPDKHARDVPSLDKYAEERWEVVLHFMVGSPSAAVSQDLAQLLSQAGLMKSTEPGEPPCITSAGFQFLLLDTPAQLWYFMLQYLQTAQSRGMDLVEILSFLFQLSFSTLGKDYSVEGMSDSLLNFLQHLREFGLVFQRKDERLDKWLPGKKQGGVLPLPLKRSGVLGQYQEAVARTEYLGLSGEEKLGVEVLHLGRDLIFQAGRCKAVTSETRHLPFYSFQRKSRRYYPTRLAINLSSGVSGAGGTVHQPGFIVVETNYRLYAYTESELQIALIALFSEMLYRFPNMVVAQVTRESVQQAIASGITAQQIIHFLRTRAHPVMLKQTPVLPPTITDQIRLWELERDRLRFTEGVLYNQFLSQVDFELLLAHARELGVLVFENSAKRLMVVTPAGHSDVKRFWKRQKHSS

SEQ ID NO: 889786 - protein, 523 aa, Homo sapiens
MESTPSRGLNRVHLQCRNLQEFLGGLSPGVLDRLYGHPATCLAVFRELPSLAKNWVMRMLFLEQPLPQAAVALWVKKEFSKAQEESTGLLSGLRIWHTQLLPGGLQGLILNPIFRQNLRIALLGGGKAWSDDTSQLGPDKHARDVPSLDKYAEERWEVVLHFMVGSPSAAVSQDLAQLLSQAGLMKSTEPGEPPCITSAGFQFLLLDTPAQLWYFMLQYLQTAQSRGMDLVEILSFLFQLSFSTLGKDYSVEGMSDSLLNFLQHLREFGLVFQRKRKSRRYYPTRLAINLSSGVSGAGGTVHQPGFIVVETNYRLYAYTGEAGQRAPGRGGWGLRECQFMFVFTWQSTELSDISHDTVKEGLEGVWVWGWPPHPLSIPGSESELQIALIALFSEMLYRFPNMVVAQVTRESVQQAIASGITAQQIIHFLRTRAHPVMLKQTPVLPPTITDQIRLWELERDRLRFTEGVLYNQFLSQVDFELLLAHARELGVLVFENSAKRLMVVTPAGHSDVKRFWKRQKHSS

SEQ ID NO: 889787 - protein, 380 aa, Homo sapiens
MESTPSRGLNRVHLQCRNLQEFLGGLSPGVLDRLYGHPATCLAVFRELPSLAKNWVMRMLFLEQPLPQAAVALWVKKEFSKAQEESTGLLSGLRIWHTQLLPGGLQGLILNPIFRQNLRIALLGGGKAWSDDTSQLGPDKHARDVPSLDKYAEERWEVVLHFMVGSPSAAVSQDLAQLLSQAGLMKSTEPGEPPCITSAGFQFLLLDTPAQLWYFMLQYLQTAQSRGMDLVEILSFLFQLSFSTLGKDYSVEGMSDSLLNFLQHLREFGLVFQRKRKSRRYYPTRLAINLSSGVSGAGGTVHQPGFIVVETNYRLYAYTESELQIALIALFSEMLYRFPNMVVAQVTRESVQQAIASGITAQQIIHFLRTRAHPVMLKQV

SEQ ID NO: 889788 - protein, 276 aa, Homo sapiens
MESTPSRGLNRVHLQCRNLQEFLGGLSPGVLDRLYGHPATCLAVFRELPSLAKNWVMRMLFLEQPLPQAAVALWVKKEFSKAQEESTGLLSGLRIWHTQLLPGGLQGLILNPIFRQNLRIALLGGGKAWSDDTSQLGPDKHARDVPSLDKYAEERWEVVLHFMVGSPSAAVSQDLAQLLSQAGLMKSTEPGEPPCITSAGFQFLLLDTPAQLWYFMLQYLQTAQSRGMDLVEILSFLFQLSFSTLGKDYSVEGMSDSLLNFLQHLREFGLVFQRKV

SEQ ID NO: 889789 - protein, 462 aa, Homo sapiens; identical to SEQ ID NO: 889784

SEQ ID NO: 889790 - protein, 175 aa, Homo sapiens
MTQVSWDQTTGGTVHQPGFIVVETNYRLYAYTESELQIALIALFSEMLYRFPNMVVAQVTRESVQQAIASGITAQQIIHFLRTRAHPVMLKQTPVLPPTITDQIRLWELERDRLRFTEGVLYNQFLSQVDFELLLAHARELGVLVFENSAKRLMVVTPAGHSDVKRFWKRQKHSS

SEQ ID NO: 889791 - protein, 183 aa, Homo sapiens
MESTPSRGLNRVHLQCRNLQEFLGGLSPGVLDRLYGHPATCLAVFRELPSLAKNWVMRMLFLEQPLPQAAVALWVKKEFSKAQEESTGLLSGLRIWHTQLLPGGLQGLILNPIFRQNLRIALLGGGKAWSDDTSQLGPDKDSGSLRVSCITSSCRKWTLSCCWPTRGSWACSCSRTRPSGSWW

SEQ ID NO: 889792 - protein, 171 aa, Homo sapiens
MVRLSELKSTVQNSRPIKTATTLPDDMITQREDAEGVAAEEEQEGDSGEQETGATDARPRRRKPARLLEATAKPEPEEKSRAKRQKDFDIAEQNESSDEESLRKERARSAEEPWTQNQQKLLELALQQYPRGSSDRWDKIARCVPSKSKEDCIARYKLLVELVQKKKQAKS

SEQ ID NO: 889793 - protein, 109 aa, Homo sapiens
MTAPCSQPAQLPGRRQLGLVPFPPPPPRTPLLWLLLLLLAAVAPARGWESGDLELFDLVEEVQLNFYQFLGVQQDASSADIRKAYRKLSLTLHPDKNKDENAETQFRQV

SEQ ID NO: 889794 - protein, 340 aa, Homo sapiens
MKPQWHDLLPCKLGIWFCLTLKALPHLIQDAGQFYAKYKETRLKEKEDALTRTELETLQKQKKVKKPKPEFPVYTPLETTYIQSYDHGTSIEEIEEQMDDWLENRNRTQKKQAPEWTEEDLSQLTRSMVKFPGGTPGRWEKIAHELGRSVTDVTTKAKQLKDSVTCSPGMVRLSELKSTVQNSRPIKTATTLPDDMITQREDAEGVAAEEEQEGDSGEQETGATDARPRRRKPARLLEATAKPEPEEKSRAKRQKDFDIAEQNESSDEESLRKERARSAEEPWTQNQQKLLELALQQYPRGSSDRWDKIARCVPSKSKEDCIARYKLLVELVQKKKQAKS

SEQ ID NO: 889795 - protein, 213 aa, Homo sapiens [sequence omitted]

SEQ ID NO: 889796 - protein, 456 aa, Homo sapiens
MKMQKLSLDKLVAIYEVLKDDERRQRYDDILINGLPDWRQPVFYYRRVRKMSNAELALLLFIILTVGHYAVVWSIYLEKQLDELLSRKKREKKKKTGSKSVDVSKLGASEKNERLLMKPQWHDLLPCKLGIWFCLTLKALPHLIQDAGQFYAKYKETRLKEKEDALTRTELETLQKQKKVKKPKPEFPVYTPLETTYIQSYDHGTSIEEIEEQMDDWLENRNRTQKKQAPEWTEEDLSQLTRSMVKFPGGTPGRWEKIAHELGRSVTDVTTKAKQLKDSVTCSPGMVRLSELKSTVQNSRPIKTATTLPDDMITQREDAEGVAAEEEQEGDSGEQETGATDARPRRRKPARLLEATAKPEPEEKSRAKRQKDFDIAEQNESSDEESLRKERARSAEEPWTQNQQKLLELALQQYPRGSSDRWDKIARCVPSKSKEDCIARYKLLVELVQKKKQAKS

SEQ ID NO: 889797 - protein, 437 aa, Homo sapiens
MMNDRQRYDDILINGLPDWRQPVFYYRRVRKMSNAELALLLFIILTVGHYAVVWSIYLEKQLDELLSRKKREKKKKTGSKSVDVSKLGASEKNERLLMKPQWHDLLPCKLGIWFCLTLKALPHLIQDAGQFYAKYKETRLKEKEDALTRTELETLQKQKKVKKPKPEFPVYTPLETTYIQSYDHGTSIEEIEEQMDDWLENRNRTQKKQAPEWTEEDLSQLTRSMVKFPGGTPGRWEKIAHELGRSVTDVTTKAKQLKDSVTCSPGMVRLSELKSTVQNSRPIKTATTLPDDMITQREDAEGVAAEEEQEGDSGEQETGATDARPRRRKPARLLEATAKPEPEEKSRAKRQKDFDIAEQNESSDEESLRKERARSAEEPWTQNQQKLLELALQQYPRGSSDRWDKIARCVPSKSKEDCIARYKLLVELVQKKKQAKS

SEQ ID NO: 889798 - protein, 388 aa, Homo sapiens
ADLKHRIYLEQQLDELLSRKKREKKKKTGSKSVDVSKLGASEKNERLLMKPQWHDLLPCKLGIWFCLTLKALPHLIQDAGQFYAKYKETRLKEKEDALTRTELETLQKQKKVKKPKPEFPVYTPLETTYIQSYDHGTSIEEIEEQMDDWLENRNRTQKKQAPEWTEEDLSQLTRSMVKFPGGTPGRWEKIAHELGRSVTDVTTKAKQLKDSVTCSPGMVRLSELKSTVQNSRPIKTATTLPDDMITQREDAEGVAAEEEQEGDSGEQETGATDARPRRRKPARLLEATAKPEPEEKSRAKRQKDFDIAEQNESSDEESLRKERARSAEEPWTQNQQKLLELALQQYPRGSSDRWDKIARCVPSKSKEDCIARYKLLVELVQKKKQAKS

SEQ ID NO: 889799 - protein, 656 aa, Homo sapiens
MEGDGSDPEPPDAGEDSKSENGENAPIYCICRKPDINCFMIGCDNCNEWFHGDCIRITEKMAKAIREWYCRECREKDPKLEIRYRHKKSRERDGNERDSSEPRDEGGGRKRPVPDPDLQRRAGSGTGVGAMLARGSASPHKSSPQPLVATPSQHHQQQQQQIKRSARMCGECEACRRTEDCGHCDFCRDMKKFGGPNKIRQKCRLRQCQLRARESYKYFPSSLSPVTPSESLPRPRRPLPTQQQPQPSQKLGRIREDEGAVASSTVKEPPEATATPEPLSDEDLPLDPDLYQDFCAGAFDDHGLPWMSDTEESPFLDPALRKRAVKVKHVKRREKKSEKKKEERYKRHRQKQKHKDKWKHPERADAKDPASLPQCLGPGCVRPAQPSSKYCSDDCGMKLAANRIYEILPQRIQQWQQSPCIAEEHGKKLLERIRREQQSARTRLQEMERRFHELEAIILRAKQQAVREDEESNEGDSDDTDLQIFCVSCGHPINPRVALRHMERCYAKYESQTSFGSMYPTRIEGATRLFCDVYNPQSKTYCKRLQVLCPEHSRDPKVPADEVCGCPLVRDVFELTGDFCRLPKRQCNRHYCWEKLRRAEVDLERVRVWYKLDELFEQERNVRTAMTNRAGLLALMLHQTIQHDPLTTDLRSSADR

SEQ ID NO: 889800 - protein, 154 aa, Homo sapiens
GNQPGQMDLPSLPLLPSLLQIPRATRLFCDVYNPQSKTYCKRLQVLCPEHSRDPKVPADEVCGCPLVRDVFELTGDFCRLPKRQCNRHYCWEKLRRAEVDLERVRVWYKLDELFEQERNVRTAMTNRAGLLALMLHQTIQHDPLTTDLRSSADR

SEQ ID NO: 889801 - protein, 529 aa, Homo sapiens
MEGDGSDPEPPDAGEDSKSENGENAPIYCICRKPDINCFMIGCDNCNEWFHGDCIRITEKMAKAIREWYCRECREKDPKLEIRYRHKKSRERDGNERDSSEPRDEGGGRKRPVPDPDLQRRAGSGTGVGAMLARGSASPHKSSPQPLVATPSQHHQQQQQQIKRSARMCGECEACRRTEDCGHCDFCRDMKKFGGPNKIRQKCRLRQCQLRARESYKYFPSSLSPVTPSESLPRPRRPLPTQQQPQPSQKLGRIREDEGAVASSTVKEPPEATATPEPLSDEDLPLDPDLYQDFCAGAFDDHGLPWMSDTEESPFLDPALRKRAVKVKHVKRREKKSEKKKEERYKRHRQKQKHKDKWKHPERADAKDPASLPQCLGPGCVRPAQPSSKYCSDDCGMKLAANRIYEILPQRIQQWQQSPCIAEEHGKKLLERIRREQQSARTRLQEMERRFHELEAIILRAKQQAVREDEESNEGDSDDTDLQIFCVSCGHPINPRVALRHMERCYAKYESQTSFGSMYPTRIEGQNIL

SEQ ID NO: 889802 - protein, 742 aa, Homo sapiens
MEGDGSDPEPPDAGEDSKSENGENAPIYCICRKPDINCFMIGCDNCNEWFHGDCIRITEKMAKAIREWYCRECREKDPKLEIRYRHKKSRERDGNERDSSEPRDEGGGRKRPVPDPDLQRRAGSGTGVGAMLARGSASPHKSSPQPLVATPSQHHQQQQQQIKRSARMCGECEACRRTEDCGHCDFCRDMKKFGGPNKIRQKCRLRQCQLRARESYKYFPSSLSPVTPSESLPRPRRPLPTQQQPQPSQKLGRIREDEGAVASSTVKEPPEATATPEPLSDEDLPLDPDLYQDFCAGAFDDHGLPWMSDTEESPFLDPALRKRAVKVKHVKRREKKSEKKKEERYKRHRQKQKHKDKWKHPERADAKDPASLPQCLGPGCVRPAQPSSKYCSDDCGMKLAANRIYEILPQRIQQWQQSPCIAEEHGKKLLERIRREQQSARTRLQEMERRFHELEAIILRAKQQAVREDEESNEGDSDDTDLQIFCVSCGHPINPRVALRHMERCYAKYESQTSFGSMYPTRIEGATRLFCDVYNPQSKTYCKRLQVLCPEHSRDPKVRFSLSSSHFAPPPCLAVPHSSLPSSPHFSFTFSSQLPCCFTLHSSFSMPPHRSLNPPFFSFSLLEPPFLFSLITAIHPPNLASLQVPADEVCGCPLVRDVFELTGDFCRLPKRQCNRHYCWEKLRRAEVDLERVRVWYKLDELFEQERNVRTAMTNRAGLLALMLHQTIQHDPLTTDLRSSADR

SEQ ID NO: 889803 - protein, 703 aa, Homo sapiens
MEGDGSDPEPPDAGEDSKSENGENAPIYCICRKPDINCFMIGCDNCNEWFHGDCIRITEKMAKAIREWYCRECREKDPKLEIRYRHKKSRERDGNERDSSEPRDEGGGRKRPVPDPDLQRRAGSGTGVGAMLARGSASPHKSSPQPLVATPSQHHQQQQQQIKRSARMCGECEACRRTEDCGHCDFCRDMKKFGGPNKIRQKCRLRQCQLRARESYKYFPSSLSPVTPSESLPRPRRPLPTQQQPQPSQKLGRIREDEGAVASSTVKEPPEATATPEPLSDEDLPLDPDLYQDFCAGAFDDHGLPWMSDTEESPFLDPALRKRAVKVKHVKRREKKSEKKKEERYKRHRQKQKHKDKWKHPERADAKDPASLPQCLGPGCVRPAQPSSKYCSDDCGMKLAANRIYEILPQRIQQWQQSPCIAEEHGKKLLERIRREQQSARTRLQEMERRFHELEAIILRAKQQAVREDEESNEGDSDDTDLQIFCVSCGHPINPRVALRHMERCYAKVGVSELRGRTMWEHQWASGGQICCLGGVLGGHAAHIHSSLHLCSSLQYESQTSFGSMYPTRIEGATRLFCDVYNPQSKTYCKRLQVLCPEHSRDPKVPADEVCGCPLVRDVFELTGDFCRLPKRQCNRHYCWEKLRRAEVDLERVRVWYKLDELFEQERNVRTAMTNRAGLLALMLHQTIQHDPLTTDLRSSADR

SEQ ID NO: 889804 - protein, 789 aa, Homo sapiens
MEGDGSDPEPPDAGEDSKSENGENAPIYCICRKPDINCFMIGCDNCNEWFHGDCIRITEKMAKAIREWYCRECREKDPKLEIRYRHKKSRERDGNERDSSEPRDEGGGRKRPVPDPDLQRRAGSGTGVGAMLARGSASPHKSSPQPLVATPSQHHQQQQQQIKRSARMCGECEACRRTEDCGHCDFCRDMKKFGGPNKIRQKCRLRQCQLRARESYKYFPSSLSPVTPSESLPRPRRPLPTQQQPQPSQKLGRIREDEGAVASSTVKEPPEATATPEPLSDEDLPLDPDLYQDFCAGAFDDHGLPWMSDTEESPFLDPALRKRAVKVKHVKRREKKSEKKKEERYKRHRQKQKHKDKWKHPERADAKDPASLPQCLGPGCVRPAQPSSKYCSDDCGMKLAANRIYEILPQRIQQWQQSPCIAEEHGKKLLERIRREQQSARTRLQEMERRFHELEAIILRAKQQAVREDEESNEGDSDDTDLQIFCVSCGHPINPRVALRHMERCYAKVGVSELRGRTMWEHQWASGGQICCLGGVLGGHAAHIHSSLHLCSSLQYESQTSFGSMYPTRIEGATRLFCDVYNPQSKTYCKRLQVLCPEHSRDPKVRFSLSSSHFAPPPCLAVPHSSLPSSPHFSFTFSSQLPCCFTLHSSFSMPPHRSLNPPFFSFSLLEPPFLFSLITAIHPPNLASLQVPADEVCGCPLVRDVFELTGDFCRLPKRQCNRHYCWEKLRRAEVDLERVRVWYKLDELFEQERNVRTAMTNRAGLLALMLHQTIQHDPLTTDLRSSADR

SEQ ID NO: 889805 - protein, 728 aa, Homo sapiens
MEGDGSDPEPPDAGEDSKSENGENAPIYCICRKPDINCFMIGCDNCNEWFHGDCIRITEKMAKAIREWYCRECREKDPKLEIRYRHKKSRERDGNERDSSEPRDEGGGRKRPVPDPDLQRRAGSGTGVGAMLARGSASPHKSSPQPLVATPSQHHQQQQQQIKRSARMCGECEACRRTEDCGHCDFCRDMKKFGGPNKIRQKCRLRQCQLRARESYKYFPSSLSPVTPSESLPRPRRPLPTQQQPQPSQKLGRIREDEGAVASSTVKEPPEATATPEPLSDEDLPLDPDLYQDFCAGAFDDHGLPWMSDTEESPFLDPALRKRAVKVKHVKRREKKSEKKKEERYKRHRQKQKHKDKWKHPERADAKDPASLPQCLGPGCVRPAQPSSKYCSDDCGMKLAANRIYEILPQRIQQWQQSPCIAEEHGKKLLERIRREQQSARTRLQEMERRFHELEAIILRAKQQAVREDEEEQAGAQQSRACTLSFPALFSFHSMQSNEGDSDDTDLQIFCVSCGHPINPRVALRHMERCYAKVGVSELRGRTMWEHQWASGGQICCLGGVLGGHAAHIHSSLHLCSSLQYESQTSFGSMYPTRIEGATRLFCDVYNPQSKTYCKRLQVLCPEHSRDPKVPADEVCGCPLVRDVFELTGDFCRLPKRQCNRHYCWEKLRRAEVDLERVRVWYKLDELFEQERNVRTAMTNRAGLLALMLHQTIQHDPLTTDLRSSADR

SEQ ID NO: 889806 - protein, 656 aa, Homo sapiens; identical to SEQ ID NO: 889799

SEQ ID NO: 889807 - protein, 656 aa, Homo sapiens; identical to SEQ ID NO: 889799

SEQ ID NO: 889808 - protein, 452 aa, Homo sapiens
MEGDGSDPEPPDAGEDSKSENGENAPIYCICRKPDINCFMIGCDNCNEWFHGDCIRITEKMAKAIREWYCRECREKDPKLEIRYRHKKSRERDGNERDSSEPRDEGGGRKRPVPDPDLQRRAGSGTGVGAMLARGSASPHKSSPQPLVATPSQHHQQQQQQIKRSARMCGECEACRRTEDCGHCDFCRDMKKFGGPNKIRQKCRLRQCQLRARESYKYFPSSLSPVTPSESLPRPRRPLPTQQQPQPSQKLGRIREDEGAVASSTVKEPPEATATPEPLSDEDLPLDPDLYQDFCAGAFDDHGLPWMSDTEESPFLDPALRKRAVKVKHVKRREKKSEKKKEERYKRHRQKQKHKDKWKHPERADAKDPASLPQCLGPGCVRPAQPSSKYCSDDCGMKLAANRIYEILPQRIHAIAITAGRSCGVRKWTWSACVCGTSWTSCLSRSAMCAQP

SEQ ID NO: 889809 - protein, 554 aa, Homo sapiens
MEGDGSDPEPPDAGEDSKSENGENAPIYCICRKPDINCFMIGCDNCNEWFHGDCIRITEKMAKAIREWYCRECREKDPKLEIRYRHKKSRERDGNERDSSEPRDEGGGRKRPVPDPDLQRRAGSGTGVGAMLARGSASPHKSSPQPLVATPSQHHQQQQQQIKRSARMCGECEACRRTEDCGHCDFCRDMKKFGGPNKIRQKCRLRQCQLRARESYKYFPSSLSPVTPSESLPRPRRPLPTQQQPQPSQKLGRIREDEGAVASSTVKEPPEATATPEPLSDEDLPLDPDLYQDFCAGAFDDHGLPWMSDTEESPFLDPALRKRAVKVKHVKRREKKSEKKKEERYKRHRQKQKHKDKWKHPERADAKDPASLPQCLGPGCVRPAQPSSKYCSDDCGMKLAANRIYEILPQRIQQWQQSPCIAEEHGKKLLERIRREQQSARTRLQEMERRFHELEAIILRAKQQAVREDEESNEGDSDDTDLQIFCVSCGHPINPRVALRHMERCYAKYESQTSFGSMYPTRIEGATRLFCDVYNPQTQTSNHMVSLSGDQPQL

SEQ ID NO: 889810 - protein, 687 aa, Homo sapiens
MEGDGSDPEPPDAGEDSKSENGENAPIYCICRKPDINCFMIGCDNCNEWFHGDCIRITEKMAKAIREWYCRECREKDPKLEIRYRHKKSRERDGNERDSSEPRDEGGGRKRPVPDPDLQRRAGSGTGVGAMLARGSASPHKSSPQPLVATPSQVSGCIKVNGCVKWFRFSPAWVLISVLGPLLQHHQQQQQQIKRSARMCGECEACRRTEDCGHCDFCRDMKKFGGPNKIRQKCRLRQCQLRARESYKYFPSSLSPVTPSESLPRPRRPLPTQQQPQPSQKLGRIREDEGAVASSTVKEPPEATATPEPLSDEDLPLDPDLYQDFCAGAFDDHGLPWMSDTEESPFLDPALRKRAVKVKHVKRREKKSEKKKEERYKRHRQKQKHKDKWKHPERADAKDPASLPQCLGPGCVRPAQPSSKYCSDDCGMKLAANRIYEILPQRIQQWQQSPCIAEEHGKKLLERIRREQQSARTRLQEMERRFHELEAIILRAKQQAVREDEESNEGDSDDTDLQIFCVSCGHPINPRVALRHMERCYAKYESQTSFGSMYPTRIEGATRLFCDVYNPQSKTYCKRLQVLCPEHSRDPKVPADEVCGCPLVRDVFELTGDFCRLPKRQCNRHYCWEKLRRAEVDLERVRVWYKLDELFEQERNVRTAMTNRAGLLALMLHQTIQHDPLTTDLRSSADR

SEQ ID NO: 889811 - protein, 121 aa, Homo sapiens
HERWRRLRGLGGSRPATYWFAAETTHGACAIGVRCLGGVTRSGSSCGRLCNRLGRRRVVCAGSRVAGGGREGVRRERRYGGRWFRPRASRCRGGQQVREWGECAHLLHLPQTGHQLLHDRV

SEQ ID NO: 889812 - protein, 531 aa, Homo sapiens
MSGSMGTASGSLRRWPRPSGSGTVGSAEHHQQQQQQIKRSARMCGECEACRRTEDCGHCDFCRDMKKFGGPNKIRQKCRLRQCQLRARESYKYFPSSLSPVTPSESLPRPRRPLPTQQQPQPSQKLGRIREDEGAVASSTVKEPPEATATPEPLSDEDLPLDPDLYQDFCAGAFDDHGLPWMSDTEESPFLDPALRKRAVKVKHVKRREKKSEKKKEERYKRHRQKQKHKDKWKHPERADAKDPASLPQCLGPGCVRPAQPSSKYCSDDCGMKLAANRIYEILPQRIQQWQQSPCIAEEHGKKLLERIRREQQSARTRLQEMERRFHELEAIILRAKQQAVREDEESNEGDSDDTDLQIFCVSCGHPINPRVALRHMERCYAKYESQTSFGSMYPTRIEGATRLFCDVYNPQSKTYCKRLQVLCPEHSRDPKVPADEVCGCPLVRDVFELTGDFCRLPKRQCNRHYCWEKLRRAEVDLERVRVWYKLDELFEQERNVRTAMTNRAGLLALMLHQTIQHDPLTTDLRSSADR

SEQ ID NO: 889813 - protein, 504 aa, Homo sapiens
MHHQQQQQQIKRSARMCGECEACRRTEDCGHCDFCRDMKKFGGPNKIRQKCRLRQCQLRARESYKYFPSSLSPVTPSESLPRPRRPLPTQQQPQPSQKLGRIREDEGAVASSTVKEPPEATATPEPLSDEDLPLDPDLYQDFCAGAFDDHGLPWMSDTEESPFLDPALRKRAVKVKHVKRREKKSEKKKEERYKRHRQKQKHKDKWKHPERADAKDPASLPQCLGPGCVRPAQPSSKYCSDDCGMKLAANRIYEILPQRIQQWQQSPCIAEEHGKKLLERIRREQQSARTRLQEMERRFHELEAIILRAKQQAVREDEESNEGDSDDTDLQIFCVSCGHPINPRVALRHMERCYAKYESQTSFGSMYPTRIEGATRLFCDVYNPQSKTYCKRLQVLCPEHSRDPKVPADEVCGCPLVRDVFELTGDFCRLPKRQCNRHYCWEKLRRAEVDLERVRVWYKLDELFEQERNVRTAMTNRAGLLALMLHQTIQHDPLTTDLRSSADR

SEQ ID NO: 889814 - protein, 535 aa, Homo sapiens
LPKPKKNSLTFPPGQKAPLFRGFGEAPKTPSQHHQQQQQQIKRSARMCGECEACRRTEDCGHCDFCRDMKKFGGPNKIRQKCRLRQCQLRARESYKYFPSSLSPVTPSESLPRPRRPLPTQQQPQPSQKLGRIREDEGAVASSTVKEPPEATATPEPLSDEDLPLDPDLYQDFCAGAFDDHGLPWMSDTEESPFLDPALRKRAVKVKHVKRREKKSEKKKEERYKRHRQKQKHKDKWKHPERADAKDPASLPQCLGPGCVRPAQPSSKYCSDDCGMKLAANRIYEILPQRIQQWQQSPCIAEEHGKKLLERIRREQQSARTRLQEMERRFHELEAIILRAKQQAVREDEESNEGDSDDTDLQIFCVSCGHPINPRVALRHMERCYAKYESQTSFGSMYPTRIEGATRLFCDVYNPQSKTYCKRLQVLCPEHSRDPKVPADEVCGCPLVRDVFELTGDFCRLPKRQCNRHYCWEKLRRAEVDLERVRVWYKLDELFEQERNVRTAMTNRAGLLALMLHQTIQHDPLTTDLRSSADR

SEQ ID NO: 889815 - protein, 439 aa, Homo sapiens
MSALQLSPVTPSESLPRPRRPLPTQQQPQPSQKLGRIREDEGAVASSTVKEPPEATATPEPLSDEDLPLDPDLYQDFCAGAFDDHGLPWMSDTEESPFLDPALRKRAVKVKHVKRREKKSEKKKEERYKRHRQKQKHKDKWKHPERADAKDPASLPQCLGPGCVRPAQPSSKYCSDDCGMKLAANRIYEILPQRIQQWQQSPCIAEEHGKKLLERIRREQQSARTRLQEMERRFHELEAIILRAKQQAVREDEESNEGDSDDTDLQIFCVSCGHPINPRVALRHMERCYAKYESQTSFGSMYPTRIEGATRLFCDVYNPQSKTYCKRLQVLCPEHSRDPKVPADEVCGCPLVRDVFELTGDFCRLPKRQCNRHYCWEKLRRAEVDLERVRVWYKLDELFEQERNVRTAMTNRAGLLALMLHQTIQHDPLTTDLRSSADR

SEQ ID NO: 889816 - protein, 365 aa, Homo sapiens
RPSEEGNGRREKIQEEEGDRDERRGRWRGGGRWEEGEDTGGGRSWGGREKEERYKRHRQKQKHKDKWKHPERADAKDPASLPQCLGPGCVRPAQPSSKYCSDDCGMKLAANRIYEILPQRIQQWQQSPCIAEEHGKKLLERIRREQQSARTRLQEMERRFHELEAIILRAKQQAVREDEESNEGDSDDTDLQIFCVSCGHPINPRVALRHMERCYAKYESQTSFGSMYPTRIEGATRLFCDVYNPQSKTYCKRLQVLCPEHSRDPKVPADEVCGCPLVRDVFELTGDFCRLPKRQCNRHYCWEKLRRAEVDLERVRVWYKLDELFEQERNVRTAMTNRAGLLALMLHQTIQHDPLTTDLRSSADR

SEQ ID NO: 889817 - protein, 314 aa, Homo sapiens
MEGDGSDPEPPDAGEDSKSENGENAPIYCICRKPDINCFMIGCDNCNEWFHGDCIRITEKMAKAIREWYCRECREKDPKLEIRYRHKKSRERDGNERDSSEPRDEGGGRKRPVPDPDLQRRAGSGTGVGAMLARGSASPHKSSPQPLVATPSQHHQQQQQQIKRSARMCGECEACRRTEDCGHCDFCRDMKKFGGPNKIRQKCRLRQCQLRARESYKYFPSSLSPVTPSESLPRPRRPLPTQQQPQPSQKLGRIREDEGAVASSTVKEPPEATATPEPLSDEDLPLDPDLYQDFCAGAFDDHGLVSRQEHPLVE

SEQ ID NO: 889818 - protein, 185 aa, Homo sapiens [sequence omitted]

SEQ ID NO: 889819 - protein, 154 aa, Homo sapiens; identical to SEQ ID NO: 889800

SEQ ID NO: 889820 - protein, 131 aa, Homo sapiens
TIPPVTYLLLLLPFASILPFSLTDHLTHSVACYLPCSRIYEILPQRIQQWQQSPCIAEEHGKKLLERIRREQQSARTRLQEMERRFHELEAIILRAKQQAVREDEEEQAGAQQSRACTLSFPALLFLPFHA

SEQ ID NO: 889821 - protein, 112 aa, Homo sapiens
MGLRAGKQGMMGPHSSFSRYPSGVQGSRYSTCQVSDQRGTGNGKDLKEGQAELWEATSSRKPSLIHPSQAVSICSQISTALILRSASISLPRLQALLGPRLFLTCAQWHPCT

SEQ ID NO: 889822 - protein, 112 aa, Homo sapiens; identical to SEQ ID NO: 889821

SEQ ID NO: 889823 - protein, 112 aa, Homo sapiens; identical to SEQ ID NO: 889821

SEQ ID NO: 889824 - protein, 755 aa, Homo sapiens
LQSRLSLEVAVTCMKRKKGGPRDERGLHAWGPEWWAGTVVLLQGCWPSLAPAPVGPAREPPCARAGFTHPGEVIPCARAGARAAREPSNPSMRHQPFPPGTSFLFPNSREGGPGTYKLEPWPIRMSEAASQGLRAAARSVWAGTDRRGCRHRRPVPLCSGTALSQCPRFPRRLHAARLGNMLGVLVLGALALAGLGFPAPAEPQPGGSQCVEHDCFALYPGPATFLNASQICDGLRGHLMTVRSSVAADVISLLLNGDGGVGRRRLWIGLQLPPGCGDPKRLGPLRGFQWVTGDNNTSYSRWARLDLNGAPLCGPLCVAVSAAEATVPSEPIWEEQQCEVKADGFLCEFHFPATCRPLAVEPGAAAAAVSITYGTPFAARGADFQALPVGSSAAVAPLGLQLMCTAPPGAVQGHWAREAPGAWDCSVENGGCEHACNAIPGAPRCQCPAGAALQADGRSCTASATQSCNDLCEHFCVPNPDQPGSYSCMCETGYRLAADQHRCEDVDDCILEPSPCPQRCVNTQGGFECHCYPNYDLVDGECVEPVDPCFRANCEYQCQPLNQTSYLCVCAEGFAPIPHEPHRCQMFCNQTACPADCDPNTQASCECPEGYILDDGFICTDIDECENGGFCSGVCHNLPGTFECICGPDSALARHIGTDCDSGKVDGGDSGSGEPPPSPTPGSTLTPPAVGLVHSGLLIGISIASLCLVVALLALLCHLRKKQGAARAKMEYKCAAPSKEVVLQHVRTERTPQRL

SEQ ID NO: 889825 - protein, 755 aa, Homo sapiens; identical to SEQ ID NO: 889824

SEQ ID NO: 889826 - protein, 755 aa, Homo sapiens; identical to SEQ ID NO: 889824

SEQ ID NO: 889827 - protein, 681 aa, Homo sapiens
LQSRLSLEVAVTCMKRKKGGPRDERGLHAWGPEWWAGTVVLLQGCWPSLAPAPVGPAREPPCARAGFTHPGEVIPCRGRAQGRPENPAIRVCGISPSHQALPSFSRTSREGGPGTYKLEPWPIRMSEAASQGLRAAARSVWAGTDRRGCRHRRPVPLCSGTALSQCPRFPRRLHAARLGNMLGVLVLGALALAGLGFPAPGCGDPKRLGPLRGFQWVTGDNNTSYSRWARLDLNGAPLCGPLCVAVSAAEATVPSEPIWEEQQCEVKADGFLCEFHFPATCRPLAVEPGAAAAAVSITYGTPFAARGADFQALPVGSSAAVAPLGLQLMCTAPPGAVQGHWAREAPGAWDCSVENGGCEHACNAIPGAPRCQCPAGAALQADGRSCTASATQSCNDLCEHFCVPNPDQPGSYSCMCETGYRLAADQHRCEDVDDCILEPSPCPQRCVNTQGGFECHCYPNYDLVDGECVEPVDPCFRANCEYQCQPLNQTSYLCVCAEGFAPIPHEPHRCQMFCNQTACPADCDPNTQASCECPEGYILDDGFICTDIDECENGGFCSGVCHNLPGTFECICGPDSALARHIGTDCDSGKVDGGDSGSGEPPPSPTPGSTLTPPAVGLVHSGLLIGISIASLCLVVALLALLCHLRKKQGAARAKMEYKCAAPSKEVVLQHVRTERTPQRL

SEQ ID NO: 889828 - protein, 98 aa, Homo sapiens
QNCRFCLQCSLHLIRSRQARCSTRILGARLRPFSCARSLVPSLGYGGMIYILISLFSVYRHFMVFVCFLCSYLYVSSIHFAQLSGLSLSTNSHLSCDR

SEQ ID NO: 889829 - protein, 755 aa, Homo sapiens; identical to SEQ ID NO: 889824

SEQ ID NO: 889830 - protein, 755 aa, Homo sapiens; identical to SEQ ID NO: 889824

SEQ ID NO: 889831 - protein, 510 aa, Homo sapiens
MAAAALRDPAQVPVAADLLTDHEEGYVTFEDVAVYFSQEEWRLLDDAQRLLYRNVMLENFTLLASLGLASSKTHEITQLESWEEPFMPAWEVVTSAIPRGCWHGAEAEEAPEQIASVGLLSSNIQQHQKQHCGEKPLKRQQGRVPVLRSCKVHLSEKSLQSREVGKALLISSGVLKHQVTHTGEKSHRSSKSREAFHAGKRHYKCSECGKAFGQKYLLVQHQRLHAGKKTYECSECGKLFRDMSNLFIHQIVHTGERPYGCSNCGKSFSRNAHLIEHQRVHTGEKPFTCSECGKAFRHNSTLVQHHKIHTGVRPYECSECGKLFSFNSSLMKHQRIHTGERPYKCSECGKFYSHKSNLIKHWRVHTGERPYKCSDCGKFFTQCSSLMQHQKVHTGEKPFKCNECGRFFRENSTLVRHQRVHTGAKPYECRECGKFFSQSSTLMQHRKVHIGEKPFKCNECGRLFRENSSLVKHQRVHTGAKPYECRECGKFFRHNSSLFKHRRIHTGEMQ

SEQ ID NO: 889832 - protein, 491 aa, Homo sapiens
MNLTEGYVTFEDVAVYFSQEEWRLLDDAQRLLYRNVMLENFTLLASLGLASSKTHEITQLESWEEPFMPAWEVVTSAIPRGCWHGAEAEEAPEQIASVGLLSSNIQQHQKQHCGEKPLKRQQGRVPVLRSCKVHLSEKSLQSREVGKALLISSGVLKHQVTHTGEKSHRSSKSREAFHAGKRHYKCSECGKAFGQKYLLVQHQRLHAGKKTYECSECGKLFRDMSNLFIHQIVHTGERPYGCSNCGKSFSRNAHLIEHQRVHTGEKPFTCSECGKAFRHNSTLVQHHKIHTGVRPYECSECGKLFSFNSSLMKHQRIHTGERPYKCSECGKFYSHKSNLIKHWRVHTGERPYKCSDCGKFFTQCSSLMQHQKVHTGEKPFKCNECGRFFRENSTLVRHQRVHTGAKPYECRECGKFFSQSSTLMQHRKVHIGEKPFKCNECGRLFRENSSLVKHQRVHTGAKPYECRECGKFFRHNSSLFKHRRIHTGEMQ

SEQ ID NO: 889833 - protein, 115 aa, Homo sapiens
MAAAALRDPAQGYVTFEDVAVYFSQEEWRLLDDAQRLLYRNVMLENFTLLASLGLASSKTHEITQLESWEEPFMPAWEVVTSAIPRETLRMAFMRELAIEHHSSKYAHWRQDENS

SEQ ID NO: 889834 - protein, 34 aa, Homo sapiens
MVSSSNCTSLPHLPTGSIAVAAMHKDPAQVSQGF

SEQ ID NO: 889835 - protein, 477 aa, Homo sapiens
MAAAALRDPAQVPVAADLLTDHEEGYVTFEDVAVYFSQEEWRLLDDAQRLLYRNVMLENFTLLASLGCWHGAEAEEAPEQIASVGLLSSNIQQHQKQHCGEKPLKRQQGRVPVLRSCKVHLSEKSLQSREVGKALLISSGVLKHQVTHTGEKSHRSSKSREAFHAGKRHYKCSECGKAFGQKYLLVQHQRLHAGKKTYECSECGKLFRDMSNLFIHQIVHTGERPYGCSNCGKSFSRNAHLIEHQRVHTGEKPFTCSECGKAFRHNSTLVQHHKIHTGVRPYECSECGKLFSFNSSLMKHQRIHTGERPYKCSECGKFYSHKSNLIKHWRVHTGERPYKCSDCGKFFTQCSSLMQHQKVHTGEKPFKCNECGRFFRENSTLVRHQRVHTGAKPYECRECGKFFSQSSTLMQHRKVHIGEKPFKCNECGRLFRENSSLVKHQRVHTGAKPYECRECGKFFRHNSSLFKHRRIHTGEMQ

SEQ ID NO: 889836 - protein, 182 aa, Homo sapiens
MVFEDVAIYFSQEEWGILNDAQRHLHSNVMLENFALLSSVGCWHGAKDEEVPSKQCVSVRVLQVTIPKPALSTLKAQPCKMCSSILKDILHLAEHDGTHPEQGLYTCAAEHDLHQKEQIREKLTRSDEWRPSFVNHSAHVGERNFTCTQGGKDFTASSDLLQQQVLNSGWKLYRDTQDGEAF

SEQ ID NO: 889837 - protein, 497 aa, Homo sapiens
MAAAALRDPAQGYVTFEDVAVYFSQEEWRLLDDAQRLLYRNVMLENFTLLASLGLASSKTHEITQLESWEEPFMPAWEVVTSAIPRGCWHGAEAEEAPEQIASVGLLSSNIQQHQKQHCGEKPLKRQQGRVPVLRSCKVHLSEKSLQSREVGKALLISSGVLKHQVTHTGEKSHRSSKSREAFHAGKRHYKCSECGKAFGQKYLLVQHQRLHAGKKTYECSECGKLFRDMSNLFIHQIVHTGERPYGCSNCGKSFSRNAHLIEHQRVHTGEKPFTCSECGKAFRHNSTLVQHHKIHTGVRPYECSECGKLFSFNSSLMKHQRIHTGERPYKCSECGKFYSHKSNLIKHWRVHTGERPYKCSDCGKFFTQCSSLMQHQKVHTGEKPFKCNECGRFFRENSTLVRHQRVHTGAKPYECRECGKFFSQSSTLMQHRKVHIGEKPFKCNECGRLFRENSSLVKHQRVHTGAKPYECRECGKFFRHNSSLFKHRRIHTGEMQ

SEQ ID NO: 889838 - protein, 182 aa, Homo sapiens; identical to SEQ ID NO: 889836

SEQ ID NO: 889839 - protein, 1209 aa, Homo sapiens
NSARALPSRLDYLKLLSVLEMILPPNVCVSLSSPTCIVDIYNVPAIVLQVHHIFVFVLGGKGRARQPGFIFLQVHASRLLYLQCFQHLLIKGESFIASTMKETSRKGMELENYKQPVVLREDNCRRRRRMKPRSAAASLSSMELIPIEFVLPTSQRKCKSPETALLHVAGHGNVEQMKAQVWLRALETSVAADFYHRLGPHHFLLLYQKKGQWYEIYDKYQVVQTLDCLRYWKATHRSPGQIHLVQRHPPSEESQAFQRQLTALIGYDVTDVSNVHDDELEFTRRGLVTPRMAEVASRDPKLYAMHPWVTSKPLPEYLWKKIANNCIFIVIHRSTTSQTIKVSPDDTPGAILQSFFTKMAKKKSLMDIPESQSEQDFVLRVCGRDEYLVGETPIKNFQWVRHCLKNGEEIHVVLDTPPDPALDEVRKEEWPLVDDCTGVTGYHEQLTIHGKDHESVFTVSLWDCDRKFRVKIRGIDIPVLPRNTDLTVFVEANIQHGQQVLCQRRTSPKPFTEEVLWNVWLEFSIKIKDLPKGALLNLQIYCGKAPALSSKASAESPSSESKGKVRLLYYVNLLLIDHRFLLRRGEYVLHMWQISGKGEDQGSFNADKLTSATNPDKENSMSISILLDNYCHPIALPKHQPTPDPEGDRVRAEMPNQLRKQLEAIIATDPLNPLTAEDKELLWHFRYESLKHPKAYPKLFSSVKWGQQEIVAKTYQLLARREVWDQSALDVGLTMQLLDCNFSDENVRAIAVQKLESLEDDDVLHYLLQLVQAVKFEPYHDSALARFLLKRGLRNKRIGHFLFWFLRSEIAQSRHYQQRFAVILEAYLRGCGTAMLHDFTQQVQVIEMLQKVTLDIKSLSAEKYDVSSQVISQLKQKLENLQNSQLPESFRVPYDPGLKAGALAIEKCKVMASKKKPLWLEFKCADPTALSNETIGIIFKHGDDLRQDMLILQILRIMESIWETESLDLCLLPYGCISTGDKIGMIEIVKDATTIAKIQQSTVGNTGAFKDEVLNHWLKEKSPTEEKFQAAVERFVYSCAGYCVATFVLGIGDRHNDNIMITETGNLFHIDFGHILGNYKSFLGINKERVPFVLTPDFLFVMGTSGKKTSPHFQKFQDICVKAYLALRHHTNLLIILFSMMLMTGMPQLTSKEDIEYIRDALTVGKNEEDAKKYFLDQIEVCRDKGWTVQFNWFLHLVLGIKQGEKHSA

SEQ ID NO: 889840 - protein, 375 aa, Homo sapiens
MLHDFTQQVQVIEMLQKVTLDIKSLSAEKYDVSSQVISQLKQKLENLQNSQLPESFRVPYDPGLKAGALAIEKCKVMASKKKPLWLEFKCADPTALSNETIGIIFKHGDDLRQDMLILQILRIMESIWETESLDLCLLPYGCISTGDKIGMIEIVKDATTIAKIQQSTVGNTGAFKDEVLNHWLKEKSPTEEKFQAAVERFVYSCAGYCVATFVLGIGDRHNDNIMITETGNLFHIDFGHILGNYKSFLGINKERVPFVLTPDFLFVMGTSGKKTSPHFQKFQDICVKAYLALRHHTNLLIILFSMMLMTGMPQLTSKEDIEYIRDALTVGKNEEDAKKYFLDQIEVCRDKGWTVQFNWFLHLVLGIKQGEKHSA

SEQ ID NO: 889841 - protein, 404 aa, Homo sapiens
PEVGAFPAAIPAVLTSRLFFCAGGLPAVMKDVPGFLQQSQSSGPGQPAVWHRLEELYTKKLWHQLTLQVLDFVQDPCFAQGDGLIKLYENFISEFEHRVNPLSLVEIILHVVRQMTDPNVALTFLEKTREKVKSSDEAVILCKTAIGALKLNIGDLQVTKETIEDVEEMLNNLPGVTSVHSRFYDLSSKYYQTIGNHASYYKDALRFLGCVDIKDLPVSEQQERAFTLGLAGLLGEGVFNFGELLMHPVLESLRNTDRQWLIDTLYAFNSGNVERFQTLKTAWGQQPDLAANEAQLLRKIQLLCLMEMTFTRPANHRQLTFEEIAKSAKITVNEVELLVMKALSVGLVKGSIDEVDKRVHMTWVQPRVLDLQQIKGMKDRLEFWCTDVKSMEMLVEHQAHDILT

SEQ ID NO: 889842 - protein, 404 aa, Homo sapiens; identical to SEQ ID NO: 889841

SEQ ID NO: 889843 - protein, 205 aa, Homo sapiens
PEVGAFPAAIPAVLTSRLFFCAGGLPAVMKDVPGFLQQSQSSGPGQPAVWHRLEELYTKKLWHQLTLQVLDFVQDPCFAQGDGLIKLYENFISEFEHRVNPLSLVEIILHVVRQMTDPNVALTFLEKTREKVKSSDEAVILCKTAIGALKLNIGDLQVTKETIEDVEEMLNNLPGVTSVHSRFYDLSIPIHLYGHLFRCGLRMFL

SEQ ID NO: 889844 - protein, 139 aa, Homo sapiens
PEVGAFPAAIPAVLTSRLFFCAGGLPAVMKDVPGFLQQSQSSGPGQPAVWHRLEELYTKKLWHQLTLQVLDFVQDPCFAQGDGLIKLFVKIYQKILNTEGVPCAPREITLNGEREMSLLIVALPLLEKTLERGKEGDAQ

SEQ ID NO: 889845 - protein, 92 aa, Homo sapiens
VRRRLSKVKLLLGEGVFNFGGLLMHPVLESLRNTDRQWLIDTLYAFNSGNVERFQTLKTAWGQQLKALSCCSDTGRSLMSTQQERVSVELGT

SEQ ID NO: 889846 - protein, 404 aa, Homo sapiens; identical to SEQ ID NO: 889841

SEQ ID NO: 889847 - protein, 404 aa, Homo sapiens; identical to SEQ ID NO: 889841

SEQ ID NO: 889848 - protein, 404 aa, Homo sapiens; identical to SEQ ID NO: 889841

SEQ ID NO: 889849 - protein, 404 aa, Homo sapiens; identical to SEQ ID NO: 889841

SEQ ID NO: 889850 - protein, 338 aa, Homo sapiens
PEVGAFPAAIPAVLTSRLFFCAGGLPAVMKDVPGFLQQSQSSGPGQPAVWHRLEELYTKKLWHQLTLQVLDFVQDPCFAQGDGLIKLYENFISEFEHRVNPLSLVEIILHVVRQMTDPNVALTFLEKTREKVKSSDEAVILCKTAIGALKLNIGDLQVTKETIEDVEEMLNNLPGVTSVHSRFYDLSSKYYQTIGNHASYYKDALRFLGCVDIKDLPVSEQQERAFTLGLAGLLGEGVFNFGELLMHPVLESLRNTDRQWLIDTLYAFNSGNVERFQTLKTAWGQQPDLAANEAQLLRKIQLLCLMEIKGMKDRLEFWCTDVKSMEMLVEHQAHDILT

SEQ ID NO: 889851 - protein, 410 aa, Homo sapiens
PEVGAFPAAIPAVLTSRLFFCAGGLPAVMKDVPGFLQQSQSSGPGQPAVWHRLEELYTKKLWHQLTLQVLDFVQDPCFAQGDGLIKLYENFISEFEHRVNPLSLVEIILHVVRQMTDPNVALTFLEKTREKVKSSDEAVILCKTAIGALKLNIGDLQVTKETIEDVEEMLNNLPGVTSVHSRFYDLSSKYYQTIGNHASYYKDALRFLGCVDIKDLPVSEQQERAFTLGLAGLLGEGVFNFGELLMHPVLESLRNTDRQWLIDTLYAFNSGNVERFQTLKTAWGQQPDLAANEAQLLRKIQLLCLMEMTFTRPANHRQLTFEEIAKSAKITVNEVELLVMKALSVGLVKGSIDEVDKRVHMTWVQPRVLDLQQIKGMKDRLEFWCTDVKSMEMLVEHQAHDIYTALFRRF

SEQ ID NO: 889852 - protein, 311 aa, Homo sapiens
MVSLRVNPLSLVEIILHVVRQMTDPNVALTFLEKTREKVKSSDEAVILCKTAIGALKLNIGDLQVTKETIEDVEEMLNNLPGVTSVHSRFYDLSSKYYQTIGNHASYYKDALRFLGCVDIKDLPVSEQQERAFTLGLAGLLGEGVFNFGELLMHPVLESLRNTDRQWLIDTLYAFNSGNVERFQTLKTAWGQQPDLAANEAQLLRKIQLLCLMEMTFTRPANHRQLTFEEIAKSAKITVNEVELLVMKALSVGLVKGSIDEVDKRVHMTWVQPRVLDLQQIKGMKDRLEFWCTDVKSMEMLVEHQAHDILT

SEQ ID NO: 889853 - protein, 432 aa, Homo sapiens
PEVGAFPAAIPAVLTSRLFFCAGGLPAVMKDVPGFLQQSQSSGPGQPAVWHRLEELYTKKLWHQLTLQVLDFVQDPCFAQGDGLIKLYENFISEFEHSKSLSSVFHFGDEYIDARWCSKTGGFYFRVNPLSLVEIILHVVRQMTDPNVALTFLEKTREKVKSSDEAVILCKTAIGALKLNIGDLQVTKETIEDVEEMLNNLPGVTSVHSRFYDLSSKYYQTIGNHASYYKDALRFLGCVDIKDLPVSEQQERAFTLGLAGLLGEGVFNFGELLMHPVLESLRNTDRQWLIDTLYAFNSGNVERFQTLKTAWGQQPDLAANEAQLLRKIQLLCLMEMTFTRPANHRQLTFEEIAKSAKITVNEVELLVMKALSVGLVKGSIDEVDKRVHMTWVQPRVLDLQQIKGMKDRLEFWCTDVKSMEMLVEHQAHDILT

SEQ ID NO: 889854 - protein, 412 aa, Homo sapiens
PEVGAFPAAIPAVLTSRLFFCAGGLPAVMKDVPGFLQQSQSSGPGQPAVWHRLEELYTKKLWHQLTLQVLDFVQDPCFAQGDGLIKLYENFISEFEHRVNPLSLVEIILHVVRQMTDFHEGQRIHPNVALTFLEKTREKVKSSDEAVILCKTAIGALKLNIGDLQVTKETIEDVEEMLNNLPGVTSVHSRFYDLSSKYYQTIGNHASYYKDALRFLGCVDIKDLPVSEQQERAFTLGLAGLLGEGVFNFGELLMHPVLESLRNTDRQWLIDTLYAFNSGNVERFQTLKTAWGQQPDLAANEAQLLRKIQLLCLMEMTFTRPANHRQLTFEEIAKSAKITVNEVELLVMKALSVGLVKGSIDEVDKRVHMTWVQPRVLDLQQIKGMKDRLEFWCTDVKSMEMLVEHQAHDILT

SEQ ID NO: 889855 - protein, 208 aa, Homo sapiens
FDGDSPDALRFLGCVDIKDLPVSEQQERAFTLGLAGLLGEGVFNFGELLMHPVLESLRNTDRQWLIDTLYAFNSGNVERFQTLKTAWGQQPDLAANEAQLLRKIQLLCLMEMTFTRPANHRQLTFEEIAKSAKITVNEVELLVMKALSVGLVKGSIDEVDKRVHMTWVQPRVLDLQQIKGMKDRLEFWCTDVKSMEMLVEHQAHDILT

SEQ ID NO: 889856 - protein, 320 aa, Homo sapiens
PEVGAFPAAIPAVLTSRLFFCAGGLPAVMKDVPGFLQQSQSSGPGQPAVWHRLEELYTKKLWHQLTLQVLDFVQDPCFAQGDGLIKLYENFISEFEHRVNPLSLVEIILHVVRQMTDPNVALTFLEKTREKVKSSDEAVILCKTAIGALKLNIGDLQVTKETIEDVEEMLNNLPGVTSVHSRFYDLSSKYYQTIGNHASYYKDALRFLGCVDIKDLPVSEQQERAFTLGLAGLLGEGVFNFGELLMHPVLESLRNTDRQWLIDTLYAFNSGNVERFQTLKTAWGQQPELAANEAKLLREIHVMLMGYFTHPAHPDPLWEC

SEQ ID NO: 889857 - protein, 313 aa, Homo sapiens
PEVGAFPAAIPAVLTSRLFFCAGGLPAVMKDVPGFLQQSQSSGPGQPAVWHRLEELYTKKLWHQLTLQVLDFVQDPCFAQGDGLIKLYENFISEFEHRVNPLSLVEIILHVVRQMTDPNVALTFLEKTREKVKSSDEAVILCKTAIGALKLNIGDLQVTKETIEDVEEMLNNLPGVTSVHSRFYDLSSKYYQTIGNHASYYKDALRFLGCVDIKDLPVSEQQERAFTLGLAGLLGEGVFNFGELLMHPVLESLRNTDRQWLIDTLYAFNSGNVERFQTLKTAWGQQVGLPRCPALIPPCVYSLIQQMFIERLP

SEQ ID NO: 889858 - protein, 159 aa, Homo sapiens [sequence omitted]

SEQ ID NO: 889859 - protein, 163 aa, Homo sapiens
PVMQLLPHCMSLLVYTHICLSPLELKLLRKWPLDFWFAVVTPGQPWQIVASSTCSGIEQWLLSETPMTFTRPANHRQLTFEEIAKSAKITVNEVELLVMKALSVGLVKGSIDEVDKRVHMTWVQPRVLDLQQIKGMKDRLEFWCTDVKSMEMLVEHQAHDILT

SEQ ID NO: 889860 - protein, 246 aa, Homo sapiens
PEVGAFPAAIPAVLTSRLFFCAGGLPAVMKDVPGFLQQSQSSGPGQPAVWHRLEELYTKKLWHQLTLQVLDFVQDPCFAQGDGLIKLYENFISEFEHRVNPLSLVEIILHVVRQMTDPNVALTFLEKTREKVKSSDEAVILCKTAIGALKLNIGDLQVTKETIEDVEEMLNNLPGVTSVHSRFYDLSSKYYQTIGNHASYYKDALRFLGCVDIKDLPVSEQQERAFTLGLAGLLGEGVFNFGELVS

SEQ ID NO: 889861 - protein, 150 aa, Homo sapiens
PEVGAFPAAIPAVLTSRLFFCAGGLPAVMKDVPGFLQQSQSSGPGQPAVWHRLEELYTKKLWHQLTLQVLDFVQDPCFAQGDGLIKLYENFISEFEHRVNPLSLVEIILHVVRQMTDPNVALTFLEKTREKVKSSDEAVILCKTAIGALK

SEQ ID NO: 889862 - protein, 373 aa, Homo sapiens
PEVGAFPAAIPAVLTSRLFFCAGGLPAVMKDVPGFLQQSQSSGPGQPAVWHRLEELYTKKLWHQLTLQVLDFVQDPCFAQGDGLIKLYENFISEFEHRVNPLSLVEIILHVVRQMTDPNVALTFLEKTREKVKSSDEAVILCKTAIGALKLNIGDLQVTKETIEDVEEMLNNLPGVTSVHSRFYDLSSKYYQTIGNHASYYKDALRFLGCVDIKDLPVSEQQERAFTLGLAGLLGEGVFNFGELLMHPVLESLRNTDRQWLIDTLYAFNSGNVERFQTLKTAWGQQPDLAANEAQLLRKIQLLCLMEMTFTRPANHRQLTFEEIAKSAKITVNEVELLVMKALSVGLVKGSIDEVDKRVHMTWVQPRVLDLQQ

SEQ ID NO: 889863 - protein, 347 aa, Homo sapiens
GDGRHYCYPHFTCAVDTENIRRVFNDCRGIDKHQKSKSHIRISHLSNYVKNDFHEGQRIHPNVALTFLEKTREKVKSSDEAVILCKTAIGALKLNIGDLQVTKETIEDVEEMLNNLPGVTSVHSRFYDLSSKYYQTIGNHASYYKDALRFLGCVDIKDLPVSEQQERAFTLGLAGLLGEGVFNFGELLMHPVLESLRNTDRQWLIDTLYAFNSGNVERFQTLKTAWGQQPDLAANEAQLLRKIQLLCLMEMTFTRPANHRQLTFEEIAKSAKITVNEVELLVMKALSVGLVKGSIDEVDKRVHMTWVQPRVLDLQQIKGMKDRLEFWCTDVKSMEMLVEHQAHDILT

SEQ ID NO: 889864 - protein, 386 aa, Homo sapiens
PEVGAFPAAIPAVLTSRLFFCAGGLPAVMKDVPGFLQQSQSSGPGQPAVWHRLEELYTKKLWHQLTLQVLDFVQDPCFAQGDGLIKLYENFISEFEHRVNPLSLVEIILHVVRQMTDPNVALTFLEKTREKVKSSDEAVILCKTAIGALKMLNNLPGVTSVHSRFYDLSSKYYQTIGNHASYYKDALRFLGCVDIKDLPVSEQQERAFTLGLAGLLGEGVFNFGELLMHPVLESLRNTDRQWLIDTLYAFNSGNVERFQTLKTAWGQQPDLAANEAQLLRKIQLLCLMEMTFTRPANHRQLTFEEIAKSAKITVNEVELLVMKALSVGLVKGSIDEVDKRVHMTWVQPRVLDLQQIKGMKDRLEFWCTDVKSMEMLVEHQAHDILT

SEQ ID NO: 889865 - protein, 430 aa, Homo sapiens
PEVGAFPAAIPAVLTSRLFFCAGGLPAVMKDVPGFLQQSQSSGPGQPAVWHRLEELYTKKLWHQLTLQVLDFVQDPCFAQGDGLIKLYENFISEFEHRVNPLSLVEIILHVVRQMTDPNVALTFLEKTREKVKSSDEAVILCKTAIGALKLNIGDLQVTKETIEDVEEMLNNLPGVTSVHSRFYDLSSKYYQTIGNHASYYKDALRFLGCVDIKDLPVSEQQERAFTLGLAGLLGEGVFNFGELVKLTLSSASLTRETKVLLADQSPSSQLMHPVLESLRNTDRQWLIDTLYAFNSGNVERFQTLKTAWGQQPDLAANEAQLLRKIQLLCLMEMTFTRPANHRQLTFEEIAKSAKITVNEVELLVMKALSVGLVKGSIDEVDKRVHMTWVQPRVLDLQQIKGMKDRLEFWCTDVKSMEMLVEHQAHDILT

SEQ ID NO: 889866 - protein, 297 aa, Homo sapiens
PEVGAFPAAIPAVLTSRLFFCAGGLPAVMKDVPGFLQQSQSSGPGQPAVWHRLEELYTKKLWHQLTLQVLDFVQDPCFAQGDGLIKLYENFISEFEHRVNPLSLVEIILHVVRQMTDPNVALTFLEKTREKVKSSDEAVILCKTAIGALKLNIGDLQVTKETIEDVEEMLNNLPGVTSVHSRFYDLSSKYYQTIGNHASYYKDALRFLGCVDIKDLPEFPVNEGEAFWLNKGPLRWALGKRPVYEVGKRVPHDPGVQSPKCWNLQQIKGMKDRLEFWCTDVKSMEMLVEHQAHDILT

SEQ ID NO: 889867 - protein, 281 aa, Homo sapiens
PEVGAFPAAIPAVLTSRLFFCAGGLPAVMKDVPGFLQQSQSSGPGQPAVWHRLEELYTKKLWHQLTLQVLDFVQDPCFAQGDGLIKLYENFISEFEHRVNPLSLVEIILHVVRQMTDPNVALTFLEKTREKVKSSDEAVILCKTAIGALKLNIGDLQVTKETIEDVEEMLNNLPGVTSVHSRFYDLSSKYYQTIGNHASYYKDALRFLGCVDIKDLPVSEQQERAFTLGLAGLLGEGVFNFGELLMHPVLESLRNTDRGGWFDLFLTVAVGSHWMRARRYD

SEQ ID NO: 889868 - protein, 218 aa, Homo sapiens
PEVGAFPAAIPAVLTSRLFFCAGGLPAVMKDVPGFLQQSQSSGPGQPAVWHRLEELYTKKLWHQLTLQVLDFVQDPCFAQGDGLIKLYENFISEFEHRVNPLSLVEIILHVVRQMTDPNVALTFLEKTREKVKSSDEAVILCKTAIGALKLNIGDLQVTKETIEDVEEMLNNLPGVTSVHSRFYDLSSKYYQTIGNHASYYKDALRFLGCVDIKDLPG

SEQ ID NO: 889869 - protein, 518 aa, Homo sapiens
MAENHAQNKAKLISETRRRFEAEYVTDKSDKYDARDVERLQQDDNWVESYLSWRHNIVDETLKMLDESFQWRKEISVNDLNESSIPRWLLEIGVIYLHGYDKEGNKLFWIRVKYHVKDQKTILDKKKLIAFWLERYAKRENGKPVTVMFDLSETGINSIDMDFVRFIINCFKVYYPKYLSKIVIFDMPWLMNAAFKIVKTWLGPEAVSLLKFTSKNEVQDYVSVEYLPPHMGGTDPFKYSYPPLVDDDFQTPLCENGPITSEDETSSKEDIESDGKETLETISNEEQTPLLKKINPTESTSKAEENEKVDSKVKAFKKPLSVFKGPLLHISPAEELYFGSTESGEKKTLIVLTNVTKNIVAFKVRTTAPEKYRVKPSNSSCDPGASVDIVVSPHGGLTVSAQDRFLIMAAEMEQSSGTGPAELTQFWKEVPRNKVMEHRLRCHTVESSKPNTLTLKDNAFNMSDKTSEDICLQLSRLLESNRKLEDQVQRCIWFQQLLLSLTMLLLAFVTSFFYLLYS

SEQ ID NO: 889870 - protein, 518 aa, Homo sapiens; identical to SEQ ID NO: 889869

SEQ ID NO: 889871 - protein, 518 aa, Homo sapiens; identical to SEQ ID NO: 889869

SEQ ID NO: 889872 - protein, 518 aa, Homo sapiens; identical to SEQ ID NO: 889869

SEQ ID NO: 889873 - protein, 188 aa, Homo sapiens
MAENHAQNKAKLISETRRRFEAEYVTDKSDKYDARDVERLQQDDNWVESYLSWRHNIVDETLKMLDESFQWRKEISVNDLNESSIPRWLLEIGVIYLHGYDKEGNKLFWIRVKYHVKDQKTILDKKKLIAFWLERYAKRENGKPVTVMFDLSETGINSIDMDFVRFIINCFKVYYPKYLSPIVISDMP

SEQ ID NO: 889874 - protein, 194 aa, Homo sapiens
MATGTRYAGKVVVVTGGGRGIGAGIVRAFVNSGARVVICDKDESGGRALEQELPGAVFILCDVTQEDDVKTLVSETIRRFGRLDCVVNNAGHPACLSLPKCWDYQLALPYLRKSQGNVINISSLVGAIGQAQAVPYVATKGAVTAMTKALALDESPYGVRVNCHWAAWASPLRSGLRQCSWPPKPTSARALNCS

SEQ ID NO: 889875 - protein, 107 aa, Homo sapiens [sequence omitted]

SEQ ID NO: 889876 - protein, 140 aa, Homo sapiens
MATGTRYAGKVVVVTGGGRGIGAGIVRAFVNSGARVVICDKDESGGRALEQELPGAVFILCDVTQEDDVKTLVSETIRRFGRLDCVVNNAGHPRPPLPAEESRECHQHLQPGGGNRPGPGSSLCGHQGGSNSHDQSFGPG

SEQ ID NO: 889877 - protein, 136 aa, Homo sapiens
MATGTRYAGKVVVVTGGGRGIGAGIVRAFVNSGARVVICDKDESGGRALEQELPGAVFILCDVTQEDDVKTLVSETIRRFGRLDCVVNNAGHPRPPLPAEESRECHQHLQPGGGNRPGPGSSLCGHQATGPHGPAR

SEQ ID NO: 889878 - protein, 195 aa, Homo sapiens
MATGTRYAGKVVVVTGGGRGIGAGIVRAFVNSGARVVICDKDESGGRALEQELPGAVFILCDVTQEDDVKTTGFSERQFRSHYGTARGIMWLVESKLLGADKSTSRSSMSLTEDHRVARGIPAKGWRWKLEAYLGGTVHLMNQCSHRPSTQDGKDVKAKVVTTTSSKTLSEEEQLRGESAPKAKISRYCCAHPKV

SEQ ID NO: 889879 - protein, 270 aa, Homo sapiens
MATGTRYAGKVVVVTGGGRGIGAGIVRAFVNSGARVVICDKDESGGRALEQELPGAVFILCDVTQEDDVKTLVSETIRRFGRLDCVVNNAGHHPPPQRPEETSAQGFRQLLELNLLGTYTLTKLALPYLRKSQGNVINISSLVGAIGQAQAVPYVATKGAVTAMTKALALDESPYGVRVNCISPGNIWTPLWEELAALMPDPRATIREGMLAQPLGRMGQPAEVGAAAVFLASEANFCTGIELLVTGGAELGYGCKASRSTPVDAPDIPS

SEQ ID NO: 889880 - protein, 270 aa, Homo sapiens; identical to SEQ ID NO: 889879

SEQ ID NO: 889881 - protein, 252 aa, Homo sapiens
MATGTRYAGKVVVVTGGGRGIGAGIVRAFVNSGARVVICDKDESGGRALEQELPGAVFILCDVTQEDDVKTLVSETIRRFGRLDCVVNNAGHHPPPQRPEETSAQGFRQLLELNLLGTYTLTKLALPYLRKSQGNVINISSLVGAIGQAQAVPYVATKGAVTAMTKALALDESPYGVRVNCISPGNIWTPLWEELAALMPDPRATIREGMLAQVEVGFRSSHWAAWASPLRSGLRQCSWPPKPTSARALNCS

SEQ ID NO: 889882 - protein, 238 aa, Homo sapiens
MATGTRYAGKVVVVTGGGRGIGAGIVRAFVNSGARVVICDKDESGGRALEQELPGAVFILCDVTQEDDVKTLVSETIRRFGRLDCVVNNAGHPRPPLPAEESRECHQHLQPGGGNRPGPGSSLCGHQVSSIGGSYSQRRRRLGQGWKSISVVTDSEIGNSDVSLGQEPIETIEGAMRAKVYAGLRSRYVGKGNALLVSTGKQKREQRRARGYGGEPSWNRTPIALLESISHMLSRGTM

SEQ ID NO: 889883 - protein, 66 aa, Homo sapiens
NSGARVVICDKDVVSDGPSALTLALPPSDPEVQTPSTSSLRPRSPGPQALLPQTQESRPQPLLPQT

SEQ ID NO: 889884 - protein, 83 aa, Homo sapiens
MYGNILCPTLHTLCTQILYCMNYALSRIQCQGELGEINYFNFFFILYKAMDFIWLMCALYTSHFNRMELLIIFQRVIDMQKFQ

SEQ ID NO: 889885 - protein, 83 aa, Homo sapiens; identical to SEQ ID NO: 889884

SEQ ID NO: 889886 - protein, 83 aa, Homo sapiens; identical to SEQ ID NO: 889884

SEQ ID NO: 889887 - protein, 83 aa, Homo sapiens; identical to SEQ ID NO: 889884

SEQ ID NO: 889888 - protein, 83 aa, Homo sapiens; identical to SEQ ID NO: 889884

SEQ ID NO: 889889 - protein, 128 aa, Homo sapiens
MESKEERALNNLIVENVNQENDEKDEKEQVANKGEPLALPLNVSEYCVPRGNRRRFRVRQPILQYRWDIMHRLGEPQARMREENMERIGEEVRQLMEKLREKQLSHSLRAVSTDPPHHDHHDEFCLMP

SEQ ID NO: 889890 - protein, 128 aa, Homo sapiens; identical to SEQ ID NO: 889889

SEQ ID NO: 889891 - protein, 100 aa, Homo sapiens
SGITATRDRPTLSLTSLWRQNRRRSLPSRQWYLFPVSLRTCGPGTAPKVGSGGGAGLRGQVLRRRTSRRESGGGDCKDRPRSNGVQEERAIYSAGILYNP

SEQ ID NO: 889892 - protein, 128 aa, Homo sapiens; identical to SEQ ID NO: 889889

SEQ ID NO: 889893 - protein, 128 aa, Homo sapiens; identical to SEQ ID NO: 889889

SEQ ID NO: 889894 - protein, 128 aa, Homo sapiens; identical to SEQ ID NO: 889889

SEQ ID NO: 889895 - protein, 307 aa, Homo sapiens
MASVLSYESLVHAVAGAVGSVTAMTVFFPLDTARLRLQVDEKRKSKTTHMVLLEIIKEEGLLAPYRGWFPVISSLCCSNFVYFYTFNSLKALWVKGQHSTTGKDLVVGFVAGVVNVLLTTPLWVVNTRLKLQGAKFRNEDIVPTNYKGIIDAFHQIIRDEGISALWNGTFPSLLLVFNPAIQFMFYEGLKRQLLKKRMKLSSLDVFIIGAVAKAIATTVTYPLQTVQSILRFGRHRLNPENRTLGSLRNILYLLHQRVRRFGIMGLYKGLEAKLLQTVLTAALMFLVYEKLTAATFTVMGLKRAHQH

SEQ ID NO: 889896 - protein, 307 aa, Homo sapiens; identical to SEQ ID NO: 889895

SEQ ID NO: 889897 - protein, 242 aa, Homo sapiens
MASVLSYESLVHAVAGAVGSVTAMTVFFPLDTARLRLQVDEKRKSKTTHMVLLEIIKEEGLLAPYRGWFPVISSLCCSNFVYFYTFNSLKALWVKGQHSTTGKDLVVGFVAGVVNVLLTTPLWVVNTRLKLQGAKFRNEDIVPTNYKGIIDAFHQIIRDEGISALWNGTFPSLLLVFNPAIQFMFYEGLKRQLLKKRMKLSSLDVFIIGAVAKAIATTVTYPLQTVQSILRTFWNNGTLQRP

SEQ ID NO: 889898 - protein, 293 aa, Homo sapiens
MASVLSYESLVHAVAGAVLRLRLQVDEKRKSKTTHMVLLEIIKEEGLLAPYRGWFPVISSLCCSNFVYFYTFNSLKALWVKGQHSTTGKDLVVGFVAGVVNVLLTTPLWVVNTRLKLQGAKFRNEDIVPTNYKGIIDAFHQIIRDEGISALWNGTFPSLLLVFNPAIQFMFYEGLKRQLLKKRMKLSSLDVFIIGAVAKAIATTVTYPLQTVQSILRFGRHRLNPENRTLGSLRNILYLLHQRVRRFGIMGLYKGLEAKLLQTVLTAALMFLVYEKLTAATFTVMGLKRAHQH

SEQ ID NO: 889899 - protein, 234 aa, Homo sapiens
MASVLSYESLVHAVAGAVGSVTAMTVFFPLDTARLRLQGVVNVLLTTPLWVVNTRLKLQGAKFRNEDIVPTNYKGIIDAFHQIIRDEGISALWNGTFPSLLLVFNPAIQFMFYEGLKRQLLKKRMKLSSLDVFIIGAVAKAIATTVTYPLQTVQSILRFGRHRLNPENRTLGSLRNILYLLHQRVRRFGIMGLYKGLEAKLLQTVLTAALMFLVYEKLTAATFTVMGLKRAHQH

SEQ ID NO: 889900 - protein, 124 aa, Homo sapiens
MFYEGLKRQLLKKRMKLSSLDVFIIGAVAKAIATTVTYPLQTVQSILRFGRHRLNPENRTLGSLRNILYLLHQRVRRFGIMGLYKGLEAKLLQTVLTAALMFLVYEKLTAATFTVMGLKRAHQH

SEQ ID NO: 889901 - protein, 221 aa, Homo sapiens
MASVLSYESLVHAVAGAVGSVTAMTVFFPLDTARLRLQGVVNVLLTTPLWVVNTRLKLQGAKFRNEDIVPTNYKGIIDAFHQIIRDEGISALWNGTFPSLLLVFNPAIQFMFYEGLKRQLLKKRMKLSSLDVFIIGAVAKAIATTVTYPLQTVQSILRFGRHRLNPENRTLGSLRNILYLLHQRVRRFGIMGLYKGLEAKLLQTVLTAALMFLVYEKLTLD

SEQ ID NO: 889902 - protein, 294 aa, Homo sapiens
MASVLSYESLVHAVAGAVGSVTAMTVFFPLDTARLRLQVDEKRKSKTTHMVLLEIIKEEGLLAPYRGWFPVISSLCCSNFVYFYTFNSLKALWVKGQHSTTGKDLVVGFVAGVVNVLLTTPLWVVNTRLKLQGAKFRNEDIVPTNYKGIIDAFHQIIRDEGISALWNGTFPSLLLVFNPAIQFMFYEGLKRQLLKKRMKLSSLDVFIIGAVAKAIATTVTYPLQTVQSILRFGRHRLNPENRTLGSLRNILYLLHQRVRRFGIMGLYKGLEAKLLQTVLTAALMFLVYEKLTLD

SEQ ID NO: 889903 - protein, 124 aa, Homo sapiens; identical to SEQ ID NO: 889900

SEQ ID NO: 889904 - protein, 231 aa, Homo sapiens
MSKIQLSIVIQSLKALWVKGQHSTTGKDLVVGFVAGVVNVLLTTPLWVVNTRLKLQGAKFRNEDIVPTNYKGIIDAFHQIIRDEGISALWNGTFPSLLLVFNPAIQFMFYEGLKRQLLKKRMKLSSLDVFIIGAVAKAIATTVTYPLQTVQSILRFGRHRLNPENRTLGSLRNILYLLHQRVRRFGIMGLYKGLEAKLLQTVLTAALMFLVYEKLTAATFTVMGLKRAHQH

SEQ ID NO: 889905 - protein, 237 aa, Homo sapiens
MASVLSYESLVHAVAGAVGSVTAMTVFFPLDTARLRLQVDEKRKSKTTHMVLLEIIKEEGLLAPYRGWFPVISSLCCSNFVYFYTFNSLKALWVKGQHSTTGKDLVVGFVAGVVNVLLTTPLWVVNTRLKLQGAKFRNEDIVPTNYKGIIDAFHQIIRDEGISALWNGTFPSLLLVFNPAIQFMFYEGLKRQLLKKRMKLSSLDVFIIGAVAKAIATTVTYPLQTVQSILRVSAGVL

SEQ ID NO: 889906 - protein, 132 aa, Homo sapiens
MTVFFPLDTARLRLQVDEKRKSKTTHMVLLEIIKEEGLLAPYRGWFPVISSLCCSNFVYFYTFNSLKALWVKGQHSTTGKDLVVGFVAGLVRNILISQDGVKLGSYVFKKEAPGSLYCSTLRQPWGAKIPIL

SEQ ID NO: 889907 - protein, 220 aa, Homo sapiens
MTTMQGMEQAMPGAGPGVPQLGNMAVIHSHLWKGLQEKFLKGEPKVLGVVQILTALMSLSMGITMMCMASNTYGSNPISVYIGYTIWGSVMFIISGSLSIAAGIRTTKGLVRGSLGMNITSSVLAASGILINTFSLAFYSFHHPYCNYYGNSNNCHGTMSILMGLDGMVLLLSVLEFCIAVSLSAFGCKVLCCTPGGVVLILPSHSHMAETASPTPLNEV

SEQ ID NO: 889908 - protein, 239 aa, Homo sapiens [sequence omitted]

SEQ ID NO: 889909 - protein, 239 aa, Homo sapiens [sequence omitted]

SEQ ID NO: 889910 - protein, 220 aa, Homo sapiens; identical to SEQ ID NO: 889907

SEQ ID NO: 889911 - protein, 220 aa, Homo sapiens; identical to SEQ ID NO: 889907

SEQ ID NO: 889912 - protein, 119 aa, Homo sapiens
MHQTYSRHCRPEESTFSAAMTTMQGMEQAMPGAGPGVPQLGNMAVIHSHLWKGLQEKFLKGEPKVLGVVQILTALMSLSMGITMMCMASNTYGSNPISVYIGYTIWGSVMFIFFRLLVP

SEQ ID NO: 889913 - protein, 167 aa, Homo sapiens
MTTMQGMEQAMPGAGPGVPQLGNMAVIHSHLWKGLQEKFLKGEPKVLGVVQILTALMSLSMGITMMCMASNTYGSNPISVYIGYTIWGSVMFIISGSLSIAAGIRTTKGLGLDGMVLLLSVLEFCIAVSLSAFGCKVLCCTPGGVVLILPSHSHMAETASPTPLNEV

SEQ ID NO: 889914 - protein, 2785 aa, Homo sapiens [sequence omitted]

SEQ ID NO: 889915 - protein, 1442 aa, Homo sapiens
DPTGLDTPYLSPNLTVKSTKLLARDTEVDILVTVQNLLKHCVDPTSFLKPIAKLFSVIKNKLSRKLLCTVFETLSDFESGLKYITDVVKLNAFDQRHLDDINFDVRFETFQTITSYIKEMQIVDVNYLIPVMHNCFYNLELGDMSLSDNASMCLMSIIKKLAALNVTEKDYREIIHRSLLEKLRKGLKSQTESIQQDYTTILSCLIQTFPNQLEFKDLVQLTHYHDPEMDFFENMKHIQIHRRARALKKLAKQLMEGKVVLSSKSLQNYIMPYAMTPIFDEKMLKHENITTAATEIIGAICKHLSWSAYMYYLKHFIHVLQTGQINQKLGVSLLVIVLEAFHFDHKTLEEQMGKIENEENAIEAIELPEPEAMELERVDEEEKEYTCKSLSDNGQPGTPDPADSGGTSAKESECITKPVSFLPQNKEEIERTIKNIQGTITGDILPRLHKCLASTTKREEEHKLVKSKVVNDEEVVRVPLAFAMVKLMQSLPQEVMEANLPSILLKVCALLKNRAQEIRDIARSTLAKIIEDLGVHFLQYVLKELQTTLVRGYQVHVLTFTVHMLLQGLTNKLQVGDLDSCLDIMIEIFNHELFGAVAEEKEVKQILSKVMEARRSKSYDSYEILGKFVGKDQVTKLILPLKEILQNTTSLKLARKVHETLRRITVGLIVNQEMTAESILLLSYGLISENLPLLTEKEKNPVAPAPDPRLPPQSCLLLPPTPVRGGQKAVVSRKTNMHIFIESGLRLLHLSLKTSKIKSSGECVLEMLDPFVSLLIDCLGSMDVKVITGALQCLIWVLRFPLPSIETKAEQLTKHLFLLLKDYAKLGAARGQNFHLVVNCFKCVTILVKKVKSYQITEKQLQVLLAYAEEDIYDTSRQATAFGLLKAILSRKLLVPEIDEVMRKVSKLAVSAQSEPARVQCRQVFLKYILDYPLGDKLRPNLEFMLAQLNYEHETGRESTLEMIAYLFDTFPQGLLHENCGMFFIPLCLMTINDDSATCKKMASMTIKSLLGKISLEKKDWLFDMVTTWFGAKKRLNRQLAALICGLFVESEGVDFEKRLGTVLPVIEKEIDPENFKDIMEETEEKAADRLLFSFLTLITKLIKECNIIQFTKPAETLSKIWSHVHSHLRHPHNWVWLTAAQIFGLLFASCQPEELIQKWNTKKTKKHLPEPVAIKFLASDLDQKMKSISLASCHQLHSKFLDQSLGEQVVKNLLFAAKVLYLLELYCEDKQSKIKEDLEEQEALEDGVACADEKAESDGEEKEEVKEELGRPATLLWLIQKLSRIAKLEAAYSPRNPLKRTCIFKFLGAVAMDLGIDKVKPYLPMIIAPLFRELNSTYSEQDPLLKNLSQEIIELLKKLVGLESFSLAFASVQKQANEKRALRKKRKALEFVTNPDIAAKKKMKKHKNKSEAKKRKIEFLRPGYKAKRQKSHSLKDLAMVE

SEQ ID NO: 889916 - protein, 2645 aa, Homo sapiens
MKTKPVSHKTENTYRFLTFAERLGNVNIDIIHRIDRTASYEEEVETYFFEGLLKWRELNLTEHFGKFYKEVIDKCQSFNQLVYHQNEIVQSLKTHLQVKNSFAYQPLLDLVVQLARDLQMDFYPHFPEFFLTITSILETQDTELLEWAFTSLSYLYKYLWRLMVKDMSSIYSMYSTLLAHKKLHIRNFAAESFTFLMRKVSDKNALFNLMFLDLDKHPEKVEGVGQLLFEMCKGVRNMFHSCTGQAVKLILRKLGPVTETETQLPWMLIGETLKNMVKSTVSYISKEHFGTFFECLQESLLDLHTKVTKTNCCESSEQIKRLLETYLILVKHGSGTKIPTPADVCKVLSQTLQVASLSTSCWETLLDVISALILGENVSLPETLIKETIEKIFESRFEKRLIFSFSEVMFAMKQFEQLFLPSFLSYIVNCFLIDDAVVKDEALAILAKLILNKAAPPTAGSMAIEKYPLVFSPQMVGFYIKQKKTRSKGRNEQFPVLDHLLSIIKLPPNKDTTYLSQSWAALVVLPHIRPLEKEKVIPLVTGFIEALFMTVDKGSFGKGNLFVLCQAVNTLLSLEESSELLHLVPVERVKNLVLTFPLEPSVLLLTDLYYQRLALCGCKGPLSQEALMELFPKLQANISTGVSKIRLLTIRILNHFDVQLPESMEDDGLSERQSVFAILRQAELVPATVNDYREKLLHLRKLRHDVVQTAVPDGPLQEVPLRYLLGMLYINFSALWDPVIELISSHAHEMENKQFWKVYYEHLEKAATHAEKELQNDMTDEKSVGDESWEQTQEGDVGALYHEQLALKTDCQERLDHTNFRFLLWRALTKFPERVEPRSRELSPLFLRFINNEYYPADLQVAPTQDLRRKGKGMVAEEIEEEPAAGDDEELEEEAVPQDESSQKKKTRRAAAKQLIAHLQVFSKFSNPRALYLESKLYELYLQLLLHQDQMVQKITLDCIMTYKHPHVLPYRENLQRLLEDRSFKEEIVHFSISEDNAVVKTAHRADLFPILMRILYGRMKNKTGSKTQGKSASGTRMAIVLRFLAGTQPEEIQIFLDLLFEPVRHFKNGECHSAVIQAVEDLDLSKVLPLGRQHGILNSLEIVLKNISHLISAYLPKILQILLCMTATVSHILDQREKIQLRFINPLKNLRRLGIKMVTDIFLDWESYQFRTEEIDAVFHGAVWPQISRLGSESQYSPTPLLKLISIWSRNARYFPLLAKQKPGHPECDILTNVFAILSAKNLSDATASIVMDIVDDLLNLPDFEPTETVLNLLVTGCVYPGIAENIGESITIGGRLILPHVPAILQYLSKTTISAEKVKKKKNRAQVSKELGILSKISKFMKDKEQSSVLITLLLPFLHRGNIAEDTEVDILVTVQNLLKHCVDPTSFLKPIAKLFSVIKNKLSRKLLCTVFETLSDFESGLKYITDVVKLNAFDQRHLDDINFDVRFETFQTITSYIKEMQIVDVNYLIPVMHNCFYNLELGDMSLSDNASMCLMSIIKKLAALNVTEKDYREIIHRSLLEKLRKGLKSQTESIQQDYTTILSCLIQTFPNQLEFKDLVQLTHYHDPEMDFFENMKHIQIHRRARALKKLAKQLMEGKVVLSSKSLQNYIMPYAMTPIFDEKMLKHENITTAATEIIGAICKHLSWSAYMYYLKHFIHVLQTGQINQKLGVSLLVIVLEAFHFDHKTLEEQMGKIENEENAIEAIELPEPEAMELERVDEEEKEYTCKSLSDNGQPGTPDPADSGGTSAKESECITKPVSFLPQNKEEIERTIKNIQGTITGDILPRLHKCLASTTKREEEHKLVKSKVVNDEEVVRVPLAFAMVKLMQSLPQEVMEANLPSILLKVCALLKNRAQEIRDIARSTLAKIIEDLGVHFLQYVLKELQTTLVRGYQVHVLTFTVHMLLQGLTNKLQVGDLDSCLDIMIEIFNHELFGAVAEEKEVKQILSKVMEARRSKSYDSYEILGKFVGKDQVTKLILPLKEILQNTTSLKLARKVHETLRRITVGLIVNQEMTAESILLLSYGLISENLPLLTEKEKNPVAPAPDPRLPPQSCLLLPPTPVRGGQKAVVSRKTNMHIFIESGLRLLHLSLKTSKIKSSGECVLEMLDPFVSLLIDCLGSMDVKVITGALQCLIWVLRFPLPSIETKAEQLTKHLFLLLKDYAKLGAARGQNFHLVVNCFKCVTILVKKVKSYQITEKQLQVLLAYAEEDIYDTSRQATAFGLLKAILSRKLLVPEIDEVMRKVSKLAVSAQSEPARVQCRQVFLKYILDYPLGDKLRPNLEFMLAQLNYEHETGRESTLEMIAYLFDTFPQGLLHENCGMFFIPLCLMTINDDSATCKKMASMTIKSLLGKISLEKKDWLFDMVTTWFGAKKRLNRQLAALICGLFVESEGVDFEKRLGTVLPVIEKEIDPENFKDIMEETEEKAADRLLFSFLTLITKLIKECNIIQFTKPAETLSKIWSHVHSHLRHPHNWVWLTAAQIFGLLFASCQPEELIQKWNTKKTKKHLPEPVAIKFLASDLDQKMKSISLASCHQLHSKFLDQSLGEQVVKNLLFAAKVLYLLELYCEDKQSKIKEDLEEQEALEDGVACADEKAESDGEEKEEVKEELGRPATLLWLIQKLSRIAKLEAAYSPRNPLKVR

SEQ ID NO: 889917 - protein, 2645 aa, Homo sapiens; identical to SEQ ID NO: 889916

SEQ ID NO: 889918 - protein, 2431 aa, Homo sapiens
MKTKPVSHKTENTYRFLTFAERLGNVNIDIIHRIDRTASYEEEVETYFFEGLLKWRELNLTEHFGKFYKEVIDKCQSFNQLVYHQNEIVQSLKTHLQVKNSFAYQPLLDLVVQLARDLQMDFYPHFPEFFLTITSILETQDTELLEWAFTSLSYLYKYLWRLMVKDMSSIYSMYSTLLAHKKLHIRNFAAESFTFLMRKVSDKNALFNLMFLDLDKHPEKVEGVGQLLFEMCKGVRNMFHSCTGQAVKLILRKLGPVTETETQLPWMLIGETLKNMVKSTVSYISKEHFGTFFECLQESLLDLHTKVTKTNCCESSEQIKRLLETYLILVKHGSGTKIPTPADVCKVLSQTLQVASLSTSCWETLLDVISALILGENVSLPETLIKETIEKIFESRFEKRLIFSFSEVMFAMKQFEQLFLPSFLSYIVNCFLIDDAVVKDEALAILAKLILNKAAPPTAGSMAIEKYPLVFSPQMVGFYIKQKKTRSKGRNEQFPVLDHLLSIIKLPPNKDTTYLSQSWAALVVLPHIRPLEKEKVIPLVTGFIEALFMTVDKGSFGKGNLFVLCQAVNTLLSLEESSELLHLVPVERVKNLVLTFPLEPSVLLLTDLYYQRLALCGCKGPLSQEALMELFPKLQANISTGVSKIRLLTIRILNHFDVQLPESMEDDGLSERQSVFAILRQAELVPATVNDYREKLLHLRKLRHDVVQTAVPDGPLQEVPLRYLLGMLYINFSALWDPVIELISSHAHEMENKQFWKVYYEHLEKAATHAEKELQNDMTDEKSVGDESWEQTQEGDVGALYHEQLALKTDCQERLDHTNFRFLLWRALTKFPERVEPRSRELSPLFLRFINNEYYPADLQVAPTQDLRRKGKGMVAEEIEEEPAAGDDEELEEEAVPQDESSQKKKTRRAAAKQLIAHLQVFSKFSNPRALYLESKLYELYLQLLLHQDQMVQKITLDCIMTYKHPHVLPYRENLQRLLEDRSFKEEIVHFSISEDNAVVKTAHRADLFPILMRILYGRMKNKTGSKTQGKSASGTRMAIVLRFLAGTQPEEIQIFLDLLFEPVRHFKNGECHSAVIQAVEDLDLSKVLPLGRQHGILNSLEIVLKNISHLISAYLPKILQILLCMTATVSHILDQREKIQLRFINPLKNLRRLGIKMVTDIFLDWESYQFRTEEIDAVFHGAVWPQISRLGSESQYSPTPLLKLISIWSRNARYFPLLAKQKPGHPECDILTNVFAILSAKNLSDATASIVMDIVDDLLNLPDFEPTETVLNLLVTGCVYPGIAENIGESITIGGRLILPHVPAILQYLSKTTISAEKVKKKKNRAQVSKELGILSKISKFMKDKEQSSVLITLLLPFLHRGNIAEDTEVDILVTVQNLLKHCVDPTSFLKPIAKLFSVIKNKLSRKLLCTVFETLSDFESGLKYITDVVKLNAFDQRHLDDINFDVRFETFQTITSYIKEMQIVDVNYLIPVMHNCFYNLELGDMSLSDNASMCLMSIIKKLAALNVTEKDYREIIHRSLLEKLRKGLKSQTESIQQDYTTILSCLIQTFPNQLEFKDLVQLTHYHDPEMDFFENMKHIQIHRRARALKKLAKQLMEGKVVLSSKSLQNYIMPYAMTPIFDEKMLKHENITTAATEIIGAICKHLSWSAYMYYLKHFIHVLQTGQINQKLGVSLLVIVLEAFHFDHKTLEEQMGKIENEENAIEAIELPEPEAMELERVDEEEKEYTCKSLSDNGQPGTPDPADSGGTSAKESECITKPVSFLPQNKEEIERTIKNIQGTITGDILPRLHKCLASTTKREEEHKLVKSKVVNDEEVVRVPLAFAMVKLMQSLPQEVMEANLPSILLKVCALLKNRAQEIRDIARSTLAKIIEDLGVHFLQYVLKELQTTLVRGYQVHVLTFTVHMLLQGLTNKLQVGDLDSCLDIMIEIFNHELFGAVAEEKEVKQILSKVMEARRSKSYDSYEILGKFVGKDQVTKLILPLKEILQNTTSLKLARKVHETLRRITVGLIVNQEMTAESILLLSYGLISENLPLLTEKEKNPVAPAPDPRLPPQSCLLLPPTPVRGGQKAVVSRKTNMHIFIESGLRLLHLSLKTSKIKSSGECVLEMLDPFVSLLIDCLGSMDVKVITGALQCLIWVLRFPLPSIETKAEQLTKHLFLLLKDYAKLGAARGQNFHLVVNCFKCVTILVKKVKSYQITEKQLQVLLAYAEEDIYDTSRQATAFGLLKAILSRKLLVPEIDEVMRKVSKLAVSAQSEPARVQCRQVFLKYILDYPLGDKLRPNLEFMLAQLNYEHETGRESTLEMIAYLFDTFPQGLLHENCGMFFIPLCLMTINDDSATCKKMASMTIKSLLGKISLEKKDWLFDMVTTWFGAKKVCVAFSHSSVTSLSFGDHSLSKNICHTLLNWFFSQIVLFLSDYANSIFLKFSKV

SEQ ID NO: 889919 - protein, 116 aa, Homo sapiens
KQIMCFCLFRILYGRMKNKTGSKTQGKSASGTRMAIVLRFLAGTQPEEIQIFLDLLFEPVRHFKNGNYQLPLTLIPVVCGGLLTSQATFPMLLGVFLTGLFLPILMAIFLLKCNSF

SEQ ID NO: 889920 - protein, 1783 aa, Homo sapiens
MCKQIMCFCLFRILYGRMKNKTGSKTQGKSASGTRMAIVLRFLAGTQPEEIQIFLDLLFEPVRHFKNGECHSAVIQAVEDLDLSKVLPLGRQHGILNSLEIVLKNISHLISAYLPKILQILLCMTATVSHILDQREKIQLRFINPLKNLRRLGIKMVTDIFLDWESYQFRTEEIDAVFHGAVWPQISRLGSESQYSPTPLLKLISIWSRNARYFPLLAKQKPGHPECDILTNVFAILSAKNLSDATASIVMDIVDDLLNLPDFEPTETVLNLLVTGCVYPGIAENIGESITIGGRLILPHVPAILQYLSKTTISAEKVKKKKNRAQVSKELGILSKISKFMKDKEQSSVLITLLLPFLHRGNIAEDTEVDILVTVQNLLKHCVDPTSFLKPIAKLFSVIKNKLSRKLLCTVFETLSDFESGLKYITDVVKLNAFDQRHLDDINFDVRFETFQTITSYIKEMQIVDVNYLIPVMHNCFYNLELGDMSLSDNASMCLMSIIKKLAALNVTEKDYREIIHRSLLEKLRKGLKSQTESIQQDYTTILSCLIQTFPNQLEFKDLVQLTHYHDPEMDFFENMKHIQIHRRARALKKLAKQLMEGKVVLSSKSLQNYIMPYAMTPIFDEKMLKHENITTAATEIIGAICKHLSWSAYMYYLKHFIHVLQTGQINQKLGVSLLVIVLEAFHFDHKTLEEQMGKIENEENAIEAIELPEPEAMELERVDEEEKEYTCKSLSDNGQPGTPDPADSGGTSAKESECITKPVSFLPQNKEEIERTIKNIQGTITGDILPRLHKCLASTTKREEEHKLVKSKVVNDEEVVRVPLAFAMVKLMQSLPQEVMEANLPSILLKVCALLKNRAQEIRDIARSTLAKIIEDLGVHFLQYVLKELQTTLVRGYQVHVLTFTVHMLLQGLTNKLQVGDLDSCLDIMIEIFNHELFGAVAEEKEVKQILSKVMEARRSKSYDSYEILGKFVGKDQVTKLILPLKEILQNTTSLKLARKVHETLRRITVGLIVNQEMTAESILLLSYGLISENLPLLTEKEKNPVAPAPDPRLPPQSCLLLPPTPVRGGQKAVVSRKTNMHIFIESGLRLLHLSLKTSKIKSSGECVLEMLDPFVSLLIDCLGSMDVKVITGALQCLIWVLRFPLPSIETKAEQLTKHLFLLLKDYAKLGAARGQNFHLVVNCFKCVTILVKKVKSYQITEKQLQVLLAYAEEDIYDTSRQATAFGLLKAILSRKLLVPEIDEVMRKVSKLAVSAQSEPARVQCRQVFLKYILDYPLGDKLRPNLEFMLAQLNYEHETGRESTLEMIAYLFDTFPQGLLHENCGMFFIPLCLMTINDDSATCKKMASMTIKSLLGKISLEKKDWLFDMVTTWFGAKKRLNRQLAALICGLFVESEGVDFEKRLGTVLPVIEKEIDPENFKDIMEETEEKAADRLLFSFLTLITKLIKECNIIQFTKPAETLSKIWSHVHSHLRHPHNWVWLTAAQIFGLLFASCQPEELIQKWNTKKTKKHLPEPVAIKFLASDLDQKMKSISLASCHQLHSKFLDQSLGEQVVKNLLFAAKVLYLLELYCEDKQSKIKEDLEEQEALEDGVACADEKAESDGEEKEEVKEELGRPATLLWLIQKLSRIAKLEAAYSPRNPLKRTCIFKFLGAVAMDLGIDKVKPYLPMIIAPLFRELNSTYSEQDPLLKNLSQEIIELLKKLVGLESFSLAFASVQKQANEKRALRKKRKALEFVTNPDIAAKKKMKKHKNKSEAKKRKIEFLRPGYKAKRQKSHSLKDLAMVE

SEQ ID NO: 889921 - protein, 2759 aa, Homo sapiens
MKTKPVSHKTENTYRFLTFAERLGNVNIDIIHRIDRTASYEEEVETYFFEGLLKWRELNLTEHFGKFYKEVIDKCQSFNQLVYHQNEIVQSLKTHLQVKNSFAYQPLLDLVVQLARDLQMDFYPHFPEFFLTITSILETQDTELLEWAFTSLSYLYKYLWRLMVKDMSSIYSMYSTLLAHKKLHIRNFAAESFTFLMRKVSDKNALFNLMFLDLDKHPEKVEGVGQLLFEMCKGVRNMFHSCTGQAVKLILRKLGPVTETETQLPWMLIGETLKNMVKSTVSYISKEHFGTFFECLQESLLDLHTKVTKTNCCESSEQIKRLLETYLILVKHGSGTKIPTPADVCKVLSQTLQVASLSTSCWETLLDVISALILGENVSLPETLIKETIEKIFESRFEKRLIFSFSEVMFAMKQFEQLFLPSFLSYIVNCFLIDDAVVKDEALAILAKLILNKAAPPTAGSMAIEKYPLVFSPQMVGFYIKQKKTRSKGRNEQFPVLDHLLSIIKLPPNKDTTYLSQSWAALVVLPHIRPLEKEKVIPLVTGFIEALFMTVDKGSFGKGNLFVLCQAVNTLLSLEESSELLHLVPVERVKNLVLTFPLEPSVLLLTDLYYQRLALCGCKGPLSQEALMELFPKLQANISTGVSKIRLLTIRILNHFDVQLPESMEDDGLSERQSVFAILRQAELVPATVNDYREKLLHLRKLRHDVVQTAVPDGPLQEVPLRYLLGMLYINFSALWDPVIELISSHAHEMENKQFWKVYYEHLEKAATHAEKELQNDMTDEKSVGDESWEQTQEGDVGALYHEQLALKTDCQERLDHTNFRFLLWRALTKFPERVEPRSRELSPLFLRFINNEYYPADLQVAPTQDLRRKGKGMVAEEIEEEPAAGDDEELEEEAVPQDESSQKKKTRRAAAKQLIAHLQVFSKFSNPRALYLESKLYELYLQLLLHQDQMVQKITLDCIMTYKHPHVLPYRENLQRLLEDRSFKEEIVHFSISEDNAVVKTAHRADLFPILMRILYGRMKNKTGSKTQGKSASGTRMAIVLRFLAGTQPEEIQIFLDLLFEPVRHFKNGECHSAVIQAVEDLDLSKVLPLGRQHGILNSLEIVLKNISHLISAYLPKILQILLCMTATVSHILDQREKIQLRFINPLKNLRRLGIKMVTDIFLDWESYQFRTEEIDAVFHGAVWPQISRLGSESQYSPTPLLKLISIWSRNARYFPLLAKQKPGHPECDILTNVFAILSAKNLSDATASIVMDIVDDLLNLPDFEPTETVLNLLVTGCVYPGIAENIGESITIGGRLILPHVPAILQYLSKTTISAEKVKKKKNRAQVSKELGILSKISKFMKDKEQSSVLITLLLPFLHRGNIAEDTEVDILVTVQNLLKHCVDPTSFLKPIAKLFSVIKNKLSRKLLCTVFETLSDFESGLKYITDVVKLNAFDQRHLDDINFDVRFETFQTITSYIKEMQIVDVNYLIPVMHNCFYNLELGDMSLSDNASMCLMSIIKKLAALNVTEKDYREIIHRSLLEKLRKGLKSQTESIQQDYTTILSCLIQTFPNQLEFKDLVQLTHYHDPEMDFFENMKHIQIHRRARALKKLAKQLMEGKVVLSSKSLQNYIMPYAMTPIFDEKMLKHENITTAATEIIGAICKHLSWSAYMYYLKHFIHVLQTGQINQKLGVSLLVIVLEAFHFDHKTLEEQMGKIENEENAIEAIELPEPEAMELERVDEEEKEYTCKSLSDNGQPGTPDPADSGGTSAKESECITKPVSFLPQNKEEIERTIKNIQGTITGDILPRLHKCLASTTKREEEHKLVKSKVVNDEEVVRVPLAFAMVKLMQSLPQEVMEANLPSILLKVCALLKNRAQEIRDIARSTLAKIIEDLGVHFLQYVLKELQTTLVRGYQVHVLTFTVHMLLQGLTNKLQVGDLDSCLDIMIEIFNHELFGAVAEEKEVKQILSKVMEARRSKSYDSYEILGKFVGKDQVTKLILPLKEILQNTTSLKLARKVHETLRRITVGLIVNQEMTAESILLLSYGLISENLPLLTEKEKNPVAPAPDPRLPPQSCLLLPPTPVRGGQKAVVSRKTNMHIFIESGLRLLHLSLKTSKIKSSGECVLEMLDPFVSLLIDCLGSMDVKVITGALQCLIWVLRFPLPSIETKAEQLTKHLFLLLKDYAKLGAARGQNFHLVVNCFKCVTILVKKVKSYQITEKQLQVLLAYAEEDIYDTSRQATAFGLLKAILSRKLLVPEIDEVMRKVSKLAVSAQSEPARVQCRQVFLKYILDYPLGDKLRPNLEFMLAQLNYEHETGRESTLEMIAYLFDTFPQGLLHENCGMFFIPLCLMTINDDSATCKKMASMTIKSLLGKISLEKKDWLFDMVTTWFGAKKRLNRQLAALICGLFVESEGVDFEKRLGTVLPVIEKEIDPENFKDIMEETEEKAADRLLFSFLTLITKLIKECNIIQFTKPAETLSKIWSHVHSHLRHPHNWVWLTAAQIFGLLFASCQPEELIQKWNTKKTKKHLPEPVAIKFLASDLDQKMKSISLASCHQLHSKFLDQSLGEQVVKNLLFAAKVLYLLELYCEDKQSKIKEDLEEQEALEDGVACADEKAESDGEEKEEVKEELGRPATLLWLIQKLSRIAKLEAAYSPRNPLKRTCIFKFLGAVAMDLGIDKVKPYLPMIIAPLFRELNSTYSEQDPLLKNLSQEIIELLKKLVGLESFSLAFASVQKQRSYDHWEIRLYLVYPKIHCYGAEELKDACSLYGVSRRRGR

SEQ ID NO: 889922 - protein, 256 aa, Homo sapiens
IGKVRGWVVITCIQILGSVSRRTVVKNLLFAAKVLYLLELYCEDKQSKIKEDLEEQEALEDGVACADEKAESDGEEKEEVKEELGRPATLLWLIQKLSRIAKLEAAYSPRNPLKRTCIFKFLGAVAMDLGIDKVKPYLPMIIAPLFRELNSTYSEQDPLLKNLSQEIIELLKKLVGLESFSLAFASVQKQANEKRALRKKRKALEFVTNPDIAAKKKMKKHKNKSEAKKRKIEFLRPGYKAKRQKSHSLKDLAMVE

SEQ ID NO: 889923 - protein, 1894 aa, Homo sapiens
MKTKPVSHKTENTYRFLTFAERLGNVNIDIIHRIDRTASYEEEVETYFFEGLLKWRELNLTEHFGKFYKEVIDKCQSFNQLVYHQNEIVQSLKTHLQVKNSFAYQPLLDLVVQLARDLQMDFYPHFPEFFLTITSILETQDTELLEWAFTSLSYLYKYLWRLMVKDMSSIYSMYSTLLAHKKLHIRNFAAESFTFLMRKVSDKNALFNLMFLDLDKHPEKVEGVGQLLFEMCKGVRNMFHSCTGQAVKLILRKLGPVTETETQLPWMLIGETLKNMVKSTVSYISKEHFGTFFECLQESLLDLHTKVTKTNCCESSEQIKRLLETYLILVKHGSGTKIPTPADVCKVLSQTLQVASLSTSCWETLLDVISALILGENVSLPETLIKETIEKIFESRFEKRLIFSFSEVMFAMKQFEQLFLPSFLSYIVNCFLIDDAVVKDEALAILAKLILNKAAPPTAGSMAIEKYPLVFSPQMVGFYIKQKKTRSKGRNEQFPVLDHLLSIIKLPPNKDTTYLSQSWAALVVLPHIRPLEKEKVIPLVTGFIEALFMTVDKGSFGKGNLFVLCQAVNTLLSLEESSELLHLVPVERVKNLVLTFPLEPSVLLLTDLYYQRLALCGCKGPLSQEALMELFPKLQANISTGVSKIRLLTIRILNHFDVQLPESMEDDGLSERQSVFAILRQAELVPATVNDYREKLLHLRKLRHDVVQTAVPDGPLQEVPLRYLLGMLYINFSALWDPVIELISSHAHEMENKQFWKVYYEHLEKAATHAEKELQNDMTDEKSVGDESWEQTQEGDVGALYHEQLALKTDCQERLDHTNFRFLLWRALTKFPERVEPRSRELSPLFLRFINNEYYPADLQVAPTQDLRRKGKGMVAEEIEEEPAAGDDEELEEEAVPQDESSQKKKTRRAAAKQLIAHLQVFSKFSNPRALYLESKLYELYLQLLLHQDQMVQKITLDCIMTYKHPHVLPYRENLQRLLEDRSFKEEIVHFSISEDNAVVKTAHRADLFPILMRILYGRMKNKTGSKTQGKSASGTRMAIVLRFLAGTQPEEIQIFLDLLFEPVRHFKNGECHSAVIQAVEDLDLSKVLPLGRQHGILNSLEIVLKNISHLISAYLPKILQILLCMTATVSHILDQREKIQLRFINPLKNLRRLGIKMVTDIFLDWESYQFRTEEIDAVFHGAVWPQISRLGSESQYSPTPLLKLISIWSRNARYFPLLAKQKPGHPECDILTNVFAILSAKNLSDATASIVMDIVDDLLNLPDFEPTETVLNLLVTGCVYPGIAENIGESITIGGRLILPHVPAILQYLSKTTISAEKVKKKKNRAQVSKELGILSKISKFMKDKEQSSVLITLLLPFLHRGNIAEDTEVDILVTVQNLLKHCVDPTSFLKPIAKLFSVIKNKLSRKLLCTVFETLSDFESGLKYITDVVKLNAFDQRHLDDINFDVRFETFQTITSYIKEMQIVDVNYLIPVMHNCFYNLELGDMSLSDNASMCLMSIIKKLAALNVTEKDYREIIHRSLLEKLRKGLKSQTESIQQDYTTILSCLIQTFPNQLEFKDLVQLTHYHDPEMDFFENMKHIQIHRRARALKKLAKQLMEGKVVLSSKSLQNYIMPYAMTPIFDEKMLKHENITTAATEIIGAICKHLSWSAYMYYLKHFIHVLQTGQINQKLGVSLLVIVLEAFHFDHKTLEEQMGKIENEENAIEAIELPEPEAMELERVDEEEKEYTCKSLSDNGQPGTPDPADSGGTSAKESECITKPVSFLPQNKEEIERTIKNIQGTITGDILPRLHKCLASTTKREEEHKLVKSKVVNDEEVVRVPLAFAMVKLMQSLPQEVMEANLPSILLKVCALLKNRAQEIRDIARSTLAKIIEDLGVHFLQYVLKISIIISKR

SEQ ID NO: 889924 - protein, 2129 aa, Homo sapiens
WTKALGGALRTPGAPPTEVAMDALESLLDEVALEGLDGLCLPALWSRLETRVPPFPLPLEPCTQEFLWRALATHPGISFYEEPRERPDLQLQDRYEEIDLETGILESRRDPVALEDVYPIHMILENKDGIQGSCRYFKERKNITNDIRTKSLQPRCTMVEAFDRWGKKLIIVASQAMRYRALIGQEGDPDLKLPDFSYCILERLGRSRWQGELQRDLHTTAFKVDAGKLHYHRKILNKNGLITMQSHVIRLPTGAQQHSILLLLNRFHVDRRSKYDILMEKLSVMLSTRTNHIETLGKLREELGLCERTFKRLYQYMLNAGLAKVVSLRLQEIHPECGPCKTKKGTDVMVRCLKLLKEFKRNDHDDDEDEEVISKTVPPVDIVFERDMLTQTYDLIERRGTKGISQAEIRVAMNVGKLEARMLCRLLQRFKVVKGFMEDEGRQRTTKYISCVFAEESDLSRQYQREKARSELLTTVSLASMQEESLLPEGEDTFLSESDSEEERSSSKRRGRGSQKDTRASANLRPKTQPHHSTPTKGGWKVVNLHPLKKQPPSFPGAAEERACQSLASRDSLLDTSSVSEPNVSFVSHCADSNSGDIAVIEEVRMENPKESSSSLKTGRHSSGQDKPHETYRLLKRRNLIIEAVTNLRLIESLFTIQKMIMDQEKQEGVSTKCCKKSIVRLVRNLSEEGLLRLYRTTVIQDGIKKKVDLVVHPSMDQNDPLVRSAIEQVRFRISNSSTANRVKTSQPPVPQGEAEEDSQGKEGPSGSGDSQLSASSRSESGRMKKSDNKMGITPLRNYHPIVVPGLGRSLGFLPKMPRLRVVHMFLWYLIYGHPASNTVEKPSFISERRTIKQESGRAGVRPSSSGSAWEACSEAPSKGSQDGVTWEAEVELATETVYVDDASWMRYIPPIPVHRDFGFGWALVSDILLCLPLSIFIQIVQVSYKVDNLEEFLNDPLKKHTLIRFLPRPIRQQLLYKRRYIFSVVENLQRLCYMGLLQFGPTEKFQDKDQVFIFLKKNAVIVDTTICDPHYNLARSSRPFERRLYVLNSMQDVENYWFDLQCVCLNTPLGVVRCPRVRKNSSTDQGSDEEGSLQKEQESAMDKHNLERKCAMLEYTTGSREVVDEGLIPGDGLGAAGLDSSFYGHLKRNWIWTSYIINQAKKENTAAENGLTVRLQTFLSKRPMPLSARGNSRLNIWGEARVGSELCAGWEEQFEVDREPSLDRNRRVRGGKSQKRKRLKKDPGKKIKRKKKGEFPGEKSKRLRYHDEADQSALQRMTRLRVTWSMQEDGLLVLCRIASNVLNTKVKGPFVTWQVVRDILHATFEESLDKTSHSVGRRARYIVKNPQAYLNYKVCLAEVYQDKALVGDFMNRRGDYDDPKVCANEFKEFVEKLKEKFSSALRNSNLEIPDTLQELFARYRVLAIGDEKDQTRKEDELNSVDDIHFLVLQNLIQSTLALSDSQMKSYQSFQTFRLYREYKDHVLVKAFMECQKRSLVNRRRVNHTLGPKKNRALPFVPMSYQLSQTYYRIFTWRFPSTICTESFQFLDRMRAAGKLDQPDRFSFKDQDNNEPTNDMVAFSLDGPGGNCVAVLTLFSLGLISVDVRIPEQIIVVDSSMVENEVIKSLGKDGSLEDDEDEEDDLDEGVGGKRRSMEVKPAQASHTNYLLMRGYYSPGIVSTRNLNPNDSIVVNSCQMKFQLRCTPVPARLRPAAAPLEELTMGTSCLPDTFTKLINPQENTCSLEEFVLQLELSGYSPEDLTAALEILEAIIATGCFGIDKEELRRRFSALEKAGGGRTRTFADCIQALLEQHQVLEVGGNTARLVAMGSAWPWLLHSVRLKDREDADIQREDPQARPLEGSSSEDSPPEGQAPPSHSPRGTKRRASWASENGETDAEGTQMTPAKRPALQDSNLAPSLGPGAEDGAEAQAPSPPPALEDTAAAGAAQEDQEGVGEFSSPGQEQLSGQAQPPEGSEDPRGFTESFGAANISQAARERDCESVCFIGRPWRVVDGHLNLPVCKGMMEAMLYHIMTRPGIPESSLLRHYQGVLQPVAVLELLQGLESLGCIRKRWLRKPRPVSLFSTPVVEEVEVPSSLDESPMAFYEPTLDCTLRLGRVFPHEVNWNKWIHL

SEQ ID NO: 889925 - protein, 2103 aa, Homo sapiens
WTKALGGALRTPGAPPTEVAMDALESLLDEVALEGLDGLCLPALWSRLETRVPPFPLPLEPCTQEFLWRALATHPGISFYEEPRERPDLQLQDRYEEIDLETGILESRRDPVALEDVYPIHMILENKDGIQGSCRYFKERKNITNDIRTKSLQPRCTMVEAFDRWGKKLIIVASQAMRYRALIGQEGDPDLKLPDFSYCILERLGRSRWQGELQRDLHTTAFKVDAGKLHYHRKILNKNGLITMQSHVIRLPTGAQQHSILLLLNRFHVDRRSKYDILMEKLSVMLSTRTNHIETLGKLREELGLCERTFKRLYQYMLNAGLAKVVSLRLQEIHPECGPCKTKKGTDVMVRCLKLLKEFKRNDHDDDEDEEVISKTVPPVDIVFERDMLTQTYDLIERRGTKGISQAEIRVAMNVGKLEARMLCRLLQRFKVVKGFMEDEGRQRTTKYISCVFAEESDLSRQYQREKARSELLTTVSLASMQEESLLPEGEDTFLSESDSEEERSSSKRRGRGSQKDTRASANLRPKTQPHHSTPTKGGWKVVNLHPLKKQPPSFPGAAEERACQSLASRDSLLDTSSVSEPNVSFVSHCADSNSGDIAVIEEVRMENPKESSSSLKTGRHSSGQDKPHETYRLLKRRNLIIEAVTNLRLIESLFTIQKMIMDQEKQEGVSTKCCKKSIVRLVRNLSEEGLLRLYRTTVIQDGIKKKVDLVVHPSMDQNDPLVRSAIEQVRFRISNSSTANRVKTSQPPVPQGEAEEDSQGKEGPSGSGDSQLSASSRSESGRMKKSDNKMGITPLRNYHPIVVPGLGRSLGFLPKMPRLRVVHMFLWYLIYGHPASNTVEKPSFISERRTIKQESGRAGVRPSSSGSAWEACSEAPSKGSQDGVTWEAEVELATETVYVDDASWMRYIPPIPVHRDFGFGWALVSDILLCLPLSIFIQIVQVSYKVDNLEEFLNDPLKKHTLIRFLPRPIRQQLLYKRRYIFSVVENLQRLCYMGLLQFGPTEKFQDKDQVFIFLKKNAVIVDTTICDPHYNLARSSRPFERRLYVLNSMQDVENYWFDLQCVCLNTPLGVVRCPRVRKNSSTDQGSDEEGSLQKEQESAMDKHNLERKCAMLEYTTGSREVVDEGLIPGDGLGAAGLDSSFYGHLKRNWIWTSYIINQAKKENTAAENGLTVRLQTFLSKRPMPLSARGNSRLNIWGEARVGSELCAGWEEQFEVDREPSLDRNRRVRGGKSQKRKRLKKDPGKKIKRKKKGEFPGEKSKRLRYHDEADQSALQRMTRLRVTWSMQEDGLLVLCRIASNVLNTKVKGPFVTWQVVRDILHATFEESLDKTSHSVGRRARYIVKNPQAYLNYKVCLAEVYQDKALVGDFMNRRGDYDDPKVCANEFKEFVEKLKEKFSSALRNSNLEIPDTLQELFARYRVLAIGDEKDQTRKEDELNSVDDIHFLVLQNLIQSTLALSDSQMKSYQSFQTFRLYREYKDHVLVKAFMECQKRSLVNRRRVNHTLGPKKNRALPFVPMSYQLSQTYYRIFTWRFPSTICTESFQFLDRMRAAGKLDQPDRFSFKDQDNNEPTNDMVAFSLDGPGGNCVAVLTLFSLGLISVDVRIPEQIIVVDSSMVENEVIKSLGKDGSLEDDEDEEDDLDEGVGGKRRSMEVKPAQASHTNYLLMRGYYSPGIVSTRNLNPNDSIVVNSCQMKFQLRCTPVPARLRPAAAPLEELTMGTSCLPDTFTKLINPQENTCSLEEFVLQLELSGYSPEDLTAALEILEAIIATGCFGIDKEELRRRFSALEKAGGGRTRTFADCIQALLEQHQVLEVGGNTARLVAMGSAWPWLLHSVRLKDREDADIQREDPQARPLEGSSSEDSPPEGQAPPSHSPRGTKRRASWASENGETDAEGTQMTPAKRPALQDSNLAPSLGPGAEDGAEAQAPSPPPALEDTAAAGAAQEDQEGGFTESFGAANISQAARERDCESVCFIGRPWRVVDGHLNLPVCKGMMEAMLYHIMTRPGIPESSLLRHYQGVLQPVAVLELLQGLESLGCIRKRWLRKPRPVSLFSTPVVEEVEVPSSLDESPMAFYEPTLDCTLRLGRVFPHEVNWNKWIHL

SEQ ID NO: 889926 - protein, 908 aa, Homo sapiens
TGDAVGTKPRDSGVVPVGTEEAPKVFKMAASMHGQPSPSLEDAKLRRPMVIEIIEKKKGEFPGEKSKRLRYHDEADQSALQRMTRLRVTWSMQEDGLLVLCRIASNVLNTKVKGPFVTWQVVRDILHATFEESLDKTSHSVGRRARYIVKNPQAYLNYKVCLAEVYQDKALVGDFMNRRGDYDDPKVCANEFKEFVEKLKEKFSSALRNSNLEIPDTLQELFARYRVLAIGDEKDQTRKEDELNSVDDIHFLVLQNLIQSTLALSDSQMKSYQSFQTFRLYREYKDHVLVKAFMECQKRSLVNRRRVNHTLGPKKNRALPFVPMSYQLSQTYYRIFTWRFPSTICTESFQFLDRMRAAGKLDQPDRFSFKDQDNNEPTNDMVAFSLDGPGGNCVAVLTLFSLGLISVDVRIPEQIIVVDSSMVENEVIKSLGKDGSLEDDEDEEDDLDEGVGGKRRSMEVKPAQASHTNYLLMRGYYSPGIVSTRNLNPNDSIVVNSCQMKFQLRCTPVPARLRPAAAPLEELTMGTSCLPDTFTKLINPQENTCSLEEFVLQLELSGYSPEDLTAALEILEAIIATGCFGIDKEELRRRFSALEKAGGGRTRTFADCIQALLEQHQVLEVGGNTARLVAMGSAWPWLLHSVRLKDREDADIQREDPQARPLEGSSSEDSPPEGQAPPSHSPRGTKRRASWASENGETDAEGTQMTPAKRPALQDSNLAPSLGPGAEDGAEAQAPSPPPALEDTAAAGAAQEDQEGGFTESFGAANISQAARERDCESVCFIGRPWRVVDGHLNLPVCKGMMEAMLYHIMTRPGIPESSLLRHYQGVLQPVAVLELLQGLESLGCIRKRWLRKPRPVSLFSTPVVEEVEVPSSLDESPMAFYEPTLDCTLRLGRVFPHEVNWNKWIHL

SEQ ID NO: 889927 - protein, 554 aa, Homo sapiens
MRAAGKLDQPDRFSFKDQDNNEPTNDMVAFSLDGPGGNCVAVLTLFSLGLISVDVRIPEQIIVVDSSMVENEVIKSLGKDGSLEDDEDEEDDLDEGVGGKRRSMEVKPAQASHTNYLLMRGYYSPGIVSTRNLNPNDSIVVNSCQMKFQLRCTPVPARLRPAAAPLEELTMGTSCLPDTFTKLINPQENTCSLEEFVLQLELSGYSPEDLTAALEILEAIIATGCFGIDKEELRRRFSALEKAGGGRTRTFADCIQALLEQHQVLEVGGNTARLVAMGSAWPWLLHSVRLKDREDADIQREDPQARPLEGSSSEDSPPEGQAPPSHSPRGTKRRASWASENGETDAEGTQMTPAKRPALQDSNLAPSLGPGAEDGAEAQAPSPPPALEDTAAAGAAQEDQEGGFTESFGAANISQAARERDCESVCFIGRPWRVVDGHLNLPVCKGMMEAMLYHIMTRPGIPESSLLRHYQGVLQPVAVLELLQGLESLGCIRKRWLRKPRPVSLFSTPVVEEVEVPSSLDESPMAFYEPTLDCTLRLGRVFPHEVNWNKWIHL

SEQ ID NO: 889928 - protein, 1820 aa, Homo sapiens
WTKALGGALRTPGAPPTEVAMDALESLLDEVALEGLDGLCLPALWSRLETRVPPFPLPLEPCTQEFLWRALATHPGISFYEEPRERPDLQLQDRYEEIDLETGILESRRDPVALEDVYPIHMILENKDGIQGSCRYFKERKNITNDIRTKSLQPRCTMVEAFDRWGKKLIIVASQAMRYRALIGQEGDPDLKLPDFSYCILERLGRSRWQGELQRDLHTTAFKVDAGKLHYHRKILNKNGLITMQSHVIRLPTGAQQHSILLLLNRFHVDRRSKYDILMEKLSVMLSTRTNHIETLGKLREELGLCERTFKRLYQYMLNAGLAKVVSLRLQEIHPECGPCKTKKGTDVMVRCLKLLKEFKRNDHDDDEDEEVISKTVPPVDIVFERDMLTQTYDLIERRGTKGISQAEIRVAMNVGKLEARMLCRLLQRFKVVKGFMEDEGRQRTTKYISCVFAEESDLSRQYQREKARSELLTTVSLASMQEESLLPEGEDTFLSESDSEEERSSSKRRGRGSQKDTRASANLRPKTQPHHSTPTKGGWKVVNLHPLKKQPPSFPGAAEERACQSLASRDSLLDTSSVSEPNVSFVSHCADSNSGDIAVIEEVRMENPKESSSSLKTGRHSSGQDKPHETYRLLKRRNLIIEAVTNLRLIESLFTIQKMIMDQEKQEGVSTKCCKKSIVRLVRNLSEEGLLRLYRTTVIQDGIKKKVDLVVHPSMDQNDPLVRSAIEQVRFRISNSSTANRVKTSQPPVPQGEAEEDSQGKEGPSGSGDSQLSASSRSESGRMKKSDNKMGITPLRNYHPIVVPGLGRSLGFLPKMPRLRVVHMFLWYLIYGHPASNTVEKPSFISERRTIKQESGRAGVRPSSSGSAWEACSEAPSKGSQDGVTWEAEVELATETVYVDDASWMRYIPPIPVHRDFGFGWALVSDILLCLPLSIFIQIVQVSYKVDNLEEFLNDPLKKHTLIRFLPRPIRQQLLYKRRYIFSVVENLQRLCYMGLLQFGPTEKFQDKDQVFIFLKKNAVIVDTTICDPHYNLARSSRPFERRLYVLNSMQDVENYWFDLQCVCLNTPLGVVRCPRVRKNSSTDQGSDEEGSLQKEQESAMDKHNLERKCAMLEYTTGSREVVDEGLIPGDGLGAAGLDSSFYGHLKRNWIWTSYIINQAKKENTAAENGLTVRLQTFLSKRPMPLSARGNSRLNIWGEARVGSELCAGWEEQFEVDREPSLDRNRRVRGGKSQKRKRLKKDPGKKIKRKKKGEFPGEKSKRLRYHDEADQSALQRMTRLRVTWSMQEDGLLVLCRIASNVLNTKVKGPFVTWQVVRDILHATFEESLDKTSHSVGRRARYIVKNPQAYLNYKVCLAEVYQDKALVGDFMNRRGDYDDPKVCANEFKEFVEKLKEKFSSALRNSNLEIPDTLQELFARYRVLAIGDEKDQTRKEDELNSVDDIHFLVLQNLIQSTLALSDSQMKSYQSFQTFRLYREYKDHVLVKAFMECQKRSLVNRRRVNHTLGPKKNRALPFVPMSYQLSQTYYRIFTWRFPSTICTESFQFLDRMRAAGKLDQPDRFSFKDQDNNEPTNDMVAFSLDGPGGNCVAVLTLFSLGLISVDVRIPEQIIVVDSSMVENEVIKSLGKDGSLEDDEDEEDDLDEGVGGKRRSMEVKPAQASHTNYLLMRGYYSPGIVSTRNLNPNDSIVVNSCQMKFQLRCTPVPARLRPAAAPLEELTMGTSCLPDTFTKLINPQENTCSLEEFVLQLELSGYSPEDLTAALEILEAIIATGCFGIDKEELRRRFSALEKAGGGRTRTFADCIQALLEQHQVLEATELL

SEQ ID NO: 889929 - protein, 1654 aa, Homo sapiens
WTKALGGALRTPGAPPTEVAMDALESLLDEVALEGLDGLCLPALWSRLETRVPPFPLPLEPCTQEFLWRALATHPGISFYEEPRERPDLQLQDRYEEIDLETGILESRRDPVALEDVYPIHMILENKDGIQGSCRYFKERKNITNDIRTKSLQPRCTMVEAFDRWGKKLIIVASQAMRYRALIGQEGDPDLKLPDFSYCILERLGRSRWQGELQRDLHTTAFKVDAGKLHYHRKILNKNGLITMQSHVIRLPTGAQQHSILLLLNRFHVDRRSKYDILMEKLSVMLSTRTNHIETLGKLREELGLCERTFKRLYQYMLNAGLAKVVSLRLQEIHPECGPCKTKKGTDVMVRCLKLLKEFKRNDHDDDEDEEVISKTVPPVDIVFERDMLTQTYDLIERRGTKGISQAEIRVAMNVGKLEARMLCRLLQRFKVVKGFMEDEGRQRTTKYISCVFAEESDLSRQYQREKARSELLTTVSLASMQEESLLPEGEDTFLSESDSEEERSSSKRRGRGSQKDTRASANLRPKTQPHHSTPTKGGWKVVNLHPLKKQPPSFPGAAEERACQSLASRDSLLDTSSVSEPNVSFVSHCADSNSGDIAVIEEVRMENPKESSSSLKTGRHSSGQDKPHETYRLLKRRNLIIEAVTNLRLIESLFTIQKMIMDQEKQEGVSTKCCKKSIVRLVRNLSEEGLLRLYRTTVIQDGIKKKVDLVVHPSMDQNDPLVRSAIEQVRFRISNSSTANRVKTSQPPVPQGEAEEDSQGKEGPSGSGDSQLSASSRSESGRMKKSDNKMGITPLRNYHPIVVPGLGRSLGFLPKMPRLRVVHMFLWYLIYGHPASNTVEKPSFISERRTIKQESGRAGVRPSSSGSAWEACSEAPSKGSQDGVTWEAEVELATETVYVDDASWMRYIPPIPVHRDFGFGWALVSDILLCLPLSIFIQIVQVSYKVDNLEEFLNDPLKKHTLIRFLPRPIRQQLLYKRRYIFSVVENLQRLCYMGLLQFGPTEKFQDKDQVFIFLKKNAVIVDTTICDPHYNLARSSRPFERRLYVLNSMQDVENYWFDLQCVCLNTPLGVVRCPRVRKNSSTDQGSDEEGSLQKEQESAMDKHNLERKCAMLEYTTGSREVVDEGLIPGDGLGAAGLDSSFYGHLKRNWIWTSYIINQAKKENTAAENGLTVRLQTFLSKRPMPLSARGNSRLNIWGEARVGSELCAGWEEQFEVDREPSLDRNRRVRGGKSQKRKRLKKDPGKKIKRKKKGEFPGEKSKRLRYHDEADQSALQRMTRLRVTWSMQEDGLLVLCRIASNVLNTKVKGPFVTWQVVRDILHATFEESLDKTSHSVGRRARYIVKNPQAYLNYKVCLAEVYQDKALVGDFMNRRGDYDDPKVCANEFKEFVEKLKEKFSSALRNSNLEIPDTLQELFARYRVLAIGDEKDQTRKEDELNSVDDIHFLVLQNLIQSTLALSDSQMKSYQSFQTFRLYREYKDHVLVKAFMECQKRSLVNRRRVNHTLGPKKNRALPFVPMSYQLSQTYYRIFTWRFPSTICTESFQFLDRMRAAGKLDQPDRFSFKDQDNNEPTNDMVAFSLDGPGGNCVAVLTLFSLGLISVDVRIPEQIIVGSHFVGSAAHEVESLATQCASVSVGILTKAGEVPFKVPMIES

SEQ ID NO: 889930 - protein, 1364 aa, Homo sapiens
WTKALGGALRTPGAPPTEVAMDALESLLDEVALEGLDGLCLPALWSRLETRVPPFPLPLEPCTQEFLWRALATHPGISFYEEPRERPDLQLQDRYEEIDLETGILESRRDPVALEDVYPIHMILENKDGIQGSCRYFKERKNITNDIRTKSLQPRCTMVEAFDRWGKKLIIVASQAMRYRALIGQEGDPDLKLPDFSYCILERLGRSRWQGELQRDLHTTAFKVDAGKLHYHRKILNKNGLITMQSHVIRLPTGAQQHSILLLLNRFHVDRRSKYDILMEKLSVMLSTRTNHIETLGKLREELGLCERTFKRLYQYMLNAGLAKVVSLRLQEIHPECGPCKTKKGTDVMVRCLKLLKEFKRNDHDDDEDEEVISKTVPPVDIVFERDMLTQTYDLIERRGTKGISQAEIRVAMNVGKLEARMLCRLLQRFKVVKGFMEDEGRQRTTKYISCVFAEESDLSRQYQREKARSELLTTVSLASMQEESLLPEGEDTFLSESDSEEERSSSKRRGRGSQKDTRASANLRPKTQPHHSTPTKGGWKVVNLHPLKKQPPSFPGAAEERACQSLASRDSLLDTSSVSEPNVSFVSHCADSNSGDIAVIEEVRMENPKESSSSLKTGRHSSGQDKPHETYRLLKRRNLIIEAVTNLRLIESLFTIQKMIMDQEKQEGVSTKCCKKSIVRLVRNLSEEGLLRLYRTTVIQDGIKKKVDLVVHPSMDQNDPLVRSAIEQVRFRISNSSTANRVKTSQPPVPQGEAEEDSQGKEGPSGSGDSQLSASSRSESGRMKKSDNKMGITPLRNYHPIVVPGLGRSLGFLPKMPRLRVVHMFLWYLIYGHPASNTVEKPSFISERRTIKQESGRAGVRPSSSGSAWEACSEAPSKGSQDGVTWEAEVELATETVYVDDASWMRYIPPIPVHRDFGFGWALVSDILLCLPLSIFIQIVQVSYKVDNLEEFLNDPLKKHTLIRFLPRPIRQQLLYKRRYIFSVVENLQRLCYMGLLQFGPTEKFQDKDQVFIFLKKNAVIVDTTICDPHYNLARSSRPFERRLYVLNSMQDVENYWFDLQCVCLNTPLGVVRCPRVRKNSSTDQGSDEEGSLQKEQESAMDKHNLERKCAMLEYTTGSREVVDEGLIPGDGLGAAGLDSSFYGHLKRNWIWTSYIINQAKKENTAAENGLTVRLQTFLSKRPMPLSARGNSRLNIWGEARVGSELCAGWEEQFEVDREPSLDRNRRVRGGKSQKRKRLKKDPGKKIKRKKKGEFPGEKSKRLRYHDEADQSALQRMTRLRVTWSMQEDGLLVLCRIASNVLNTKVKGPFVTWQVVRDILHATFEESLDKTSHSVGRRARYIVKNPQAYLNYKSAHMVLDKPL

SEQ ID NO: 889931 - protein, 304 aa, Homo sapiens
MGSAWPWLLHSVRLKDREDADIQREDPQARPLEGSSSEDSPPEGQAPPSHSPRGTKRRASWASENGETDAEGTQMTPAKRPALQDSNLAPSLGPGAEDGAEAQAPSPPPALEDTAAAGAAQEDQEGVGEFSSPGQEQLSGQAQPPEGSEDPRGFTESFGAANISQAARERDCESVCFIGRPWRVVDGHLNLPVCKGMMEAMLYHIMTRPGIPESSLLRHYQGVLQPVAVLELLQGLESLGCIRKRWLRKPRPVSLFSTPVVEEVEVPSSLDESPMAFYEPTLDCTLRLGRVFPHEVNWNKWIHL

SEQ ID NO: 889932 - protein, 360 aa, Homo sapiens
  misc_feature (18)..(18): Xaa can be any naturally occurring amino acid
TQPQNESSTQNLTVSEEXRVNTDTRGRTRTFADCIQALLEQHQVLEVGGNTARLVAMGSAWPWLLHSVRLKDREDADIQREDPQARPLEGSSSEDSPPEGQAPPSHSPRGTKRRASWASENGETDAEGTQMTPAKRPALQDSNLAPSLGPGAEDGAEAQAPSPPPALEDTAAAGAAQEDQEGVGEFSSPGQEQLSGQAQPPEGSEDPRGFTESFGAANISQAARERDCESVCFIGRPWRVVDGHLNLPVCKGMMEAMLYHIMTRPGIPESSLLRHYQGVLQPVAVLELLQGLESLGCIRKRWLRKPRPVSLFSTPVVEEVEVPSSLDESPMAFYEPTLDCTLRLGRVFPHEVNWNKWIHL

SEQ ID NO: 889933 - protein, 235 aa, Homo sapiens
MSPPWTVPSGWAVCSPTRSTGTSGSTSRTPVGVPSLPATACHTTPAWCSADPTVPWPWVCRASCSRGRVLWPESQTDTFPTVLELWKEGLPDLPIPQALLGLPLGNWPHHTGSWCFLSLGLQSLPRLCTPHIPDSSHLGRISWLLECPGATKRKGLVGYTLQNRDRCAPLRGAPHGGCGPSAGRTSQPLAGTEPPRAERLPFQPCESPGRPQLGWLSVSLSLAGDSLQARNEESL

SEQ ID NO: 889934 - protein, 266 aa, Homo sapiens
GSAPLVGPGWLFSLWFSNRNVCFEESVPGTLHMAWSRASGSRSREFCHSLEVVSAWAASRAGKSRSHNPCPSPANVGGPTEASVTATSERTPRPGSTQLAVKGPSVQTGEKQGVWKAESKKVAGLSPVTWARPRTPLSLSVLSGRAALLPPPSPDVKPSPCRDCESVCFIGRPWRVVDGHLNLPVCKGMMEAMLYHIMTRPGIPESSLLRHYQGVLQPVAVLELLQVWGLPGFSRVWRRLGALSGPAVMFRPQATCSTTILLACTS

SEQ ID NO: 889935 - protein, 2103 aa, Homo sapiens; identical to SEQ ID NO: 889925

SEQ ID NO: 889936 - protein, 1403 aa, Homo sapiens
CSNLSLQVDLVVHPSMDQNDPLVRSAIEQVRFRISNSSTANRVKTSQPPVPQGEAEEDSQGKEGPSGSGDSQLSASSRSESGRMKKSDNKMGITPLRNYHPIVVPGLGRSLGFLPKMPRLRVVHMFLWYLIYGHPASNTVEKPSFISERRTIKQESGRAGVRPSSSGSAWEACSEAPSKGSQDGVTWEAEVELATETVYVDDASWMRYIPPIPVHRDFGFGWALVSDILLCLPLSIFIQIVQVSYKVDNLEEFLNDPLKKHTLIRFLPRPIRQQLLYKRRYIFSVVENLQRLCYMGLLQFGPTEKFQDKDQVFIFLKKNAVIVDTTICDPHYNLARSSRPFERRLYVLNSMQDVENYWFDLQCVCLNTPLGVVRCPRVRKNSSTDQGSDEEGSLQKEQESAMDKHNLERKCAMLEYTTGSREVVDEGLIPGDGLGAAGLDSSFYGHLKRNWIWTSYIINQAKKENTAAENGLTVRLQTFLSKRPMPLSARGNSRLNIWGEARVGSELCAGWEEQFEVDREPSLDRNRRVRGGKSQKRKRLKKDPGKKIKRKKKGEFPGEKSKRLRYHDEADQSALQRMTRLRVTWSMQEDGLLVLCRIASNVLNTKVKGPFVTWQVVRDILHATFEESLDKTSHSVGRRARYIVKNPQAYLNYKVCLAEVYQDKALVGDFMNRRGDYDDPKVCANEFKEFVEKLKEKFSSALRNSNLEIPDTLQELFARYRVLAIGDEKDQTRKEDELNSVDDIHFLVLQNLIQSTLALSDSQMKSYQSFQTFRLYREYKDHVLVKAFMECQKRSLVNRRRVNHTLGPKKNRALPFVPMSYQLSQTYYRIFTWRFPSTICTESFQFLDRMRAAGKLDQPDRFSFKDQDNNEPTNDMVAFSLDGPGGNCVAVLTLFSLGLISVDVRIPEQIIVVDSSMVENEVIKSLGKDGSLEDDEDEEDDLDEGVGGKRRSMEVKPAQASHTNYLLMRGYYSPGIVSTRNLNPNDSIVVNSCQMKFQLRCTPVPARLRPAAAPLEELTMGTSCLPDTFTKLINPQENTCSLEEFVLQLELSGYSPEDLTAALEILEAIIATGCFGIDKEELRRRFSALEKAGGGRTRTFADCIQALLEQHQVLEVGGNTARLVAMGSAWPWLLHSVRLKDREDADIQREDPQARPLEGSSSEDSPPEGQAPPSHSPRGTKRRASWASENGETDAEGTQMTPAKRPALQDSNLAPSLGPGAEDGAEAQAPSPPPALEDTAAAGAAQEDQEGGFTESFGAANISQAARERDCESVCFIGRPWRVVDGHLNLPVCKGMMEAMLYHIMTRPGIPESSLLRHYQGVLQPVAVLELLQGLESLGCIRKRWLRKPRPVSLFSTPVVEEVEVPSSLDESPMAFYEPTLDCTLRLGRVFPHEVNWNKWIHL

SEQ ID NO: 889937 - protein, 667 aa, Homo sapiens
  misc_feature (1)..(2): Xaa can be any naturally occurring amino acid
XXIVIQALVSSDSVSPEHLLAPLQRVMMKSYQSFQTFRLYREYKDHVLVKAFMECQKRSLVNRRRVNHTLGPKKNRALPFVPMSYQLSQTYYRIFTWRFPSTICTESFQFLDRMRAAGKLDQPDRFSFKDQDNNEPTNDMVAFSLDGPGGNCVAVLTLFSLGLISVDVRIPEQIIVVDSSMVENEVIKSLGKDGSLEDDEDEEDDLDEGVGGKRRSMEVKPAQASHTNYLLMRGYYSPGIVSTRNLNPNDSIVVNSCQMKFQLRCTPVPARLRPAAAPLEELTMGTSCLPDTFTKLINPQENTCSLEEFVLQLELSGYSPEDLTAALEILEAIIATGCFGIDKEELRRRFSALEKAGGGRTRTFADCIQALLEQHQVLEVGGNTARLVAMGSAWPWLLHSVRLKDREDADIQREDPQARPLEGSSSEDSPPEGQAPPSHSPRGTKRRASWASENGETDAEGTQMTPAKRPALQDSNLAPSLGPGAEDGAEAQAPSPPPALEDTAAAGAAQEDQEGGFTESFGAANISQAARERDCESVCFIGRPWRVVDGHLNLPVCKGMMEAMLYHIMTRPGIPESSLLRHYQGVLQPVAVLELLQGLESLGCIRKRWLRKPRPVSLFSTPVVEEVEVPSSLDESPMAFYEPTLDCTLRLGRVFPHEVNWNKWIHL

SEQ ID NO: 889938 - protein, 846 aa, Homo sapiens
WTKALGGALRTPGAPPTEVAMDALESLLDEVALEGLDGLCLPALWSRLETRVPPFPLPLEPCTQEFLWRALATHPGISFYEEPRERPDLQLQDRYEEIDLETGILESRRDPVALEDVYPIHMILENKDGIQGSCRYFKERKNITNDIRTKSLQPRCTMVEAFDRWGKKLIIVASQAMRYRALIGQEGDPDLKLPDFSYCILERLGRSRWQGELQRDLHTTAFKVDAGKLHYHRKILNKNGLITMQSHVIRLPTGAQQHSILLLLNRFHVDRRSKYDILMEKLSVMLSTRTNHIETLGKLREELGLCERTFKRLYQYMLNAGLAKVVSLRLQEIHPECGPCKTKKGTDVMVRCLKLLKEFKRNDHDDDEDEEVISKTVPPVDIVFERDMLTQTYDLIERRGTKGISQAEIRVAMNVGKLEARMLCRLLQRFKVVKGFMEDEGRQRTTKYISCVFAEESDLSRQYQREKARSELLTTVSLASMQEESLLPEGEDTFLSESDSEEERSSSKRRGRGSQKDTRASANLRPKTQPHHSTPTKGGWKVVNLHPLKKQPPSFPGAAEERACQSLASRDSLLDTSSVSEPNVSFVSHCADSNSGDIAVIEEVRMENPKESSSSLKTGRHSSGQDKPHETYRLLKRRNLIIEAVTNLRLIESLFTIQKMIMDQEKQEVGEFSSPGQEQLSGQAQPPEGSEDPRGFTESFGAANISQAARERDCESVCFIGRPWRVVDGHLNLPVCKGMMEAMLYHIMTRPGIPESSLLRHYQGVLQPVAVLELLQGLESLGCIRKRWLRKPRPVSLFSTPVVEEVEVPSSLDESPMAFYEPTLDCTLRLGRVFPHEVNWNKWIHL

SEQ ID NO: 889939 - protein, 1419 aa, Homo sapiens
WTKALGGALRTPGAPPTEVAMDALESLLDEVALEGLDGLCLPALWSRLETRVPPFPLPLEPCTQEFLWRALATHPGISFYEEPRERPDLQLQDRYEEIDLETGILESRRDPVALEDVYPIHMILENKDGIQGSCRYFKERKNITNDIRTKSLQPRCTMVEAFDRWGKKLIIVASQAMRYRALIGQEGDPDLKLPDFSYCILERLGRSRWQGELQRDLHTTAFKVDAGKLHYHRKILNKNGLITMQSHVIRLPTGAQQHSILLLLNRFHVDRRSKYDILMEKLSVMLSTRTNHIETLGKLREELGLCERTFKRLYQYMLNAGLAKVVSLRLQEIHPECGPCKTKKGTDVMVRCLKLLKEFKRNDHDDDEDEEVISKTVPPVDIVFERDMLTQTYDLIERRGTKGISQAEIRVAMNVGKLEARMLCRLLQRFKVVKGFMEDEGRQRTTKYISCVFAEESDLSRQYQREKARSELLTTVSLASMQEESLLPEGEDTFLSESDSEEERSSSKRRGRGSQKDTRASANLRPKTQPHHSTPTKGGWKVVNLHPLKKQPPSFPGAAEERACQSLASRDSLLDTSSVSEPNVSFVSHCADSNSGDIAVIEEVRMENPKESSSSLKTGRHSSGQDKPHETYRLLKRRNLIIEAVTNLRLIESLFTIQKMIMDQEKQEGVSTKCCKKSIVRLVRNLSEEGLLRLYRTTVIQDGIKKKVDLVVHPSMDQNDPLVRSAIEQVRFRISNSSTANRVKTSQPPVPQGEAEEDSQGKEGPSGSGDSQLSASSRSESGRMKKSDNKMGITPLRNYHPIVVPGLGRSLGFLPKMPRLRVVHMFLWYLIYGHPASNTVEKPSFISERRTIKQESGRAGVRPSSSGSAWEACSEAPSKGSQDGVTWEAEVELATETVYVDDASWMRYIPPIPVHRDFGFGWALVSDILLCLPLSIFIQIVQVSYKVDNLEEFLNDPLKKHTLIRFLPRPIRQQLLYKRRYIFSVVENLQRLCYMGLLQFGPTEKFQDKDQVFIFLKKNAVIVDTTICDPHYNLARSSRPFERRLYVLNSMQDVENYWFDLQCVCLNTPLGVVRCPRVRKNSSTDQGSDEEGSLQKEQESAMDKHNLERKCAMLEYTTGSREVVDEGLIPGDGLGAAGLDSSFYGHLKRNWIWTSYIINQAKKENTAAENGLTVRLQTFLSKRPMPLSARGNSRLNIWGEARVGSELCAGWEEQFEVDREPSLDRNRRVRGGKSQKRKRLKKDPGKKIKRKKKGEFPGEKSKRLRYHDEADQSALQRMTRLRVTWSMQEDGLLVLCRIASNVLNTKVKGPFVTWQVVRDILHATFEESLDKTSHSVGRRARYIVKNPQAYLNYKVCLAEVYQDKALVGDFMNRRGDYDDPKVCANEFKEFVEKLKEKFSSALRNSNLEIPDTLQELFAR

SEQ ID NO: 889940 - protein, 278 aa, Homo sapiens
MGSAWPWLLHSVRLKDREDADIQREDPQARPLEGSSSEDSPPEGQAPPSHSPRGTKRRASWASENGETDAEGTQMTPAKRPALQDSNLAPSLGPGAEDGAEAQAPSPPPALEDTAAAGAAQEDQEGGFTESFGAANISQAARERDCESVCFIGRPWRVVDGHLNLPVCKGMMEAMLYHIMTRPGIPESSLLRHYQGVLQPVAVLELLQGLESLGCIRKRWLRKPRPVSLFSTPVVEEVEVPSSLDESPMAFYEPTLDCTLRLGRVFPHEVNWNKWIHL

SEQ ID NO: 889941 - protein, 1095 aa, Homo sapiens
WTKALGGALRTPGAPPTEVAMDALESLLDEVALEGLDGLCLPALWSRLETRVPPFPLPLEPCTQEFLWRALATHPGISFYEEPRERPDLQLQDRYEEIDLETGILESRRDPVALEDVYPIHMILENKDGIQGSCRYFKERKNITNDIRTKSLQPRCTMVEAFDRWGKKLIIVASQAMRYRALIGQEGDPDLKLPDFSYCILERLGRSRWQGELQRDLHTTAFKVDAGKLHYHRKILNKNGLITMQSHVIRLPTGAQQHSILLLLNRFHVDRRSKYDILMEKLSVMLSTRTNHIETLGKLREELGLCERTFKRLYQYMLNAGLAKVVSLRLQEIHPECGPCKTKKGTDVMVRCLKLLKEFKRNDHDDDEDEEVISKTVPPVDIVFERDMLTQTYDLIERRGTKGISQAEIRVAMNVGKLEARMLCRLLQRFKVVKGFMEDEGRQRTTKYISCVFAEESDLSRQYQREKARSELLTTVSLASMQEESLLPEGEDTFLSESDSEEERSSSKRRGRGSQKDTRASANLRPKTQPHHSTPTKGGWKVVNLHPLKKQPPSFPGAAEERACQSLASRDSLLDTSSVSEPNVSFVSHCADSNSGDIAVIEEVRMENPKESSSSLKTGRHSSGQDKPHETYRLLKRRNLIIEAVTNLRLIESLFTIQKMIMDQEKQEGVSTKCCKKSIVRLVRNLSEEGLLRLYRTTVIQDGIKKKVDLVVHPSMDQNDPLVRSAIEQVRFRISNSSTANRVKTSQPPVPQGEAEEDSQGKEGPSGSGDSQLSASSRSESGRMKKSDNKMGITPLRNYHPIVVPGLGRSLGFLPKMPRLRVVHMFLWYLIYGHPASNTVEKPSFISERRTIKQESGRAGVRPSSSGSAWEACSEAPSKGSQDGVTWEAEVELATETVYVDDASWMRYIPPIPVHRDFGFGWALVSDILLCLPLSIFIQIVQVSYKVDNLEEFLNDPLKKHTLIRFLPRPIRQQLLYKRRYIFSVVENLQRLCYMGLLQFGPTEKFQDKDQVFIFLKKNAVIVDTTICDPHYNLARSSRPFERRLYVLNSMQDVENYWFDLQCVCLNTPLGVVPARASGRTAAPRRRIPHHNGYA

SEQ ID NO: 889942 - protein, 846 aa, Homo sapiens; identical to SEQ ID NO: 889938

SEQ ID NO: 889943 - protein, 224 aa, Homo sapiens
MPGRAPLRTVPGALGAWLLGGLWAWTLCGLCSLGAVGAPRPCQAPQQWEGRQVMYQQSSGRNSRALLSYDGLNQRVRVLDERKALIPCKRLFEYILLYKDGVMFQIDQATKQCSKMTLTQPWDPLDIPQNSTFEDQYSIGGPQEQITVQEWSDRKSARSYETWIGIYTVKDCYPVQETFTINYSVILSTRFFDIQLGIKDPSVFTPPSTCQMAQLEKMSEDCSW

SEQ ID NO: 889944 - protein, 344 aa, Homo sapiens
MPPRMLVAPLPLHFLLAAVSSENRSGRRQWQQAVAAGSGPGRNSSRAIHWSLPRALVPATGTRASGSQKRQRPPKGQEALWSRPHSRHSAERAGGSHSDPGRLSAPLGLGLPSGRGRLTAMPGRAPLRTVPGALGAWLLGGLWAWTLCGLCSLGAVGAPRPCQAPQQWEGRQVMYQQSSGRNSRALLSYDGLNQRVRVLDERKALIPCKRLFEYILLYKDGVMFQIDQATKQCSKMTLTQPWDPLDIPQNSTFEDQYSIGGPQEQITVQEWSDRKSARSYETWIGIYTVKDCYPVQETFTINYSVILSTRFFDIQLGIKDPSVFTPPSTCQMAQLEKMSEDCSW

SEQ ID NO: 889945 - protein, 214 aa, Homo sapiens
MPPRMLVAPLPLHFLLAAVSSENRSGRRQWQQAVAAGSGPGRNSSRAIHWSLPRALVPATGTRASGSQKRQRPPKGQEALWSRPHSRHSAERAGGSHSDPGRLSAPLGLGLPSGRGRLTAMPGRAPLRTVPGALGAWLLGGLWAWTLCGLCSLGAVGAPRPCQAPQQWEGRQVMYQQSSGRNSRALLSYDGLNQRVRVLDERKALIPCKSAPGE

SEQ ID NO: 889946 - protein, 344 aa, Homo sapiens; identical to SEQ ID NO: 889944

SEQ ID NO: 889947 - protein, 210 aa, Homo sapiens
MPPRMLVAPLPLHFLLAAVSSENRSGRRQWQQAVAAGSGPGRNSSRAIHWSLPRALVPATGTRASGSQKRQRPPKGQEALWSRPHSRHSAERAGGSHSDPGRLSAPLGLGLPSGRGRLTAMPGRAPLRTVPGALGAWLLGGLWAWTLCGLCSLGAVGAPRPCQAPQQWEGRQVMYQQSSGRNSRALLSYDGLNQRVRVLDERKALIPCKR

SEQ ID NO: 889948 - protein, 1003 aa, Homo sapiens
GTAAGIRVRSAASQARAVWDPSARTPAPAKEPGMAQLERSAISGFSSKSRRNSFAYDVKREVYNEETFQQEHKRKASSSGNMNINITTFRHHVQCRCSWHRFLRCVLTIFPFLEWMCMYRLKDWLLGDLLAGISVGLVQVPQGLTLSLLARQLIPPLNIAYAAFCSSVIYVIFGSCHQMSIGSFFLVSALLINVLKVSPFNNGQLVMGSFVKNEFSAPSYLMGYNKSLSVVATTTFLTGIIQLIMGVLGLGFIATYLPESAMSAYLAAVALHIMLSQLTFIFGIMISFHAGPISFFYDIINYCVALPKANSTSILVFLTVVVALRINKCIRISFNQYPIEFPMELFLIIGFTVIANKISMATETSQTLIDMIPYSFLLPVTPDFSLLPKIILQAFSLSLVSSFLLIFLGKKIASLHNYSVNSNQDLIAIGLCNVVSSFFRSCVFTGAIARTIIQDKSGGRQQFASLVGAGVMLLLMVKMGHFFYTLPNAVLAGIILSNVIPYLETISNLPSLWRQDQYDCALWMMTFSSSIFLGLDIGLIISVVSAFFITTVRSHRAKILLLGQIPNTNIYRSINDYREIITIPGVKIFQCCSSITFVNVYYLKHKLLKEVDMVKVPLKEEEIFSLFNSSDTNLQGGKICRCFCNCDDLEPLPRILYTERFENKLDPEASSINLIHCSHFESMNTSQTASEDQVPYTVSSVSQKNQGQQYEEVEEVWLPNNSSRNSSPGLPDVAESQGRRSLIPYSDASLLPSVHTIILDFSMVHYVDSRGLVVLRQICNAFQNANILILIAGCHSSIVRAFERNDFFDAGITKTQLFLSVHDAVLFALSRKVIGSSELSIDESETVIRETYSETDKNDNSRYKMSSSFLGSQKNVSPGFIKIQQPVEEESELDLELESEQEAGLGLDLDLDRELEPEMEPKAETETKTQTEMEPQPETEPEMEPNPKSRPRAHTFPQQRYWPMYHPSMASTQSQTQTRTWSVERRRHPMDSYSPEGNSNEDV

SEQ ID NO: 889949 - protein, 970 aa, Homo sapiens
MAQLERSAISGFSSKSRRNSFAYDVKREVYNEETFQQEHKRKASSSGNMNINITTFRHHVQCRCSWHRFLRCVLTIFPFLEWMCMYRLKDWLLGDLLAGISVGLVQVPQGLTLSLLARQLIPPLNIAYAAFCSSVIYVIFGSCHQMSIGSFFLVSALLINVLKVSPFNNGQLVMGSFVKNEFSAPSYLMGYNKSLSVVATTTFLTGIIQLIMGVLGLGFIATYLPESAMSAYLAAVALHIMLSQLTFIFGIMISFHAGPISFFYDIINYCVALPKANSTSILVFLTVVVALRINKCIRISFNQYPIEFPMELFLIIGFTVIANKISMATETSQTLIDMIPYSFLLPVTPDFSLLPKIILQAFSLSLVSSFLLIFLGKKIASLHNYSVNSNQDLIAIGLCNVVSSFFRSCVFTGAIARTIIQDKSGGRQQFASLVGAGVMLLLMVKMGHFFYTLPNAVLAGIILSNVIPYLETISNLPSLWRQDQYDCALWMMTFSSSIFLGLDIGLIISVVSAFFITTVRSHRAKILLLGQIPNTNIYRSINDYREIITIPGVKIFQCCSSITFVNVYYLKHKLLKEVDMVKVPLKEEEIFSLFNSSDTNLQGGKICRCFCNCDDLEPLPRILYTERFENKLDPEASSINLIHCSHFESMNTSQTASEDQVPYTVSSVSQKNQGQQYEEVEEVWLPNNSSRNSSPGLPDVAESQGRRSLIPYSDASLLPSVHTIILDFSMVHYVDSRGLVVLRQICNAFQNANILILIAGCHSSIVRAFERNDFFDAGITKTQLFLSVHDAVLFALSRKVIGSSELSIDESETVIRETYSETDKNDNSRYKMSSSFLGSQKNVSPGFIKIQQPVEEESELDLELESEQEAGLGLDLDLDRELEPEMEPKAETETKTQTEMEPQPETEPEMEPNPKSRPRAHTFPQQRYWPMYHPSMASTQSQTQTRTWSVERRRHPMDSYSPEGNSNEDV

SEQ ID NO: 889950 - protein, 321 aa, Homo sapiens
MNTSQTASEDQVPYTVSSVSQKNQGQQYEEVEEVWLPNNSSRNSSPGLPDVAESQGRRSLIPYSDASLLPSVHTIILDFSMVHYVDSRGLVVLRQICNAFQNANILILIAGCHSSIVRAFERNDFFDAGITKTQLFLSVHDAVLFALSRKVIGSSELSIDESETVIRETYSETDKNDNSRYKMSSSFLGSQKNVSPGFIKIQQPVEEESELDLELESEQEAGLGLDLDLDRELEPEMEPKAETETKTQTEMEPQPETEPEMEPNPKSRPRAHTFPQQRYWPMYHPSMASTQSQTQTRTWSVERRRHPMDSYSPEGNSNEDV

SEQ ID NO: 889951 - protein, 150 aa, Homo sapiens
GRYLCAHLGVAEKTQLLKLSVPATFMLVSLDEGPGPPIKYQYAELGKLYSVVSQLIRCCNVSSRMQSSINGNPPLPNPFGDPNLSQPIMPIQQNVADILFVRTSYVKKIIEDCSNSEETVKLLRFCCWENPQFSSTVLSELLWQVAYSYT

SEQ ID NO: 889952 - protein, 2547 aa, Homo sapiens
MTATTRGSPVGGNDNQGQAPDGQSLPPLQQNQTSSPDSSNENSPATPPDEQGQGDAPPQLEDEEPAFPHTDLAKLDDMINRPRWVVPVLPKGELEVLLEAAIDLSKKGLDVKSEACQRFFRDGLTISFTKILTDEAVSGWKFEIHSCLVELCVAKLSQDWFPLLELLAMALNPHCKFHIYNGTRPCESVSSSVQLPEDELFARSPDPRSPKGWLVDLLNKFGTLNGFQILHDRFINGSALNVQIIAALIKPFGQCYEFLTLHTVKKYFLPIIEMVPQFLENLTDEELKKEAKNEAKNDALSMIIKSLKNLASRVPGQEETVKNLEIFRLKMILRLLQISSFNGKMNALNEVNKVISSVSYYTHRHGNPEEEEWLTAERMAEWIQQNNILSIVLRDSLHQPQYVEKLEKILRFVIKEKALTLQDLDNIWAAQAGKHEAIVKNVHDLLAKLAWDFSPEQLDHPFDCFKASRTNASKKQREKLLELIRRLAEDDKDGVMAHRVLNLLWNLAHSDDVPVDIMDLALSAHIKILDYSCSQDRDTQKIQWIDRFIEELRTNDKWVIPALKQIREICSLFGEAPQNLSQTQRSPHVFYRHDLINQLQHNHALVTLVAENLATYMESMRLYARDHEDYDPQTVRLGSRYSHVQEVQERLNFLRFLLKDGQLWLCAPQAKQIWKCLAENAVYLCDREACFKWYSKLMGDEPDLDPDINKDFFESNVLQLDPSLLTENGMKCFERFFKAVNCREGKLVAKRRAYMMDDLELIGLDYLWRVVIQSNDDIASRAIDLLKEIYTNLGPRLQVNQVVIHEDFIQSCFDRLKASYDTLCVLDGDKDSVNCARQEAVRMVRVLTVLREYINECDSDYHEERTILPMSRAFRGKHLSFVVRFPNQGRQVDDLEVWSHTNDTIGSVRRCILNRIKANVAHTKIELFVGGELIDPADDRKLIGQLNLKDKSLITAKLTQISSNMPSSPDSSSDSSTGSPGNHGNHYSDGPNPEVESCLPGVIMSLHPRYISFLWQVADLGSSLNMPPLRDGARVLMKLMPPDSTTIEKLRAICLDHAKLGESSLSPSLDSLFFGPSASQVLYLTEVVYALLMPAGAPLADDSSDFQFHFLKSGGLPLVLSMLTRNNFLPNADMETRRGAYLNALKIAKLLLTAIGYGHVRAVAEACQPGVEGVNPMTQINQVTHDQAVVLQSALQSIPNPSSECMLRNVSVRLAQQISDEASRYMPDICVIRAIQKIIWASGCGSLQLVFSPNEEITKIYEKTNAGNEPDLEDEQVCCEALEVMTLCFALIPTALDALSKEKAWQTFIIDLLLHCHSKTVRQVAQEQFFLMCTRCCMGHRPLLFFITLLFTVLGSTARERAKHSGDYFTLLRHLLNYAYNSNINVPNAEVLLNNEIDWLKRIRDDVKRTGETGIEETILEGHLGVTKELLAFQTSEKKFHIGCEKGGANLIKELIDDFIFPASNVYLQYMRNGELPAEQAIPVCGSPPTINAGFELLVALAVGCVRNLKQIVDSLTEMYYIGTAITTCEALTEWEYLPPVGPRPPKGFVGLKNAGATCYMNSVIQQLYMIPSIRNGILAIEGTGSDVDDDMSGDEKQDNESNVDPRDDVFGYPQQFEDKPALSKTEDRKEYNIGVLRHLQVIFGHLAASRLQYYVPRGFWKQFRLWGEPVNLREQHDALEFFNSLVDSLDEALKALGHPAMLSKVLGGSFADQKICQGCPHRYECEESFTTLNVDIRNHQNLLDSLEQYVKGDLLEGANAYHCEKCNKKVDTVKRLLIKKLPPVLAIQLKRFDYDWERECAIKFNDYFEFPRELDMEPYTVAGVAKLEGDNVNPESQLIQQSEQSESETAGSTKYRLVGVLVHSGQASGGHYYSYIIQRNGGDGERNRWYKFDDGDVTECKMDDDEEMKNQCFGGEYMGEVFDHMMKRMSYRRQKRWWNAYILFYERMDTIDQDDELIRYISELAITTRPHQIIMPSAIERSVRKQNVQFMHNRMQYSMEYFQFMKKLLTCNGVYLNPPPGQDHLLPEAEEITMISIQLAARFLFTTGFHTKKVVRGSASDWYDALCILLRHSKNVRFWFAHNVLFNVSNRFSEYLLECPSAEVRGAFAKLIVFIAHFSLQDGPCPSPFASPGPSSQAYDNLSLSDHLLRAVLNLLRREVSEHGRHLQQYFNLFVMYANLGVAEKTQLLKLSVPATFMLVSLDEGPGPPIKYQYAELGKLYSVVSQLIRCCNVSSRMQSSINGNPPLPNPFGDPNLSQPIMPIQQNVADILFVRTSYVKKIIEDCSNSEETVKLLRFCCWENPQFSSTVLSELLWQVAYSYTYELRPYLDLLLQILLIEDSWQTHRIHNALKGIPDDRDGLFDTIQRSKNHYQKRAYQCIKCMVALFSNCPVAYQILQGNGDLKRKWTWAVEWLGDELERRPYTGNPQYTYNNWSPPVQSNETSNGYFLERSHSARMTLAKACELCPEEEPDDQDAPDEHESPPPEDAPLYPHSPGSQYQQNNHVHGQPYTGPAAHHMNNPQRTGQRAQENYEGSEEVSPPQTKDQ

SEQ ID NO: 889953 - protein, 2547 aa, Homo sapiens; identical to SEQ ID NO: 889952

SEQ ID NO: 889954 - protein, 2547 aa, Homo sapiens; identical to SEQ ID NO: 889952

SEQ ID NO: 889955 - protein, 2563 aa, Homo sapiens
MTATTRGSPVGGNDNQGQAPDGQSLPPLQQNQTSSPDSSNENSPATPPDEQGQGDAPPQLEDEEPAFPHTDLAKLDDMINRPRWVVPVLPKGELEVLLEAAIDLSKKGLDVKSEACQRFFRDGLTISFTKILTDEAVSGWKFEIHSCLVELCVAKLSQDWFPLLELLAMALNPHCKFHIYNGTRPCESVSSSVQLPEDELFARSPDPRSPKGWLVDLLNKFGTLNGFQILHDRFINGSALNVQIIAALIKPFGQCYEFLTLHTVKKYFLPIIEMVPQFLENLTDEELKKEAKNEAKNDALSMIIKSLKNLASRVPGQEETVKNLEIFRLKMILRLLQISSFNGKMNALNEVNKVISSVSYYTHRHGNPEEEEWLTAERMAEWIQQNNILSIVLRDSLHQPQYVEKLEKILRFVIKEKALTLQDLDNIWAAQAGKHEAIVKNVHDLLAKLAWDFSPEQLDHPFDCFKASRTNASKKQREKLLELIRRLAEDDKDGVMAHRVLNLLWNLAHSDDVPVDIMDLALSAHIKILDYSCSQDRDTQKIQWIDRFIEELRTNDKWVIPALKQIREICSLFGEAPQNLSQTQRSPHVFYRHDLINQLQHNHALVTLVAENLATYMESMRLYARDHEDYDPQTVRLGSRYSHVQEVQERLNFLRFLLKDGQLWLCAPQAKQIWKCLAENAVYLCDREACFKWYSKLMGDEPDLDPDINKDFFESNVLQLDPSLLTENGMKCFERFFKAVNCREGKLVAKRRAYMMDDLELIGLDYLWRVVIQSNDDIASRAIDLLKEIYTNLGPRLQVNQVVIHEDFIQSCFDRLKASYDTLCVLDGDKDSVNCARQEAVRMVRVLTVLREYINECDSDYHEERTILPMSRAFRGKHLSFVVRFPNQGRQVDDLEVWSHTNDTIGSVRRCILNRIKANVAHTKIELFVGGELIDPADDRKLIGQLNLKDKSLITAKLTQISSNMPSSPDSSSDSSTGSPGNHGNHYSDGPNPEVESCLPGVIMSLHPRYISFLWQVADLGSSLNMPPLRDGARVLMKLMPPDSTTIEKLRAICLDHAKLGESSLSPSLDSLFFGPSASQVLYLTEVVYALLMPAGAPLADDSSDFQFHFLKSGGLPLVLSMLTRNNFLPNADMETRRGAYLNALKIAKLLLTAIGYGHVRAVAEACQPGVEGVNPMTQINQVTHDQAVVLQSALQSIPNPSSECMLRNVSVRLAQQISDEASRYMPDICVIRAIQKIIWASGCGSLQLVFSPNEEITKIYEKTNAGNEPDLEDEQVCCEALEVMTLCFALIPTALDALSKEKAWQTFIIDLLLHCHSKTVRQVAQEQFFLMCTRCCMGHRPLLFFITLLFTVLGSTARERAKHSGDYFTLLRHLLNYAYNSNINVPNAEVLLNNEIDWLKRIRDDVKRTGETGIEETILEGHLGVTKELLAFQTSEKKFHIGCEKGGANLIKELIDDFIFPASNVYLQYMRNGELPAEQAIPVCGSPPTINAGFELLVALAVGCVRNLKQIVDSLTEMYYIGTAITTCEALTEWEYLPPVGPRPPKGFVGLKNAGATCYMNSVIQQLYMIPSIRNGILAIEGTGSDVDDDMSGDEKQDNESNVDPRDDVFGYPQQFEDKPALSKTEDRKEYNIGVLRHLQVIFGHLAASRLQYYVPRGFWKQFRLWGEPVNLREQHDALEFFNSLVDSLDEALKALGHPAMLSKVLGGSFADQKICQGCPHRYECEESFTTLNVDIRNHQNLLDSLEQYVKGDLLEGANAYHCEKCNKKVDTVKRLLIKKLPPVLAIQLKRFDYDWERECAIKFNDYFEFPRELDMEPYTVAGVAKLEGDNVNPESQLIQQSEQSESETAGSTKYRLVGVLVHSGQASGGHYYSYIIQRNGGDGERNRWYKFDDGDVTECKMDDDEEMKNQCFGGEYMGEVFDHMMKRMSYRRQKRWWNAYILFYERMDTIDQDDELIRYISELAITTRPHQIIMPSAIERSVRKQNVQFMHNRMQYSMEYFQFMKKLLTCNGVYLNPPPGQDHLLPEAEEITMISIQLAARFLFTTGFHTKKVVRGSASDWYDALCILLRHSKNVRFWFAHNVLFNVSNRFSEYLLECPSAEVRGAFAKLIVFIAHFSLQDGPCPSPFASPGPSSQAYDNLSLSDHLLRAVLNLLRREVSEHGRHLQQYFNLFVMYANLGVAEKTQLLKLSVPATFMLVSLDEGPGPPIKYQYAELGKLYSVVSQLIRCCNVSSRMQSSINGNPPLPNPFGDPNLSQPIMPIQQNVADILFVRTSYVKKIIEDCSNSEETVKLLRFCCWENPQFSSTVLSELLWQVAYSYTYELRPYLDLLLQILLIEDSWQTHRIHNALKGIPDDRDGLFDTIQRSKNHYQKRAYQCIKCMVALFSNCPVAYQILQGNGDLKRKWTWAVEWLGDELERRPYTGNPQYTYNNWSPPVQSNETSNGYFLERSHSARMTLAKACELCPEEVKKATSVQQIEMEESKEPDDQDAPDEHESPPPEDAPLYPHSPGSQYQQNNHVHGQPYTGPAAHHMNNPQRTGQRAQENYEGSEEVSPPQTKDQ

SEQ ID NO: 889956 - protein, 2477 aa, Homo sapiens
MINRPRWVVPVLPKGELEVLLEAAIDLSKKGLDVKSEACQRFFRDGLTISFTKILTDEAVSGWKFEIHRCIINNTHRLVELCVAKLSQDWFPLLELLAMALNPHCKFHIYNGTRPCESVSSSVQLPEDELFARSPDPRSPKGWLVDLLNKFGTLNGFQILHDRFINGSALNVQIIAALIKPFGQCYEFLTLHTVKKYFLPIIEMVPQFLENLTDEELKKEAKNEAKNDALSMIIKSLKNLASRVPGQEETVKNLEIFRLKMILRLLQISSFNGKMNALNEVNKVISSVSYYTHRHGNPEEEEWLTAERMAEWIQQNNILSIVLRDSLHQPQYVEKLEKILRFVIKEKALTLQDLDNIWAAQAGKHEAIVKNVHDLLAKLAWDFSPEQLDHPFDCFKASRTNASKKQREKLLELIRRLAEDDKDGVMAHRVLNLLWNLAHSDDVPVDIMDLALSAHIKILDYSCSQDRDTQKIQWIDRFIEELRTNDKWVIPALKQIREICSLFGEAPQNLSQTQRSPHVFYRHDLINQLQHNHALVTLVAENLATYMESMRLYARDHEDYDPQTVRLGSRYSHVQEVQERLNFLRFLLKDGQLWLCAPQAKQIWKCLAENAVYLCDREACFKWYSKLMGDEPDLDPDINKDFFESNVLQLDPSLLTENGMKCFERFFKAVNCREGKLVAKRRAYMMDDLELIGLDYLWRVVIQSNDDIASRAIDLLKEIYTNLGPRLQVNQVVIHEDFIQSCFDRLKASYDTLCVLDGDKDSVNCARQEAVRMVRVLTVLREYINECDSDYHEERTILPMSRAFRGKHLSFVVRFPNQGRQVDDLEVWSHTNDTIGSVRRCILNRIKANVAHTKIELFVGGELIDPADDRKLIGQLNLKDKSLITAKLTQISSNMPSSPDSSSDSSTGSPGNHGNHYSDGPNPEVESCLPGVIMSLHPRYISFLWQVADLGSSLNMPPLRDGARVLMKLMPPDSTTIEKLRAICLDHAKLGESSLSPSLDSLFFGPSASQVLYLTEVVYALLMPAGAPLADDSSDFQFHFLKSGGLPLVLSMLTRNNFLPNADMETRRGAYLNALKIAKLLLTAIGYGHVRAVAEACQPGVEGVNPMTQINQVTHDQAVVLQSALQSIPNPSSECMLRNVSVRLAQQISDEASRYMPDICVIRAIQKIIWASGCGSLQLVFSPNEEITKIYEKTNAGNEPDLEDEQVCCEALEVMTLCFALIPTALDALSKEKAWQTFIIDLLLHCHSKTVRQVAQEQFFLMCTRCCMGHRPLLFFITLLFTVLGSTARERAKHSGDYFTLLRHLLNYAYNSNINVPNAEVLLNNEIDWLKRIRDDVKRTGETGIEETILEGHLGVTKELLAFQTSEKKFHIGCEKGGANLIKELIDDFIFPASNVYLQYMRNGELPAEQAIPVCGSPPTINAGFELLVALAVGCVRNLKQIVDSLTEMYYIGTAITTCEALTEWEYLPPVGPRPPKGFVGLKNAGATCYMNSVIQQLYMIPSIRNGILAIEGTGSDVDDDMSGDEKQDNESNVDPRDDVFGYPQQFEDKPALSKTEDRKEYNIGVLRHLQVIFGHLAASRLQYYVPRGFWKQFRLWGEPVNLREQHDALEFFNSLVDSLDEALKALGHPAMLSKVLGGSFADQKICQGCPHRYECEESFTTLNVDIRNHQNLLDSLEQYVKGDLLEGANAYHCEKCNKKVDTVKRLLIKKLPPVLAIQLKRFDYDWERECAIKFNDYFEFPRELDMEPYTVAGVAKLEGDNVNPESQLIQQSEQSESETAGSTKYRLVGVLVHSGQASGGHYYSYIIQRNGGDGERNRWYKFDDGDVTECKMDDDEEMKNQCFGGEYMGEVFDHMMKRMSYRRQKRWWNAYILFYERMDTIDQDDELIRYISELAITTRPHQIIMPSAIERSVRKQNVQFMHNRMQYSMEYFQFMKKLLTCNGVYLNPPPGQDHLLPEAEEITMISIQLAARFLFTTGFHTKKVVRGSASDWYDALCILLRHSKNVRFWFAHNVLFNVSNRFSEYLLECPSAEVRGAFAKLIVFIAHFSLQDGPCPSPFASPGPSSQAYDNLSLSDHLLRAVLNLLRREVSEHGRHLQQYFNLFVMYANLGVAEKTQLLKLSVPATFMLVSLDEGPGPPIKYQYAELGKLYSVVSQLIRCCNVSSRMQSSINGNPPLPNPFGDPNLSQPIMPIQQNVADILFVRTSYVKKIIEDCSNSEETVKLLRFCCWENPQFSSTVLSELLWQVAYSYTYELRPYLDLLLQILLIEDSWQTHRIHNALKGIPDDRDGLFDTIQRSKNHYQKRAYQCIKCMVALFSNCPVAYQILQGNGDLKRKWTWAVEWLGDELERRPYTGNPQYTYNNWSPPVQSNETSNGYFLERSHSARMTLAKACELCPEEEPDDQDAPDEHESPPPEDAPLYPHSPGSQYQQNNHVHGQPYTGPAAHHMNNPQRTGQRAQENYEGSEEVSPPQTKDQ

SEQ ID NO: 889957 - protein, 2554 aa, Homo sapiens
MTATTRGSPVGGNDNQGQAPDGQSLPPLQQNQTSSPDSSNENSPATPPDEQGQGDAPPQLEDEEPAFPHTDLAKLDDMINRPRWVVPVLPKGELEVLLEAAIDLSKKGLDVKSEACQRFFRDGLTISFTKILTDEAVSGWKFEIHRCIINNTHRLVELCVAKLSQDWFPLLELLAMALNPHCKFHIYNGTRPCESVSSSVQLPEDELFARSPDPRSPKGWLVDLLNKFGTLNGFQILHDRFINGSALNVQIIAALIKPFGQCYEFLTLHTVKKYFLPIIEMVPQFLENLTDEELKKEAKNEAKNDALSMIIKSLKNLASRVPGQEETVKNLEIFRLKMILRLLQISSFNGKMNALNEVNKVISSVSYYTHRHGNPEEEEWLTAERMAEWIQQNNILSIVLRDSLHQPQYVEKLEKILRFVIKEKALTLQDLDNIWAAQAGKHEAIVKNVHDLLAKLAWDFSPEQLDHPFDCFKASRTNASKKQREKLLELIRRLAEDDKDGVMAHRVLNLLWNLAHSDDVPVDIMDLALSAHIKILDYSCSQDRDTQKIQWIDRFIEELRTNDKWVIPALKQIREICSLFGEAPQNLSQTQRSPHVFYRHDLINQLQHNHALVTLVAENLATYMESMRLYARDHEDYDPQTVRLGSRYSHVQEVQERLNFLRFLLKDGQLWLCAPQAKQIWKCLAENAVYLCDREACFKWYSKLMGDEPDLDPDINKDFFESNVLQLDPSLLTENGMKCFERFFKAVNCREGKLVAKRRAYMMDDLELIGLDYLWRVVIQSNDDIASRAIDLLKEIYTNLGPRLQVNQVVIHEDFIQSCFDRLKASYDTLCVLDGDKDSVNCARQEAVRMVRVLTVLREYINECDSDYHEERTILPMSRAFRGKHLSFVVRFPNQGRQVDDLEVWSHTNDTIGSVRRCILNRIKANVAHTKIELFVGGELIDPADDRKLIGQLNLKDKSLITAKLTQISSNMPSSPDSSSDSSTGSPGNHGNHYSDGPNPEVESCLPGVIMSLHPRYISFLWQVADLGSSLNMPPLRDGARVLMKLMPPDSTTIEKLRAICLDHAKLGESSLSPSLDSLFFGPSASQVLYLTEVVYALLMPAGAPLADDSSDFQFHFLKSGGLPLVLSMLTRNNFLPNADMETRRGAYLNALKIAKLLLTAIGYGHVRAVAEACQPGVEGVNPMTQINQVTHDQAVVLQSALQSIPNPSSECMLRNVSVRLAQQISDEASRYMPDICVIRAIQKIIWASGCGSLQLVFSPNEEITKIYEKTNAGNEPDLEDEQVCCEALEVMTLCFALIPTALDALSKEKAWQTFIIDLLLHCHSKTVRQVAQEQFFLMCTRCCMGHRPLLFFITLLFTVLGSTARERAKHSGDYFTLLRHLLNYAYNSNINVPNAEVLLNNEIDWLKRIRDDVKRTGETGIEETILEGHLGVTKELLAFQTSEKKFHIGCEKGGANLIKELIDDFIFPASNVYLQYMRNGELPAEQAIPVCGSPPTINAGFELLVALAVGCVRNLKQIVDSLTEMYYIGTAITTCEALTEWEYLPPVGPRPPKGFVGLKNAGATCYMNSVIQQLYMIPSIRNGILAIEGTGSDVDDDMSGDEKQDNESNVDPRDDVFGYPQQFEDKPALSKTEDRKEYNIGVLRHLQVIFGHLAASRLQYYVPRGFWKQFRLWGEPVNLREQHDALEFFNSLVDSLDEALKALGHPAMLSKVLGGSFADQKICQGCPHRYECEESFTTLNVDIRNHQNLLDSLEQYVKGDLLEGANAYHCEKCNKKVDTVKRLLIKKLPPVLAIQLKRFDYDWERECAIKFNDYFEFPRELDMEPYTVAGVAKLEGDNVNPESQLIQQSEQSESETAGSTKYRLVGVLVHSGQASGGHYYSYIIQRNGGDGERNRWYKFDDGDVTECKMDDDEEMKNQCFGGEYMGEVFDHMMKRMSYRRQKRWWNAYILFYERMDTIDQDDELIRYISELAITTRPHQIIMPSAIERSVRKQNVQFMHNRMQYSMEYFQFMKKLLTCNGVYLNPPPGQDHLLPEAEEITMISIQLAARFLFTTGFHTKKVVRGSASDWYDALCILLRHSKNVRFWFAHNVLFNVSNRFSEYLLECPSAEVRGAFAKLIVFIAHFSLQDGPCPSPFASPGPSSQAYDNLSLSDHLLRAVLNLLRREVSEHGRHLQQYFNLFVMYANLGVAEKTQLLKLSVPATFMLVSLDEGPGPPIKYQYAELGKLYSVVSQLIRCCNVSSRMQSSINGNPPLPNPFGDPNLSQPIMPIQQNVADILFVRTSYVKKIIEDCSNSEETVKLLRFCCWENPQFSSTVLSELLWQVAYSYTYELRPYLDLLLQILLIEDSWQTHRIHNALKGIPDDRDGLFDTIQRSKNHYQKRAYQCIKCMVALFSNCPVAYQILQGNGDLKRKWTWAVEWLGDELERRPYTGNPQYTYNNWSPPVQSNETSNGYFLERSHSARMTLAKACELCPEEEPDDQDAPDEHESPPPEDAPLYPHSPGSQYQQNNHVHGQPYTGPAAHHMNNPQRTGQRAQENYEGSEEVSPPQTKDQ

SEQ ID NO: 889958 - protein, 1409 aa, Homo sapiens
SVPTSPRLADKLLLTAIGYGHVRAVAEACQPGVEGVNPMTQINQVTHDQAVVLQSALQSIPNPSSECMLRNVSVRLAQQISDEASRYMPDICVIRAIQKIIWASGCGSLQLVFSPNEEITKIYEKTNAGNEPDLEDEQVCCEALEVMTLCFALIPTALDALSKEKAWQTFIIDLLLHCHSKTVRQVAQEQFFLMCTRCCMGHRPLLFFITLLFTVLGSTARERAKHSGDYFTLLRHLLNYAYNSNINVPNAEVLLNNEIDWLKRIRDDVKRTGETGIEETILEGHLGVTKELLAFQTSEKKFHIGCEKGGANLIKELIDDFIFPASNVYLQYMRNGELPAEQAIPVCGSPPTINAGFELLVALAVGCVRNLKQIVDSLTEMYYIGTAITTCEALTEWEYLPPVGPRPPKGFVGLKNAGATCYMNSVIQQLYMIPSIRNGILAIEGTGSDVDDDMSGDEKQDNESNVDPRDDVFGYPQQFEDKPALSKTEDRKEYNIGVLRHLQVIFGHLAASRLQYYVPRGFWKQFRLWGEPVNLREQHDALEFFNSLVDSLDEALKALGHPAMLSKVLGGSFADQKICQGCPHRYECEESFTTLNVDIRNHQNLLDSLEQYVKGDLLEGANAYHCEKCNKKVDTVKRLLIKKLPPVLAIQLKRFDYDWERECAIKFNDYFEFPRELDMEPYTVAGVAKLEGDNVNPESQLIQQSEQSESETAGSTKYRLVGVLVHSGQASGGHYYSYIIQRNGGDGERNRWYKFDDGDVTECKMDDDEEMKNQCFGGEYMGEVFDHMMKRMSYRRQKRWWNAYILFYERMDTIDQDDELIRYISELAITTRPHQIIMPSAIERSVRKQNVQFMHNRMQYSMEYFQFMKKLLTCNGVYLNPPPGQDHLLPEAEEITMISIQLAARFLFTTGFHTKKVVRGSASDWYDALCILLRHSKNVRFWFAHNVLFNVSNRFSEYLLECPSAEVRGAFAKLIVFIAHFSLQDGPCPSPFASPGPSSQAYDNLSLSDHLLRAVLNLLRREVSEHGRHLQQYFNLFVMYANLGVAEKTQLLKLSVPATFMLVSLDEGPGPPIKYQYAELGKLYSVVSQLIRCCNVSSRMQSSINGNPPLPNPFGDPNLSQPIMPIQQNVADILFVRTSYVKKIIEDCSNSEETVKLLRFCCWENPQFSSTVLSELLWQVAYSYTYELRPYLDLLLQILLIEDSWQTHRIHNALKGIPDDRDGLFDTIQRSKNHYQKRAYQCIKCMVALFSNCPVAYQILQGNGDLKRKWTWAVEWLGDELERRPYTGNPQYTYNNWSPPVQSNETSNGYFLERSHSARMTLAKACELCPEEEPDDQDAPDEHESPPPEDAPLYPHSPGSQYQQNNHVHGQPYTGPAAHHMNNPQRTGQRAQENYEGSEEVSPPQTKDQ

SEQ ID NO: 889959 - protein, 1096 aa, Homo sapiens
TKLILMVHILVQLIDGFKTLINRLSQKSSKFLVVEESSDYSLVEFYTLLQGASHISDYNWGSAQRLHYHLGTQQITTCEALTEWEYLPPVGPRPPKGFVGLKNAGATCYMNSVIQQLYMIPSIRNGILAIEGTGSDVDDDMSGDEKQDNESNVDPRDDVFGYPQQFEDKPALSKTEDRKEYNIGVLRHLQVIFGHLAASRLQYYVPRGFWKQFRLWGEPVNLREQHDALEFFNSLVDSLDEALKALGHPAMLSKVLGGSFADQKICQGCPHRYECEESFTTLNVDIRNHQNLLDSLEQYVKGDLLEGANAYHCEKCNKKVDTVKRLLIKKLPPVLAIQLKRFDYDWERECAIKFNDYFEFPRELDMEPYTVAGVAKLEGDNVNPESQLIQQSEQSESETAGSTKYRLVGVLVHSGQASGGHYYSYIIQRNGGDGERNRWYKFDDGDVTECKMDDDEEMKNQCFGGEYMGEVFDHMMKRMSYRRQKRWWNAYILFYERMDTIDQDDELIRYISELAITTRPHQIIMPSAIERSVRKQNVQFMHNRMQYSMEYFQFMKKLLTCNGVYLNPPPGQDHLLPEAEEITMISIQLAARFLFTTGFHTKKVVRGSASDWYDALCILLRHSKNVRFWFAHNVLFNVSNRFSEYLLECPSAEVRGAFAKLIVFIAHFSLQDGPCPSPFASPGPSSQAYDNLSLSDHLLRAVLNLLRREVSEHGRHLQQYFNLFVMYANLGVAEKTQLLKLSVPATFMLVSLDEGPGPPIKYQYAELGKLYSVVSQLIRCCNVSSRMQSSINGNPPLPNPFGDPNLSQPIMPIQQNVADILFVRTSYVKKIIEDCSNSEETVKLLRFCCWENPQFSSTVLSELLWQVAYSYTYELRPYLDLLLQILLIEDSWQTHRIHNALKGIPDDRDGLFDTIQRSKNHYQKRAYQCIKCMVALFSNCPVAYQILQGNGDLKRKWTWAVEWLGDELERRPYTGNPQYTYNNWSPPVQSNETSNGYFLERSHSARMTLAKACELCPEEEPDDQDAPDEHESPPPEDAPLYPHSPGSQYQQNNHVHGQPYTGPAAHHMNNPQRTGQRAQENYEGSEEVSPPQTKDQ

SEQ ID NO: 889960 - protein, 422 aa, Homo sapiens
RSRGSRLPGPSSQAYDNLSLSDHLLRAVLNLLRREVSEHGRHLQQYFNLFVMYANLGVAEKTQLLKLSVPATFMLVSLDEGPGPPIKYQYAELGKLYSVVSQLIRCCNVSSRMQSSINGNPPLPNPFGDPNLSQPIMPIQQNVADILFVRTSYVKKIIEDCSNSEETVKLLRFCCWENPQFSSTVLSELLWQVAYSYTYELRPYLDLLLQILLIEDSWQTHRIHNALKGIPDDRDGLFDTIQRSKNHYQKRAYQCIKCMVALFSNCPVAYQILQGNGDLKRKWTWAVEWLGDELERRPYTGNPQYTYNNWSPPVQSNETSNGYFLERSHSARMTLAKACELCPEEEPDDQDAPDEHESPPPEDAPLYPHSPGSQYQQNNHVHGQPYTGPAAHHMNNPQRTGQRAQENYEGSEEVSPPQTKDQ

SEQ ID NO: 889961 - protein, 2477 aa, Homo sapiens; identical to SEQ ID NO: 889956

SEQ ID NO: 889962 - protein, 2477 aa, Homo sapiens; identical to SEQ ID NO: 889956

SEQ ID NO: 889963 - protein, 2477 aa, Homo sapiens; identical to SEQ ID NO: 889956

SEQ ID NO: 889964 - protein, 235 aa, Homo sapiens
SHLPLRTFIVHSPSPLFMITVISFLIIHESLSYVRLCKNRPKGAFGSGLLAAELGGAVLGGGRRAGRRAEPPEPSYSRERRENQILQGNGDLKRKWTWAVEWLGDELERRPYTGNPQYTYNNWSPPVQSNETSNGYFLERSHSARMTLAKACELCPEEEPDDQDAPDEHESPPPEDAPLYPHSPGSQYQQNNHVHGQPYTGPAAHHMNNPQRTGQRAQENYEGSEEVSPPQTKDQ

SEQ ID NO: 889965 - protein, 2396 aa, Homo sapiens
MINRPRWVVPVLPKGELEVLLEAAIDLSKKGLDVKSEACQRFFRDGLTISFTKILTDEAVSGWKFEIHRCIINNTHRLVELCVAKLSQDWFPLLELLAMALNPHCKFHIYNGTRPCESVSSSVQLPEDELFARSPDPRSPKGWLVDLLNKFGTLNGFQILHDRFINGSALNVQIIAALIKPFGQCYEFLTLHTVKKYFLPIIEMVPQFLENLTDEELKKEAKNEAKNDALSMIIKSLKNLASRVPGQEETVKNLEIFRLKMILRLLQISSFNGKMNALNEVNKVISSVSYYTHRHGNPEEEEWLTAERMAEWIQQNNILSIVLRDSLHQPQYVEKLEKILRFVIKEKALTLQDLDNIWAAQAGKHEAIVKNVHDLLAKLAWDFSPEQLDHPFDCFKASRTNASKKQREKLLELIRRLAEDDKDGVMAHRVLNLLWNLAHSDDVPVDIMDLALSAHIKILDYSCSQDRDTQKIQWIDRFIEELRTNDKWVIPALKQIREICSLFGEAPQNLSQTQRSPHVFYRHDLINQLQHNHALVTLVAENLATYMESMRLYARDHEDYDPQTVRLGSRYSHVQEVQERLNFLRFLLKDGQLWLCAPQAKQIWKCLAENAVYLCDREACFKWYSKLMGDEPDLDPDINKDFFESNVLQLDPSLLTENGMKCFERFFKAVNCREGKLVAKRRAYMMDDLELIGLDYLWRVVIQSNDDIASRAIDLLKEIYTNLGPRLQVNQVVIHEDFIQSCFDRLKASYDTLCVLDGDKDSVNCARQEAVRMVRVLTVLREYINECDSDYHEERTILPMSRAFRGKHLSFVVRFPNQGRQVDDLEVWSHTNDTIGSVRRCILNRIKANVAHTKIELFVGGELIDPADDRKLIGQLNLKDKSLITAKLTQISSNMPSSPDSSSDSSTGSPGNHGNHYSDGPNPEVESCLPGVIMSLHPRYISFLWQVADLGSSLNMPPLRDGARVLMKLMPPDSTTIEKLRAICLDHAKLGESSLSPSLDSLFFGPSASQVLYLTEVVYALLMPAGAPLADDSSDFQFHFLKSGGLPLVLSMLTRNNFLPNADMETRRGAYLNALKIAKLLLTAIGYGHVRAVAEACQPGVEGVNPMTQINQVTHDQAVVLQSALQSIPNPSSECMLRNVSVRLAQQISDEASRYMPDICVIRAIQKIIWASGCGSLQLVFSPNEEITKIYEKTNAGNEPDLEDEQVCCEALEVMTLCFALIPTALDALSKEKAWQTFIIDLLLHCHSKTVRQVAQEQFFLMCTRCCMGHRPLLFFITLLFTVLGSTARERAKHSGDYFTLLRHLLNYAYNSNINVPNAEVLLNNEIDWLKRIRDDVKRTGETGIEETILEGHLGVTKELLAFQTSEKKFHIGCEKGGANLIKELIDDFIFPASNVYLQYMRNGELPAEQAIPVCGSPPTINAGFELLVALAVGCVRNLKQIVDSLTEMYYIGTAITTCEALTEWEYLPPVGPRPPKGFVGLKNAGATCYMNSVIQQLYMIPSIRNGILAIEGTGSDVDDDMSGDEKQDNESNVDPRDDVFGYPQQFEDKPALSKTEDRKEYNIGVLRHLQVIFGHLAASRLQYYVPRGFWKQFRLWGEPVNLREQHDALEFFNSLVDSLDEALKALGHPAMLSKVLGGSFADQKICQGCPHRYECEESFTTLNVDIRNHQNLLDSLEQYVKGDLLEGANAYHCEKCNKKVDTVKRLLIKKLPPVLAIQLKRFDYDWERECAIKFNDYFEFPRELDMEPYTVAGVAKLEGDNVNPESQLIQQSEQSESETAGSTKYRLVGVLVHSGQASGGHYYSYIIQRNGGDGERNRWYKFDDGDVTECKMDDDEEMKNQCFGGEYMGEVFDHMMKRMSYRRQKRWWNAYILFYERMDTIDQDDELIRYISELAITTRPHQIIMPSAIERSVRKQNVQFMHNRMQYSMEYFQFMKKLLTCNGVYLNPPPGQDHLLPEAEEITMISIQLAARFLFTTGFHTKKVVRGSASDWYDALCILLRHSKNVRFWFAHNVLFNVSNRFSEYLLECPSAEVRGAFAKLIVFIAHFSLQDGPCPSPFASPGPSSQAYDNLSLSDHLLRAVLNLLRREVSEHGRHLQQYFNLFVMYANLGVAEKTQLLKLSVPATFMLVSLDEGPGPPIKYQYAELGKLYSVVSQLIRCCNVSSRMQSSINGNPPLPNPFGDPNLSQPIMPIQQNVADILFVRTSYVKKIIEDCSNSEETVKLLRFCCWENPQFSSTVLSELLWQVAYSYTYELRPYLDLLLQILLIEDSWQTHRIHNALKGIPDDRDGLFDTIQRSKNHYQKRAYQCIKCMVALFSNCPVAYQILQGNGDLKKKVVKITSEIPQTERMQKRAERFNVPVSLESKKAARAARLGISSVPTKGLSSDNKPMVNLD

SEQ ID NO: 889966 - protein, 1801 aa, Homo sapiens
MINRPRWVVPVLPKGELEVLLEAAIDLSKKGLDVKSEACQRFFRDGLTISFTKILTDEAVSGWKFEIHRCIINNTHRLVELCVAKLSQDWFPLLELLAMALNPHCKFHIYNGTRPCESVSSSVQLPEDELFARSPDPRSPKGWLVDLLNKFGTLNGFQILHDRFINGSALNVQIIAALIKPFGQCYEFLTLHTVKKYFLPIIEMVPQFLENLTDEELKKEAKNEAKNDALSMIIKSLKNLASRVPGQEETVKNLEIFRLKMILRLLQISSFNGKMNALNEVNKVISSVSYYTHRHGNPEEEEWLTAERMAEWIQQNNILSIVLRDSLHQPQYVEKLEKILRFVIKEKALTLQDLDNIWAAQAGKHEAIVKNVHDLLAKLAWDFSPEQLDHPFDCFKASRTNASKKQREKLLELIRRLAEDDKDGVMAHRVLNLLWNLAHSDDVPVDIMDLALSAHIKILDYSCSQDRDTQKIQWIDRFIEELRTNDKWVIPALKQIREICSLFGEAPQNLSQTQRSPHVFYRHDLINQLQHNHALVTLVAENLATYMESMRLYARDHEDYDPQTVRLGSRYSHVQEVQERLNFLRFLLKDGQLWLCAPQAKQIWKCLAENAVYLCDREACFKWYSKLMGDEPDLDPDINKDFFESNVLQLDPSLLTENGMKCFERFFKAVNCREGKLVAKRRAYMMDDLELIGLDYLWRVVIQSNDDIASRAIDLLKEIYTNLGPRLQVNQVVIHEDFIQSCFDRLKASYDTLCVLDGDKDSVNCARQEAVRMVRVLTVLREYINECDSDYHEERTILPMSRAFRGKHLSFVVRFPNQGRQVDDLEVWSHTNDTIGSVRRCILNRIKANVAHTKIELFVGGELIDPADDRKLIGQLNLKDKSLITAKLTQISSNMPSSPDSSSDSSTGSPGNHGNHYSDGPNPEVESCLPGVIMSLHPRYISFLWQVADLGSSLNMPPLRDGARVLMKLMPPDSTTIEKLRAICLDHAKLGESSLSPSLDSLFFGPSASQVLYLTEVVYALLMPAGAPLADDSSDFQFHFLKSGGLPLVLSMLTRNNFLPNADMETRRGAYLNALKIAKLLLTAIGYGHVRAVAEACQPGVEGVNPMTQINQVTHDQAVVLQSALQSIPNPSSECMLRNVSVRLAQQISDEASRYMPDICVIRAIQKIIWASGCGSLQLVFSPNEEITKIYEKTNAGNEPDLEDEQVCCEALEVMTLCFALIPTALDALSKEKAWQTFIIDLLLHCHSKTVRQVAQEQFFLMCTRCCMGHRPLLFFITLLFTVLGSTARERAKHSGDYFTLLRHLLNYAYNSNINVPNAEVLLNNEIDWLKRIRDDVKRTGETGIEETILEGHLGVTKELLAFQTSEKKFHIGCEKGGANLIKELIDDFIFPASNVYLQYMRNGELPAEQAIPVCGSPPTINAGFELLVALAVGCVRNLKQIVDSLTEMYYIGTAITTCEALTEWEYLPPVGPRPPKGFVGLKNAGATCYMNSVIQQLYMIPSIRNGILAIEGTGSDVDDDMSGDEKQDNESNVDPRDDVFGYPQQFEDKPALSKTEDRKEYNIGVLRHLQVIFGHLAASRLQYYVPRGFWKQFRLWGEPVNLREQHDALEFFNSLVDSLDEALKALGHPAMLSKVLGGSFADQKICQGCPHRYECEESFTTLNVDIRNHQNLLDSLEQYVKGDLLEGANAYHCEKCNKKVDTVKRLLIKKLPPVLAIQLKRFDYDWERECAIKFNDYFEFPRELDMEPYTVAGVAKLEGDNVNPESQLIQQSEQSESETAGTQENYEGSEEVSPPQTKDQ

SEQ ID NO: 889967 - protein, 2253 aa, Homo sapiens
MINRPRWVVPVLPKGELEVLLEAAIDLSKKGLDVKSEACQRFFRDGLTISFTKILTDEAVSGWKFEIHRCIINNTHRLVELCVAKLSQDWFPLLELLAMALNPHCKFHIYNGTRPCESVSSSVQLPEDELFARSPDPRSPKGWLVDLLNKFGTLNGFQILHDRFINGSALNVQIIAALIKPFGQCYEFLTLHTVKKYFLPIIEMVPQFLENLTDEELKKEAKNEAKNDALSMIIKSLKNLASRVPGQEETVKNLEIFRLKMILRLLQISSFNGKMNALNEVNKVISSVSYYTHRHGNPEEEEWLTAERMAEWIQQNNILSIVLRDSLHQPQYVEKLEKILRFVIKEKALTLQDLDNIWAAQAGKHEAIVKNVHDLLAKLAWDFSPEQLDHPFDCFKASRTNASKKQREKLLELIRRLAEDDKDGVMAHRVLNLLWNLAHSDDVPVDIMDLALSAHIKILDYSCSQDRDTQKIQWIDRFIEELRTNDKWVIPALKQIREICSLFGEAPQNLSQTQRSPHVFYRHDLINQLQHNHALVTLVAENLATYMESMRLYARDHEDYDPQTVRLGSRYSHVQEVQERLNFLRFLLKDGQLWLCAPQAKQIWKCLAENAVYLCDREACFKWYSKLMGDEPDLDPDINKDFFESNVLQLDPSLLTENGMKCFERFFKAVNCREGKLVAKRRAYMMDDLELIGLDYLWRVVIQSNDDIASRAIDLLKEIYTNLGPRLQVNQVVIHEDFIQSCFDRLKASYDTLCVLDGDKDSVNCARQEAVRMVRVLTVLREYINECDSDYHEERTILPMSRAFRGKHLSFVVRFPNQGRQVDDLEVWSHTNDTIGSVRRCILNRIKANVAHTKIELFVGGELIDPADDRKLIGQLNLKDKSLITAKLTQISSNMPSSPDSSSDSSTGSPGNHGNHYSDGPNPEVESCLPGVIMSLHPRYISFLWQVADLGSSLNMPPLRDGARVLMKLMPPDSTTIEKLRAICLDHAKLGESSLSPSLDSLFFGPSASQVLYLTEVVYALLMPAGAPLADDSSDFQFHFLKSGGLPLVLSMLTRNNFLPNADMETRRGAYLNALKIAKLLLTAIGYGHVRAVAEACQPGVEGVNPMTQINQVTHDQAVVLQSALQSIPNPSSECMLRNVSVRLAQQISDEASRYMPDICVIRAIQKIIWASGCGSLQLVFSPNEEITKIYEKTNAGNEPDLEDEQVCCEALEVMTLCFALIPTALDALSKEKAWQTFIIDLLLHCHSKTVRQVAQEQFFLMCTRCCMGHRPLLFFITLLFTVLGSTARERAKHSGDYFTLLRHLLNYAYNSNINVPNAEVLLNNEIDWLKRIRDDVKRTGETGIEETILEGHLGVTKELLAFQTSEKKFHIGCEKGGANLIKELIDDFIFPASNVYLQYMRNGELPAEQAIPVCGSPPTINAGFELLVALAVGCVRNLKQIVDSLTEMYYIGTAITTCEALTEWEYLPPVGPRPPKGFVGLKNAGATCYMNSVIQQLYMIPSIRNGILAIEGTGSDVDDDMSGDEKQDNESNVDPRDDVFGYPQQFEDKPALSKTEDRKEYNIGVLRHLQVIFGHLAASRLQYYVPRGFWKQFRLWGEPVNLREQHDALEFFNSLVDSLDEALKALGHPAMLSKVLGGSFADQKICQGCPHRYECEESFTTLNVDIRNHQNLLDSLEQYVKGDLLEGANAYHCEKCNKKVDTVKRLLIKKLPPVLAIQLKRFDYDWERECAIKFNDYFEFPRELDMEPYTVAGVAKLEGDNVNPESQLIQQSEQSESETAGSTKYRLVGVLVHSGQASGGHYYSYIIQRNGGDGERNRWYKFDDGDVTECKMDDDEEMKNQCFGGEYMGEVFDHMMKRMSYRRQKRWWNAYILFYERMDTIDQDDELIRYISELAITTRPHQIIMPSAIERSVRKQNVQFMHNRMQYSMEYFQFMKKLLTCNGVYLNPPPGQDHLLPEAEEITMISIQLAARFLFTTGFHTKKVVRGSASDWYDALCILLRHSKNVRFWFAHNVLFNVSNRFSEYLLECPSAEVRGAFAKLIVFIAHFSLQDGPCPSPFASPGPSSQAYDNLSLSDHLLRAVLNLLRREVSEHGRHLQQYFNLFVMYANLGVAEKTQLLKLSVPATFMLVSLDEGPGPPIKYQYAELGKLYSVVSQLIRCCNVSSRMQSSINGNPPLPNPFGDPNLSQPIMPIQQNVADILFVRTSYVKKIIEDCSNSEETVKLLRFCCWENPQFSSTVLSELLWQVAYSYT

SEQ ID NO: 889968 - protein, 1660 aa, Homo sapiens
MINRPRWVVPVLPKGELEVLLEAAIDLSKKGLDVKSEACQRFFRDGLTISFTKILTDEAVSGWKFEIHRCIINNTHRLVELCVAKLSQDWFPLLELLAMALNPHCKFHIYNGTRPCESVSSSVQLPEDELFARSPDPRSPKGWLVDLLNKFGTLNGFQILHDRFINGSALNVQIIAALIKPFGQCYEFLTLHTVKKYFLPIIEMVPQFLENLTDEELKKEAKNEAKNDALSMIIKSLKNLASRVPGQEETVKNLEIFRLKMILRLLQISSFNGKMNALNEVNKVISSVSYYTHRHGNPEEEEWLTAERMAEWIQQNNILSIVLRDSLHQPQYVEKLEKILRFVIKEKALTLQDLDNIWAAQAGKHEAIVKNVHDLLAKLAWDFSPEQLDHPFDCFKASRTNASKKQREKLLELIRRLAEDDKDGVMAHRVLNLLWNLAHSDDVPVDIMDLALSAHIKILDYSCSQDRDTQKIQWIDRFIEELRTNDKWVIPALKQIREICSLFGEAPQNLSQTQRSPHVFYRHDLINQLQHNHALVTLVAENLATYMESMRLYARDHEDYDPQTVRLGSRYSHVQEVQERLNFLRFLLKDGQLWLCAPQAKQIWKCLAENAVYLCDREACFKWYSKLMGDEPDLDPDINKDFFESNVLQLDPSLLTENGMKCFERFFKAVNCREGKLVAKRRAYMMDDLELIGLDYLWRVVIQSNDDIASRAIDLLKEIYTNLGPRLQVNQVVIHEDFIQSCFDRLKASYDTLCVLDGDKDSVNCARQEAVRMVRVLTVLREYINECDSDYHEERTILPMSRAFRGKHLSFVVRFPNQGRQVDDLEVWSHTNDTIGSVRRCILNRIKANVAHTKIELFVGGELIDPADDRKLIGQLNLKDKSLITAKLTQISSNMPSSPDSSSDSSTGSPGNHGNHYSDGPNPEVESCLPGVIMSLHPRYISFLWQVADLGSSLNMPPLRDGARVLMKLMPPDSTTIEKLRAICLDHAKLGESSLSPSLDSLFFGPSASQVLYLTEVVYALLMPAGAPLADDSSDFQFHFLKSGGLPLVLSMLTRNNFLPNADMETRRGAYLNALKIAKLLLTAIGYGHVRAVAEACQPGVEGVNPMTQINQVTHDQAVVLQSALQSIPNPSSECMLRNVSVRLAQQISDEASRYMPDICVIRAIQKIIWASGCGSLQLVFSPNEEITKIYEKTNAGNEPDLEDEQVCCEALEVMTLCFALIPTALDALSKEKAWQTFIIDLLLHCHSKTVRQVAQEQFFLMCTRCCMGHRPLLFFITLLFTVLGSTARERAKHSGDYFTLLRHLLNYAYNSNINVPNAEVLLNNEIDWLKRIRDDVKRTGETGIEETILEGHLGVTKELLAFQTSEKKFHIGCEKGGANLIKELIDDFIFPASNVYLQYMRNGELPAEQAIPVCGSPPTINAGFELLVALAVGCVRNLKQIVDSLTEMYYIGTAITTCEALTEWEYLPPVGPRPPKGFVGLKNAGATCYMNSVIQQLYMIPSIRNGILAIEGTGSDVDDDMSGDEKQDNESNVDPRDDVFGYPQQFEDKPALSKTEDRKEYNIGVLRHLQVIFGHLAASRLQYYVPRGFWKQFRLWGEPVNLREQHDALEFFNSLVDSLDEALKALGHPAMLSKVLGGSFADQKICQGCPHSSASDGTG

SEQ ID NO: 889969 - protein, 1615 aa, Homo sapiens
  misc_feature (1585)..(1585): Xaa can be any naturally occurring amino acid
  misc_feature (1595)..(1595): Xaa can be any naturally occurring amino acid
  misc_feature (1598)..(1598): Xaa can be any naturally occurring amino acid
  misc_feature (1614)..(1614): Xaa can be any naturally occurring amino acid
MINRPRWVVPVLPKGELEVLLEAAIDLSKKGLDVKSEACQRFFRDGLTISFTKILTDEAVSGWKFEIHRCIINNTHRLVELCVAKLSQDWFPLLELLAMALNPHCKFHIYNGTRPCESVSSSVQLPEDELFARSPDPRSPKGWLVDLLNKFGTLNGFQILHDRFINGSALNVQIIAALIKPFGQCYEFLTLHTVKKYFLPIIEMVPQFLENLTDEELKKEAKNEAKNDALSMIIKSLKNLASRVPGQEETVKNLEIFRLKMILRLLQISSFNGKMNALNEVNKVISSVSYYTHRHGNPEEEEWLTAERMAEWIQQNNILSIVLRDSLHQPQYVEKLEKILRFVIKEKALTLQDLDNIWAAQAGKHEAIVKNVHDLLAKLAWDFSPEQLDHPFDCFKASRTNASKKQREKLLELIRRLAEDDKDGVMAHRVLNLLWNLAHSDDVPVDIMDLALSAHIKILDYSCSQDRDTQKIQWIDRFIEELRTNDKWVIPALKQIREICSLFGEAPQNLSQTQRSPHVFYRHDLINQLQHNHALVTLVAENLATYMESMRLYARDHEDYDPQTVRLGSRYSHVQEVQERLNFLRFLLKDGQLWLCAPQAKQIWKCLAENAVYLCDREACFKWYSKLMGDEPDLDPDINKDFFESNVLQLDPSLLTENGMKCFERFFKAVNCREGKLVAKRRAYMMDDLELIGLDYLWRVVIQSNDDIASRAIDLLKEIYTNLGPRLQVNQVVIHEDFIQSCFDRLKASYDTLCVLDGDKDSVNCARQEAVRMVRVLTVLREYINECDSDYHEERTILPMSRAFRGKHLSFVVRFPNQGRQVDDLEVWSHTNDTIGSVRRCILNRIKANVAHTKIELFVGGELIDPADDRKLIGQLNLKDKSLITAKLTQISSNMPSSPDSSSDSSTGSPGNHGNHYSDGPNPEVESCLPGVIMSLHPRYISFLWQVADLGSSLNMPPLRDGARVLMKLMPPDSTTIEKLRAICLDHAKLGESSLSPSLDSLFFGPSASQVLYLTEVVYALLMPAGAPLADDSSDFQFHFLKSGGLPLVLSMLTRNNFLPNADMETRRGAYLNALKIAKLLLTAIGYGHVRAVAEACQPGVEGVNPMTQINQVTHDQAVVLQSALQSIPNPSSECMLRNVSVRLAQQISDEASRYMPDICVIRAIQKIIWASGCGSLQLVFSPNEEITKIYEKTNAGNEPDLEDEQVCCEALEVMTLCFALIPTALDALSKEKAWQTFIIDLLLHCHSKTVRQVAQEQFFLMCTRCCMGHRPLLFFITLLFTVLGSTARERAKHSGDYFTLLRHLLNYAYNSNINVPNAEVLLNNEIDWLKRIRDDVKRTGETGIEETILEGHLGVTKELLAFQTSEKKFHIGCEKGGANLIKELIDDFIFPASNVYLQYMRNGELPAEQAIPVCGSPPTINAGFELLVALAVGCVRNLKQIVDSLTEMYYIGTAITTCEALTEWEYLPPVGPRPPKGFVGLKNAGATCYMNSVIQQLYMIPSIRNGILAIEGTGSDVDDDMSGDEKQDNESNVDPRDDVFGYPQQFEDKPALSKTEDRKEYNIGVLRHLQVIFGHLAASSELAXYLMLPKKGFXGKXSFQGFWGVKPRLNPGXE

SEQ ID NO: 889970 - protein, 1595 aa, Homo sapiens
MINRPRWVVPVLPKGELEVLLEAAIDLSKKGLDVKSEACQRFFRDGLTISFTKILTDEAVSGWKFEIHRCIINNTHRLVELCVAKLSQDWFPLLELLAMALNPHCKFHIYNGTRPCESVSSSVQLPEDELFARSPDPRSPKGWLVDLLNKFGTLNGFQILHDRFINGSALNVQIIAALIKPFGQCYEFLTLHTVKKYFLPIIEMVPQFLENLTDEELKKEAKNEAKNDALSMIIKSLKNLASRVPGQEETVKNLEIFRLKMILRLLQISSFNGKMNALNEVNKVISSVSYYTHRHGNPEEEEWLTAERMAEWIQQNNILSIVLRDSLHQPQYVEKLEKILRFVIKEKALTLQDLDNIWAAQAGKHEAIVKNVHDLLAKLAWDFSPEQLDHPFDCFKASRTNASKKQREKLLELIRRLAEDDKDGVMAHRVLNLLWNLAHSDDVPVDIMDLALSAHIKILDYSCSQDRDTQKIQWIDRFIEELRTNDKWVIPALKQIREICSLFGEAPQNLSQTQRSPHVFYRHDLINQLQHNHALVTLVAENLATYMESMRLYARDHEDYDPQTVRLGSRYSHVQEVQERLNFLRFLLKDGQLWLCAPQAKQIWKCLAENAVYLCDREACFKWYSKLMGDEPDLDPDINKDFFESNVLQLDPSLLTENGMKCFERFFKAVNCREGKLVAKRRAYMMDDLELIGLDYLWRVVIQSNDDIASRAIDLLKEIYTNLGPRLQVNQVVIHEDFIQSCFDRLKASYDTLCVLDGDKDSVNCARQEAVRMVRVLTVLREYINECDSDYHEERTILPMSRAFRGKHLSFVVRFPNQGRQVDDLEVWSHTNDTIGSVRRCILNRIKANVAHTKIELFVGGELIDPADDRKLIGQLNLKDKSLITAKLTQISSNMPSSPDSSSDSSTGSPGNHGNHYSDGPNPEVESCLPGVIMSLHPRYISFLWQVADLGSSLNMPPLRDGARVLMKLMPPDSTTIEKLRAICLDHAKLGESSLSPSLDSLFFGPSASQVLYLTEVVYALLMPAGAPLADDSSDFQFHFLKSGGLPLVLSMLTRNNFLPNADMETRRGAYLNALKIAKLLLTAIGYGHVRAVAEACQPGVEGVNPMTQINQVTHDQAVVLQSALQSIPNPSSECMLRNVSVRLAQQISDEASRYMPDICVIRAIQKIIWASGCGSLQLVFSPNEEITKIYEKTNAGNEPDLEDEQVCCEALEVMTLCFALIPTALDALSKEKAWQTFIIDLLLHCHSKTVRQVAQEQFFLMCTRCCMGHRPLLFFITLLFTVLGSTARERAKHSGDYFTLLRHLLNYAYNSNINVPNAEVLLNNEIDWLKRIRDDVKRTGETGIEETILEGHLGVTKELLAFQTSEKKFHIGCEKGGANLIKELIDDFIFPASNVYLQYMRNGELPAEQAIPVCGSPPTINAGFELLVALAVGCVRNLKQIVDSLTEMYYIGTAITTCEALTEWEYLPPVGPRPPKGFVGLKNAGATCYMNSVIQQLYMIPSIRNGILAIEGTGSDVDDDMSGDEKQDNESNVDPRDDVFGYPQQFEDKPALSKTEDRKEYNIGVLRHLQVIFGHLAASRLQYYVPRGFWKQFR

SEQ ID NO: 889971 - protein, 1122 aa, Homo sapiens
MINRPRWVVPVLPKGELEVLLEAAIDLSKKGLDVKSEACQRFFRDGLTISFTKILTDEAVSGWKFEIHRCIINNTHRLVELCVAKLSQDWFPLLELLAMALNPHCKFHIYNGTRPCESVSSSVQLPEDELFARSPDPRSPKGWLVDLLNKFGTLNGFQILHDRFINGSALNVQIIAALIKPFGQCYEFLTLHTVKKYFLPIIEMVPQFLENLTDEELKKEAKNEAKNDALSMIIKSLKNLASRVPGQEETVKNLEIFRLKMILRLLQISSFNGKMNALNEVNKVISSVSYYTHRHGNPEEEEWLTAERMAEWIQQNNILSIVLRDSLHQPQYVEKLEKILRFVIKEKALTLQDLDNIWAAQAGKHEAIVKNVHDLLAKLAWDFSPEQLDHPFDCFKASRTNASKKQREKLLELIRRLAEDDKDGVMAHRVLNLLWNLAHSDDVPVDIMDLALSAHIKILDYSCSQDRDTQKIQWIDRFIEELRTNDKWVIPALKQIREICSLFGEAPQNLSQTQRSPHVFYRHDLINQLQHNHALVTLVAENLATYMESMRLYARDHEDYDPQTVRLGSRYSHVQEVQERLNFLRFLLKDGQLWLCAPQAKQIWKCLAENAVYLCDREACFKWYSKLMGDEPDLDPDINKDFFESNVLQLDPSLLTENGMKCFERFFKAVNCREGKLVAKRRAYMMDDLELIGLDYLWRVVIQSNDDIASRAIDLLKEIYTNLGPRLQVNQVVIHEDFIQSCFDRLKASYDTLCVLDGDKDSVNCARQEAVRMVRVLTVLREYINECDSDYHEERTILPMSRAFRGKHLSFVVRFPNQGRQVDDLEVWSHTNDTIGSVRRCILNRIKANVAHTKIELFVGGELIDPADDRKLIGQLNLKDKSLITAKLTQISSNMPSSPDSSSDSSTGSPGNHGNHYSDGPNPEVESCLPGVIMSLHPRYISFLWQVADLGSSLNMPPLRDGARVLMKLMPPDSTTIEKLRAICLDHAKLGESSLSPSLDSLFFGPSASQVLYLTEVVYALLMPAGAPLADDSSDFQFHFLKSGGLPLVLSMLTRNNFLPNADMETRRGAYLNALKIAKLLLTAIGYGHVRAVAEACQPGVEGVNPMTQVIQTFQKSFYNSR

SEQ ID NO: 889972 - protein, 1249 aa, Homo sapiens
MINRPRWVVPVLPKGELEVLLEAAIDLSKKGLDVKSEACQRFFRDGLTISFTKILTDEAVSGWKFEIHRCIINNTHRLVELCVAKLSQDWFPLLELLAMALNPHCKFHIYNGTRPCESVSSSVQLPEDELFARSPDPRSPKGWLVDLLNKFGTLNGFQILHDRFINGSALNVQIIAALIKPFGQCYEFLTLHTVKKYFLPIIEMVPQFLENLTDEELKKEAKNEAKNDALSMIIKSLKNLASRVPGQEETVKNLEIFRLKMILRLLQISSFNGKMNALNEVNKVISSVSYYTHRHGNPEEEEWLTAERMAEWIQQNNILSIVLRDSLHQPQYVEKLEKILRFVIKEKALTLQDLDNIWAAQAGKHEAIVKNVHDLLAKLAWDFSPEQLDHPFDCFKASRTNASKKQREKLLELIRRLAEDDKDGVMAHRVLNLLWNLAHSDDVPVDIMDLALSAHIKILDYSCSQDRDTQKIQWIDRFIEELRTNDKWVIPALKQIREICSLFGEAPQNLSQTQRSPHVFYRHDLINQLQHNHALVTLVAENLATYMESMRLYARDHEDYDPQTVRLGSRYSHVQEVQERLNFLRFLLKDGQLWLCAPQAKQIWKCLAENAVYLCDREACFKWYSKLMGDEPDLDPDINKDFFESNVLQLDPSLLTENGMKCFERFFKAVNCREGKLVAKRRAYMMDDLELIGLDYLWRVVIQSNDDIASRAIDLLKEIYTNLGPRLQVNQVVIHEDFIQSCFDRLKASYDTLCVLDGDKDSVNCARQEAVRMVRVLTVLREYINECDSDYHEERTILPMSRAFRGKHLSFVVRFPNQGRQVDDLEVWSHTNDTIGSVRRCILNRIKANVAHTKIELFVGGELIDPADDRKLIGQLNLKDKSLITAKLTQISSNMPSSPDSSSDSSTGSPGNHGNHYSDGPNPEVESCLPGVIMSLHPRYISFLWQVADLGSSLNMPPLRDGARVLMKLMPPDSTTIEKLRAICLDHAKLGESSLSPSLDSLFFGPSASQVLYLTEVVYALLMPAGAPLADDSSDFQFHFLKSGGLPLVLSMLTRNNFLPNADMETRRGAYLNALKIAKLLLTAIGYGHVRAVAEACQPGVEGVNPMTQINQVTHDQAVVLQSALQSIPNPSSECMLRNVSVRLAQQISDEASRYMPDICVIRAIQKIIWASGCGSLQLVFSPNEEITKIYEKTNAGNEPDLEDEQVCCEALEVMTLCFALIPTALDALSKEKAWQTFIIDLLLHCHSK

SEQ ID NO: 889973 - protein, 289 aa, Homo sapiens
AGPGGLVAGKEEKKKAGGGVLNRLKARRQAPHHAADDGVGAAVTEQELLAMDTIRPEHVLRLSRVTERVCTHLVRPILACPSLLACSLLTLWQQQHSLDGSKAAMVSAELLQQAAQGCSDYLCKPEDNIYSIDFTRFKIRDLETGTVLFEIAKPCVSDQEEDEEEGGGDVDISAGRFVRYQFTPAFLRLRTVGATVEFTVGDKPVSNFRMIERHYFREHLLKNFDFDFGFCIPSSRNTCEHIYEFPQLSEDVIRLMIENPYETRSDSFYFVDNKLIMHNKADYAYNGGQ

SEQ ID NO: 889974 - protein, 289 aa, Homo sapiens; identical to SEQ ID NO: 889973

SEQ ID NO: 889975 - protein, 289 aa, Homo sapiens; identical to SEQ ID NO: 889973

SEQ ID NO: 889976 - protein, 289 aa, Homo sapiens; identical to SEQ ID NO: 889973

SEQ ID NO: 889977 - protein, 289 aa, Homo sapiens; identical to SEQ ID NO: 889973

SEQ ID NO: 889978 - protein, 111 aa, Homo sapiens
AGPGGLVAGKEEKKKAGGGVLNRLKARRQAPHHAADDGVGAAVTEQELLAMDTIRPEHVLRLSRVTERVCTHLVRPILACPSLLACSLLTLWQQQHSLDGSKAAMVSAELL

SEQ ID NO: 889979 - protein, 292 aa, Homo sapiens
ADDAGAAGGPGGPGGPGMGNRGGFRGGFGSGIRGRGRGRGRGRGRGRGARGGKAEDKEWMPVTKLGRLVKDMKIKSLEEIYLFSLPIKESEIIDFFLGASLKDEVLKIMPVQKQTRAGQRTRFKAFVAIGDYNGHVGLGVKCSKEVATAIRGAIILAKLSIVPVRRGYWGNKIGKPHTVPCKVTGRCGSVLVRLIPAPRGTGIVSAPVPKKLLMMAGIDDCYTSARGCTATLGNFAKATFDAISKTYSYLTPDLWKETVFTKSPYQEFTDHLVKTHTRVSVQRTQAPAVATT

SEQ ID NO: 889980 - protein, 292 aa, Homo sapiens; identical to SEQ ID NO: 889979

SEQ ID NO: 889981 - protein, 280 aa, Homo sapiens
MVAGAAGAWALVALMEPRSAGGGGRSRGRGRGRGRGARGGKAEDKEWMPVTKLGRLVKDMKIKSLEEIYLFSLPIKESEIIDFFLGASLKDEVLKIMPVQKQTRAGQRTRFKAFVAIGDYNGHVGLGVKCSKEVATAIRGAIILAKLSIVPVRRGYWGNKIGKPHTVPCKVTGRCGSVLVRLIPAPRGTGIVSAPVPKKLLMMAGIDDCYTSARGCTATLGNFAKATFDAISKTYSYLTPDLWKETVFTKSPYQEFTDHLVKTHTRVSVQRTQAPAVATT

SEQ ID NO: 889982 - protein, 292 aa, Homo sapiens; identical to SEQ ID NO: 889979

SEQ ID NO: 889983 - protein, 244 aa, Homo sapiens
MVAGAAGAWALVALMEPRSAGGGGRSRGRGRGRGRGARGGKAEDKEWMPVTKLGRLVKDMKIKSLEEIYLFSLPIKESEIIDFFLGASLKDEVLKIMPVQKQTRAGQRTRFKAFVAIGDYNGHVGLGVKCSKEVATAIRGAIILAKLSIVPVRRGYWGNKIGKPHTVPCKVTGRCGSVLVRLIPAPRGTGIVSAPVPKKLLMMAGIDEYEVPMNSEVPMNSEVPMNSVAPKNSAVPINSVAPMY

SEQ ID NO: 889984 - protein, 122 aa, Homo sapiens
MTTATRQEVLGLYRSIFRLARKWQATSGQMEDTIKEKQYILNEARTLFRKNKNLTDTDLIKQCIDECTARIEIGLHYKIPYPRPIHLPPMGLTPLRGRGLRSQEKLRKLSKPVYLRSHDEVS

SEQ ID NO: 889985 - protein, 122 aa, Homo sapiens; identical to SEQ ID NO: 889984

SEQ ID NO: 889986 - protein, 248 aa, Homo sapiens
PPPRAPTSQRSPRTEDQSLHPLQGSSNPISPGPGLRGAGGGEAGTVGSLPPPPPPLLPPLPPPPLHLRPTGVRPPRSPAPSIASCIITSGNPAGRQLQEGEWERGKEGTSGRLRHDAHKDVRSRRQMTTATRQEVLGLYRSIFRLARKWQATSGQMEDTIKEKQYILNEARTLFRKNKNLTDTDLIKQCIDECTARIEIGLHYKIPYPRPIHLPPMGLTPLRGRGLRSQEKLRKLSKPVYLRSHDEVS

SEQ ID NO: 889987 - protein, 164 aa, Homo sapiens
PPPRAPTSQRSPRTEDQSLHPLQGSSNPISPGPGLRGAGGGEAGTVGSLPPPPPPLLPPLPPPPLHLRPTGVRPPRSPAPSIASCIITSGNPAGRQLQEGEWERGKEGTSGRLRHDAHKDVRSRRQRVPREGEASKGDDTDKTSEIKGRGPLISWNNGTHPRNQ

SEQ ID NO: 889988 - protein, 122 aa, Homo sapiens; identical to SEQ ID NO: 889984

SEQ ID NO: 889989 - protein, 195 aa, Homo sapiens
PPPRAPTSQRSPRTEDQSLHPLQGSSNPISPGPGLRGAGGGEAGTVGSLPPPPPPLLPPLPPPPLHLRPTGVRPPRSPAPSIASCIITSGNPAGRQLQEGEWERGKEGTSGRLRHDAHKDVRSRRQLTDTDLIKQCIDECTARIEIGLHYKIPYPRPIHLPPMGLTPLRGRGLRSQEKLRKLSKPVYLRSHDEVS

SEQ ID NO: 889990 - protein, 164 aa, Homo sapiens; identical to SEQ ID NO: 889987

SEQ ID NO: 889991 - protein, 88 aa, Homo sapiens
ASRKWLARPRGEAWCGDAQLTDTDLIKQCIDECTARIEIGLHYKIPYPRPIHLPPMGLTPLRGRGLRSQEKLRKLSKPVYLRSHDEVS

SEQ ID NO: 889992 - protein, 122 aa, Homo sapiens; identical to SEQ ID NO: 889984

SEQ ID NO: 889993 - protein, 122 aa, Homo sapiens; identical to SEQ ID NO: 889984

SEQ ID NO: 889994 - protein, 122 aa, Homo sapiens; identical to SEQ ID NO: 889984

SEQ ID NO: 889995 - protein, 164 aa, Homo sapiens; identical to SEQ ID NO: 889987

SEQ ID NO: 889996 - protein, 122 aa, Homo sapiens; identical to SEQ ID NO: 889984

SEQ ID NO: 889997 - protein, 122 aa, Homo sapiens; identical to SEQ ID NO: 889984

SEQ ID NO: 889998 - protein, 122 aa, Homo sapiens; identical to SEQ ID NO: 889984

SEQ ID NO: 889999 - protein, 72 aa, Homo sapiens
SVSRDSPRPGTGAPTEVGPVVWSGLAYWTSLCSVGHGSAGLLAPPPPSPPRAARFCGWGKAGLTQTHGHRPN

SEQ ID NO: 890000 - protein, 107 aa, Homo sapiens
MTTATRQEVLGLYRSIFRLARKWQATSGQMEDTIKEKQYILNEARTLFRKNKNARIEIGLHYKIPYPRPIHLPPMGLTPLRGRGLRSQEKLRKLSKPVYLRSHDEVS

SEQ ID NO: 890001 - protein, 248 aa, Homo sapiens; identical to SEQ ID NO: 889986

SEQ ID NO: 890002 - protein, 248 aa, Homo sapiens; identical to SEQ ID NO: 889986

SEQ ID NO: 890003 - protein, 840 aa, Homo sapiens
MNGEYRGRGFGRGRFQSWKRGRGGGNFSGKWREREHRPDLSKTTGKRTSEQTPQFLLSTKTPQSMQSTLDRFIPYKGWKLYFSEVYSDSSPLIEKIQAFEKFFTRHIDLYDKDEIERKGSILVDFKELTEGGEVTNLIPDIATELRDAPEKTLACMGLAIHQVLTKDLERHAAELQAQEGLSNDGETMVNVPHIHARVYNYEPLTQLKNVRANYYGKYIALRGTVVRVSNIKPLCTKMAFLCAACGEIQSFPLPDGKYSLPTKCPVPVCRGRSFTALRSSPLTVTMDWQSIKIQELMSDDQREAGRIPRTIECELVHDLVDSCVPGDTVTITGIVKVSNAEEGSRNKNDKCMFLLYIEANSISNSKGQKTKSSEDGCKHGMLMEFSLKDLYAIQEIQAEENLFKLIVNSLCPVIFGHELVKAGLALALFGGSQKYADDKNRIPIRGDPHILVVGDPGLGKSQMLQAACNVAPRGVYVCGNTTTTSGLTVTLSKDSSSGDFALEAGALVLGDQGICGIDEFDKMGNQHQALLEAMEQQSISLAKAGVVCSLPARTSIIAAANPVGGHYNKAKTVSENLKMGSALLSRFDLVFILLDTPNEHHDHLLSEHVIAIRAGKQRTISSATVARMNSQDSNTSVLEVVSEKPLSERLKVVPGETIDPIPHQLLRKYIGYARQYVYPRLSTEAARVLQDFYLELRKQSQRLNSSPITTRQLESLIRLTEARARLELREEATKEDAEDIVEIMKYSMLGTYSDEFGNLDFERSQHGSGMSNRSTAKRFISALNNVAERTYNNIFQFHQLRQIAKELNIQVADFENFIGSLNDQGYLLKKGPKVYQLQTM

SEQ ID NO: 890004 - protein, 824 aa, Homo sapiens
MNGEYRGRGFGRGRFQSWKRGRGGGNFSGKWREREHRPDLSKTTGKRTSEQTPQFLLSTKTPQSMQSTLDRFIPYKGWKLYFSEVYSDSSPLIEKIQAFEKFFTRHIDLYDKDEIERKGSILVDFKELTEGGEVTNLIPDIATELRDAPEKTLACMGLAIHQVLTKDLERHAAELQAQEGLSNDGETMVNVPHIHARVYNYEPLTQLKNVRANYYGKYIALRGTVVRVSNIKPLCTKMAFLCAACGEIQSFPLPDGKYSLPTKCPVPVCRGRSFTALRSSPLTVTMDWQSIKIQELMSDDQREAGRIPRTIECELVHDLVDSCVPGDTVTITGIVKVSNAEEANSISNSKGQKTKSSEDGCKHGMLMEFSLKDLYAIQEIQAEENLFKLIVNSLCPVIFGHELVKAGLALALFGGSQKYADDKNRIPIRGDPHILVVGDPGLGKSQMLQAACNVAPRGVYVCGNTTTTSGLTVTLSKDSSSGDFALEAGALVLGDQGICGIDEFDKMGNQHQALLEAMEQQSISLAKAGVVCSLPARTSIIAAANPVGGHYNKAKTVSENLKMGSALLSRFDLVFILLDTPNEHHDHLLSEHVIAIRAGKQRTISSATVARMNSQDSNTSVLEVVSEKPLSERLKVVPGETIDPIPHQLLRKYIGYARQYVYPRLSTEAARVLQDFYLELRKQSQRLNSSPITTRQLESLIRLTEARARLELREEATKEDAEDIVEIMKYSMLGTYSDEFGNLDFERSQHGSGMSNRSTAKRFISALNNVAERTYNNIFQFHQLRQIAKELNIQVADFENFIGSLNDQGYLLKKGPKVYQLQTM

SEQ ID NO: 890005 - protein, 840 aa, Homo sapiens; identical to SEQ ID NO: 890003

SEQ ID NO: 890006 - protein, 840 aa, Homo sapiens; identical to SEQ ID NO: 890003

SEQ ID NO: 890007 - protein, 840 aa, Homo sapiens; identical to SEQ ID NO: 890003

SEQ ID NO: 890008 - protein, 383 aa, Homo sapiens [sequence omitted]

SEQ ID NO: 890009 - protein, 272 aa, Homo sapiens
YHSDVGADCLGCCAPPRCLGDLWARARATMTDYGEEQRNELEALESIYPDSFTVLSENPPSFTITVTSEAGENDETVQTTLKFTYSEKYPDEAPLYEIFSQENLEDNDVSDILKLLALQAEENLGMVMIFTLVTAVQEKLNEIVDQIKTRREEEKKQKEKEAEEAEKQLFHGTPVTIENFLNWKAKFDAELLEIKKKRMKEEEQAGKNKLSGKQLFETDHNLDTSDIQFLEDAGNNVEVDESLFQEMDDLELEDDEDDPDYNPADPESDSAD

SEQ ID NO: 890010 - protein, 243 aa, Homo sapiens
MTDYGEEQRNELEALESIYPDSFTVLSENPPSFTITVTSEAGENDETVQTTLKFTYSEKYPDEAPLYEIFSQENLEDNDVSDILKLLALQAEENLGMVMIFTLVTAVQEKLNEIVDQIKTRREEEKKQKEKEAEEAEKQLFHGTPVTIENFLNWKAKFDAELLEIKKKRMKEEEQAGKNKLSGKQLFETDHNLDTSDIQFLEDAGNNVEVDESLFQEMDDLELEDDEDDPDYNPADPESDSAD

SEQ ID NO: 890011 - protein, 147 aa, Homo sapiens
MVMIFTLVTAVQEKLNEIVDQIKTRREEEKKQKEKEAEEAEKQLFHGTPVTIENFLNWKAKFDAELLEIKKKRMKEEEQAGKNKLSGKQLFETDHNLDTSDIQFLEDAGNNVEVDESLFQEMDDLELEDDEDDPDYNPADPESDSAD

SEQ ID NO: 890012 - protein, 147 aa, Homo sapiens; identical to SEQ ID NO: 890011

SEQ ID NO: 890013 - protein, 240 aa, Homo sapiens
MRVLRTDHNLADLISVLGGCGNNVEVDESLYQEMDDLELENDETVQTTLKFTYSEKYPDEAPLYEIFSQENLEDNDVSDILKLLALQAEENLGMVMIFTLVTAVQEKLNEIVDQIKTRREEEKKQKEKEAEEAEKQLFHGTPVTIENFLNWKAKFDAELLEIKKKRMKEEEQAGKNKLSGKQLFETDHNLDTSDIQFLEDAGNNVEVDESLFQEMDDLELEDDEDDPDYNPADPESDSAD

SEQ ID NO: 890014 - protein, 272 aa, Homo sapiens
GGRRGAAVKQAGSGFGPWAFQPGTLRLRPPGRRPLSRRGSCLGCCAPPRCLGDLWARARATMTDYGEEQRNELEALESIYPDSFTVLSENPPSFTITVTSEAGENDETVQTTLKFTYSEKYPDEAPLYEIFSQENLEDNDVSDILKLLALQAEENLGMVMIFTLVTAVQEKLNEIVDQIKTRREEEKKQKEKEAEEAEKQLFHGTPVTIENFLNWKAKFDAELLEIKKKRMKEEEQAGKNKLSGKQLFETDHNLDTSDIQFLEDGKIIVEFH

SEQ ID NO: 890015 - protein, 304 aa, Homo sapiens
GGRRGAAVKQAGSGFGPWAFQPGTLRLRPPGRRPLSRRGSCLGCCAPPRCLGDLWARARATMTDYGEEQRNELEALESIYPDSFTVLSENPPSFTITVTSEAGENDETVQTTLKFTYSEKYPDEAPLYEIFSQENLEDNDVSDILKLLALQAEENLGMVMIFTLVTAVQEKLNEIVDQIKTRREEEKKQKEKEAEEAEKQLFHGTPVTIENFLNWKAKFDAELLEIKKKRMKEEEQAGKNKLSGKQLFETDHNLDTSDIQFLEDAGNNVEVDESLFQEMDDLELEDDEDDPDYNPADPESDSAD

SEQ ID NO: 890016 - protein, 147 aa, Homo sapiens; identical to SEQ ID NO: 890011

SEQ ID NO: 890017 - protein, 238 aa, Homo sapiens
  misc_feature (15)..(15): Xaa can be any naturally occurring amino acid
TPTQHNAAGRRNEPXEGLQVLSENPPSFTITVTSEAGENDETVQTTLKFTYSEKYPDEAPLYEIFSQENLEDNDVSDILKLLALQAEENLGMVMIFTLVTAVQEKLNEIVDQIKTRREEEKKQKEKEAEEAEKQLFHGTPVTIENFLNWKAKFDAELLEIKKKRMKEEEQAGKNKLSGKQLFETDHNLDTSDIQFLEDAGNNVEVDESLFQEMDDLELEDDEDDPDYNPADPESDSAD

SEQ ID NO: 890018 - protein, 304 aa, Homo sapiens; identical to SEQ ID NO: 890015

SEQ ID NO: 890019 - protein, 121 aa, Homo sapiens
YHSDVGADCLGCCAPPRCLGDLWARARATMTDYGEEQRNELEALESIYPDSFTVLSENPPSFTITVTSEAGENDETVQTTLKFTYSEKYPDEAPLYEIFSQENLEDNDVSDNVYTLSDDKE

SEQ ID NO: 890020 - protein, 1366 aa, Homo sapiens
RENSTKVVFLITDGYSNGGDPRPIAASLRDSGVEIFTFGIWQGNIRELNDMASTPKEEHCYLLHSFEEFEALARRALHEDLPSGSFIQDDMVHCSYLCDEGKDCCDRMGSCKCGTHTGHFECICEKGYYGKGLQYECTACPSGTYKPEGSPGGISSCIPCPDENHTSPPGSTSPEDCVCREGYRASGQTCELVHCPALKPPENGYFIQNTCNNHFNAACGVRCHPGFDLVGSSIILCLPNGLWSGSESYCRVRTCPHLRQPKHGHISCSTREMLYKTTCLVACDEGYRLEGSDKLTCQGNSQWDGPEPRCVERHCSTFQMPKDVIISPHNCGKQPAKFGTICYVSCRQGFILSGVKEMLRCTTSGKWNVGVQAAVCKDVEAPQINCPKDIEAKTLEQQDSANVTWQIPTAKDNSGEKVSVHVHPAFTPPYLFPIGDVAIVYTATDLSGNQASCIFHIKVIDAEPPVIDWCRSPPPVQVSEKVHAASWDEPQFSDNSGAELVITRSHTQGDLFPQGETIVQYTATDPSGNNRTCDIHIVIKGSPCEIPFTPVNGDFICTPDNTGVNCTLTCLEGYDFTEGSTDKYYCAYEDGVWKPTYTTEWPDCAKKRFANHGFKSFEMFYKAARCDDTDLMKKFSEAFETTLGKMVPSFCSDAEDIDCRLEENLTKKYCLEYNYDYENGFAIGPGGWGAANRLDYSYDDFLDTVQETATSIGNAKSSRIKRSAPLSDYKIKLIFNITASVPLPDERNDTLEWENQQRLLQTLETITNKLKRTLNKDPMYSFQLASEILIADSNSLETKKASPFCRPGSVLRGRMCVNCPLGTYYNLEHFTCESCRIGSYQDEEGQLECKLCPSGMYTEYIHSRNISDCKAQCKQGTYSYSGLETCESCPLGTYQPKFGSRSCLSCPENTSTVKRGAVNISACGVPCPEGKFSRSGLMPCHPCPRDYYQPNAGKAFCLACPFYGTTPFAGSRSITECSSFSSTFSAAEESVVPPASLGHIKKRHEISSQVFHECFFNPCHNSGTCQQLGRGYVCLCPLGYTGLKCETDIDECSPLPCLNNGVCKDLVGEFICECPSGYTGQRCEENINECSSSPCLNKGICVDGVAGYRCTCVKGFVGLHCETEVNECQSNPCLNNAVCEDQVGGFLCKCPPGFLGTRCGKNVDECLSQPCKNGATCKDGANSFRCLCAAGFTGSHCELNINECQSNPCRNQATCVDELNSYSCKCQPGFSGKRCETEQSTGFNLDFEVSGIYGYVMLDGMLPSLHALTCTFWMKSSDDMNYGTPISYAVDNGSDNTLLLTDYNGWVLYVNGREKITNCPSVNDGRWHHIAITWTSANGIWKVYIDGKLSDGGAGLSVGLPIPGMF

SEQ ID NO: 890021 - protein, 685 aa, Homo sapiens
RENSTKVVFLITDGYSNGGDPRPIAASLRDSGVEIFTFGIWQGNIRELNDMASTPKEEHCYLLHSFEEFEALARRALHEDLPSGSFIQDDMVHCSYLCDEGKDCCDRMGSCKCGTHTGHFECICEKGYYGKGLQYECTACPSGTYKPEGSPGGISSCIPCPDENHTSPPGSTSPEDCVCREGYRASGQTCELVHCPALKPPENGYFIQNTCNNHFNAACGVRCHPGFDLVGSSIILCLPNGLWSGSESYCRVRTCPHLRQPKHGHISCSTREMLYKTTCLVACDEGYRLEGSDKLTCQGNSQWDGPEPRCVERHCSTFQMPKDVIISPHNCGKQPAKFGTICYVSCRQGFILSGVKEMLRCTTSGKWNVGVQAAVCKDVEAPQINCPKDIEAKTLEQQDSANVTWQIPTAKDNSGEKVSVHVHPAFTPPYLFPIGDVAIVYTATDLSGNQASCIFHIKVIDAEPPVIDWCRSPPPVQVSEKVHAASWDEPQFSDNSGAELVITRSHTQGDLFPQGETIVQYTATDPSGNNRTCDIHIVIKGSPCEIPFTPVNGDFICTPDNTGVNCTLTCLEGYDFTEGSTDKYYCAYEDGVWKPTYTTEWPDCAKKRFANHGFKSFEMFYKAARCDDTDLMKKFSEAFETTLGKMVPSFCSDAEDIDCRLEENLTKKYCLEYNYDYENGFAIGN

SEQ ID NO: 890022 - protein, 1603 aa, Homo sapiens
RENSTKVVFLITDGYSNGGDPRPIAASLRDSGVEIFTFGIWQGNIRELNDMASTPKEEHCYLLHSFEEFEALARRALHEDLPSGSFIQDDMVHCSYLCDEGKDCCDRMGSCKCGTHTGHFECICEKGYYGKGLQYECTACPSGTYKPEGSPGGISSCIPCPDENHTSPPGSTSPEDCVCREGYRASGQTCELVHCPALKPPENGYFIQNTCNNHFNAACGVRCHPGFDLVGSSIILCLPNGLWSGSESYCRVRTCPHLRQPKHGHISCSTREMLYKTTCLVACDEGYRLEGSDKLTCQGNSQWDGPEPRCVERHCSTFQMPKDVIISPHNCGKQPAKFGTICYVSCRQGFILSGVKEMLRCTTSGKWNVGVQAAVCKDVEAPQINCPKDIEAKTLEQQDSANVTWQIPTAKDNSGEKVSVHVHPAFTPPYLFPIGDVAIVYTATDLSGNQASCIFHIKVIDAEPPVIDWCRSPPPVQVSEKVHAASWDEPQFSDNSGAELVITRSHTQGDLFPQGETIVQYTATDPSGNNRTCDIHIVIKGSPCEIPFTPVNGDFICTPDNTGVNCTLTCLEGYDFTEGSTDKYYCAYEDGVWKPTYTTEWPDCAKKRFANHGFKSFEMFYKAARCDDTDLMKKFSEAFETTLGKMVPSFCSDAEDIDCRLEENLTKKYCLEYNYDYENGFAIGPGGWGAANRLDYSYDDFLDTVQETATSIGNAKSSRIKRSAPLSDYKIKLIFNITASVPLPDERNDTLEWENQQRLLQTLETITNKLKRTLNKDPMYSFQLASEILIADSNSLETKKASPFCRPGSVLRGRMCVNCPLGTYYNLEHFTCESCRIGSYQDEEGQLECKLCPSGMYTEYIHSRNISDCKAQCKQGTYSYSGLETCESCPLGTYQPKFGSRSCLSCPENTSTVKRGAVNISACGVPCPEGKFSRSGLMPCHPCPRDYYQPNAGKAFCLACPFYGTTPFAGSRSITECSSFSSTFSAAEESVVPPASLGHIKKRHEISSQVFHECFFNPCHNSGTCQQLGRGYVCLCPLGYTGLKCETDIDECSPLPCLNNGVCKDLVGEFICECPSGYTGQRCEENINECSSSPCLNKGICVDGVAGYRCTCVKGFVGLHCETEVNECQSNPCLNNAVCEDQVGGFLCKCPPGFLGTRCGKNVDECLSQPCKNGATCKDGANSFRCLCAAGFTGSHCELNINECQSNPCRNQATCVDELNSYSCKCQPGFSGKRCETEQSTGFNLDFEVSGIYGYVMLDGMLPSLHALTCTFWMKSSDDMNYGTPISYAVDNGSDNTLLLTDYNGWVLYVNGREKITNCPSVNDGRWHHIAITWTSANGIWKVYIDGKLSDGGAGLSVGLPIPGGGALVLGQEQDKKGEGFSPAESFVGSISQLNLWDYVLSPQQVKSLATSCPEELSKGNVLAWPDFLSGIVGKVKIDSKSIFCSDCPRLGGSVPHLRTASEDLKPGSKVNLFCDPGFQLVGNPVQYCLNQGQWTQPLPHCERISCGVPPPLENGFHSADDFYAGSTVTYQCNNGYYLLGDSRMFCTDNGSWNGVSPSCLDVDECAVGSDCSEHASCLNVDGSYICSCVPPYTGDGKNCAGN

SEQ ID NO: 890023 - protein, 924 aa, Homo sapiens
RENSTKVVFLITDGYSNGGDPRPIAASLRDSGVEIFTFGIWQGNIRELNDMASTPKEEHCYLLHSFEEFEALARRALHEDLPSGSFIQDDMVHCSYLCDEGKDCCDRMGSCKCGTHTGHFECICEKGYYGKGLQYECTACPSGTYKPEGSPGGISSCIPCPDENHTSPPGSTSPEDCVCREGYRASGQTCELVHCPALKPPENGYFIQNTCNNHFNAACGVRCHPGFDLVGSSIILCLPNGLWSGSESYCRVRTCPHLRQPKHGHISCSTREMLYKTTCLVACDEGYRLEGSDKLTCQGNSQWDGPEPRCVERHCSTFQMPKDVIISPHNCGKQPAKFGTICYVSCRQGFILSGVKEMLRCTTSGKWNVGVQAAVCKDVEAPQINCPKDIEAKTLEQQDSANVTWQIPTAKDNSGEKVSVHVHPAFTPPYLFPIGDVAIVYTATDLSGNQASCIFHIKVIDAEPPVIDWCRSPPPVQVSEKVHAASWDEPQFSDNSGAELVITRSHTQGDLFPQGETIVQYTATDPSGNNRTCDIHIVIKGSPCEIPFTPVNGDFICTPDNTGVNCTLTCLEGYDFTEGSTDKYYCAYEDGVWKPTYTTEWPDCAKKRFANHGFKSFEMFYKAARCDDTDLMKKFSEAFETTLGKMVPSFCSDAEDIDCRLEENLTKKYCLEYNYDYENGFAIGPGGWGAANRLDYSYDDFLDTVQETATSIGNAKSSRIKRSAPLSDYKIKLIFNITASVPLPDERNDTLEWENQQRLLQTLETITNKLKRTLNKDPMYSFQLASEILIADSNSLETKKASPFCRPGSVLRGRMCVNCPLGTYYNLEHFTCESCRIGSYQDEEGQLECKLCPSGMYTEYIHSRNISDCKGRGLLDISTRSSPIFVSLLGERKIYFLHPTLGSCLRPLWQKIDLQEKSIHIYSI

SEQ ID NO: 890024 - protein, 822 aa, Homo sapiens
RENSTKVVFLITDGYSNGGDPRPIAASLRDSGVEIFTFGIWQGNIRELNDMASTPKEEHCYLLHSFEEFEALARRALHEDLPSGSFIQDDMVHCSYLCDEGKDCCDRMGSCKCGTHTGHFECICEKGYYGKGLQYECTACPSGTYKPEGSPGGISSCIPCPDENHTSPPGSTSPEDCVCREGYRASGQTCELVHCPALKPPENGYFIQNTCNNHFNAACGVRCHPGFDLVGSSIILCLPNGLWSGSESYCRVRTCPHLRQPKHGHISCSTREMLYKTTCLVACDEGYRLEGSDKLTCQGNSQWDGPEPRCVERHCSTFQMPKDVIISPHNCGKQPAKFGTICYVSCRQGFILSGVKEMLRCTTSGKWNVGVQAAVCKDVEAPQINCPKDIEAKTLEQQDSANVTWQIPTAKDNSGEKVSVHVHPAFTPPYLFPIGDVAIVYTATDLSGNQASCIFHIKVIDAEPPVIDWCRSPPPVQVSEKVHAASWDEPQFSDNSGAELVITRSHTQGDLFPQGETIVQYTATDPSGNNRTCDIHIVIKGSPCEIPFTPVNGDFICTPDNTGVNCTLTCLEGYDFTEGSTDKYYCAYEDGVWKPTYTTEWPDCAKKRFANHGFKSFEMFYKAARCDDTDLMKKFSEAFETTLGKMVPSFCSDAEDIDCRLEENLTKKYCLEYNYDYENGFAIGPGGWGAANRLDYSYDDFLDTVQETATSIGNAKSSRIKRSAPLSDYKIKLIFNITASVPLPDERNDTLEWENQQRLLQTLETITNKLKRTLNKDPMYSFQLASEILIADSNSLETKKASPFCRPGSVLRGRMCGKDCSL

SEQ ID NO: 890025 - protein, 121 aa, Homo sapiens
MIETADISVTAGDAQEEEAEVFQGVEVVVDHVVANPPSVLCSIDPDSKIHSSVTYDKNEIRGILLDLRSLLGHWYCTIQLIQDARSKNQNIKSNRSKKNNGHIHVQVFIKFYSSTNNELDF

SEQ ID NO: 890026 - protein, 162 aa, Homo sapiens
VKTPGDWSLAGEDDRDAADISVTAGDAQEEEAEVFQGVEVVVDHVGGKSSISYGTNSELSNPSETESERKDELSDWSLAGEDDRDSRHQRDSRRRPGGRGRSVSGGRGRGGPRGGKSSISSGTNSELSNPSETESERKDELSDGHWQEKMIETADISVTAGD

SEQ ID NO: 890027 - protein, 642 aa, Homo sapiens
LKDPYFFNPPPPPPPGLCGSNMAELTVEVRGSNGAFYKGFIKDVHEDSLTVVFENNWQPERQVPFNEVRLPPPPDIKKEISEGDEVEVYSRANDQEPCGWWLAKVRMMKGEFYVIEYAACDATYNEIVTFERLRPVNQNKTVKKNTFFKCTVDVPEDLREACANENAHKDFKKAVGACRIFYHPETTQLMILSASEATVKRVNILSDMHLRSIRTKLMLMSRNEEATKHLECTKQLAAAFHEEFVVREDLMGLAIGTHGSNIQQARKVPGVTAIELDEDTGTFRIYGESADAVKKARGFLEFVEDFIQVPRNLVGKVIGKNGKVIQEIVDKSGVVRVRIEGDNENKLPREDGMVPFVFVGTKESIGNVQVLLEYHIAYLKEVEQLRMERLQIDEQLRQIGSRSYSGRGRGRRGPNYTSGYGTNSELSNPSETESERKDELSDWSLAGEDDRDSRHQRDSRRRPGGRGRSVSGGRGRGGPRGGKSSISSVLKDPDSNPYSLLDNTESDQTADTDASESHHSTNRRRRSRRRRTDEDAVLMDGMTESDTASVNENGLVTVADYISRAESQSRQRNLPRETLAKNKKEMAKDVIEEHGPSEKAINGPTSASGDDISKLQRTPGEEKINTLKEENTQEAAVLNGVS

SEQ ID NO: 890028 - protein, 621 aa, Homo sapiens
MAELTVEVRGSNGAFYKGFIKDVHEDSLTVVFENNWQPERQVPFNEVRLPPPPDIKKEISEGDEVEVYSRANDQEPCGWWLAKVRMMKGEFYVIEYAACDATYNEIVTFERLRPVNQNKTVKKNTFFKCTVDVPEDLREACANENAHKDFKKAVGACRIFYHPETTQLMILSASEATVKRVNILSDMHLRSIRTKLMLMSRNEEATKHLECTKQLAAAFHEEFVVREDLMGLAIGTHGSNIQQARKVPGVTAIELDEDTGTFRIYGESADAVKKARGFLEFVEDFIQVPRNLVGKVIGKNGKVIQEIVDKSGVVRVRIEGDNENKLPREDGMVPFVFVGTKESIGNVQVLLEYHIAYLKEVEQLRMERLQIDEQLRQIGSRSYSGRGRGRRGPNYTSGYGTNSELSNPSETESERKDELSDWSLAGEDDRDSRHQRDSRRRPGGRGRSVSGGRGRGGPRGGKSSISSVLKDPDSNPYSLLDNTESDQTADTDASESHHSTNRRRRSRRRRTDEDAVLMDGMTESDTASVNENGLVTVADYISRAESQSRQRNLPRETLAKNKKEMAKDVIEEHGPSEKAINGPTSASGDDISKLQRTPGEEKINTLKEENTQEAAVLNGVS

SEQ ID NO: 890029 - protein, 539 aa, Homo sapiens
MAELTVEVRGSNGAFYKGFIKDVHEDSLTVVFENNWQPERQVPFNEVRLPPPPDIKKEISEGDEVEVYSRANDQEPCGWWLAKVRMMKGEFYVIEYAACDATYNEIVTFERLRPVNQNKTVKKNTFFKCTVDVPEDLREACANENAHKDFKKAVGACRIFYHPETTQLMILSASEATVKRVNILSDMHLRSIRTKLMLMSRNEEATKHLECTKQLAAAFHEEFVVREDLMGLAIGTHGSNIQQARKVPGVTAIELDEDTGTFRIYGESADAVKKARGFLEFVEDFIQVPRNLVGKVIGKNGKVIQEIVDKSGVVRVRIEGDNENKLPREDGMVPFVFVGTKESIGNVQVLLEYHIAYLKEVEQLRMERLQIDEQLRQIGSRSYSGRGRGRRGPNYTSGYGTNSELSNPSETESERKDELSDWSLAGEDDRDSRHQRDSRRRPGGRGRSVSGGRGRGGPRGGKSSISSVLKDPDSNPYSLLDNTESDQTADTDASESHHSTNRRRRSRRRRTDEDAVLMDGMTESDTASVNENGLGKRCD

SEQ ID NO: 890030 - protein, 648 aa, Homo sapiens
MAELTVEVRGSNGAFYKGFIKDVHEDSLTVVFENNWQPERQVPFNEVRLPPPPDIKKEISEGDEVEVYSRANDQEPCGWWLAKVRMMKGEFYVIEYAACDATYNEIVTFERLRPVNQNKTVKKNTFFKCTVDVPEDLREACANENAHKDFKKAVGACRIFYHPETTQLMILSASEATVKRVNILSDMHLRSIRTKLMLMSRNEEATKHLECTKQLAAAFHEEFVVREDLMGLAIGTHGSNIQQARKVPGVTAIELDEDTGTFRIYGESADAVKKARGFLEFVEDFIQVPRNLVGKVIGKNGKVIQEIVDKSGVVRVRIEGDNENKLPREDGMVPFVFVGTKESIGNVQVLLEYHIAYLKEVEQLRMERLQIDEQLRQIGSRSYSGRGRGRRGPNYTSGYGTNSELSNPSETESERKDELSDWSLAGEDDRDSRHQRDSRRRPGGRGRSVSGGRGRGGPRGGKSSISSVLKDPDSNPYSLLDNTESDQTADTDASESHHSTNRRRRSRRRRTDEDAVLMDGMTESDTASVNENGLDDSEKKPQRRNRSRRRRFRGQAEDRQPVTVADYISRAESQSRQRNLPRETLAKNKKEMAKDVIEEHGPSEKAINGPTSASGDDISKLQRTPGEEKINTLKEENTQEAAVLNGVS

SEQ ID NO: 890031 - protein, 648 aa, Homo sapiens; identical to SEQ ID NO: 890030

SEQ ID NO: 890032 - protein, 614 aa, Homo sapiens
RTDGSRNFYKGFIKDVHEDSLTVVFENNWQPERQVPFNEVRLPPPPDIKKEISEGDEVEVYSRANDQEPCGWWLAKVRMMKGEFYVIEYAACDATYNEIVTFERLRPVNQNKTVKKNTFFKCTVDVPEDLREACANENAHKDFKKAVGACRIFYHPETTQLMILSASEATVKRVNILSDMHLRSIRTKLMLMSRNEEATKHLECTKQLAAAFHEEFVVREDLMGLAIGTHGSNIQQARKVPGVTAIELDEDTGTFRIYGESADAVKKARGFLEFVEDFIQVPRNLVGKVIGKNGKVIQEIVDKSGVVRVRIEGDNENKLPREDGMVPFVFVGTKESIGNVQVLLEYHIAYLKEVEQLRMERLQIDEQLRQIGSRSYSGRGRGRRGPNYTSGYGTNSELSNPSETESERKDELSDWSLAGEDDRDSRHQRDSRRRPGGRGRSVSGGRGRGGPRGGKSSISSVLKDPDSNPYSLLDNTESDQTADTDASESHHSTNRRRRSRRRRTDEDAVLMDGMTESDTASVNENGLVTVADYISRAESQSRQRNLPRETLAKNKKEMAKDVIEEHGPSEKAINGPTSASGDDISKLQRTPGEEKINTLKEENTQEAAVLNGVS

SEQ ID NO: 890033 - protein, 575 aa, Homo sapiens
MAELTVEVRGSNGAFYKGFIKDVHEDSLTVVFENNWQPERQVPFNEVRLPPPPDIKKEISEGDEVEVYSRANDQEPCGWWLAKVRMMKGEFYVIEYAACDATYNEIVTFERLRPVNQNKTVKKNTFFKCTVDVPEDLREACANENAHKDFKKAVGACRIFYHPETTQLMILSASEATVKRVNILSDMHLRSIRTKLMLMSRNEEATKHLECTKQLAAAFHEEFVVREDLMGLAIGTHGSNIQQARKVPGVTAIELDEDTGTFRIYGESADAVKKARGFLEFVEDFIQVPRNLVGKVIGKNGKVIQEIVDKSGVVRVRIEGDNENKLPREDGMVPFVFVGTKESIGNVQVLLEYHIAYLKEVEQLRMERLQIDEQLRQIGSRSYSGRGRGRRGPNYTSGYGTNSELSNPSETESERKDELSDWSLAGEDDRDSRHQRDSRRRPGGRGRSVSGGRGRGGPRGGKSSISSVLKDPDSNPYSLLDNTESDQTADTDASESHHSTNRRRRSRRRRTDEDAVLMDGMTESDTASVNENGLDDSEKKPQRRNRSRRRRFRGQAEDRQPGNLSGPVDTIRSQA

SEQ ID NO: 890034 - protein, 575 aa, Homo sapiens; identical to SEQ ID NO: 890033

SEQ ID NO: 890035 - protein, 258 aa, Homo sapiens
LEDPASRDDEQLRQIGSRSYSGRGRGRRGPNYTSGYGTNSELSNPSETESERKDELSDWSLAGEDDRDSRHQRDSRRRPGGRGRSVSGGRGRGGPRGGKSSISSVLKDPDSNPYSLLDNTESDQTADTDASESHHSTNRRRRSRRRRTDEDAVLMDGMTESDTASVNENGLVTVADYISRAESQSRQRNLPRETLAKNKKEMAKDVIEEHGPSEKAINGPTSASGDDISKLQRTPGEEKINTLKEENTQEAAVLNGVS

SEQ ID NO: 890036 - protein, 275 aa, Homo sapiens
VKTPGDWSLAGEDDRDAADISVTAGDAQEEEAEVFQGVEVVVDHVGGKSSISYGTNSELSNPSETESERKDELSDWSLAGEDDRDSRHQRDSRRRPGGRGRSVSGGRGRGGPRGGKSSISSVLKDPDSNPYSLLDNTESDQTADTDASESHHSTNRRRRSRRRRTDEDAVLMDGMTESDTASVNENGLVTVADYISRAESQSRQRNLPRETLAKNKKEMAKDVIEEHGPSEKAINGPTSASGDDISKLQRTPGEEKINTLKEENTQEAAVLNGVS

SEQ ID NO: 890037 - protein, 218 aa, Homo sapiens
CSRGSLIGSQERKDELSDWSLAGEDDRDSRHQRDSRRRPGGRGRSVSGGRGRGGPRGGKSSISSVLKDPDSNPYSLLDNTESDQTADTDASESHHSTNRRRRSRRRRTDEDAVLMDGMTESDTASVNENGLVTVADYISRAESQSRQRNLPRETLAKNKKEMAKDVIEEHGPSEKAINGPTSASGDDISKLQRTPGEEKINTLKEENTQEAAVLNGVS

SEQ ID NO: 890038 - protein, 103 aa, Homo sapiens
  misc_feature (1)..(1): Xaa can be any naturally occurring amino acid
XTLEYPPLTLQLMKMGFTVADYISRAESQSRQRNLPRETLAKNKKEMAKDVIEEHGPSEKAINGPTSASGDDISKLQRTPGEEKINTLKEENTQEAAVLNGVS

SEQ ID NO: 890039 - protein, 135 aa, Homo sapiens
  misc_feature (120)..(120): Xaa can be any naturally occurring amino acid
  misc_feature (129)..(129): Xaa can be any naturally occurring amino acid
  misc_feature (131)..(131): Xaa can be any naturally occurring amino acid
LKDPYFFNPPPPPPPGLCGSNMAELTVEVRGSNGAFYKGFIKDVHEDSLTVVFENNWQPERQVPFNEVRLPPPPDIKKKQTTKKKKSGWGAPRDPAKKPLRKHIRGWGARGPQVRSKFGXRSDAKHVWXQXLKRQ

SEQ ID NO: 890040 - protein, 621 aa, Homo sapiens; identical to SEQ ID NO: 890028

SEQ ID NO: 890041 - protein, 621 aa, Homo sapiens; identical to SEQ ID NO: 890028

SEQ ID NO: 890042 - protein, 650 aa, Homo sapiens
MAELTVEVRGSNGAFYKGFIKDVHEDSLTVVFENNWQPERQVPFNEVRLPPPPDIKKEISEGDEVEVYSRANDQEPCGWWLAKVRMMKGEFYVIEYAACDATYNEIVTFERLRPVNQNKTVKKNTFFKCTVDVPEDLREACANENAHKDFKKAVGACRIFYHPETTQLMILSASEATVKRVNILSDMHLRSIRTKLMLMSRNEEATKHLECTKQLAAAFHEEFVVREDLMGLAIGTHGSNIQQARKVPGVTAIELDEDTGTFRIYGESADAVKKARGFLEFVEDFIQVPRNLVGKVIGKNGKVIQEIVDKSGVVRVRIEGDNENKLPREDGMVPFVFVGTKESIGNVQVLLEYHIAYLKEVEQLRMERLQIDEQLRQIGMGFRPSSTRGPEKEKGYATDESTVSSVQGSRSYSGRGRGRRGPNYTSGYGTNSELSNPSETESERKDELSDWSLAGEDDRDSRHQRDSRRRPGGRGRSVSGGRGRGGPRGGKSSISSVLKDPDSNPYSLLDNTESDQTADTDASESHHSTNRRRRSRRRRTDEDAVLMDGMTESDTASVNENGLVTVADYISRAESQSRQRNLPRETLAKNKKEMAKDVIEEHGPSEKAINGPTSASGDDISKLQRTPGEEKINTLKEENTQEAAVLNGVS

SEQ ID NO: 890043 - protein, 539 aa, Homo sapiens; identical to SEQ ID NO: 890029

SEQ ID NO: 890044 - protein, 626 aa, Homo sapiens
MYEAGCSNRPRGGRGSNGAFYKGFIKDVHEDSLTVVFENNWQPERQVPFNEVRLPPPPDIKKEISEGDEVEVYSRANDQEPCGWWLAKVRMMKGEFYVIEYAACDATYNEIVTFERLRPVNQNKTVKKNTFFKCTVDVPEDLREACANENAHKDFKKAVGACRIFYHPETTQLMILSASEATVKRVNILSDMHLRSIRTKLMLMSRNEEATKHLECTKQLAAAFHEEFVVREDLMGLAIGTHGSNIQQARKVPGVTAIELDEDTGTFRIYGESADAVKKARGFLEFVEDFIQVPRNLVGKVIGKNGKVIQEIVDKSGVVRVRIEGDNENKLPREDGMVPFVFVGTKESIGNVQVLLEYHIAYLKEVEQLRMERLQIDEQLRQIGSRSYSGRGRGRRGPNYTSGYGTNSELSNPSETESERKDELSDWSLAGEDDRDSRHQRDSRRRPGGRGRSVSGGRGRGGPRGGKSSISSVLKDPDSNPYSLLDNTESDQTADTDASESHHSTNRRRRSRRRRTDEDAVLMDGMTESDTASVNENGLVTVADYISRAESQSRQRNLPRETLAKNKKEMAKDVIEEHGPSEKAINGPTSASGDDISKLQRTPGEEKINTLKEENTQEAAVLNGVS

SEQ ID NO: 890045 - protein, 535 aa, Homo sapiens
MKGEFYVIEYAACDATYNEIVTFERLRPVNQNKTVKKNTFFKCTVDVPEDLREACANENAHKDFKKAVGACRIFYHPETTQLMILSASEATVKRVNILSDMHLRSIRTKLMLMSRNEEATKHLECTKQLAAAFHEEFVVREDLMGLAIGTHGSNIQQARKVPGVTAIELDEDTGTFRIYGESADAVKKARGFLEFVEDFIQVPRNLVGKVIGKNGKVIQEIVDKSGVVRVRIEGDNENKLPREDGMVPFVFVGTKESIGNVQVLLEYHIAYLKEVEQLRMERLQIDEQLRQIGSRSYSGRGRGRRGPNYTSGYGTNSELSNPSETESERKDELSDWSLAGEDDRDSRHQRDSRRRPGGRGRSVSGGRGRGGPRGGKSSISSVLKDPDSNPYSLLDNTESDQTADTDASESHHSTNRRRRSRRRRTDEDAVLMDGMTESDTASVNENGLVTVADYISRAESQSRQRNLPRETLAKNKKEMAKDVIEEHGPSEKAINGPTSASGDDISKLQRTPGEEKINTLKEENTQEAAVLNGVS

SEQ ID NO: 890046 - protein, 298 aa, Homo sapiens
ISSVPTTGMVPFVFVGTKESIGNVQVLLEYHIAYLKEVEQLRMERLQIDEQLRQIGSRSYSGRGRGRRGPNYTSGYGTNSELSNPSETESERKDELSDWSLAGEDDRDSRHQRDSRRRPGGRGRSVSGGRGRGGPRGGKSSISSVLKDPDSNPYSLLDNTESDQTADTDASESHHSTNRRRRSRRRRTDEDAVLMDGMTESDTASVNENGLVTVADYISRAESQSRQRNLPRETLAKNKKEMAKDVIEEHGPSEKAINGPTSASGDDISKLQRTPGEEKINTLKEENTQEAAVLNGVS

SEQ ID NO: 890047 - protein, 545 aa, Homo sapiens
MAELTVEVRGSNGAFYKGFIKDVHEDSLTVVFENNWQPERQVPFNEVRLPPPPDIKKEISEGDEVEVYSRANDQEPCGWWLAKVRMMKGEFYVIEYAACDATYNEIVTFERLRPVNQNKTVKKNTFFKCTVDVPEDLREACANENAHKDFKKAVGACRIFYHPETTQLMILSASEATVKRVNILSDMHLRSIRTKLMLMSRNEEATKHLECTKQLAAAFHEEFVVREDLMGLAIGTHGSNIQQARKVPGVTAIELDEDTGTFRIYGESADAVKKARGFLEFVEDFIQVPRNLVGKVIGKNGKVIQEIVDKSGVVRVRIEGDNENKLPREDGMVPFVFVGTKESIGNVQVLLEYHIAYLKEVEQLRMERLQIDEQLRQIGSRSYSGRGRGRRGPNYTSGYGTNSELSNPSETESERKDELSDWSLAGEDDRDSRHQRDSRRRPGGRGRSVSGGRGRGGPRGGKSSISSGSLFYTLSASIICKQFNFTKVNSSPRATHFWKFLLLLIVLEKVVDHIAVSGKALVECFSVKVYLEYTGQNFSWQLFFI

SEQ ID NO: 890048 - protein, 182 aa, Homo sapiens
MQDVQNCLDRVYEEFCAVENPVGSSISSVLKDPDSNPYSLLDNTESDQTADTDASESHHSTNRRRRSRRRRTDEDAVLMDGMTESDTASVNENGLVTVADYISRAESQSRQRNLPRETLAKNKKEMAKDVIEEHGPSEKAINGPTSASGDDISKLQRTPGEEKINTLKEENTQEAAVLNGVS

SEQ ID NO: 890049 - protein, 121 aa, Homo sapiens
MVNFAITDDSEKKPQRRNRSRRRRFRGQAEDRQPVTVADYISRAESQSRQRNLPRETLAKNKKEMAKDVIEEHGPSEKAINGPTSASGDDISKLQRTPGEEKINTLKEENTQEAAVLNGVS

SEQ ID NO: 890050 - protein, 181 aa, Homo sapiens
EESKVSRGPVVWPVGANPHQVLKDPDSNPYSLLDNTESDQTADTDASESHHSTNRRRRSRRRRTDEDAVLMDGMTESDTASVNENGLVTVADYISRAESQSRQRNLPRETLAKNKKEMAKDVIEEHGPSEKAINGPTSASGDDISKLQRTPGEEKINTLKEENTQEAAITFTIVLVQACQR

SEQ ID NO: 890051 - protein, 140 aa, Homo sapiens
MPLPEPSEQEGESVKASQEPSPKPGTEVIPAAPRKPRKFSKLVLLTASKDSTKVAGAKRKGVHCVMSLGVPGPATLAKALLQTHPEAQRAIEAAPQEPEQKRSRQDPGTDRTEDSGLAAGPPEAAGENFAPCSVAPGKSL

SEQ ID NO: 890052 - protein, 140 aa, Homo sapiens; identical to SEQ ID NO: 890051

SEQ ID NO: 890053 - protein, 124 aa, Homo sapiens
MPLPEPSEQEGESVKASQEPSPKPGTEVIPAAPRKPRKFSKLVLLTASKDSTKVAGAKRKGVHCVMSLGVPGPATLAKALLQTHPEAQRAIEAAPVTLTTGASSQATNPAIGSSLSAGLLGPNG

SEQ ID NO: 890054 - protein, 140 aa, Homo sapiens; identical to SEQ ID NO: 890051

SEQ ID NO: 890055 - protein, 456 aa, Homo sapiens
MFEEPEWAEAAPVAAGLGPVISRPPPAASSQNKGSKRRQLLATLRALEAASLSQHPPSLCISDSEEEEEERKKKCPKKASFASASAEVGKKGKKKCQKQGPPCSDSEEEVERKKKCHKQALVGSDSAEDEKRKRKCQKHAPINSAQHLDNVDQTGPKAWKGSTTNDPPKQSPGSTSPKPPHTLSRKQWRNRQKNKRRCKNKFQPPQVPDQAPAEAPTEKTEVSPVPRTDSHEARAGALRARMAQRLDGARFRYLNEQLYSGPSSAAQRLFQEDPEAFLLYHRGFQSQVKKWPLQPVDRIARDLRQRPASLVVADFGCGDCRLASSIRNPVHCFDLASLDPRVTVCDMAQVPLEDESVDVAVFCLSLMGTNIRDFLEEANRVLKPGGLLKVAEVSSRFEDVRTFLRAVTKLGFKIVSKDLTNSHFFLFDFQKTGPPLVGPKAQLSGLQLQPCLYKRR

SEQ ID NO: 890056 - protein, 456 aa, Homo sapiens; identical to SEQ ID NO: 890055

SEQ ID NO: 890057 - protein, 108 aa, Homo sapiens
MGSATEMRIRVRYWSSMTLKREFCGEGEDKSEGQYEVAAPLSHAEPCYSGTLLALLCLNPLPYQVSIRKLDLHLMQNFIQKNPLLLESQPHLQQGTCVSSQRNAGGKH

SEQ ID NO: 890058 - protein, 487 aa, Homo sapiens
MFEEPEWAEAAPVAAGLGPVISRPPPAASSQNKGSKRRQLLATLRALEAASLSQHPPSLCISDSEEEEEERKKKCPKKASFASASAEVGKKGKKKCQKQGPPCSDSEEEVERKKKCHKQALVGSDSAEDEKRKRKCQKHAPINSAQHLDNVDQTGPKAWKGSTTNDPPKQSPGSTSPKPPHTLSRKQWRNRQKNKRRCKNKFQPPQVPDQAPAEAPTEKTEVSPVPRTDSHEARAGALRARMAQRLDGARFRYLNEQLYSGPSSAAQRLFQEDPEAFLLYHRGFQSQVKKWPLQPVDRIARDLRQRRMGVRDCEKPCGGSVIGSDQTNMGPLPSTLRPASLVVADFGCGDCRLASSIRNPVHCFDLASLDPRVTVCDMAQVPLEDESVDVAVFCLSLMGTNIRDFLEEANRVLKPGGLLKVAEVSSRFEDVRTFLRAVTKLGFKIVSKDLTNSHFFLFDFQKTGPPLVGPKAQLSGLQLQPCLYKRR

SEQ ID NO: 890059 - protein, 532 aa, Homo sapiens
MFEEPEWAEAAPVAAGLGPVISRPPPAASSQNKGSKRRQLLATLRALEAASLSQHPPSLCISDSEEEEEERKKKCPKKASFASASAEVGKKGKKKCQKQGPPCSDSEEEVERKKKCHKQALVGSDSAEDEKRKRKCQKHAPINSAQHLDNVDQTGPKAWKGSTTNDPPKQSPGSTSPKPPHTLSRKQWRNRQKNKRRCKNKFQPPQVPDQAPAEAPTEKTEVSPVPRTDSHEARAGALRARMAQRLDGARFRYLNEQLYSGPSSAAQRLFQEDPEAFLLYHRGFQSQVKKWPLQPVDRIARDLRQRRMGVRDCEKPCGGSVIGSDQTNMGPLPSTLRPASLVVADFGCGDCRLASSIRNPVHCFDLASLDPRVTVCDMAQVPLEDESVDVAVFCLSLMGTNIRDFLEEANRVLKPGGLLKVAEVSSRFEDVRTFLRAVTKLGFKIVSKVRAPRHLYLFLSHVALFRVLVFRKEALGTGTDILLPNGSGSPGKLCEQRQYIEGGVLRSWDEDLVLTGSFLPLGRPDQQPFLLV

SEQ ID NO: 890060 - protein, 359 aa, Homo sapiens [sequence omitted]

SEQ ID NO: 890061 - protein, 215 aa, Homo sapiens
MAQRLDGARFRYLNEQLYSGPSSAAQRLFQEDPEAFLLYHRGFQSQVKKWPLQPVDRIARDLRQRPASLVVADFGCGDCRLASSIRNPVHCFDLASLDPRVTVCDMAQVPLEDESVDVAVFCLSLMGTNIRDFLEEANRVLKPGGLLKVAEVSSRFEDVRTFLRAVTKLGFKIVSKDLTNSHFFLFDFQKTGPPLVGPKAQLSGLQLQPCLYKRR

SEQ ID NO: 890062 - protein, 747 aa, Homo sapiens
MFFFFFFLRQSLAAVAQAGMRWRDLRSLKPLPAGSSTSPASDSRVAGNTGTCHHAQLIFVFLVVTGFHHVGQAGLELLTSSDRPASASQSAGITGMSHCAQPVFFFFFFFMGGWAGCYLSSAIEMRENSECSGVRIAENVEGLFEVNGSGKRLLHYESPLPEFLIGPQKFISDCFDFFSGEQEASLSFESENRGEEISSRPTVHRNTQSGQNDLSVYLSSSLGPRAISSDEVERSRGEGRAYQSLLPFPVQAPRLSWGRAGRGKRDLKLQQVQIIVTQDVDILIELRLCLFLKLITGLSIKNITTSLQLFSIAGRVPPSNKIWRVVRDKNKIGFGYPCLMLVQHPFESSPNKYVTASAVIGVLQLLFPEYSPVLREHSSKRNNMILAETPLSSKPNHLCNCTKLSTAFHRDQKLEPFIPWSSSFPGEFSDQPSGFRIPNSCSNCLTGGLIASTRVPKAINFPHSHVIFLKCKSAYVTSLLKILQWILTASRTKDKLFRPRVILPRPPSPSPSASEPTPPLSQNSSHTDLLFIPQAFQTVSTESLCTCSIFLEYSFPSELIFIFLNSYHYYLCFCGRNWPDAHPNVLFLDTGKLHFPAPCIYAYVSSSQQWKMSGSDVSILDQGSERVAEPFPLFSSSFLFKVTLKHMFDGDGVIAEKKSEYLSYYLGHNSYLTKNIHLDFEQENKLDYILLVSFEGVLAVIIIYTGYIFYGILSTLLLTTVPSLFPSGCFRYLIILPDASQHFLFVP

SEQ ID NO: 890063 - protein, 140 aa, Homo sapiens
MFEEPEWAEAAPVAAGLGPVISRPPPAASSQNKVPLEDESVDVAVFCLSLMGTNIRDFLEEANRVLKPGGLLKVAEVSSRFEDVRTFLRAVTKLGFKIVSKDLTNSHFFLFDFQKTGPPLVGPKAQLSGLQLQPCLYKRR

SEQ ID NO: 890064 - protein, 116 aa, Homo sapiens
LCISDSEEEEEERKKKCPKKASFASASAEVGKKGKKKCQKQGPPCSDSEEEVERKKKCHKQALVGSDSAEDEKRKRKCQKHAPINSAQHLDNVDQTGTIGCVYVCVLVCVCRGVSW

SEQ ID NO: 890065 - protein, 1131 aa, Homo sapiens
TGGPGPPAGPSLPLRHRSSSEITLSECDAEDAGEPRGARHTGALPLFREYGSTSSIDVQGMPEQSFFDILNEFRSEQPDARGCQALTELLRADPGPHLMGGGGGAKGDSHNGQPAKDSLLPLQPTKEKEKARKKPARGLGGGDTVDSSIFRKLRSSKPEGEAGRSPGEADEGRSPPEASRPWVCQKSFAHFDVQSMLFDLNEAAANRVSVSQRRNTTTGASAASAASAMASLTASRAHSLGGLDPAFTSTEDLNCKENLEQDLGDDNSNDLLLSCPHFRNEIGGECERNVSFSRASVGSPSSGEGHLAEPALSAYRTNASISVLEVPKEQQRTQSRPRQYSIEHVDLGARYYQDYFVGKEHANYFGVDEKLGPVAVSIKREKLEDHKEHGPQYQYRIIFRTRELITLRGSILEDATPTATKHGTGRGLPLKDALEYVIPELNIHCLRLALNTPKVTEQLLKLDEQGLCRKHKVGILYCKAGQSSEEEMYNNEEAGPAFEEFLSLIGEKVCLKGFTKYAAQLDVKTDSTGTHSLYTMYQDYEIMFHVSTLLPYTPNNRQQLLRKRHIGNDIVTIIFQEPGALPFTPKNIRSHFQHVFIIVRVHNPCTDNVCYSMAVTRSKDAPPFGPPIPSGTTFRKSDVFRDFLLAKVINAENAAHKSDKFHTMATRTRQEYLKDLAENCVSNTPIDSTGKFNLISLTSKKKEKTKARAGAEQHSAGAIAWRVVAQDYAQGVEIDCILGISNEFVVLLDLRTKEVVFNCYCGDVIGWTPDSSTLKIFYGRGDHIFLQATEGSVEDIREIVQRLKVMTSGWETVDMTLRRNGLGQLGFHVKYDGTVAEVEDYGFAWQAGLRQGSRLVEICKVAVVTLTHDQMIDLLRTSVTVKVVIIPPFEDGTPRRGWPETYDMNTSEPKTEQESITPGGRPPYRSNAPWQWSGPASHNSLPASKWATPTTPGHAQSLSRPLKQTPIVPFRESQPLHSKRPVSFPETPYTVSPAGADRVPPYRQPSGSFSTPGSATYVRYKPSPERYTAAPHPLLSLDPHFSHDGTSSGDSSSGGLTSQESTMERQKPEPLWHVPAQARLSAIAGSSGNKHPSRQDAAGKDSPNRHSKGEPQYSSHSSRSSGFNLVVVGGS

SEQ ID NO: 890066 - protein, 811 aa, Homo sapiens
TGGPGPPAGPSLPLRHRSSSEITLSECDAEDAGEPRGARHTGALPLFREYGSTSSIDVQGMPEQSFFDILNEFRSEQPDARGCQALTELLRADPGPHLMGGGGGAKGDSHNGQPAKDSLLPLQPTKEKEKARKKPARGLGGGDTVDSSIFRKLRSSKPEGEAGRSPGEADEGRSPPEASRPWVCQKSFAHFDVQSMLFDLNEAAANRVSVSQRRNTTTGASAASAASAMASLTASRAHSLGGLDPAFTSTEDLNCKENLEQDLGDDNSNDLLLSCPHFRNEIGGECERNVSFSRASVGSPSSGEGHLAEPALSAYRTNASISVLEVPKEQQRTQSRPRQYSIEHVDLGARYYQDYFVGKEHANYFGVDEKLGPVAVSIKREKLEDHKEHGPQYQYRIIFRTRELITLRGSILEDATPTATKHGTGRGLPLKDALEYVIPELNIHCLRLALNTPKVTEQLLKLDEQGLCRKHKVGILYCKAGQSSEEEMYNNEEAGPAFEEFLSLIGEKVCLKGFTKYAAQLDVKTDSTGTHSLYTMYQDYEIMFHVSTLLPYTPNNRQQLLRKRHIGNDIVTIIFQEPGALPFTPKNIRSHFQHVFIIVRVHNPCTDNVCYSMAVTRSKDAPPFGPPIPSGTTFRKSDVFRDFLLAKVINAENAAHKSDKFHTMATRTRQEYLKDLAENCVSNTPIDSTGKFNLISLTSKKKEKTKARAGAEQHSAGAIAWRVVAQDYAQGVEIDCILGISNEFVVLLDLRTKEVVFNCYCGDVIGWTPDSSTLKIFYGRGDHIFLQATEGSVEDIREIVQRLKVRERARR

SEQ ID NO: 890067 - protein, 923 aa, Homo sapiens
TGGPGPPAGPSLPLRHRSSSEITLSECDAEDAGEPRGARHTGALPLFREYGSTSSIDVQGMPEQSFFDILNEFRSEQPDARGCQALTELLRADPGPHLMGGGGGAKGDSHNGQPAKDSLLPLQPTKEKEKARKKPARGLGGGDTVDSSIFRKLRSSKPEGEAGRSPGEADEGRSPPEASRPWVCQKSFAHFDVQSMLFDLNEAAANRVSVSQRRNTTTGASAASAASAMASLTASRAHSLGGLDPAFTSTEDLNCKENLEQDLGDDNSNDLLLSCPHFRNEIGGECERNVSFSRASVGSPSSGEGHLAEPALSAYRTNASISVLEVPKEQQRTQSRPRQYSIEHVDLGARYYQDYFVGKEHANYFGVDEKLGPVAVSIKREKLEDHKEHGPQYQYRIIFRTRELITLRGSILEDATPTATKHGTGRGLPLKDALEYVIPELNIHCLRLALNTPKVTEQLLKLDEQGLCRKHKVGILYCKAGQSSEEEMYNNEEAGPAFEEFLSLIGEKVCLKGFTKYAAQLDVKTDSTGTHSLYTMYQDYEIMFHVSTLLPYTPNNRQQLLRKRHIGNDIVTIIFQEPGALPFTPKNIRSHFQHVFIIVRVHNPCTDNVCYSMAVTRSKDAPPFGPPIPSGTTFRKSDVFRDFLLAKVINAENAAHKSDKFHTMATRTRQEYLKDLAENCVSNTPIDSTGKFNLISLTSKKKEKTKARAGAEQHSAGAIAWRVVAQDYAQGVEIDCILGISNEFVVLLDLRTKEVVFNCYCGDVIGWTPDSSTLKIFYGRGDHIFLQATEGSVEDIREIVQRLKVMTSGWETVDMTLRRNGLGQLGFHVKYDGTVAEVEDYGFAWQAGLRQGSRLVEICKVAVVTLTHDQMIDLLRTSVTVKVVIIPPFEDGTPRRWSLALSPRLKCSGVISTHCNLHLPGSS

SEQ ID NO: 890068 - protein, 1079 aa, Homo sapiens
LSPSVALSQLLRKRHIGNDIVTIIFQEPGALPFTPKNIRSHFQHVFIIVRVHNPCTDNVCYSMAVTRSKDAPPFGPPIPSGTTFRKSDVFRDFLLAKVINAENAAHKSDKFHTMATRTRQEYLKDLAENCVSNTPIDSTGKFNLISLTSKKKEKTKARAGAEQHSAGAIAWRVVAQDYAQGVEIDCILGISNEFVVLLDLRTKEVVFNCYCGDVIGWTPDSSTLKIFYGRGDHIFLQATEGSVEDIREIVQRLKVMTSGWETVDMTLRRNGLGQLGFHVKYDGTVAEVEDYGFAWQAGLRQGSRLVEICKVAVVTLTHDQMIDLLRTSVTVKVVIIPPFEDGTPRRGWPETYDMNTSEPKTEQESITPGGRPPYRSNAPWQWSGPASHNSLPASKWATPTTPGHAQSLSRPLKQTPIVPFRESQPLHSKRPVSFPETPYTVSPAGADRVPPYRQPSGSFSTPGSATYVRYKPSPERYTAAPHPLLSLDPHFSHDGTSSGDSSSGGLTSQESTMERQKPEPLWHVPAQARLSAIAGSSGNKHPSRQDAAGKDSPNRHSKGEPQYSSHSSSNTLSSNASSSHSDDRWFDPLDPLEPEQDPLSKGGSSDSGIDTTLYTSSPSCMSLAKAPRPAKPHKPPGSMGLCGGGREAAGRSHHADRRREVSPAPAVAGQSKGYRPKLYSSGSSTPTGLAGGSRDPPRQPSDMGSRVGYPAQVYKTASAETPRPSQLAQPSPFQLSASVPKSFFSKQPVRNKHPTGWKRTEEPPPRPLPFSDPKKQVDTNTKNVFGQPRLRASLRDLRSPRKNYKSTIEDDLKKLIIMDNLGPEQERDTGQSPQKGLQRTLSDESLCSGRREPSFASPAGLEPGLPSDVLFTSTCAFPSSTLPARRQHQHPHPPVGPGATPAAGSGFPEKKSTISASELSLADGRDRPLRRLDPGLMPLPDTAAGLEWSSLVNAAKAYEVQRAVSLFSLNDPALSPDIPPAHSPVHSHLSLERGPPTPRTTPTMSEEPPLDLTGKVYQLEVMLKQLHTDLQKEKQDKVVLQSEVASLRQNNQRLQEESQAASEQLRKFAEIFCREKKEL

SEQ ID NO: 890069 - protein, 520 aa, Homo sapiens
STSLDECASEQPQFSPMPGMYAGPALSEPPRPLEPEQDPLSKGGSSDSGIDTTLYTSSPSCMSLAKAPRPAKPHKPPGSMGLCGGGREAAGRSHHADRRREVSPAPAVAGQSKGYRPKLYSSGSSTPTGLAGGSRDPPRQPSDMGSRVGYPAQVYKTASAETPRPSQLAQPSPFQLSASVPKSFFSKQPVRNKHPTGWKRTEEPPPRPLPFSDPKKQVDTNTKNVFGQPRLRASLRDLRSPRKNYKSTIEDDLKKLIIMDNLGPEQERDTGQSPQKGLQRTLSDESLCSGRREPSFASPAGLEPGLPSDVLFTSTCAFPSSTLPARRQHQHPHPPVGPGATPAAGSGFPEKKSTISASELSLADGRDRPLRRLDPGLMPLPDTAAGLEWSSLVNAAKAYEVQRAVSLFSLNDPALSPDIPPAHSPVHSHLSLERGPPTPRTTPTMSEEPPLDLTGKVYQLEVMLKQLHTDLQKEKQDKVVLQSEVASLRQNNQRLQEESQAASEQLRKFAEIFCREKKEL

SEQ ID NO: 890070 - protein, 1629 aa, Homo sapiens
TGGPGPPAGPSLPLRHRSSSEITLSECDAEDAGEPRGARHTGALPLFREYGSTSSIDVQGMPEQSFFDILNEFRSEQPDARGCQALTELLRADPGPHLMGGGGGAKGDSHNGQPAKDSLLPLQPTKEKEKARKKPARGLGGGDTVDSSIFRKLRSSKPEGEAGRSPGEADEGRSPPEASRPWVCQKSFAHFDVQSMLFDLNEAAANRVSVSQRRNTTTGASAASAASAMASLTASRAHSLGGLDPAFTSTEDLNCKENLEQDLGDDNSNDLLLSCPHFRNEIGGECERNVSFSRASVGSPSSGEGHLAEPALSAYRTNASISVLEVPKEQQRTQSRPRQYSIEHVDLGARYYQDYFVGKEHANYFGVDEKLGPVAVSIKREKLEDHKEHGPQYQYRIIFRTRELITLRGSILEDATPTATKHGTGRGLPLKDALEYVIPELNIHCLRLALNTPKVTEQLLKLDEQGLCRKHKVGILYCKAGQSSEEEMYNNEEAGPAFEEFLSLIGEKVCLKGFTKYAAQLDVKTDSTGTHSLYTMYQDYEIMFHVSTLLPYTPNNRQQLLRKRHIGNDIVTIIFQEPGALPFTPKNIRSHFQHVFIIVRVHNPCTDNVCYSMAVTRSKDAPPFGPPIPSGTTFRKSDVFRDFLLAKVINAENAAHKSDKFHTMATRTRQEYLKDLAENCVSNTPIDSTGKFNLISLTSKKKEKTKARAGAEQHSAGAIAWRVVAQDYAQGVEIDCILGISNEFVVLLDLRTKEVVFNCYCGDVIGWTPDSSTLKIFYGRGDHIFLQATEGSVEDIREIVQRLKVMTSGWETVDMTLRRNGLGQLGFHVKYDGTVAEVEDYGFAWQAGLRQGSRLVEICKVAVVTLTHDQMIDLLRTSVTVKVVIIPPFEDGTPRRGWPETYDMNTSEPKTEQESITPGGRPPYRSNAPWQWSGPASHNSLPASKWATPTTPGHAQSLSRPLKQTPIVPFRESQPLHSKRPVSFPETPYTVSPAGADRVPPYRQPSGSFSTPGSATYVRYKPSPERYTAAPHPLLSLDPHFSHDGTSSGDSSSGGLTSQESTMERQKPEPLWHVPAQARLSAIAGSSGNKHPSRQDAAGKDSPNRHSKGEPQYSSHSSSNTLSSNASSSHSDDRWFDPLDPLEPEQDPLSKGGSSDSGIDTTLYTSSPSCMSLAKAPRPAKPHKPPGSMGLCGGGREAAGRSHHADRRREVSPAPAVAGQSKGYRPKLYSSGSSTPTGLAGGSRDPPRQPSDMGSRVGYPAQVYKTASAETPRPSQLAQPSPFQLSASVPKSFFSKQPVRNKHPTGWKRTEEPPPRPLPFSDPKKQVDTNTKNVFGQPRLRASLRDLRSPRKNYKSTIEDDLKKLIIMDNLGPEQERDTGQSPQKGLQRTLSDESLCSGRREPSFASPAGLEPGLPSDVLFTSTCAFPSSTLPARRQHQHPHPPVGPGATPAAGSGFPEKKSTISASELSLADGRDRPLRRLDPGLMPLPDTAAGLEWSSLVNAAKAYEVQRAVSLFSLNDPALSPDIPPAHSPVHSHLSLERGPPTPRTTPTMSEEPPLDLTGKVYQLEVMLKQLHTDLQKEKQDKVVLQSEVASLRQNNQRLQEESQAASEQLRKFAEIFCREKKEL

SEQ ID NO: 890071 - protein, 896 aa, Homo sapiens
TGGPGPPAGPSLPLRHRSSSEITLSECDAEDAGEPRGARHTGALPLFREYGSTSSIDVQGMPEQSFFDILNEFRSEQPDARGCQALTELLRADPGPHLMGGGGGAKGDSHNGQPAKDSLLPLQPTKEKEKARKKPARGLGGGDTVDSSIFRKLRSSKPEGEAGRSPGEADEGRSPPEASRPWVCQKSFAHFDVQSMLFDLNEAAANRVSVSQRRNTTTGASAASAASAMASLTASRAHSLGGLDPAFTSTEDLNCKENLEQDLGDDNSNDLLLSCPHFRNEIGGECERNVSFSRASVGSPSSGEGHLAEPALSAYRTNASISVLEVPKEQQRTQSRPRQYSIEHVDLGARYYQDYFVGKEHANYFGVDEKLGPVAVSIKREKLEDHKEHGPQYQYRIIFRTRELITLRGSILEDATPTATKHGTGRGLPLKDALEYVIPELNIHCLRLALNTPKVTEQLLKLDEQGLCRKHKVGILYCKAGQSSEEEMYNNEEAGPAFEEFLSLIGEKVCLKGFTKYAAQLDVKTDSTGTHSLYTMYQDYEIMFHVSTLLPYTPNNRQQLLRKRHIGNDIVTIIFQEPGALPFTPKNIRSHFQHVFIIVRVHNPCTDNVCYSMAVTRSKDAPPFGPPIPSGTTFRKSDVFRDFLLAKVINAENAAHKSDKFHTMATRTRQEYLKDLAENCVSNTPIDSTGKFNLISLTSKKKEKTKARAGAEQHSAGAIAWRVVAQDYAQGVEIDCILGISNEFVVLLDLRTKEVVFNCYCGDVIGWTPDSSTLKIFYGRGDHIFLQATEGSVEDIREIVQRLKVMTSGWETVDMTLRRNGLGQLGFHVKYDGTVAEVEDYGFAWQAGLRQGSRLVEICKVAVVTLTHDQMIDLLRTSVTVKVVIIPPFEDGTPRR

SEQ ID NO: 890072 - protein, 500 aa, Homo sapiens
TGGPGPPAGPSLPLRHRSSSEITLSECDAEDAGEPRGARHTGALPLFREYGSTSSIDVQGMPEQSFFDILNEFRSEQPDARGCQALTELLRADPGPHLMGGGGGAKGDSHNGQPAKDSLLPLQPTKEKEKARKKPARGLGGGDTVDSSIFRKLRSSKPEGEAGRSPGEADEGRSPPEASRPWVCQKSFAHFDVQSMLFDLNEAAANRVSVSQRRNTTTGASAASAASAMASLTASRAHSLGGLDPAFTSTEDLNCKENLEQDLGDDNSNDLLLSCPHFRNEIGGECERNVSFSRASVGSPSSGEGHLAEPALSAYRTNASISVLEVPKEQQRTQSRPRQYSIEHVDLGARYYQDYFVGKEHANYFGVDEKLGPVAVSIKREKLEDHKEHGPQYQYRIIFRTRELITLRGSILEDATPTATKHGTGRGLPLKDALEYVIPELNIHCLRLALNTPKVTEQLLKLDEQGVSQGLEVGVLLGQYLATPLLVAFSILVTFFFLCK

SEQ ID NO: 890073 - protein, 864 aa, Homo sapiens
LGPTGGISPEAGGYIEEHIFLQATEGSVEDIREIVQRLKVMTSGWETVDMTLRRNGLGQLGFHVKYDGTVAEVEDYGFAWQAGLRQGSRLVEICKVAVVTLTHDQMIDLLRTSVTVKVVIIPPFEDGTPRRGWPETYDMNTSEPKTEQESITPGGRPPYRSNAPWQWSGPASHNSLPASKWATPTTPGHAQSLSRPLKQTPIVPFRESQPLHSKRPVSFPETPYTVSPAGADRVPPYRQPSGSFSTPGSATYVRYKPSPERYTAAPHPLLSLDPHFSHDGTSSGDSSSGGLTSQESTMERQKPEPLWHVPAQARLSAIAGSSGNKHPSRQDAAGKDSPNRHSKGEPQYSSHSSSNTLSSNASSSHSDDRWFDPLDPLEPEQDPLSKGGSSDSGIDTTLYTSSPSCMSLAKAPRPAKPHKPPGSMGLCGGGREAAGRSHHADRRREVSPAPAVAGQSKGYRPKLYSSGSSTPTGLAGGSRDPPRQPSDMGSRVGYPAQVYKTASAETPRPSQLAQPSPFQLSASVPKSFFSKQPVRNKHPTGWKRTEEPPPRPLPFSDPKKQVDTNTKNVFGQPRLRASLRDLRSPRKNYKSTIEDDLKKLIIMDNLGPEQERDTGQSPQKGLQRTLSDESLCSGRREPSFASPAGLEPGLPSDVLFTSTCAFPSSTLPARRQHQHPHPPVGPGATPAAGSGFPEKKSTISASELSLADGRDRPLRRLDPGLMPLPDTAAGLEWSSLVNAAKAYEVQRAVSLFSLNDPALSPDIPPAHSPVHSHLSLERGPPTPRTTPTMSEEPPLDLTGKVYQLEVMLKQLHTDLQKEKQDKVVLQSEVASLRQNNQRLQEESQAASEQLRKFAEIFCREKKEL

SEQ ID NO: 890074 - protein, 109 aa, Homo sapiens
MAVTRSKDAPPFGPPIPSGTTFRKSDVFRDFLLAKVINAENAAHKSDKFHTMATRTRQEYLKDLAENCVSNTPIDSTGKFNLISLTSKKKEKTKARAGAEQHSAGAIAW

SEQ ID NO: 890075 - protein, 1638 aa, Homo sapiens
QLRGESDRSKQPPPASSPTKRKGRSRALEAVPAPPASGPRAPAKESPPKRVPDPSPVTKGTAAESGEEAARAIPRELPVKSSSLLPEIKPEHKRGPLPNHFNGRAEGGRSRELGRAAGAPGASDADGLKPRNHFGVGRSTVTTKVTLPAKPKHVELNLKTPKNLDSLGNEHNPFSQPVHKGNTATKISLFENKRTNSSPRHTDIRGQRNTPASSKTFVGRAKLNLAKKAKEMEQPEKKVMPNSPQNGVLVKETAIETKVTVSEEEILPATRGMNGDSSENQALGPQPNQDDKADVQTDAGCLSEPVASALIPVKDHKLLEKEDSEAADSKSLVLENVTDTAQDIPTTVDTKDLPPTAMPKPQHTFSDSQSPAESSPGPSLSLSAPAPGDVPKDTCVQSPISSFPCTDLKVSENHKGCVLPVSRQNNEKMPLLELGGETTPPLSTERSPEAVGSECPSRVLVQVRSFVLPVESTQDVSSQVIPESSEVREVQLPTCHSNEPEVVSVASCAPPQEEVLGNEHSHCTAELAAKSGPQVIPPASEKTLPIQAQSQGSRTPLMAESSPTNSPSSGNHLATPQRPDQTVTNGQDSPASLLNISAGSDDSVFDSSSDMEKFTEIIKQMDSAVCMPMKRKKARMPNSPAPHFAMPPIHEDHLEKVFDPKVFTFGLGKKKESQPEMSPALHLMQNLDTKSKLRPKRASAEQSVLFKSLHTNTNGNSEPLVMPEINDKENRDVTNGGIKRSRLEKSALFSSLLSSLPQDKIFSPSVTSVNTMTTAFSTSQNGSLSQSSVSQPTTEGAPPCGLNKEQSNLLPDNSLKVFNFNSSSTSHSSLKSPSHMEKYPQKEKTKEDLDSRSNLHLPETKFSELSKLKNDDMEKANHIESVIKSNLPNCANSDTDFMGLFKSSRYDPSISFSGMSLSDTMETLRGSVQNKLNPRPGKVVIYSEPDVSEKCIEVFSDIQDCSSWSLSPVILIKVVRGCWILYEQPNFEGHSIPLEEGELELSGLWGIEDILERHEEAESDKPVVIGSIRHVVQDYRVSHIDLFTEPEGLGILSSYFDDTEEMQGFGVMQKTCSMKVHWGTWLIYEEPGFQGVPFILEPGEYPDLSFWDTEAAYIGSMRPLKMGGRKVEFPTDPKVVVYEKPFFEGKCVELETGMCSFVMEGGETEEATGDDHLPFTSVGSMKVLRGIWVAYEKPGFTGHQYLLEEGEYRDWKAWGGYNGELQSLRPILGDFSNAHMIMYSEKNFGSKGSSIDVLGIVANLKETGYGVKTQSINVLSGVWVAYENPDFTGEQYILDKGFYTSFEDWGGKNCKISSVQPICLDSFTGPRRRNQIHLFSEPQFQGHSQSFEETTSQIDDSFSTKSCRVSGGSWVVYDGENFTGNQYVLEEGHYPCLSAMGCPPGATFKSLRFIDVEFSEPTIILFEREDFKGKKIELNAETVNLRSLGFNTQIRSVQVIGGIWVTYEYGSYRGRQFLLSPAEVPNWYEFSGCRQIGSLRPFVQKRIYFRLRNKATGLFMSTNGNLEDLKLLRIQVMEDVGADDQIWIYQEGCIKCRIAEDCCLTIVGSLVTSGSKLGLALDQNADSQFWSLKSDGRIYSKLKPNLVLDIKGGTQYDQNHIILNTVSKEKFTQVWEAMVLYT

SEQ ID NO: 890076 - protein, 246 aa, Homo sapiens
  misc_feature (229)..(229): Xaa can be any naturally occurring amino acid
MQKPKTVAWENLGPEMSALGTAFSREGGRKVEFPTDPKVVVYEKPFFEGKCVELETGMCSFVMEGGETEEATGDDHLPFTSVGSMKVLRGIWVAYEKPGFTGHQYLLEEGEYRDWKAWGGYNGELQSLRPILGDFSNAHMIMYSEKNFGSKGSSIDVLGIVANLKETGYGVKTQSINVLSGVWVAYENPDFTGEQYILDKGFYTSFEDWGGKNCKISSVQPICLGFLHXAPRENEIRFTCFQKPQV

SEQ ID NO: 890077 - protein, 1614 aa, Homo sapiens
QLRGESDRSKQPPPASSPTKRKGRSRALEAVPAPPASGPRAPAKESPPKRVPDPSPVTKGTAAESGEEAARAIPRELPVKSSSLLPEIKPEHKRGPLPNHFNGRAEGGRSRELGRAAGAPGASDADGLKPRNHFGVGRSTVTTKVTLPAKPKHVELNLKTPKNLDSLGNEHNPFSQPVHKGNTATKISLFENKRTNSSPRHTDIRGQRNTPASSKTFVGRAKLNLAKKAKEMEQPEKKVMPNSPQNGVLVKETAIETKVTVSEEEILPATRGMNGDSSENQALGPQPNQDDKADVQTDAGCLSEPVASALIPVKDHKLLEKEDSEAADSKSLVLENVTDTAQDIPTTVDTKDLPPTAMPKPQHTFSDSQSPAESSPGPSLSLSAPAPGDVPKDTCVQSPISSFPCTDLKVSENHKGCVLPVSRQNNEKMPLLELGGETTPPLSTERSPEAVGSECPSRVLVQVRSFVLPVESTQDVSSQVIPESSEVREVQLPTCHSNEPEVVSVASCAPPQEEVLGNEHSHCTAELAAKSGPQVIPPASEKTLPIQAQSQGSRTPLMAESSPTNSPSSGNHLATPQRPDQTVTNGQDSPASLLNISAGSDDSVFDSSSDMEKFTEIIKQMDSAVCMPMKRKKARMPNSPAPHFAMPPIHEDHLEKVFDPKVFTFGLGKKKESQPEMSPALHLMQNLDTKSKLRPKRASAEQSVLFKSLHTNTNGNSEPLVMPEINDKENRDVTNGGIKRSRLEKSALFSSLLSSLPQDKIFSPSVTSVNTMTTAFSTSQNGSLSQSSVSQPTTEGAPPCGLNKEQSNLLPDNSLKVFNFNSSSTSHSSLKSPSHMEKYPQKEKTKEDLDSRSNLHLPETKFSELSKLKNDDMEKANHIESVIKSNLPNCANSDTDFMGLFKSSRYDPSISFSGMSLSDTMEVSEKCIEVFSDIQDCSSWSLSPVILIKVVRGCWILYEQPNFEGHSIPLEEGELELSGLWGIEDILERHEEAESDKPVVIGSIRHVVQDYRVSHIDLFTEPEGLGILSSYFDDTEEMQGFGVMQKTCSMKVHWGTWLIYEEPGFQGVPFILEPGEYPDLSFWDTEAAYIGSMRPLKMGGRKVEFPTDPKVVVYEKPFFEGKCVELETGMCSFVMEGGETEEATGDDHLPFTSVGSMKVLRGIWVAYEKPGFTGHQYLLEEGEYRDWKAWGGYNGELQSLRPILGDFSNAHMIMYSEKNFGSKGSSIDVLGIVANLKETGYGVKTQSINVLSGVWVAYENPDFTGEQYILDKGFYTSFEDWGGKNCKISSVQPICLDSFTGPRRRNQIHLFSEPQFQGHSQSFEETTSQIDDSFSTKSCRVSGGSWVVYDGENFTGNQYVLEEGHYPCLSAMGCPPGATFKSLRFIDVEFSEPTIILFEREDFKGKKIELNAETVNLRSLGFNTQIRSVQVIGGIWVTYEYGSYRGRQFLLSPAEVPNWYEFSGCRQIGSLRPFVQKRIYFRLRNKATGLFMSTNGNLEDLKLLRIQVMEDVGADDQIWIYQEGCIKCRIAEDCCLTIVGSLVTSGSKLGLALDQNADSQFWSLKSDGRIYSKLKPNLVLDIKGGTQYDQNHIILNTVSKEKFTQVWEAMVLYT

SEQ ID NO: 890078 - protein, 1620 aa, Homo sapiens
QLRGESDRSKQPPPASSPTKRKGRSRALEAVPAPPASGPRAPAKESPPKRVPDPSPVTKGTAAESGEEAARAIPRELPVKSSSLLPEIKPEHKRGPLPNHFNGRAEGGRSRELGRAAGAPGASDADGLKPRNHFGVGRSTVTTKVTLPAKPKHVELNLKTPKNLDSLGNEHNPFSQPVHKGNTATKISLFENKRTNSSPRHTDIRGQRNTPASSKTFVGRAKLNLAKKAKEMEQPEKKVMPNSPQNGVLVKETAIETKVTVSEEEILPATRGMNGDSSENQALGPQPNQDDKADVQTDAGCLSEPVASALIPVKDHKLLEKEDSEAADSKSLVLENVTDTAQDIPTTVDTKDLPPTAMPKPQHTFSDSQSPAESSPGPSLSLSAPAPGDVPKDTCVQSPISSFPCTDLKVSENHKGCVLPVSRQNNEKMPLLELGGETTPPLSTERSPEAVGSECPSRVLVQVRSFVLPVESTQDVSSQVIPESSEVREVQLPTCHSNEPEVVSVASCAPPQEEVLGNEHSHCTAELAAKSGPQVIPPASEKTLPIQAQSQGSRTPLMAESSPTNSPSSGNHLATPQRPDQTVTNGQDSPASLLNISAGSDDSVFDSSSDMEKFTEIIKQMDSAVCMPMKRKKARMPNSPAPHFAMPPIHEDHLEKVFDPKVFTFGLGKKKESQPEMSPALHLMQNLDTKSKLRPKRASAEQSVLFKSLHTNTNGNSEPLVMPEINDKENRDVTNGGIKRSRLEKSALFSSLLSSLPQDKIFSPSVTSVNTMTTAFSTSQNGSLSQSSVSQPTTEGAPPCGLNKEQSNLLPDNSLKVFNFNSSSTSHSSLKSPSHMEKYPQKEKTKEDLDSRSNLHLPETKFSELSKLKNDDMESDTDFMGLFKSSRYDPSISFSGMSLSDTMETLRGSVQNKLNPRPGKVVIYSEPDVSEKCIEVFSDIQDCSSWSLSPVILIKVVRGCWILYEQPNFEGHSIPLEEGELELSGLWGIEDILERHEEAESDKPVVIGSIRHVVQDYRVSHIDLFTEPEGLGILSSYFDDTEEMQGFGVMQKTCSMKVHWGTWLIYEEPGFQGVPFILEPGEYPDLSFWDTEAAYIGSMRPLKMGGRKVEFPTDPKVVVYEKPFFEGKCVELETGMCSFVMEGGETEEATGDDHLPFTSVGSMKVLRGIWVAYEKPGFTGHQYLLEEGEYRDWKAWGGYNGELQSLRPILGDFSNAHMIMYSEKNFGSKGSSIDVLGIVANLKETGYGVKTQSINVLSGVWVAYENPDFTGEQYILDKGFYTSFEDWGGKNCKISSVQPICLDSFTGPRRRNQIHLFSEPQFQGHSQSFEETTSQIDDSFSTKSCRVSGGSWVVYDGENFTGNQYVLEEGHYPCLSAMGCPPGATFKSLRFIDVEFSEPTIILFEREDFKGKKIELNAETVNLRSLGFNTQIRSVQVIGGIWVTYEYGSYRGRQFLLSPAEVPNWYEFSGCRQIGSLRPFVQKRIYFRLRNKATGLFMSTNGNLEDLKLLRIQVMEDVGADDQIWIYQEGCIKCRIAEDCCLTIVGSLVTSGSKLGLALDQNADSQFWSLKSDGRIYSKLKPNLVLDIKGGTQYDQNHIILNTVSKEKFTQVWEAMVLYT

SEQ ID NO: 890079 - protein, 542 aa, Homo sapiens
MQKPKTVAWENLGPEMSALGTAFSREGGRKVEFPTDPKVVVYEKPFFEGKCVELETGMCSFVMEGGETEEATGDDHLPFTSVGSMKVLRGIWVAYEKPGFTGHQYLLEEGEYRDWKAWGGYNGELQSLRPILGDFSNAHMIMYSEKNFGSKGSSIDVLGIVANLKETGYGVKTQSINVLSGVWVAYENPDFTGEQYILDKGFYTSFEDWGGKNCKISSVQPICLDSFTGPRRRNQIHLFSEPQFQGHSQSFEETTSQIDDSFSTKSCRVSGGSWVVYDGENFTGNQYVLEEGHYPCLSAMGCPPGATFKSLRFIDVEFSEPTIILFEREDFKGKKIELNAETVNLRSLGFNTQIRSVQVIGGIWVTYEYGSYRGRQFLLSPAEVPNWYEFSGCRQIGSLRPFVQKRIYFRLRNKATGLFMSTNGNLEDLKLLRIQVMEDVGADDQIWIYQEGCIKCRIAEDCCLTIVGSLVTSGSKLGLALDQNADSQFWSLKSDGRIYSKLKPNLVLDIKGGTQYDQNHIILNTVSKEKFTQVWEAMVLYT

SEQ ID NO: 890080 - protein, 1342 aa, Homo sapiens
QLRGESDRSKQPPPASSPTKRKGRSRALEAVPAPPASGPRAPAKESPPKRVPDPSPVTKGTAAESGEEAARAIPRELPVKSSSLLPEIKPEHKRGPLPNHFNGRAEGGRSRELGRAAGAPGASDADGLKPRNHFGVGRSTVTTKVTLPAKPKHVELNLKTPKNLDSLGNEHNPFSQPVHKGNTATKISLFENKRTNSSPRHTDIRGQRNTPASSKTFVGRAKLNLAKKAKEMEQPEKKVMPNSPQNGVLVKETAIETKVTVSEEEILPATRGMNGDSSENQALGPQPNQDDKADVQTDAGCLSEPVASALIPVKDHKLLEKEDSEAADSKSLVLENVTDTAQDIPTTVDTKDLPPTAMPKPQHTFSDSQSPAESSPGPSLSLSAPAPGDVPKDTCVQSPISSFPCTDLKVSENHKGCVLPVSRQNNEKMPLLELGGETTPPLSTERSPEAVGSECPSRVLVQVRSFVLPVESTQDVSSQVIPESSEVREVQLPTCHSNEPEVVSVASCAPPQEEVLGNEHSHCTAELAAKSGPQVIPPASEKTLPIQAQSQGSRTPLMAESSPTNSPSSGNHLATPQRPDQTVTNGQDSPASLLNISAGSDDSVFDSSSDMEKFTEIIKQMDSAVCMPMKRKKARMPNSPAPHFAMPPIHEDHLEKVFDPKVFTFGLGKKKESQPEMSPALHLMQNLDTKSKLRPKRASAEQSVLFKSLHTNTNGNSEPLVMPEINDKENRDVTNGGIKRSRLEKSALFSSLLSSLPQDKIFSPSVTSVNTMTTAFSTSQNGSLSQSSVSQPTTEGAPPCGLNKEQSNLLPDNSLKVFNFNSSSTSHSSLKSPSHMEKYPQKEKTKEDLDSRSNLHLPETKFSELSKLKNDDMEKANHIESVIKSNLPNCANSDTDFMGLFKSSRYDPSISFSGMSLSDTMETLRGSVQNKLNPRPGKVVIYSEPDVSEKCIEVFSDIQDCSSWSLSPVILIKVVRGCWILYEQPNFEGHSIPLEEGELELSGLWGIEDILERHEEAESDKPVVIGSIRHVVQDYRVSHIDLFTEPEGLGILSSYFDDTEEMQGFGVMQKTCSMKVHWGTWLIYEEPGFQGVPFILEPGEYPDLSFWDTEAAYIGSMRPLKMGGRKVEFPTDPKVVVYEKPFFEGKCVELETGMCSFVMEGGETEEATGDDHLPFTSVGSMKVLRGIWVAYEKPGFTGHQYLLEEGEYRDWKAWGGYNGELQSLRPILGDFSNAHMIMYSEKNFGSKGSSIDVLGIVANLKETGYGVKTQSINVLSGVWVAYENPDFTGEQYILDKGFYTSFEDWGGKNCKISSVQPICLDSFTGPRRRNQVTLKIFFYINI

SEQ ID NO: 890081 - protein, 1137 aa, Homo sapiens
QLRGESDRSKQPPPASSPTKRKGRSRALEAVPAPPASGPRAPAKESPPKRVPDPSPVTKGTAAESGEEAARAIPRELPVKSSSLLPEIKPEHKRGPLPNHFNGRAEGGRSRELGRAAGAPGASDADGLKPRNHFGVGRSTVTTKVTLPAKPKHVELNLKTPKNLDSLGNEHNPFSQPVHKGNTATKISLFENKRTNSSPRHTDIRGQRNTPASSKTFVGRAKLNLAKKAKEMEQPEKKVMPNSPQNGVLVKETAIETKVTVSEEEILPATRGMNGDSSENQALGPQPNQDDKADVQTDAGCLSEPVASALIPVKDHKLLEKEDSEAADSKSLVLENVTDTAQDIPTTVDTKDLPPTAMPKPQHTFSDSQSPAESSPGPSLSLSAPAPGDVPKDTCVQSPISSFPCTDLKVSENHKGCVLPVSRQNNEKMPLLELGGETTPPLSTERSPEAVGSECPSRVLVQVRSFVLPVESTQDVSSQVIPESSEVREVQLPTCHSNEPEVVSVASCAPPQEEVLGNEHSHCTAELAAKSGPQVIPPASEKTLPIQAQSQGSRTPLMAESSPTNSPSSGNHLATPQRPDQTVTNGQDSPASLLNISAGSDDSVFDSSSDMEKFTEIIKQMDSAVCMPMKRKKARMPNSPAPHFAMPPIHEDHLEKVFDPKVFTFGLGKKKESQPEMSPALHLMQNLDTKSKLRPKRASAEQSVLFKSLHTNTNGNSEPLVMPEINDKENRDVTNGGIKRSRLEKSALFSSLLSSLPQDKIFSPSVTSVNTMTTAFSTSQNGSLSQSSVSQPTTEGAPPCGLNKEQSNLLPDNSLKVFNFNSSSTSHSSLKSPSHMEKYPQKEKTKEDLDSRSNLHLPETKFSELSKLKNDDMEKANHIESVIKSNLPNCANSDTDFMGLFKSSRYDPSISFSGMSLSDTMETLRGSVQNKLNPRPGKVVIYSEPDVSEKCIEVFSDIQDCSSWSLSPVILIKVVRGCWILYEQPNFEGHSIPLEEGELELSGLWGIEDILERHEEAESDKPVVIGSIRHVVQDYRVSHIDLFTEPEGLGILSSYFDDTEEMQGFGVMQKTCSMKVHWGTWLIYEEPGFQGVPFILEPGEYPDLSFWDTEAAYIGSMRPLKMVKMKSKCPCGDSLSA

SEQ ID NO: 890082 - protein, 1105 aa, Homo sapiens
  misc_feature (1105)..(1105): Xaa can be any naturally occurring amino acid
QLRGESDRSKQPPPASSPTKRKGRSRALEAVPAPPASGPRAPAKESPPKRVPDPSPVTKGTAAESGEEAARAIPRELPVKSSSLLPEIKPEHKRGPLPNHFNGRAEGGRSRELGRAAGAPGASDADGLKPRNHFGVGRSTVTTKVTLPAKPKHVELNLKTPKNLDSLGNEHNPFSQPVHKGNTATKISLFENKRTNSSPRHTDIRGQRNTPASSKTFVGRAKLNLAKKAKEMEQPEKKVMPNSPQNGVLVKETAIETKVTVSEEEILPATRGMNGDSSENQALGPQPNQDDKADVQTDAGCLSEPVASALIPVKDHKLLEKEDSEAADSKSLVLENVTDTAQDIPTTVDTKDLPPTAMPKPQHTFSDSQSPAESSPGPSLSLSAPAPGDVPKDTCVQSPISSFPCTDLKVSENHKGCVLPVSRQNNEKMPLLELGGETTPPLSTERSPEAVGSECPSRVLVQVRSFVLPVESTQDVSSQVIPESSEVREVQLPTCHSNEPEVVSVASCAPPQEEVLGNEHSHCTAELAAKSGPQVIPPASEKTLPIQAQSQGSRTPLMAESSPTNSPSSGNHLATPQRPDQTVTNGQDSPASLLNISAGSDDSVFDSSSDMEKFTEIIKQMDSAVCMPMKRKKARMPNSPAPHFAMPPIHEDHLEKVFDPKVFTFGLGKKKESQPEMSPALHLMQNLDTKSKLRPKRASAEQSVLFKSLHTNTNGNSEPLVMPEINDKENRDVTNGGIKRSRLEKSALFSSLLSSLPQDKIFSPSVTSVNTMTTAFSTSQNGSLSQSSVSQPTTEGAPPCGLNKEQSNLLPDNSLKVFNFNSSSTSHSSLKSPSHMEKYPQKEKTKEDLDSRSNLHLPETKFSELSKLKNDDMEKANHIESVIKSNLPNCANSDTDFMGLFKSSRYDPSISFSGMSLSDTMETLRGSVQNKLNPRPGKVVIYSEPDVSEKCIEVFSDIQDCSSWSLSPVILIKVVRGCWILYEQPNFEGHSIPLEEGELELSGLWGIEDILERHEEAESDKPVVIGSIRHVVQDYRVSHIDLFTEPEGLGILSSYFDDTEEMQGFGVMQKTCSMKVHWGTFSTPFLLRRLKSDVALEVPPKREVX

SEQ ID NO: 890083 - protein, 616 aa, Homo sapiens
ILTIYASIFFQDYRVSHIDLFTEPEGLGILSSYFDDTEEMQGFGVMQKTCSMKVHWGTWLIYEEPGFQGVPFILEPGEYPDLSFWDTEAAYIGSMRPLKMGGRKVEFPTDPKVVVYEKPFFEGKCVELETGMCSFVMEGGETEEATGDDHLPFTSVGSMKVLRGIWVAYEKPGFTGHQYLLEEGEYRDWKAWGGYNGELQSLRPILGDFSNAHMIMYSEKNFGSKGSSIDVLGIVANLKETGYGVKTQSINVLSGVWVAYENPDFTGEQYILDKGFYTSFEDWGGKNCKISSVQPICLDSFTGPRRRNQIHLFSEPQFQGHSQSFEETTSQIDDSFSTKSCRVSGGSWVVYDGENFTGNQYVLEEGHYPCLSAMGCPPGATFKSLRFIDVEFSEPTIILFEREDFKGKKIELNAETVNLRSLGFNTQIRSVQVIGGIWVTYEYGSYRGRQFLLSPAEVPNWYEFSGCRQIGSLRPFVQKRIYFRLRNKATGLFMSTNGNLEDLKLLRIQVMEDVGADDQIWIYQEGCIKCRIAEDCCLTIVGSLVTSGSKLGLALDQNADSQFWSLKSDGRIYSKLKPNLVLDIKGGTQYDQNHIILNTVSKEKFTQVWEAMVLYT

SEQ ID NO: 890084 - protein, 123 aa, Homo sapiens [sequence omitted]

SEQ ID NO: 890085 - protein, 1327 aa, Homo sapiens
QLRGESDRSKQPPPASSPTKRKGRSRALEAVPAPPASGPRAPAKESPPKRVPDPSPVTKGTAAESGEEAARAIPRELPVKSSSLLPEIKPEHKRGPLPNHFNGRAEGGRSRELGRAAGAPGASDADGLKPRNHFGVGRSTVTTKVTLPAKPKHVELNLKTPKNLDSLGNEHNPFSQPVHKGNTATKISLFENKRTNSSPRHTDIRGQRNTPASSKTFVGRAKLNLAKKAKEMEQPEKKVMPNSPQNGVLVKETAIETKVTVSEEEILPATRGMNGDSSENQALGPQPNQDDKADVQTDAGCLSEPVASALIPVKDHKLLEKEDSEAADSKSLVLENVTDTAQDIPTTVDTKDLPPTAMPKPQHTFSDSQSPAESSPGPSLSLSAPAPGDVPKDTCVQSPISSFPCTDLKVSENHKGCVLPVSRQNNEKMPLLELGGETTPPLSTERSPEAVGSECPSRVLVQVRSFVLPVESTQDVSSQVIPESSEVREVQLPTCHSNEPEVVSVASCAPPQEEVLGNEHSHCTAELAAKSGPQVIPPASEKTLPIQAQSQGSRTPLMAESSPTNSPSSGNHLATPQRPDQTVTNGQDSPASLLNISAGSDDSVFDSSSDMEKFTEIIKQMDSAVCMPMKRKKARMPNSPAPHFAMPPIHEDHLEKVFDPKVFTFGLGKKKESQPEMSPALHLMQNLDTKSKLRPKRASAEQSVLFKSLHTNTNGNSEPLVMPEINDKENRDVTNGGIKRSRLEKSALFSSLLSSLPQDKIFSPSVTSVNTMTTAFSTSQNGSLSQSSVSQPTTEGAPPCGLNKEQSNLLPDNSLKVFNFNSSSTSHSSLKSPSHMEKYPQKEKTKEDLDSRSNLHLPETKFSELSKLKNDDMEKANHIESVIKSNLPNCANSDTDFMGLFKSSRYDPSISFSGMSLSDTMETLRGSVQNKLNPRPGKVVIYSEPDVSEKCIEVFSDIQDCSSWSLSPVILIKVVRGCWILYEQPNFEGHSIPLEEGELELSGLWGIEDILERHEEAESDKPVVIGSIRHVVQDYRVSHIDLFTEPEGLGILSSYFDDTEEMQGFGVMQKTCSMKVHWGTWLIYEEPGFQGVPFILEPGEYPDLSFWDTEAAYIGSMRPLKMGGRKVEFPTDPKVVVYEKPFFEGKCVELETGMCSFVMEGGETEEATGDDHLPFTSVGSMKVLRGIWVAYEKPGFTGHQYLLEEGEYRDWKAWGGYNGELQSLRPILGDFSNAHMIMYSEKNFGSKGSSIDVLGIVANLKETGYGVKTQSINVLSGVWVAYENPDFTGEQYILDKGFYTSFEDWGGKNCKISSVQPICLVRSYIFV

SEQ ID NO: 890086 - protein, 93 aa, Homo sapiens
GRGPPPTTQFRQELCGPVQERTSLFFLPYNVAEAQCIANQVQLFYATDRKETYGLVETFNLRPNEFKYMSVIAELEQSGLGAELKCAQNQNKT

SEQ ID NO: 890087 - protein, 362 aa, Homo sapiens
  misc_feature (3)..(3): Xaa can be any naturally occurring amino acid
  misc_feature (13)..(13): Xaa can be any naturally occurring amino acid
  misc_feature (26)..(26): Xaa can be any naturally occurring amino acid
PPXYPHPQITVTXITYLPSLPPPSSXSCQEAGAAMAAVVVAAAGGAGPAVLQVAGLYRGLCAVRSRALGLGLVSPAQLRVFPVRPGSGRPEGGADGSGVGAEAELQANPFYDRYRDKIQLLRRSDPAAFESRLEKRSEFRKQPVGHSRQGDFIKCVEQKTDALGKQSVNRGFTKDKTLSSIFNIEMVKEKTAEEIKQIWQQYFAAKDTVYAVIPAEKFDLIWNRAQSCPTFLCALPRREGYEFFVGQWTGTELHFTALINIQTRGEAAASQLILYHYPELKEEKGIVLMTAEMDSTFLNVAEAQCIANQVQLFYATDRKETYGLVETFNLRPNEFKYMSVIAELEQSGLGAELKCAQNQNKT

SEQ ID NO: 890088 - protein, 332 aa, Homo sapiens
ARGPRAEADAPEEEEEAGAAMAAVVVAAAGGAGPAVLQVAGLYRGLCAVRSRALGLGLVSPAQLRVFPVRPGSGRPEGGADGSGVGAEAELQANPFYDRYRDKIQLLRRSDPAAFESRLEKRSEFRKQPVGHSRQGDFIKCVEQKTDALGKQSVNRGFTKDKTLSSIFNIEMVKEKTAEEIKQIWQQYFAAKDTVYAVIPAEKFDLIWNRAQSCPTFLCALPRREGYEFFVGQWTGTELHFTALINIQTRGEAAASQLILYHYPELKENVAEAQCIANQVQLFYATDRKETYGLVETFNLRPNEFKYMSVIAELEQSGLGAELKCAQNQNKT

SEQ ID NO: 890089 - protein, 378 aa, Homo sapiens
ARGPRAEADAPEEEEEAGAAMAAVVVAAAGGAGPAVLQVAGLYRGLCAVRSRALGLGLVSPAQLRVFPVRPGSGRPEGGADGSGVGAEAELQANPFYDRYRDKIQLLRRSDPAAFESRLEKRSEFRKQPVGHSRQGDFIKCVEQKDGAQNKLVRRGQRQGEYGVIQVWAAEAWIKTDALGKQSVNRGFTKDKTLSSIFNIEMVKEKTAEEIKQIWQQYFAAKDTVYAVIPAEKFDLIWNRAQSCPTFLCALPRREGYEFFVGQWTGTELHFTALINIQTRGEAAASQLILYHYPELKEEKGIVLMTAEMDSTFLNVAEAQCIANQVQLFYATDRKETYGLVETFNLRPNEFKYMSVIAELEQSGLGAELKCAQNQNKT

SEQ ID NO: 890090 - protein, 329 aa, Homo sapiens
ARGPRAEADAPEEEEEAGAAMAAVVVAAAGGAGPAVLQVAGLYRGLCAVRSRALGLGLVSPAQLRVFPVRPGSGRPEGGADGSGVGAEAELQANPFYDRYRDKIQLLRRSDPAAFESRLEKRSEFRKQPVGHSRQGDFIKCVEQKTDALGKQSVNRGFTKDKTLSSIFNIEMVKEKTAEEIKQIWQQYFAAKDTVYAVIPAEKFDLIWNRAQSCPTFLCALPRREGYEFFVGQWTGTELHFTALINIQTRGEAAASQLILYHYPELKEEKGIVLMTAEMDSTFLNVAEAQCIANQVQLFYATDRKETYGWAQLLAIHSTLIHLHQRVRK

SEQ ID NO: 890091 - protein, 280 aa, Homo sapiens
ARGPRAEADAPEEEEEAGAAMAAVVVAAAGGAGPAVLQVAGLYRGLCAVRSRALGLGLVSPAQLRVFPVRPGSGRPEGGADGSGVGAEAELQANPFYDRYRDKIQLLRRSDPAAFESRLEKRSEFRKQPVGHSRQGDFIKCVEQKTDALGKQSVNRGFTKDKTLSSIFNIEMVKEKTAEEIKQIWQQYFAAKDTVYAVIPAEKFDLIWNRAQSCPTNVAEAQCIANQVQLFYATDRKETYGLVETFNLRPNEFKYMSVIAELEQSGLGAELKCAQNQNKT

SEQ ID NO: 890092 - protein, 220 aa, Homo sapiens
ARGPRAEADAPEEEEEAGAAMAAVVVAAAGGAGPAVLQVAGLYRGLCAVRSRALGLGLVSPAQLRVFPVRPGSGRPEGGADGSGVGAEAELQANPFYDRYRDKIQLLRRSDPAAFESRLEKRSEFRKQPVGHSRQGDFIKCVEQKTDALGKQSVNRGFTKDKTLSSIFNIEMVKEKTAEEIKQIWQQYFAAKDTVYAVIPAEKFDLIWNRAQSCPTVSFW

SEQ ID NO: 890093 - protein, 205 aa, Homo sapiens
ARGPRAEADAPEEEEEAGAAMAAVVVAAAGGAGPAVLQVAGLYRGLCAVRSRALGLGLVSPAQLRVFPVRPGSGRPEGGADGSGVGAEAELQANPFYDRYRDKIQLLRRSDPAAFESRLEKRSEFRKQPVGHSRQGDFIKCVEQKTDALGKQSVNRGFTKDKTLSSIFNIEMVKEKTAEEIKQIWQQYFAAKDTVYAVIPQKSLI

SEQ ID NO: 890094 - protein, 348 aa, Homo sapiens
ARGPRAEADAPEEEEEAGAAMAAVVVAAAGGAGPAVLQVAGLYRGLCAVRSRALGLGLVSPAQLRVFPVRPGSGRPEGGADGSGVGAEAELQANPFYDRYRDKIQLLRRSDPAAFESRLEKRSEFRKQPVGHSRQGDFIKCVEQKTDALGKQSVNRGFTKDKTLSSIFNIEMVKEKTAEEIKQIWQQYFAAKDTVYAVIPAEKFDLIWNRAQSCPTFLCALPRREGYEFFVGQWTGTELHFTALINIQTRGEAAASQLILYHYPELKEEKGIVLMTAEMDSTFLNVAEAQCIANQVQLFYATDRKETYGLVETFNLRPNEFKYMSVIAELEQSGLGAELKCAQNQNKT

SEQ ID NO: 890095 - protein, 348 aa, Homo sapiens; identical to SEQ ID NO: 890094

SEQ ID NO: 890096 - protein, 177 aa, Homo sapiens
MVKEKTAEEIKQIWQQYFAAKDTVYAVIPAEKFDLIWNRAQSCPTFLCALPRREGYEFFVGQWTGTELHFTALINIQTRGEAAASQLILYHYPELKEEKGIVLMTAEMDSTFLNVAEAQCIANQVQLFYATDRKETYGLVETFNLRPNEFKYMSVIAELEQSGLGAELKCAQNQNKT

SEQ ID NO: 890097 - protein, 331 aa, Homo sapiens
ARGPRAEADAPEEEEEAGAAMAAVVVAAAGGAGPAVLQVAGLYRGLCAVRSRALGLGLVSPAQLRVFPVRPGSGRPEGGADGSGVGAEAELQANPFYDRYRDKIQLLRRSDPAAFESRLEKRSEFRKQPVGHSRQGDFIKCVEQKTDALGKQSVNRGFTKDKTLSSIFNIEMVKEKTAEEIKQAEKFDLIWNRAQSCPTFLCALPRREGYEFFVGQWTGTELHFTALINIQTRGEAAASQLILYHYPELKEEKGIVLMTAEMDSTFLNVAEAQCIANQVQLFYATDRKETYGLVETFNLRPNEFKYMSVIAELEQSGLGAELKCAQNQNKT

SEQ ID NO: 890098 - protein, 168 aa, Homo sapiens
DSGLLCFTMCRLTLFFSNLQAEKFDLIWNRAQSCPTFLCALPRREGYEFFVGQWTGTELHFTALINIQTRGEAAASQLILYHYPELKEEKGIVLMTAEMDSTFLNVAEAQCIANQVQLFYATDRKETYGLVETFNLRPNEFKYMSVIAELEQSGLGAELKCAQNQNKT

SEQ ID NO: 890099 - protein, 179 aa, Homo sapiens
ARGPRAEADAPEEEEEAGAAMAAVVVAAAGGAGPAVLQVAGLYRGLCAVRSRALGLGLVSPAQLRVFPVRPGSGRPEGGADGSGVGAEAELQANPFYDRYRDKIQLLRRSDPAAFESRLEKRSEFRKQPVGHSRQGDFIKCVEQKTDALGKQSVNRGFTKDKTLSSIFNIEMVKEKKCC

SEQ ID NO: 890100 - protein, 617 aa, Homo sapiens
MDPMNIDTGSSQMGATIVDALDTLYIMGLHDEFLDGQRWIEDNLDFSVNSEVSVFEVNIRFIGGLLAAYYLSGEEIFKIKAVQLAEKLLPAFNTPTGIPWAMVNLKSGVGRNWGWASAGSSILAEFGTLHMEFIHLSYLTGDLTYYKKVMHIRKLLQKMDRPNGLYPNYLNPRTGRWGQYHTSVGGLGDSFYEYLLKAWLMSDKTDHEARKMYDDAIEAIEKHLIKKSRGGLTFIGEWKNGHLEKKMGHLACFAGGMFALGADGSRADKAGHYLELGAEIARTCHESYDRTALKLGPESLRSMQSQAFRISQNTGPPPIDRQKRLSYPPVQSIPTGNGIPSRDSENTCHQSFMQSLLAPHLSDQVIGSQRSLSEHQRNTQCGPSSAIEYNCPPTHENVHIRRESESQNRESCDMSLGAINTRNSTLNIPFSSSSSSGDIQGRNTSPNVSVQKSNPMRITESHATKGHMNPPVTTNMHGVARPALPHPSVSHGNGDQGPAVRQANSSVPQRSRHPLQDSSGSKIRQPERNRSGNQRQSTVFDPSLPHLSLSTGGSMILGRQQPATEKRGSIVRFMPDSPQVPNDNSGPDQHTLSQNFGFSFIPEGGMNPPINANASFI

SEQ ID NO: 890101 - protein, 641 aa, Homo sapiens
MTTPALLPLSGRRIPPLNLGPPSFPHHRATLRLSEKFILLLILSAFITLCFGAFFFLPDSSKHKRFDLGLEDVLIPHVDAGKGAKNPGVFLIHGPDEHRHREEEERLRNKIRADHEKALEEAKEKLRKSREEIRAEIQTEKNKVVQEMKIKENKPLPPVPIPNLVGIRGGDPEDNDIREKREKIKEMMKHAWDNYRTYGWGHNELRPIARKGHSPNIFGSSQMGATIVDALDTLYIMGLHDEFLDGQRWIEDNLDFSVNSEVSVFEVNIRFIGGLLAAYYLSGEEIFKIKAVQLAEKLLPAFNTPTGIPWAMVNLKSGVGRNWGWASAGSSILAEFGTLHMEFIHLSYLTGDLTYYKKVMHIRKLLQKMDRPNGLYPNYLNPRTGRWGQYHTSVGGLGDSFYEYLLKAWLMSDKTDHEARKMYDDAIEAIEKHLIKKSRGGLTFIGEWKNGHLEKKMGHLACFAGGMFALGADGSRADKAGHYLELGAEIARTCHESYDRTALKLGPESFKFDGAVEAVAVRQAEKYYILRPEVIETYWYLWRFTHDPRYRQWGWEAALAIEKYCRVNGGFSGVKDVYSSTPTHDDVQQSFFLAETLKYLYLLFSGDDLLPLDHWVFNTEAHPLPVLHLANTTLSGNPAVR

SEQ ID NO: 890102 - protein, 658 aa, Homo sapiens
MTTPALLPLSGRRIPPLNLGPPSFPHHRATLRLSEKFILLLILSAFITLCFGAFFFLPDSSKHKRFDLGLEDVLIPHVDAGKGAKNPGVFLIHGPDEHRHREEEERLRNKIRADHEKALEEAKEKLRKSREEIRAEIQTEKNKVVQEMKIKENKPLPPVPIPNLVGIRGGDPEDNDIREKREKIKEMMKHAWDNYRTYGWGHNELRPIARKGHSPNIFGSSQMGATIVDALDTLYIMGLHDEFLDGQRWIEDNLDFSVNSEVSVFEVNIRFIGGLLAAYYLSGEEIFKIKAVQLAEKLLPAFNTPTGIPWAMVNLKSGVGRNWGWASAGSSILAEFGTLHMEFIHLSYLTGDLTYYKKVMHIRKLLQKMDRPNGLYPNYLNPRTGRWGQYHTSVGGLGDSFYEYLLKAWLMSDKTDHEARKMYDDAIEAIEKHLIKKSRGGLTFIGEWKNGHLEKKMGHLACFAGGMFALGADGSRADKAGHYLELGAEIARTCHESYDRTALKLGPESFKFDGAVEAVAVRQAEKYYILRPEVIETYWYLWRFTHDPRYRQWGWEAALAIEKYCRVNGGFSGVKDVYSSTPTHDDVQQSFFLAETLKYLYLLFSGDDLLPLDHWVFNTEAHPLPVLHLANTTLSGTSQGMRRQNPYFQVLYLYYPDD

SEQ ID NO: 890103 - protein, 598 aa, Homo sapiens
MTTPALLPLSGRRIPPLNLGPPSFPHHRATLRLSEKFILLLILSAFITLCFGAFFFLPDSSKHKRFDLGLEDVLIPHVDAGKGAKNPGVFLIHGPDEHRHREEEERLRNKIRADHEKALEEAKEKLRKSREEIRAEIQTEKNKVVQEMKIKENKPLPPVPIPNLVGIRGGDPEDNDIREKREKIKEMMKHAWDNYRTYGWGHNELRPIARKGHSPNIFGSSQMGATIVDALDTLYIMGLHDEFLDGQRWIEDNLDFSVNSEVSVFEVNIRFIGGLLAAYYLSGEEIFKIKAVQLAEKLLPAFNTPTGIPWAMVNLKSGVGRNWGWASAGSSILAEFGTLHMEFIHLSYLTGDLTYYKKVMHIRKLLQKMDRPNGLYPNYLNPRTGRWGQYHTSVGGLGDSFYEYLLKAWLMSDKTDHEARKMYDDAIEAIEKHLIKKSRGGLTFIGEWKNGHLEKKMGHLACFAGGMFALGADGSRADKAGHYLELGAEIARTCHESYDRTALKLGPESFKFDGAVEAVAVRQAEKYYILRPEVIETYWYLWRFTHDPRYRQWGWEAALAIEKYCRVNGGFSGVKDVYSSTPTHDDVQQSFFLAETLN

SEQ ID NO: 890104 - protein, 436 aa, Homo sapiens
MTTPALLPLSGRRIPPLNLGPPSFPHHRATLRLSEKFILLLILSAFITLCFGAFFFLPDSSKHKRFDLGLEDVLIPHVDAGKGAKNPGVFLIHGPDEHRHREEEERLRNKIRADHEKALEEAKEKLRKSREEIRAEIQTEKNKVVQEMKIKENKPLPPVPIPNLVGIRGGDPEDNDIREKREKIKEMMKHAWDNYRTYGWGHNELRPIARKGHSPNIFGSSQMGATIVDALDTLYIMGLHDEFLDGQRWIEDNLDFSVNSEVSVFEVNIRFIGGLLAAYYLSGEEIFKIKAVQLAEKLLPAFNTPTGIPWAMVNLKSGVGRNWGWASAGSSILAEFGTLHMEFIHLSYLTGDLTYYKKVMHIRKLLQKMDRPNGLYPNYLNPRTGRWGQCKYSSIPEAFLKNYLSENSLLDVVKSTLRGVRNPQCLTLWSAGAVLR

SEQ ID NO: 890105 - protein, 641 aa, Homo sapiens; identical to SEQ ID NO: 890101

SEQ ID NO: 890106 - protein, 641 aa, Homo sapiens; identical to SEQ ID NO: 890101

SEQ ID NO: 890107 - protein, 293 aa, Homo sapiens
MTTPALLPLSGRRIPPLNLGPPSFPHHRATLRLSEKFILLLILSAFITLCFGAFFFLPDSSKHKRFDLGLEDVLIPHVDAGKGAKNPGVFLIHGPDEHRHREEEERLRNKIRADHEKALEEAKEKLRKSREEIRAEIQTEKNKVVQEMKIKENKPLPPVPIPNLVGIRGGDPEDNDIREKREKIKEMMKHAWDNYRTYGWGHNELRPIARKGHSPNIFGSSQMGATIVDALDTLYIMGLHDEFLDGQRWIEDNLDFSVNSEVSVFEVNIRFIGGLLAAYYLSGEEGRGRTSEK

SEQ ID NO: 890108 - protein, 227 aa, Homo sapiens
MGNCVGRQRRERPAAPGHPRKRAGRNEPLKKERLKWKSDYPMTDGQLRSKRDEFWDTAPAFEGRKEIWDALKAAAYAAEANDHELAQAILDGASITLPHGTLCECYDELGNRYQLPIYCLSPPVNLLLEHTEEESLEPPEPPPSVRREFPLKVRLSTGKDVRLSASLPDTVGQLKRQLHAQEGIEPSWQRWFFSGKLLTDRTRLQETKIQKDFVIQVIINQPPPPQD

SEQ ID NO: 890109 - protein, 227 aa, Homo sapiens; identical to SEQ ID NO: 890108

SEQ ID NO: 890110 - protein, 227 aa, Homo sapiens; identical to SEQ ID NO: 890108

SEQ ID NO: 890111 - protein, 227 aa, Homo sapiens; identical to SEQ ID NO: 890108

SEQ ID NO: 890112 - protein, 99 aa, Homo sapiens
MPKRKSPENTEGKDGSKVTKQEPTRRSARLSAKPAPPKPEPKPRKTSAKKEPGAKISRGAKGKKEEKQEAGKEGTAPSENGETKAEEAQKTESVDNEGE

SEQ ID NO: 890113 - protein, 77 aa, Homo sapiens
MPKRKSPENTEGKDGSKVTKQEPTRRSARLSAKPAPPKPEPKPRKTSAKKEPGAKISRGAKGKKEEKQEAGKEGTEN

SEQ ID NO: 890114 - protein, 77 aa, Homo sapiens; identical to SEQ ID NO: 890113

SEQ ID NO: 890115 - protein, 134 aa, Homo sapiens
MPKRKSPENTEGKDGSKVTKQEPTRRSARLSAKPAPPKPEPKPRKTSAKKEPGAKISRGAKGKKEEKQEAGKEGTAPSENGETKAEEIHISRSTVNVSTSRGTPPSTLSVKGQIETVRVKGTAQKTESVDNEGE

SEQ ID NO: 890116 - protein, 143 aa, Homo sapiens [sequence omitted]

SEQ ID NO: 890117 - protein, 101 aa, Homo sapiens
FNKVRYIKNRFLKINFVLYNHQKICIFSHSLCSPQDGLPDCQRNLLHQNLNPNQEKHLLRKNLEQRLAEVLKGRRRKSRKLERKVLHHLKMVKLKLKRYFP

SEQ ID NO: 890118 - protein, 134 aa, Homo sapiens; identical to SEQ ID NO: 890115

SEQ ID NO: 890119 - protein, 130 aa, Homo sapiens
MPKRKSPENTEGKDGSKVTKQEPTRRSARLSAKPAPPKPEPKPRKTSAKKEPGAKISRGAKGKKEEKQEAGKEGTAPSENGETKAEEIHISRSTVNVSTSRGTPPSTLSVKGQIETVRVKGTVENSACLQ

SEQ ID NO: 890120 - protein, 98 aa, Homo sapiens
TGESLVLKQSFLHGITLLSEIAELEPTRRSARLSAKPAPPKPEPKPRKTSAKKEPGAKISRGAKGKKEEKQEAGKEGTAPSENGETKAEEVLSINTSH

SEQ ID NO: 890121 - protein, 77 aa, Homo sapiens; identical to SEQ ID NO: 890113

SEQ ID NO: 890122 - protein, 418 aa, Homo sapiens
MSIEIPAGLTELLQGFTVEVLRHQPADLLEFALQHFTRLQQENERKGTARFGHEGRTWGDLGAAAGGGTPSKGVNFAEEPMQSDSEDGEEEEAAPADAGAFNAPVINRFTRRASVCAEAYNPDEEEDDAESRIIHPKTDDQRNRLQEACKDILLFKNLDPEQMSQVLDAMFEKLVKDGEHVIDQGDDGDNFYVIDRGTFDIYVKCDGVGRCVGNYDNRGSFGELALMYNTPRAATITATSPGALWGLDRVTFRRIIVKNNAKKRKMYESFIESLPFLKSLEFSERLKVVDVIGTKVYNDGEQIIAQGDSADSFFIVESGEVKITMKRKGKSEVEENGAVEIARCSRGQYFGELALVTNKPRAASAHAIGTVKCLAMDVQAFERLLGPCMEIMKRNIATYEEQLVALFGTNMDIVEPTA

SEQ ID NO: 890123 - protein, 256 aa, Homo sapiens
MSQVLDAMFEKLVKDGEHVIDQGDDGDNFYVIDRGTFDIYVKCDGVGRCVGNYDNRGSFGELALMYNTPRAATITATSPGALWGLDRVTFRRIIVKNNAKKRKMYESFIESLPFLKSLEFSERLKVVDVIGTKVYNDGEQIIAQGDSADSFFIVESGEVKITMKRKGKSEVEENGAVEIARCSRGQYFGELALVTNKPRAASAHAIGTVKCLAMDVQAFERLLGPCMEIMKRNIATYEEQLVALFGTNMDIVEPTA

SEQ ID NO: 890124 - protein, 345 aa, Homo sapiens
MSIEIPAGLTELLQGFTVEVLRHQPADLLEFALQHFTRLQQENERKGTARFGHEGRTWGDLGAAAGGGTPSKGVNFAEEPMQSDSEDGEEEEAAPADAGAFNAPVINRFTRRASVCAEAYNPDEEEDDAESRIIHPKTDDQRNRLQEACKDILLFKNLDPEQMSQVLDAMFEKLVKDGEHVIDQGDDGDNFYVIDRGTFDIYVKCDGVGRCVGNYDNRGSFGELALMYNTPRAATITATSPGALWGLDRVTFRRIIVKNNAKKRKMYESFIESLPFLKSLEFSERLKVVDVIGTKVYNDGEQIIAQGDSADSFFIVESGEVKITMKRKQWMCKHLKGFWDLAWKL

SEQ ID NO: 890125 - protein, 418 aa, Homo sapiens; identical to SEQ ID NO: 890122

SEQ ID NO: 890126 - protein, 418 aa, Homo sapiens; identical to SEQ ID NO: 890122

SEQ ID NO: 890127 - protein, 390 aa, Homo sapiens
MSIEIPAGLTELLQGFTVEVLRHQPADLLEFALQHFTRLQQENERKGTARFGHEGRTWGDLGAAAGGGTPSKGVNFAEEPMQSDSEDGEEEEAAPADAGAFNAPVINRFTRRASVCAEAYNPDEEEDDAESREQMSQVLDAMFEKLVKDGEHVIDQGDDGDNFYVIDRGTFDIYVKCDGVGRCVGNYDNRGSFGELALMYNTPRAATITATSPGALWGLDRVTFRRIIVKNNAKKRKMYESFIESLPFLKSLEFSERLKVVDVIGTKVYNDGEQIIAQGDSADSFFIVESGEVKITMKRKGKSEVEENGAVEIARCSRGQYFGELALVTNKPRAASAHAIGTVKCLAMDVQAFERLLGPCMEIMKRNIATYEEQLVALFGTNMDIVEPTA

SEQ ID NO: 890128 - protein, 1118 aa, Homo sapiens
MSVEAYGPSSQTLTFLDTEEAELLGADTQGSEFEFTDFTLPSQTQTPPGGPGGPGGGGAGGPGGAGAGAAAGQLDAQVGPEGILQNGAVDDSVAKTSQLLAELNFEEDEEDTYYTKDLPIHACSYCGIHDPACVVYCNTSKKWFCNGRGNTSGSHIVNHLVRAKCKEVTLHKDGPLGETVLECYNCGCRNVFLLGFIPAKADSVVVLLCRQPCASQSSLKDINWDSSQWQPLIQDRCFLSWLVKIPSEQEQLRARQITAQQINKLEELWKENPSATLEDLEKPGVDEEPQHVLLRYEDAYQYQNIFGPLVKLEADYDKKLKESQTQDNITVRWDLGLNKKRIAYFTLPKTDSDMRLMQGDEICLRYKGDLAPLWKGIGHVIKVPDNYGDEIAIELRSSVGAPVEVTHNFQVDFVWKSTSFDRMQSALKTFAVDETSVSGYIYHKLLGHEVEDVIIKCQLPKRFTAQGLPDLNHSQVYAVKTVLQRPLSLIQGPPGTGKTVTSATIVYHLARQGNGPVLVCAPSNIAVDQLTEKIHQTGLKVVRLCAKSREAIDSPVSFLALHNQIRNMDSMPELQKLQQLKDETGELSSADEKRYRALKRTAERELLMNADVICCTCVGAGDPRLAKMQFRSILIDESTQATEPECMVPVVLGAKQLILVGDHCQLGPVVMCKKAAKAGLSQSLFERLVVLGIRPIRLQVQYRMHPALSAFPSNIFYEGSLQNGVTAADRVKKGFDFQWPQPDKPMFFYVTQGQEEIASSGTSYLNRTEAANVEKITTKLLKAGAKPDQIGIITPYEGQRSYLVQYMQFSGSLHTKLYQEVEIASVDAFQGREKDFIILSCVRANEHQGIGFLNDPRRLNVALTRARYGVIIVGNPKALSKQPLWNHLLNYYKEQKVLVEGPLNNLRESLMQFSKPRKLVNTINPGARFMTTAMYDAREAIIPGSVYDRSSQGRPSSMYFQTHDQIGMISAGPSHVAAMNIPIPFNLVMPPMPPPGYFGQANGPAAGRGTPKGKTGRGGRQKNRFGLPGPSQTNLPNSQASQDVASQPFSQGALTQGYISMSQPSQMSQPGLSQPELSQDSYLGDEFKSQIDVALSQDSTYQGERAYQHGGVTGLSQY

SEQ ID NO: 890129 - protein, 1118 aa, Homo sapiens; identical to SEQ ID NO: 890128

SEQ ID NO: 890130 - protein, 709 aa, Homo sapiens
MYECDQPVLFASRGSGLINVMSVGDSSVSGYIYHKLLGHEVEDVIIKCQLPKRFTAQGLPDLNHSQVYAVKTVLQRPLSLIQGPPGTGKTVTSATIVYHLARQGNGPVLVCAPSNIAVDQLTEKIHQTGLKVVRLCAKSREAIDSPVSFLALHNQIRNMDSMPELQKLQQLKDETGELSSADEKRYRALKRTAERELLMNADVICCTCVGAGDPRLAKMQFRSILIDESTQATEPECMVPVVLGAKQLILVGDHCQLGPVVMCKKAAKAGLSQSLFERLVVLGIRPIRLQVQYRMHPALSAFPSNIFYEGSLQNGVTAADRVKKGFDFQWPQPDKPMFFYVTQGQEEIASSGTSYLNRTEAANVEKITTKLLKAGAKPDQIGIITPYEGQRSYLVQYMQFSGSLHTKLYQEVEIASVDAFQGREKDFIILSCVRANEHQGIGFLNDPRRLNVALTRARYGVIIVGNPKALSKQPLWNHLLNYYKEQKVLVEGPLNNLRESLMQFSKPRKLVNTINPGARFMTTAMYDAREAIIPGSVYDRSSQGRPSSMYFQTHDQIGMISAGPSHVAAMNIPIPFNLVMPPMPPPGYFGQANGPAAGRGTPKGKTGRGGRQKNRFGLPGPSQTNLPNSQASQDVASQPFSQGALTQGYISMSQPSQMSQPGLSQPELSQDSYLGDEFKSQIDVALSQDSTYQGERAYQHGGVTGLSQY

SEQ ID NO: 890131 - protein, 1118 aa, Homo sapiens; identical to SEQ ID NO: 890128

SEQ ID NO: 890132 - protein, 1184 aa, Homo sapiens
MSVEAYGPSSQTLTFLDTEEAELLGADTQGSEFEFTDFTLPSQTQTPPGGPGGPGGGGAGGPGGAGAGAAAGQLDAQVGPEGILQNGAVDDSVAKTSQLLAELNFEEDEEDTYYTKDLPIHACSYCGIHDPACVVYCNTSKKWFCNGRGNTSGSHIVNHLVRAKCKEVTLHKDGPLGETVLECYNCGCRNVFLLGFIPAKADSVVVLLCRQPCASQSSLKDINWDSSQWQPLIQDRCFLSWLVKIPSEQEQLRARQITAQQINKLEELWKENPSATLEDLEKPGVDEEPQHVLLRYEDAYQYQNIFGPLVKLEADYDKKLKESQTQDNITVRWDLGLNKKRIAYFTLPKTDSDMRLMQGDEICLRYKGDLAPLWKGIGHVIKVPDNYGDEIAIELRSSVGAPVEVTHNFQVDFVWKSTSFDRMQSALKTFAVDETSVSGYIYHKLLGHEVEDVIIKCQLPKRFTAQGLPDLNHSQVYAVKTVLQRPLSLIQGPPGTGKTVTSATIVYHLARQGNGPVLVCAPSNIAVDQLTEKIHQTGLKVVRLCAKSREAIDSPVSFLALHNQIRNMDSMPELQKLQQLKDETGELSSADEKRYRALKRTAERELLMNADVICCTCVGAGDPRLAKMQFRSILIDESTQATEPECMVPVVLGAKQLILVGDHCQLGPVVMCKKAAKAGLSQSLFERLVVLGIRPIRLQVQYRMHPALSAFPSNIFYEGSLQNGVTAADRVKKGFDFQWPQPDKPMFFYVTQGQEEIASSGTSYLNRYLLIPHGSRFCPRDSPGEGWGSSAVQTPVMAAAFPQGVVSAPLTASSLRARDPTGGAQHCQPGFLRTEAANVEKITTKLLKAGAKPDQIGIITPYEGQRSYLVQYMQFSGSLHTKLYQEVEIASVDAFQGREKDFIILSCVRANEHQGIGFLNDPRRLNVALTRARYGVIIVGNPKALSKQPLWNHLLNYYKEQKVLVEGPLNNLRESLMQFSKPRKLVNTINPGARFMTTAMYDAREAIIPGSVYDRSSQGRPSSMYFQTHDQIGMISAGPSHVAAMNIPIPFNLVMPPMPPPGYFGQANGPAAGRGTPKGKTGRGGRQKNRFGLPGPSQTNLPNSQASQDVASQPFSQGALTQGYISMSQPSQMSQPGLSQPELSQDSYLGDEFKSQIDVALSQDSTYQGERAYQHGGVTGLSQY

SEQ ID NO: 890133 - protein, 491 aa, Homo sapiens
MQFRSILIDESTQATEPECMVPVVLGAKQLILVGDHCQLGPVVMCKKAAKAGLSQSLFERLVVLGIRPIRLQVQYRMHPALSAFPSNIFYEGSLQNGVTAADRVKKGFDFQWPQPDKPMFFYVTQGQEEIASSGTSYLNRTEAANVEKITTKLLKAGAKPDQIGIITPYEGQRSYLVQYMQFSGSLHTKLYQEVEIASVDAFQGREKDFIILSCVRANEHQGIGFLNDPRRLNVALTRARYGVIIVGNPKALSKQPLWNHLLNYYKEQKVLVEGPLNNLRESLMQFSKPRKLVNTINPGARFMTTAMYDAREAIIPGSVYDRSSQGRPSSMYFQTHDQIGMISAGPSHVAAMNIPIPFNLVMPPMPPPGYFGQANGPAAGRGTPKGKTGRGGRQKNRFGLPGPSQTNLPNSQASQDVASQPFSQGALTQGYISMSQPSQMSQPGLSQPELSQDSYLGDEFKSQIDVALSQDSTYQGERAYQHGGVTGLSQY

SEQ ID NO: 890134 - protein, 468 aa, Homo sapiens
MQFRSILIDESTQATEPECMVPVVLGAKQLILVGDHCQLGPVVMCKKAAKAGLSQSLFERLVVLGIRPIRLQVQYRMHPALSAFPSNIFYEGSLQNGVTAADRVKKGFDFQWPQPDKPMFFYVTQGQEEIASSGTSYLNRTEAANVEKITTKLLKYMQFSGSLHTKLYQEVEIASVDAFQGREKDFIILSCVRANEHQGIGFLNDPRRLNVALTRARYGVIIVGNPKALSKQPLWNHLLNYYKEQKVLVEGPLNNLRESLMQFSKPRKLVNTINPGARFMTTAMYDAREAIIPGSVYDRSSQGRPSSMYFQTHDQIGMISAGPSHVAAMNIPIPFNLVMPPMPPPGYFGQANGPAAGRGTPKGKTGRGGRQKNRFGLPGPSQTNLPNSQASQDVASQPFSQGALTQGYISMSQPSQMSQPGLSQPELSQDSYLGDEFKSQIDVALSQDSTYQGERAYQHGGVTGLSQY

SEQ ID NO: 890135 - protein, 1118 aa, Homo sapiens; identical to SEQ ID NO: 890128

SEQ ID NO: 890136 - protein, 1118 aa, Homo sapiens; identical to SEQ ID NO: 890128

SEQ ID NO: 890137 - protein, 1118 aa, Homo sapiens; identical to SEQ ID NO: 890128

SEQ ID NO: 890138 - protein, 793 aa, Homo sapiens
MSVEAYGPSSQTLTFLDTEEAELLGADTQGSEFEFTDFTLPSQTQTPPGGPGGPGGGGAGGPGGAGAGAAAGQLDAQVGPEGILQNGAVDDSVAKTSQLLAELNFEEDEEDTYYTKDLPIHACSYCGIHDPACVVYCNTSKKWFCNGRGNTSGSHIVNHLVRAKCKEVTLHKDGPLGETVLECYNCGCRNVFLLGFIPAKADSVVVLLCRQPCASQSSLKDINWDSSQWQPLIQDRCFLSWLVKIPSEQEQLRARQITAQQINKLEELWKENPSATLEDLEKPGVDEEPQHVLLRYEDAYQYQNIFGPLVKLEADYDKKLKESQTQDNITVRWDLGLNKKRIAYFTLPKTDSDMRLMQGDEICLRYKGDLAPLWKGIGHVIKVPDNYGDEIAIELRSSVGAPVEVTHNFQVDFVWKSTSFDRMQSALKTFAVDETSVSGYIYHKLLGHEVEDVIIKCQLPKRFTAQGLPDLNHSQVYAVKTVLQRPLSLIQGPPGTGKTVTSATIVYHLARQGNGPVLVCAPSNIAVDQLTEKIHQTGLKVVRLCAKSREAIDSPVSFLALHNQIRNMDSMPELQKLQQLKDETGELSSADEKRYRALKRTAERELLMNADVICCTCVGAGDPRLAKMQFRSILIDESTQATEPECMVPVVLGAKQLILVGDHCQLGPVVMCKKAAKAGLSQSLFERLVVLGIRPIRLQVQYRMHPALSAFPSNIFYEGSLQNGVTAADRVKKGFDFQWPQPDKPMFFYVTQGQEEIASSGTSYLNRTEAANVEKITTKLLKAGAKPDQIGTG

SEQ ID NO: 890139 - protein, 515 aa, Homo sapiens
MSVEAYGPSSQTLTFLDTEEAELLGADTQGSEFEFTDFTLPSQTQTPPGGPGGPGGGGAGGPGGAGAGAAAGQLDAQVGPEGILQNGAVDDSVAKTSQLLAELNFEEDEEDTYYTKDLPIHACSYCGIHDPACVVYCNTSKKWFCNGRGNTSGSHIVNHLVRAKCKEVTLHKDGPLGETVLECYNCGCRNVFLLGFIPAKADSVVVLLCRQPCASQSSLKDINWDSSQWQPLIQDRCFLSWLVKIPSEQEQLRARQITAQQINKLEELWKENPSATLEDLEKPGVDEEPQHVLLRYEDAYQYQNIFGPLVKLEADYDKKLKESQTQDNITVRWDLGLNKKRIAYFTLPKTDSDMRLMQGDEICLRYKGDLAPLWKGIGHVIKVPDNYGDEIAIELRSSVGAPVEVTHNFQVDFVWKSTSFDRMQSALKTFAVDETSVSGYIYHKLLGHEVEDVIIKCQLPKRFTAQGLPDLNHSQVYAVKTVLQRPLSLIQGPPGTGKTVTSATIVYHLARQGNG

SEQ ID NO: 890140 - protein, 69 aa, Homo sapiens
PGCGCSLLVSAAGFAAALCVSERGLDGWLGVARRNSRLAGGGTPAHGEVESFFKDAVLLVSGLVLAARF

SEQ ID NO: 890141 - protein, 1129 aa, Homo sapiens
MSVEAYGPSSQTLTFLDTEEAELLGADTQGSEFEFTDFTLPSQTQTPPGGPGGPGGGGAGGPGGAGAGAAAGQLDAQVGPEGILQNGAVDDSVAKTSQLLAELNFEEDEEDTYYTKDLPIHACSYCGIHDPACVVYCNTSKKWFCNGRGNTSGSHIVNHLVRAKCKEVTLHKDGPLGETVLECYNCGCRNVFLLGFIPAKADSVVVLLCRQPCASQSSLKDINWDSSQWQPLIQDRCFLSWLVKIPSEQEQLRARQITAQQINKLEELWKENPSATLEDLEKPGVDEEPQHVLLRYEDAYQYQNIFGPLVKLEADYDKKLKESQTQDNITVRWDLGLNKKRIAYFTLPKTDSGNEDLVIIWLRDMRLMQGDEICLRYKGDLAPLWKGIGHVIKVPDNYGDEIAIELRSSVGAPVEVTHNFQVDFVWKSTSFDRMQSALKTFAVDETSVSGYIYHKLLGHEVEDVIIKCQLPKRFTAQGLPDLNHSQVYAVKTVLQRPLSLIQGPPGTGKTVTSATIVYHLARQGNGPVLVCAPSNIAVDQLTEKIHQTGLKVVRLCAKSREAIDSPVSFLALHNQIRNMDSMPELQKLQQLKDETGELSSADEKRYRALKRTAERELLMNADVICCTCVGAGDPRLAKMQFRSILIDESTQATEPECMVPVVLGAKQLILVGDHCQLGPVVMCKKAAKAGLSQSLFERLVVLGIRPIRLQVQYRMHPALSAFPSNIFYEGSLQNGVTAADRVKKGFDFQWPQPDKPMFFYVTQGQEEIASSGTSYLNRTEAANVEKITTKLLKAGAKPDQIGIITPYEGQRSYLVQYMQFSGSLHTKLYQEVEIASVDAFQGREKDFIILSCVRANEHQGIGFLNDPRRLNVALTRARYGVIIVGNPKALSKQPLWNHLLNYYKEQKVLVEGPLNNLRESLMQFSKPRKLVNTINPGARFMTTAMYDAREAIIPGSVYDRSSQGRPSSMYFQTHDQIGMISAGPSHVAAMNIPIPFNLVMPPMPPPGYFGQANGPAAGRGTPKGKTGRGGRQKNRFGLPGPSQTNLPNSQASQDVASQPFSQGALTQGYISMSQPSQMSQPGLSQPELSQDSYLGDEFKSQIDVALSQDSTYQGERAYQHGGVTGLSQY

SEQ ID NO: 890142 - protein, 309 aa, Homo sapiens
RGVHLMPVGLSLEYPHRYKRHGREKDFIILSCVRANEHQGIGFLNDPRRLNVALTRARYGVIIVGNPKALSKQPLWNHLLNYYKEQKVLVEGPLNNLRESLMQFSKPRKLVNTINPGARFMTTAMYDAREAIIPGSVYDRSSQGRPSSMYFQTHDQIGMISAGPSHVAAMNIPIPFNLVMPPMPPPGYFGQANGPAAGRGTPKGKTGRGGRQKNRFGLPGPSQTNLPNSQASQDVASQPFSQGALTQGYISMSQPSQMSQPGLSQPELSQDSYLGDEFKSQIDVALSQDSTYQGERAYQHGGVTGLSQY

SEQ ID NO: 890143 - protein, 1118 aa, Homo sapiens; identical to SEQ ID NO: 890128

SEQ ID NO: 890144 - protein, 978 aa, Homo sapiens
MSVEAYGPSSQTLTFLDTEEAELLGADTQGSEFEFTDFTLPSQTQTPPGGPGGPGGGGAGGPGGAGAGAAAGQLDAQVGPEGILQNGAVDDSVAKTSQLLAELNFEEDEEDTYYTKDLPIHACSYCGIHDPACVVYCNTSKKWFCNGRGNTSGSHIVNHLVRAKCKEVTLHKDGPLGETVLECYNCGCRNVFLLGFIPAKADSVVVLLCRQPCASQSSLKDINWDSSQWQPLIQDRCFLSWLVKIPSEQEQLRARQITAQQINKLEELWKENPSATLEDLEKPGVDEEPQHVLLRYEDAYQYQNIFGPLVKLEADYDKKLKESQTQDNITVRWDLGLNKKRIAYFTLPKTDSDMRLMQGDEICLRYKGDLAPLWKGIGHVIKVPDNYGDEIAIELRSSVGAPVEVTHNFQVDFVWKSTSFDRMQSALKTFAVDETSVSGYIYHKLLGHEVEDVIIKCQLPKRFTAQGLPDLNHSQVYAVKTVLQRPLSLIQGPPGTGKTVTSATIVYHLARQGNGPVLVCAPSNIAVDQLTEKIHQTGLKVVRLCAKSREAIDSPVSFLALHNQIRNMDSMPELQKLQQLKDETGELSSADEKRYRALKRTAERELLMNADVICCTCVGAGDPRLAKMQFRSILIDESTQATEPECMVPVVLGAKQLILVGDHCQLGPVVMCKKAAKAGLSQSLFERLVVLGIRPIRLQVQYRMHPALSAFPSNIFYEGSLQNGVTAADRVKKGFDFQWPQPDKPMFFYVTQGQEEIASSGTSYLNRTEAANVEKITTKLLKAGAKPDQIGIITPYEGQRSYLVQYMQFSGSLHTKLYQEVEIASVDAFQGREKDFIILSCVRANEHQGIGFLNDPRRLNVALTRARYGVIIVGNPKALSKQPLWNHLLNYYKEQKVLVEGPLNNLRESLMQFSKPRKLVNTINPGARFMTTAMYDAREAIIPGSVYDRSSQARLFPQSGSRRIDNNRNSMTRRNSTA

SEQ ID NO: 890145 - protein, 108 aa, Homo sapiens
MAAAFPQGVVSAPLTASSLRARDPTGGAQHCQPGFLRTEAANVEKITTKLLKAGAKPDQIGIITPYEGQRSYLVQYMQFSGSLHTKLYQVRCALGHTWSPGPCKGIDP

SEQ ID NO: 890146 - protein, 70 aa, Homo sapiens
SRRLLSRQRLAVGPASWGLGHVEARPGPVLEANRGSCFSCAQTQDNITVRWDLGLNKKRIAYFTLPKTDS

SEQ ID NO: 890147 - protein, 116 aa, Homo sapiens
PKALSKQPLWNHLLNYYKEQKVLVEGPLNNLRESLMQFSKPRKLVNTINPVSACTGQQGSTEKPGPKTLLGTCQLGPCARELREGSPRGGWALLGEGGPAHFLSPEPCVAFLAWGR

SEQ ID NO: 890148 - protein, 639 aa, Homo sapiens
SLKLKTPAKNQYVSFCSYWEGACCGPVRKSRALVQLRAGREAVTMPACCSCSDVFQYETNKVTRIQSMNYGTIKWFFHVIIFSYVCFALVSDKLYQRKEPVISSVHTKVKGIAEVKEEIVENGVKKLVHSVFDTADYTFPLQGNSFFVMTNFLKTEGQEQRLCPEYPTRRTLCSSDRGCKKGWMDPQSKGIQTGRCVVHEGNQKTCEVSAWCPIEAVEEAPRPALLNSAENFTVLIKNNIDFPGHNYTTRNILPGLNITCTFHKTQNPQCPIFRLGDIFRETGDNFSDVAIQGGIMGIEIYWDCNLDRWFHHCHPKYSFRRLDDKTTNVSLYPGYNFRYAKYYKENNVEKRTLIKVFGIRFDILVFGTGGKFDIIQLVVYIGSTLSYFGLAAVFIDFLIDTYSSNCCRSHIYPWCKCCQPCVVNEYYYRKKCESIVEPKPTLKYVSFVDESHIRMVNQQLLGRSLQDVKGQEVPRPAMDFTDLSRLPLALHDTPPIPGQPEEIQLLRKEATPRSRDSPVWCQCGSCLPSQLPESHRCLEELCCRKKPGACITTSELFRKLVLSRHVLQFLLLYQEPLLALDVDSTNSRLRHCAYRCYATWRFGSQDMADFAILPSCCRWRIRKEFPKSEGQYSGFKSPY

SEQ ID NO: 890149 - protein, 639 aa, Homo sapiens; identical to SEQ ID NO: 890148

SEQ ID NO: 890150 - protein, 639 aa, Homo sapiens; identical to SEQ ID NO: 890148

SEQ ID NO: 890151 - protein, 425 aa, Homo sapiens [sequence omitted]

SEQ ID NO: 890152 - protein, 667 aa, Homo sapiens
SLKLKTPAKNQYVSFCSYWEGACCGPVRKSRALVQLRAGREAVTMPACCSCSDVFQYETNKVTRIQSMNYGTIKWFFHVIIFSYVCFALVSDKLYQRKEPVISSVHTKVKGIAEVKEEIVENGVKKLVHSVFDTADYTFPLQGNSFFVMTNFLKTEGQEQRLCPEYPTRRTLCSSDRGCKKGWMDPQSKGIQTGRCVVHEGNQKTCEVSAWCPIEAVEEAPRPALLNSAENFTVLIKNNIDFPGHNYTTRNILPGLNITCTFHKTQNPQCPIFRLGDIFRETGDNFSDVAIQGGIMGIEIYWDCNLDRWFHHCHPKYSFRRLDDKTTNVSLYPGYNFRYAKYYKENNVEKRTLIKVFGIRFDILVFGTGGKFDIIQLVVYIGSTLSYFGLVRDSLFHALGKWFGEGSDYRSACLHSPQAAVFIDFLIDTYSSNCCRSHIYPWCKCCQPCVVNEYYYRKKCESIVEPKPTLKYVSFVDESHIRMVNQQLLGRSLQDVKGQEVPRPAMDFTDLSRLPLALHDTPPIPGQPEEIQLLRKEATPRSRDSPVWCQCGSCLPSQLPESHRCLEELCCRKKPGACITTSELFRKLVLSRHVLQFLLLYQEPLLALDVDSTNSRLRHCAYRCYATWRFGSQDMADFAILPSCCRWRIRKEFPKSEGQYSGFKSPY

SEQ ID NO: 890153 - protein, 106 aa, Homo sapiens
SLKLKTPAKNQYVSFCSYWEGACCGPVRKSRALVQLRAGREAVTMPACCSCSDVFQYETNKVTRIQSMNYGTIKWFFHVIIFSYVCFALVSDKLYQRKEPVISSSA

SEQ ID NO: 890154 - protein, 64 aa, Homo sapiens
MPPVDAFPCLPFSFALVSDKLYQRKEPVISSVHTKVKGIAEVKEEIVENGVKKLVHSVFDTADY

SEQ ID NO: 890155 - protein, 996 aa, Homo sapiens
MQHLKSKKREERWMRASKRQSEKEMEELHHNIDDLLQEKKSLECEVEELHRTVQKRQQQKDFIDGNVESLMTELEIEKSLKHHEDIVDEIECIEKTLLKRRSELREADRLLAEAESELSCTKEKTKNAVEKFTDAKRSLLQTESDAEELERRAQETAVNLVKADQQLRSLQADAKDLEQHKIKQEEILKEINKIVAAKDSDFQCLSKKKEKLTEELQKLQKDIEMAERNEDHHLQVLKESEVLLQAKRAELEKLKSQVTSQQQEMAVLDRQLGHKKEELHLLQGSMVQAKADLQEALRLGETEVTEKCNHIREVKSLLEELSFQKGELNVQISERKTQLTLIKQEIEKEEENLQVVLRQMSKHKTELKNILDMLQLENHELQGLKLQHDQRVSELEKTQVAVLEEKLELENLQQISQQQKGEIEWQKQLLERDKREIERMTAESRALQSCVECLSKEKEDLQEKCDIWEKKLAQTKRVLAAAEENSKMEQSNLEKLELNVRKLQQELDQLNRDKLSLHNDISAMQQQLQGKEKREAVNSLQEELANVQDHLNLAKQDLLHTTKHQDVLLSEQTRLQKDISEWANRFEDCQKEEETKQQQLQVLQNEIEENKLKLVQQEMMFQRLQKERESEESKLETSKVTLKEQQHQLEKELTDQKSKLDQVLSKVLAAEERVRTLQEEERWCESLEKTLSQTKRQLSEREQQLVEKSGELLALQKEADSMRADFSLLRNQFLTERKKAEKQVASLKEALKIQRSQLEKNLLEQKQENSCIQKEMATIELVAQDNHERARRLMKELNQMQYEYTELKKQMANQKDLERRQMEISDAMRTLKSEVKDEIRTSLKNLNQFLPELPADLEAILERNENLEGELESLKENLPFTMNEGPFEEKLNFSQVHIMDEHWRGEALREKLRHREDRLKAQLRHCMSKQAEVLIKGKRQTEGTLHSLRRQVDALGELVTSTSADSASSPSLSQLESSLTEDSQLGQNQEKNASAR

SEQ ID NO: 890156 - protein, 126 aa, Homo sapiens
MAFVKLTLPFSLIQVTSQQQEMAVLDRQLGHKKEELHLLQGSMVQAKADLQEALRLGETEVTEKCNHIREVKSLLEELSFQKGELNVQISERKTQLTLIKQEIEKEEENLQVVLRQMSKHKTAFLQ

SEQ ID NO: 890157 - protein, 130 aa, Homo sapiens
FLFHENVISLEKREAVNSLQEELANVQDHLNLAKQDLLHTTKHQDVLLSEQTRLQKDISEWANRFEDCQKEEETKQQQLQVLQNEIEENKLKLVQQEMMFQRLQKERESKDPKRAKTPKEQRPQKSKDPK

SEQ ID NO: 890158 - protein, 1775 aa, Homo sapiens
MKAQKSGKEQQLDIMNKQYQQLESRLDEILSRIAKETEEIKDLEEQLTEGQIAANEALKKDLEGVISGLQEYLGTIKGQATQAQNECRKLRDEKETLLQRLTEVEQERDQLEIVAMDAENMRKELAELESALQEQHEVNASLQQTQGDLSAYEAELEARLNLRDAEANQLKEELEKVTRLTQLEQSALQAELEKERQALKNALGKAQFSEEKEQENSELHAKLKHLQDDNNLLKQQLKDFQNHLNHVVDGLVRPEEVAARVDELRRKLKLGTGEMNIHSPSDVLGKSLADLQKQFSEILARSKWERDEAQVRERKLQEEMALQQEKLATGQEEFRQACERALEARMNFDKRQHEARIQQMENEIHYLQENLKSMEEIQGLTDLQLQEADEEKERILAQLRELEKKKKLEDAKSQEQVFGLDKELKKLKKAVATSDKLATAELTIAKDQLKSLHGTVMKINQERAEELQEAERFSRKAAQAARDLTRAEAEIELLQNLLRQKGEQFRLEMEKTGVGTGANSQVLEIEKLNETMERQRTEIARLQNVLDLTGSDNKGGFENVLEEIAELRREVSYQNDYISSMADPFKRRGYWYFMPPPPSSKVSSHSSQATKDSGVGLKYSASTPVRKPRPGQQDGKEGSQPPPASGYWVYSPIRSGLHKLFPSRDADSGGDSQEESELDDQEEPPFVPPPGYMMYTVLPDGSPVPQGMALYAPPPPLPNNSRPLTPGTVVYGPPPAGAPMVYGPPPPNFSIPFIPMGVLHCNVPEHHNLENEVSRLEDIMQHLKSKKREERWMRASKRQSEKEMEELHHNIDDLLQEKKSLECEVEELHRTVQKRQQQKDFIDGNVESLMTELEIEKSLKHHEDIVDEIECIEKTLLKRRSELREADRLLAEAESELSCTKEKTKNAVEKFTDAKRSLLQTESDAEELERRAQETAVNLVKADQQLRSLQADAKDLEQHKIKQEEILKEINKIVAAKDSDFQCLSKKKEKLTEELQKLQKDIEMAERNEDHHLQVLKESEVLLQAKRAELEKLKSQVTSQQQEMAVLDRQLGHKKEELHLLQGSMVQAKADLQEALRLGETEVTEKCNHIREVKSLLEELSFQKGELNVQISERKTQLTLIKQEIEKEEENLQVVLRQMSKHKTELKNILDMLQLENHELQGLKLQHDQRVSELEKTQVAVLEEKLELENLQQISQQQKGEIEWQKQLLERDKREIERMTAESRALQSCVECLSKEKEDLQEKCDIWEKKLAQTKRVLAAAEENSKMEQSNLEKLELNVRKLQQELDQLNRDKLSLHNDISAMQQQLQGKEKREAVNSLQEELANVQDHLNLAKQDLLHTTKHQDVLLSEQTRLQKDISEWANRFEDCQKEEETKQQQLQVLQNEIEENKLKLVQQEMMFQRLQKERESEESKLETSKVTLKEQQHQLEKELTDQKSKLDQVLSKVLAAEERVRTLQEEERWCESLEKTLSQTKRQLSEREQQLVEKSGELLALQKEADSMRADFSLLRNQFLTERKKAEKQVASLKEALKIQRSQLEKNLLEQKQENSCIQKEMATIELVAQDNHERARRLMKELNQMQYEYTELKKQMANQKDLERRQMEISDAMRTLKSEVKDEIRTSLKNLNQFLPELPADLEAILERNENLEGELESLKENLPFTMNEGPFEEKLNFSQVHIMDEHWRGEALREKLRHREDRLKAQLRHCMSKQAEVLIKGKRQTEGTLHSLRRQVDALGELVTSTSADSASSPSLSQLESSLTEDSQLGQNQEKNASAR

SEQ ID NO: 890159 - protein, 1698 aa, Homo sapiens
MKAQKSGKEQQLDIMNKQYQQLESRLDEILSRIAKETEEIKDLEEQLTEGQIAANEALKKDLEGVISGLQEYLGTIKGQATQAQNECRKLRDEKETLLQRLTEVEQERDQLEIVAMDAENMRKELAELESALQEQHEVNASLQQTQGDLSAYEAELEARLNLRDAEANQLKEELEKVTRLTQLEQSALQAELEKERQALKNALGKAQFSEEKEQENSELHAKLKHLQDDNNLLKQQLKDFQNHLNHVVDGLVRPEEVAARVDELRRKLKLGTGEMNIHSPSDVLGKSLADLQKQFSEILARSKWERDEAQVRERKLQEEMALQQEKLATGQEEFRQACERALEARMNFDKRQHEARIQQMENEIHYLQENLKSMEEIQGLTDLQLQEADEEKERILAQLRELEKKKKLEDAKSQEQVFGLDKELKKLKKAVATSDKLATAELTIAKDQLKSLHGTVMKINQERAEELQEAERFSRKAAQAARDLTRAEAEIELLQNLLRQKGEQFRLEMEKTGVGTGANSQVLEIEKLNETMERQRTEIARLQNVLDLTGSDNKGGFENVLEEIAELRREVSYQNDYISSMADPFKRRGYWYFMPPPPSSKVSSHSSQATKDSGVGLKYSASTPVRKPRPGQQDGKEGSQPPPASGYWVYSPIRSGLHKLFPSRDADSGGDSQEESELDDQEEPPFVPPPGYMMYTVLPDGSPVPQGMALYAPPPPLPNNSRPLTPGTVVYGPPPAGAPMVYGPPPPNFSIPFIPMGVLHCNVPEHHNLENEVSRLEDIMQHLKSKKREERWMRASKRQSEKEMEELHHNIDDLLQEKKSLECEVEELHRTVQKRQQQKDFIDGNVESLMTELEIEKSLKHHEDIVDEIECIEKTLLKRRSELREADRLLAEAESELSCTKEKTKNAVEKFTDAKRSLLQTESDAEELERRAQETAVNLVKADQQLRSLQADAKDLEQHKIKQEEILKEINKIVAAKDSDFQCLSKKKEKLTEELQKLQKDIEMAERNEDHHLQVLKESEVLLQAKRAELEKLKSQVTSQQQEMAVLDRQLGHKKEELHLLQGSMVQAKADLQEALRLGETEVTEKCNHIREVKSLLEELSFQKGELNVQISERKTQLTLIKQEIEKEEENLQVVLRQMSKHKTELKNILDMLQLENHELQGLKLQHDQRVSELEKTQVAVLEEKLELENLQQISQQQKGEIEWQKQLLERDKREIERMTAESRALQSCVECLSKEKEDLQEKCDIWEKKLAQTKRVLAAAEENSKMEQSNLEKLELNVRKLQQELDQLNRDKLSLHNDISAMQQQLQGKEKREAVNSLQEELANVQDHLNLAKQDLLHTTKHQDVLLSEQTRLQKDISEWANRFEDCQKEEETKQQQLQVLQNEIEENKLKLVQQEMMFQRLQKERESEESKLETSKVTLKEQQHQLEKELTDQKSKLDQVLSKVLAAEERVRTLQEEERWCESLEKTLSQTKRQLSEREQQLVEKSGELLALQKEADSMRADFSLLRNQFLTERKKAEKQVASLKEALKIQRSQLEKNLLEQKQENSCIQKEMATIELVAQDNHERARRLMKELNQMQYEYTELKKQMANQKDLERRQMEISDAMRTLKSEVKDEIRTSLKNLNQFLPELPADLEAILERNENLEGELESLKENLPFTMNEGPFEEKLNFSQVHIMVRVYPAILWVRRIDHLPQLS

SEQ ID NO: 890160 - protein, 1309 aa, Homo sapiens
MKAQKSGKEQQLDIMNKQYQQLESRLDEILSRIAKETEEIKDLEEQLTEGQIAANEALKKDLEGVISGLQEYLGTIKGQATQAQNECRKLRDEKETLLQRLTEVEQERDQLEIVAMDAENMRKELAELESALQEQHEVNASLQQTQGDLSAYEAELEARLNLRDAEANQLKEELEKVTRLTQLEQSALQAELEKERQALKNALGKAQFSEEKEQENSELHAKLKHLQDDNNLLKQQLKDFQNHLNHVVDGLVRPEEVAARVDELRRKLKLGTGEMNIHSPSDVLGKSLADLQKQFSEILARSKWERDEAQVRERKLQEEMALQQEKLATGQEEFRQACERALEARMNFDKRQHEARIQQMENEIHYLQENLKSMEEIQGLTDLQLQEADEEKERILAQLRELEKKKKLEDAKSQEQVFGLDKELKKLKKAVATSDKLATAELTIAKDQLKSLHGTVMKINQERAEELQEAERFSRKAAQAARDLTRAEAEIELLQNLLRQKGEQFRLEMEKTGVGTGANSQVLEIEKLNETMERQRTEIARLQNVLDLTGSDNKGGFENVLEEIAELRREVSYQNDYISSMADPFKRRGYWYFMPPPPSSKVSSHSSQATKDSGVGLKYSASTPVRKPRPGQQDGKEGSQPPPASGYWVYSPIRSGLHKLFPSRDADSGGDSQEESELDDQEEPPFVPPPGYMMYTVLPDGSPVPQGMALYAPPPPLPNNSRPLTPGTVVYGPPPAGAPMVYGPPPPNFSIPFIPMGVLHCNVPEHHNLENEVSRLEDIMQHLKSKKREERWMRASKRQSEKEMEELHHNIDDLLQEKKSLECEVEELHRTVQKRQQQKDFIDGNVESLMTELEIEKSLKHHEDIVDEIECIEKTLLKRRSELREADRLLAEAESELSCTKEKTKNAVEKFTDAKRSLLQTESDAEELERRAQETAVNLVKADQQLRSLQADAKDLEQHKIKQEEILKEINKIVAAKDSDFQCLSKKKEKLTEELQKLQKDIEMAERNEDHHLQVLKESEVLLQAKRAELEKLKSQVTSQQQEMAVLDRQLGHKKEELHLLQGSMVQAKADLQEALRLGETEVTEKCNHIREVKSLLEELSFQKGELNVQISERKTQLTLIKQEIEKEEENLQVVLRQMSKHKTELKNILDMLQLENHELQGLKLQHDQRVSELEKTQVAVLEEKLELENLQQISQQQKGEIEWQKQLLERDKREIERMTAESRALQSCVECLSKEKEDLQEKCDIWEKKLAQTKRVLAAAEENSKMEQSNLEKLELNVRKLQQELDQLNRDKLSLHNDISAMQQQLQV

SEQ ID NO: 890161 - protein, 1148 aa, Homo sapiens
MKAQKSGKEQQLDIMNKQYQQLESRLDEILSRIAKETEEIKDLEEQLTEGQIAANEALKKDLEGVISGLQEYLGTIKGQATQAQNECRKLRDEKETLLQRLTEVEQERDQLEIVAMDAENMRKELAELESALQEQHEVNASLQQTQGDLSAYEAELEARLNLRDAEANQLKEELEKVTRLTQLEQSALQAELEKERQALKNALGKAQFSEEKEQENSELHAKLKHLQDDNNLLKQQLKDFQNHLNHVVDGLVRPEEVAARVDELRRKLKLGTGEMNIHSPSDVLGKSLADLQKQFSEILARSKWERDEAQVRERKLQEEMALQQEKLATGQEEFRQACERALEARMNFDKRQHEARIQQMENEIHYLQENLKSMEEIQGLTDLQLQEADEEKERILAQLRELEKKKKLEDAKSQEQVFGLDKELKKLKKAVATSDKLATAELTIAKDQLKSLHGTVMKINQERAEELQEAERFSRKAAQAARDLTRAEAEIELLQNLLRQKGEQFRLEMEKTGVGTGANSQVLEIEKLNETMERQRTEIARLQNVLDLTGSDNKGGFENVLEEIAELRREVSYQNDYISSMADPFKRRGYWYFMPPPPSSKVSSHSSQATKDSGVGLKYSASTPVRKPRPGQQDGKEGSQPPPASGYWVYSPIRSGLHKLFPSRDADSGGDSQEESELDDQEEPPFVPPPGYMMYTVLPDGSPVPQGMALYAPPPPLPNNSRPLTPGTVVYGPPPAGAPMVYGPPPPNFSIPFIPMGVLHCNVPEHHNLENEVSRLEDIMQHLKSKKREERWMRASKRQSEKEMEELHHNIDDLLQEKKSLECEVEELHRTVQKRQQQKDFIDGNVESLMTELEIEKSLKHHEDIVDEIECIEKTLLKRRSELREADRLLAEAESELSCTKEKTKNAVEKFTDAKRSLLQTESDAEELERRAQETAVNLVKADQQLRSLQADAKDLEQHKIKQEEILKEINKIVAAKDSDFQCLSKKKEKLTEELQKLQKDIEMAERNEDHHLQVLKESEVLLQAKRAELEKLKSQVTSQQQEMAVLDRQLGHKKEELHLLQGSMVQAKADLQEALRLGETEVTEKCNHIREVKSLLEELSFQKGELNVQISERKTQLTLIKQEIEKEEENLQVVLRQMSKHKTAFLQ

SEQ ID NO: 890162 - protein, 1809 aa, Homo sapiens
MKAQKSGKEQQLDIMNKQYQQLESRLDEILSRIAKETEEIKDLEEQLTEGQIAANEALKKDLEGVISGLQEYLGTIKGQATQAQNECRKLRDEKETLLQRLTEVEQERDQLEIVAMDAENMRKELAELESALQEQHEVNASLQQTQGDLSAYEAELEARLNLRDAEANQLKEELEKVTRLTQLEQSALQAELEKERQALKNALGKAQFSEEKEQENSELHAKLKHLQDDNNLLKQQLKDFQNHLNHVVDGLVRPEEVAARVDELRRKLKLGTGEMNIHSPSDVLGKSLADLQKQFSEILARSKWERDEAQVRERKLQEEMALQQEKLATGQEEFRQACERALEARMNFDKRQHEARIQQMENEIHYLQENLKSMEEIQGLTDLQLQEADEEKERILAQLRELEKKKKLEDAKSQEQVFGLDKELKKLKKAVATSDKLATAELTIAKDQLKSLHGTVMKINQERAEELQEAERFSRKAAQAARDLTRAEAEIELLQNLLRQKGEQFRLEMEKTGVGTGANSQVLEIEKLNETMERQRTEIARLQNVLDLTGSDNKGGFENVLEEIAELRREVSYQNDYISSMADPFKRRGYWYFMPPPPSSKVSSHSSQATKDSGVGLKYSASTPVRKPRPGQQDGKEGSQPPPASGYWVYSPIRSGLHKLFPSRDADSGGDSQEESELDDQEEPPFVPPPGYMMYTVLPDGSPVPQGMALYAPPPPLPNNSRPLTPGTVVYGPPPAGAPMVYGPPPPNFSIPFIPMGVLHCNVPEHHNLENEVSRLEDIMQHLKSKKREERWMRASKRQSEKEMEELHHNIDDLLQEKKSLECEVEELHRTVQKRQQQKDFIDGNVESLMTELEIEKSLKHHEDIVDEIECIEKTLLKRRSELREADRLLAEAESELSCTKEKTKNAVEKFTDAKRSLLQTESDAEELERRAQETAVNLVKADQQLRSLQADAKDLEQHKIKQEEILKEINKIVAAKDSDFQCLSKKKEKLTEEYSKASVGLQGFVLEDSSGVPSPLGSALVLLVLCRLQKLQKDIEMAERNEDHHLQVLKESEVLLQAKRAELEKLKSQVTSQQQEMAVLDRQLGHKKEELHLLQGSMVQAKADLQEALRLGETEVTEKCNHIREVKSLLEELSFQKGELNVQISERKTQLTLIKQEIEKEEENLQVVLRQMSKHKTELKNILDMLQLENHELQGLKLQHDQRVSELEKTQVAVLEEKLELENLQQISQQQKGEIEWQKQLLERDKREIERMTAESRALQSCVECLSKEKEDLQEKCDIWEKKLAQTKRVLAAAEENSKMEQSNLEKLELNVRKLQQELDQLNRDKLSLHNDISAMQQQLQGKEKREAVNSLQEELANVQDHLNLAKQDLLHTTKHQDVLLSEQTRLQKDISEWANRFEDCQKEEETKQQQLQVLQNEIEENKLKLVQQEMMFQRLQKERESEESKLETSKVTLKEQQHQLEKELTDQKSKLDQVLSKVLAAEERVRTLQEEERWCESLEKTLSQTKRQLSEREQQLVEKSGELLALQKEADSMRADFSLLRNQFLTERKKAEKQVASLKEALKIQRSQLEKNLLEQKQENSCIQKEMATIELVAQDNHERARRLMKELNQMQYEYTELKKQMANQKDLERRQMEISDAMRTLKSEVKDEIRTSLKNLNQFLPELPADLEAILERNENLEGELESLKENLPFTMNEGPFEEKLNFSQVHIMDEHWRGEALREKLRHREDRLKAQLRHCMSKQAEVLIKGKRQTEGTLHSLRRQVDALGELVTSTSADSASSPSLSQLESSLTEDSQLGQNQEKNASAR

SEQ ID NO: 890163 - protein, 1732 aa, Homo sapiens
MKAQKSGKEQQLDIMNKQYQQLESRLDEILSRIAKETEEIKDLEEQLTEGQIAANEALKKDLEGVISGLQEYLGTIKGQATQAQNECRKLRDEKETLLQRLTEVEQERDQLEIVAMDAENMRKELAELESALQEQHEVNASLQQTQGDLSAYEAELEARLNLRDAEANQLKEELEKVTRLTQLEQSALQAELEKERQALKNALGKAQFSEEKEQENSELHAKLKHLQDDNNLLKQQLKDFQNHLNHVVDGLVRPEEVAARVDELRRKLKLGTGEMNIHSPSDVLGKSLADLQKQFSEILARSKWERDEAQVRERKLQEEMALQQEKLATGQEEFRQACERALEARMNFDKRQHEARIQQMENEIHYLQENLKSMEEIQGLTDLQLQEADEEKERILAQLRELEKKKKLEDAKSQEQVFGLDKELKKLKKAVATSDKLATAELTIAKDQLKSLHGTVMKINQERAEELQEAERFSRKAAQAARDLTRAEAEIELLQNLLRQKGEQFRLEMEKTGVGTGANSQVLEIEKLNETMERQRTEIARLQNVLDLTGSDNKGGFENVLEEIAELRREVSYQNDYISSMADPFKRRGYWYFMPPPPSSKVSSHSSQATKDSGVGLKYSASTPVRKPRPGQQDGKEGSQPPPASGYWVYSPIRSGLHKLFPSRDADSGGDSQEESELDDQEEPPFVPPPGYMMYTVLPDGSPVPQGMALYAPPPPLPNNSRPLTPGTVVYGPPPAGAPMVYGPPPPNFSIPFIPMGVLHCNVPEHHNLENEVSRLEDIMQHLKSKKREERWMRASKRQSEKEMEELHHNIDDLLQEKKSLECEVEELHRTVQKRQQQKDFIDGNVESLMTELEIEKSLKHHEDIVDEIECIEKTLLKRRSELREADRLLAEAESELSCTKEKTKNAVEKFTDAKRSLLQTESDAEELERRAQETAVNLVKADQQLRSLQADAKDLEQHKIKQEEILKEINKIVAAKDSDFQCLSKKKEKLTEELQKLQKDIEMAERNEDHHLQVLKESEVLLQAKADLQEALRLGETEVTEKCNHIREVKSLLEELSFQKGELNVQISERKTQLTLIKQEIEKEEENLQVVLRQMSKHKTELKNILDMLQLENHELQGLKLQHDQRVSELEKTQVAVLEEKLELENLQQISQQQKGEIEWQKQLLERDKREIERMTAESRALQSCVECLSKEKEDLQEKCDIWEKKLAQTKRVLAAAEENSKMEQSNLEKLELNVRKLQQELDQLNRDKLSLHNDISAMQQQLQGKEKREAVNSLQEELANVQDHLNLAKQDLLHTTKHQDVLLSEQTRLQKDISEWANRFEDCQKEEETKQQQLQVLQNEIEENKLKLVQQEMMFQRLQKERESEESKLETSKVTLKEQQHQLEKELTDQKSKLDQVLSKVLAAEERVRTLQEEERWCESLEKTLSQTKRQLSEREQQLVEKSGELLALQKEADSMRADFSLLRNQFLTERKKAEKQVASLKEALKIQRSQLEKNLLEQKQENSCIQKEMATIELVAQDNHERARRLMKELNQMQYEYTELKKQMANQKDLERRQMEISDAMRTLKSEVKDEIRTSLKNLNQFLPELPADLEAILERNENLEGELESLKENLPFTMNEGPFEEKLNFSQVHIMDEHWRGEALREKLRHREDRLKAQLRHCMSKQAEVLIKGKRQTEGTLHSLRRQVDALGELVTSTSADSASSPSLSQLESSLTEDSQLGQNQEKNASAR

SEQ ID NO: 890164 - protein, 1706 aa, Homo sapiens
MKAQKSGKEQQLDIMNKQYQQLESRLDEILSRIAKETEEIKDLEEQLTEGQIAANEALKKDLEGVISGLQEYLGTIKGQATQAQNECRKLRDEKETLLQRLTEVEQERDQLEIVAMDAENMRKELAELESALQEQHEVNASLQQTQGDLSAYEAELEARLNLRDAEANQLKEELEKVTRLTQLEQSALQAELEKERQALKNALGKAQFSEEKEQENSELHAKLKHLQDDNNLLKQQLKDFQNHLNHVVDGLVRPEEVAARVDELRRKLKLGTGEDEMNFDKRQHEARIQQMENEIHYLQENLKSMEEIQGLTDLQLQEADEEKERILAQLRELEKKKKLEDAKSQEQVFGLDKELKKLKKAVATSDKLATAELTIAKDQLKSLHGTVMKINQERAEELQEAERFSRKAAQAARDLTRAEAEIELLQNLLRQKGEQFRLEMEKTGVGTGANSQVLEIEKLNETMERQRTEIARLQNVLDLTGSDNKGGFENVLEEIAELRREVSYQNDYISSMADPFKRRGYWYFMPPPPSSKVSSHSSQATKDSGVGLKYSASTPVRKPRPGQQDGKEGSQPPPASGYWVYSPIRSGLHKLFPSRDADSGGDSQEESELDDQEEPPFVPPPGYMMYTVLPDGSPVPQGMALYAPPPPLPNNSRPLTPGTVVYGPPPAGAPMVYGPPPPNFSIPFIPMGVLHCNVPEHHNLENEVSRLEDIMQHLKSKKREERWMRASKRQSEKEMEELHHNIDDLLQEKKSLECEVEELHRTVQKRQQQKDFIDGNVESLMTELEIEKSLKHHEDIVDEIECIEKTLLKRRSELREADRLLAEAESELSCTKEKTKNAVEKFTDAKRSLLQTESDAEELERRAQETAVNLVKADQQLRSLQADAKDLEQHKIKQEEILKEINKIVAAKDSDFQCLSKKKEKLTEELQKLQKDIEMAERNEDHHLQVLKESEVLLQAKRAELEKLKSQVTSQQQEMAVLDRQLGHKKEELHLLQGSMVQAKADLQEALRLGETEVTEKCNHIREVKSLLEELSFQKGELNVQISERKTQLTLIKQEIEKEEENLQVVLRQMSKHKTELKNILDMLQLENHELQGLKLQHDQRVSELEKTQVAVLEEKLELENLQQISQQQKGEIEWQKQLLERDKREIERMTAESRALQSCVECLSKEKEDLQEKCDIWEKKLAQTKRVLAAAEENSKMEQSNLEKLELNVRKLQQELDQLNRDKLSLHNDISAMQQQLQGKEKREAVNSLQEELANVQDHLNLAKQDLLHTTKHQDVLLSEQTRLQKDISEWANRFEDCQKEEETKQQQLQVLQNEIEENKLKLVQQEMMFQRLQKERESEESKLETSKVTLKEQQHQLEKELTDQKSKLDQVLSKVLAAEERVRTLQEEERWCESLEKTLSQTKRQLSEREQQLVEKSGELLALQKEADSMRADFSLLRNQFLTERKKAEKQVASLKEALKIQRSQLEKNLLEQKQENSCIQKEMATIELVAQDNHERARRLMKELNQMQYEYTELKKQMANQKDLERRQMEISDAMRTLKSEVKDEIRTSLKNLNQFLPELPADLEAILERNENLEGELESLKENLPFTMNEGPFEEKLNFSQVHIMDEHWRGEALREKLRHREDRLKAQLRHCMSKQAEVLIKGKRQTEGTLHSLRRQVDALGELVTSTSADSASSPSLSQLESSLTEDSQLGQNQEKNASAR

SEQ ID NO: 890165 - protein, 1430 aa, Homo sapiens
MNFDKRQHEARIQQMENEIHYLQENLKSMEEIQGLTDLQLQEADEEKERILAQLRELEKKKKLEDAKSQEQVFGLDKELKKLKKAVATSDKLATAELTIAKDQLKSLHGTVMKINQERAEELQEAERFSRKAAQAARDLTRAEAEIELLQNLLRQKGEQFRLEMEKTGVGTGANSQVLEIEKLNETMERQRTEIARLQNVLDLTGSDNKGGFENVLEEIAELRREVSYQNDYISSMADPFKRRGYWYFMPPPPSSKVSSHSSQATKDSGVGLKYSASTPVRKPRPGQQDGKEGSQPPPASGYWVYSPIRSGLHKLFPSRDADSGGDSQEESELDDQEEPPFVPPPGYMMYTVLPDGSPVPQGMALYAPPPPLPNNSRPLTPGTVVYGPPPAGAPMVYGPPPPNFSIPFIPMGVLHCNVPEHHNLENEVSRLEDIMQHLKSKKREERWMRASKRQSEKEMEELHHNIDDLLQEKKSLECEVEELHRTVQKRQQQKDFIDGNVESLMTELEIEKSLKHHEDIVDEIECIEKTLLKRRSELREADRLLAEAESELSCTKEKTKNAVEKFTDAKRSLLQTESDAEELERRAQETAVNLVKADQQLRSLQADAKDLEQHKIKQEEILKEINKIVAAKDSDFQCLSKKKEKLTEELQKLQKDIEMAERNEDHHLQVLKESEVLLQAKRAELEKLKSQVTSQQQEMAVLDRQLGHKKEELHLLQGSMVQAKADLQEALRLGETEVTEKCNHIREVKSLLEELSFQKGELNVQISERKTQLTLIKQEIEKEEENLQVVLRQMSKHKTELKNILDMLQLENHELQGLKLQHDQRVSELEKTQVAVLEEKLELENLQQISQQQKGEIEWQKQLLERDKREIERMTAESRALQSCVECLSKEKEDLQEKCDIWEKKLAQTKRVLAAAEENSKMEQSNLEKLELNVRKLQQELDQLNRDKLSLHNDISAMQQQLQGKEKREAVNSLQEELANVQDHLNLAKQDLLHTTKHQDVLLSEQTRLQKDISEWANRFEDCQKEEETKQQQLQVLQNEIEENKLKLVQQEMMFQRLQKERESEESKLETSKVTLKEQQHQLEKELTDQKSKLDQVLSKVLAAEERVRTLQEEERWCESLEKTLSQTKRQLSEREQQLVEKSGELLALQKEADSMRADFSLLRNQFLTERKKAEKQVASLKEALKIQRSQLEKNLLEQKQENSCIQKEMATIELVAQDNHERARRLMKELNQMQYEYTELKKQMANQKDLERRQMEISDAMRTLKSEVKDEIRTSLKNLNQFLPELPADLEAILERNENLEGELESLKENLPFTMNEGPFEEKLNFSQVHIMDEHWRGEALREKLRHREDRLKAQLRHCMSKQAEVLIKGKRQTEGTLHSLRRQVDALGELVTSTSADSASSPSLSQLESSLTEDSQLGQNQEKNASAR

SEQ ID NO: 890166 - protein, 845 aa, Homo sapiens
MHGKSTGPGGNKAMCFRSLQADAKDLEQHKIKQEEILKEINKIVAAKDSDFQCLSKKKEKLTEELQKLQKDIEMAERNEDHHLQVLKESEVLLQAKRAELEKLKSQVTSQQQEMAVLDRQLGHKKEELHLLQGSMVQAKADLQEALRLGETEVTEKCNHIREVKSLLEELSFQKGELNVQISERKTQLTLIKQEIEKEEENLQVVLRQMSKHKTELKNILDMLQLENHELQGLKLQHDQRVSELEKTQVAVLEEKLELENLQQISQQQKGEIEWQKQLLERDKREIERMTAESRALQSCVECLSKEKEDLQEKCDIWEKKLAQTKRVLAAAEENSKMEQSNLEKLELNVRKLQQELDQLNRDKLSLHNDISAMQQQLQGKEKREAVNSLQEELANVQDHLNLAKQDLLHTTKHQDVLLSEQTRLQKDISEWANRFEDCQKEEETKQQQLQVLQNEIEENKLKLVQQEMMFQRLQKERESEESKLETSKVTLKEQQHQLEKELTDQKSKLDQVLSKVLAAEERVRTLQEEERWCESLEKTLSQTKRQLSEREQQLVEKSGELLALQKEADSMRADFSLLRNQFLTERKKAEKQVASLKEALKIQRSQLEKNLLEQKQENSCIQKEMATIELVAQDNHERARRLMKELNQMQYEYTELKKQMANQKDLERRQMEISDAMRTLKSEVKDEIRTSLKNLNQFLPELPADLEAILERNENLEGELESLKENLPFTMNEGPFEEKLNFSQVHIMDEHWRGEALREKLRHREDRLKAQLRHCMSKQAEVLIKGKRQTEGTLHSLRRQVDALGELVTSTSADSASSPSLSQLESSLTEDSQLGQNQEKNASAR

SEQ ID NO: 890167 - protein, 753 aa, Homo sapiens
MAFVKLTLPFSLIQVTSQQQEMAVLDRQLGHKKEELHLLQGSMVQAKADLQEALRLGETEVTEKCNHIREVKSLLEELSFQKGELNVQISERKTQLTLIKQEIEKEEENLQVVLRQMSKHKTELKNILDMLQLENHELQGLKLQHDQRVSELEKTQVAVLEEKLELENLQQISQQQKGEIEWQKQLLERDKREIERMTAESRALQSCVECLSKEKEDLQEKCDIWEKKLAQTKRVLAAAEENSKMEQSNLEKLELNVRKLQQELDQLNRDKLSLHNDISAMQQQLQGKEKREAVNSLQEELANVQDHLNLAKQDLLHTTKHQDVLLSEQTRLQKDISEWANRFEDCQKEEETKQQQLQVLQNEIEENKLKLVQQEMMFQRLQKERESEESKLETSKVTLKEQQHQLEKELTDQKSKLDQVLSKVLAAEERVRTLQEEERWCESLEKTLSQTKRQLSEREQQLVEKSGELLALQKEADSMRADFSLLRNQFLTERKKAEKQVASLKEALKIQRSQLEKNLLEQKQENSCIQKEMATIELVAQDNHERARRLMKELNQMQYEYTELKKQMANQKDLERRQMEISDAMRTLKSEVKDEIRTSLKNLNQFLPELPADLEAILERNENLEGELESLKENLPFTMNEGPFEEKLNFSQVHIMDEHWRGEALREKLRHREDRLKAQLRHCMSKQAEVLIKGKRQTEGTLHSLRRQVDALGELVTSTSADSASSPSLSQLESSLTEDSQLGQNQEKNASAR

SEQ ID NO: 890168 - protein, 772 aa, Homo sapiens
MAERNEDHHLQVLKESEVLLQAKRAELEKLKSQVTSQQQEMAVLDRQLGHKKEELHLLQGSMVQAKADLQEALRLGETEVTEKCNHIREVKSLLEELSFQKGELNVQISERKTQLTLIKQEIEKEEENLQVVLRQMSKHKTELKNILDMLQLENHELQGLKLQHDQRVSELEKTQVAVLEEKLELENLQQISQQQKGEIEWQKQLLERDKREIERMTAESRALQSCVECLSKEKEDLQEKCDIWEKKLAQTKRVLAAAEENSKMEQSNLEKLELNVRKLQQELDQLNRDKLSLHNDISAMQQQLQGKEKREAVNSLQEELANVQDHLNLAKQDLLHTTKHQDVLLSEQTRLQKDISEWANRFEDCQKEEETKQQQLQVLQNEIEENKLKLVQQEMMFQRLQKERESEESKLETSKVTLKEQQHQLEKELTDQKSKLDQVLSKVLAAEERVRTLQEEERWCESLEKTLSQTKRQLSEREQQLVEKSGELLALQKEADSMRADFSLLRNQFLTERKKAEKQVASLKEALKIQRSQLEKNLLEQKQENSCIQKEMATIELVAQDNHERARRLMKELNQMQYEYTELKKQMANQKDLERRQMEISDAMRTLKSEVKDEIRTSLKNLNQFLPELPADLEAILERNENLEGELESLKENLPFTMNEGPFEEKLNFSQVHIMDEHWRGEALREKLRHREDRLKAQLRHCMSKQAEVLIKGKRQTEGTLHSLRRQVDALGELVTSTSADSASSPSLSQLESSLTEDSQLGQNQEKNASAR

SEQ ID NO: 890169 - protein, 732 aa, Homo sapiens
MAVLDRQLGHKKEELHLLQGSMVQAKADLQEALRLGETEVTEKCNHIREVKSLLEELSFQKGELNVQISERKTQLTLIKQEIEKEEENLQVVLRQMSKHKTELKNILDMLQLENHELQGLKLQHDQRVSELEKTQVAVLEEKLELENLQQISQQQKGEIEWQKQLLERDKREIERMTAESRALQSCVECLSKEKEDLQEKCDIWEKKLAQTKRVLAAAEENSKMEQSNLEKLELNVRKLQQELDQLNRDKLSLHNDISAMQQQLQGKEKREAVNSLQEELANVQDHLNLAKQDLLHTTKHQDVLLSEQTRLQKDISEWANRFEDCQKEEETKQQQLQVLQNEIEENKLKLVQQEMMFQRLQKERESEESKLETSKVTLKEQQHQLEKELTDQKSKLDQVLSKVLAAEERVRTLQEEERWCESLEKTLSQTKRQLSEREQQLVEKSGELLALQKEADSMRADFSLLRNQFLTERKKAEKQVASLKEALKIQRSQLEKNLLEQKQENSCIQKEMATIELVAQDNHERARRLMKELNQMQYEYTELKKQMANQKDLERRQMEISDAMRTLKSEVKDEIRTSLKNLNQFLPELPADLEAILERNENLEGELESLKENLPFTMNEGPFEEKLNFSQVHIMDEHWRGEALREKLRHREDRLKAQLRHCMSKQAEVLIKGKRQTEGTLHSLRRQVDALGELVTSTSADSASSPSLSQLESSLTEDSQLGQNQEKNASAR

SEQ ID NO: 890170 - protein, 750 aa, Homo sapiens
MKAQKSGKEQQLDIMNKQYQQLESRLDEILSRIAKETEEIKDLEEQLTEGQIAANEALKKDLEGVISGLQEYLGTIKGQATQAQNECRKLRDEKETLLQRLTEVEQERDQLEIVAMDAENMRKELAELESALQEQHEVNASLQQTQGDLSAYEAELEARLNLRDAEANQLKEELEKVTRLTQLEQSALQAELEKERQALKNALGKAQFSEEKEQENSELHAKLKHLQDDNNLLKQQLKDFQNHLNHVVDGLVRPEEVAARVDELRRKLKLGTGEMNIHSPSDVLGKSLADLQKQFSEILARSKWERDEAQVRERKLQEEMALQQEKLATGQEEFRQACERALEARMNFDKRQHEARIQQMENEIHYLQENLKSMEEIQGLTDLQLQEADEEKERILAQLRELEKKELTDQKSKLDQVLSKVLAAEERVRTLQEEERWCESLEKTLSQTKRQLSEREQQLVEKSGELLALQKEADSMRADFSLLRNQFLTERKKAEKQVASLKEALKIQRSQLEKNLLEQKQENSCIQKEMATIELVAQDNHERARRLMKELNQMQYEYTELKKQMANQKDLERRQMEISDAMRTLKSEVKDEIRTSLKNLNQFLPELPADLEAILERNENLEGELESLKENLPFTMNEGPFEEKLNFSQVHIMDEHWRGEALREKLRHREDRLKAQLRHCMSKQAEVLIKGKRQTEGTLHSLRRQVDALGELVTSTSADSASSPSLSQLESSLTEDSQLGQNQEKNASAR

SEQ ID NO: 890171 - protein, 557 aa, Homo sapiens
MTAESRALQSCVECLSKEKEDLQEKCDIWEKKLAQTKRVLAAAEENSKMEQSNLEKLELNVRKLQQELDQLNRDKLSLHNDISAMQQQLQGKEKREAVNSLQEELANVQDHLNLAKQDLLHTTKHQDVLLSEQTRLQKDISEWANRFEDCQKEEETKQQQLQVLQNEIEENKLKLVQQEMMFQRLQKERESEESKLETSKVTLKEQQHQLEKELTDQKSKLDQVLSKVLAAEERVRTLQEEERWCESLEKTLSQTKRQLSEREQQLVEKSGELLALQKEADSMRADFSLLRNQFLTERKKAEKQVASLKEALKIQRSQLEKNLLEQKQENSCIQKEMATIELVAQDNHERARRLMKELNQMQYEYTELKKQMANQKDLERRQMEISDAMRTLKSEVKDEIRTSLKNLNQFLPELPADLEAILERNENLEGELESLKENLPFTMNEGPFEEKLNFSQVHIMDEHWRGEALREKLRHREDRLKAQLRHCMSKQAEVLIKGKRQTEGTLHSLRRQVDALGELVTSTSADSASSPSLSQLESSLTEDSQLGQNQEKNASAR

SEQ ID NO: 890172 - protein, 794 aa, Homo sapiens
MKAQKSGKEQQLDIMNKQYQQLESRLDEILSRIAKETEEIKDLEEQLTEGQIAANEALKKDLEGVISGLQEYLGTIKGQATQAQNECRKLRDEKETLLQRLTEVEQERDQLEIVAMDAENMRKELAELESALQEQHEVNASLQQTQGDLSAYEAELEARLNLRDAEANQLKEELEKVTRLTQLEQSALQAELEKERQALKNALGKAQFSEEKEQENSELHAKLKHLQDDNNLLKQQLKDFQNHLNHVVDGLVRPEEVAARVDELRRKLKLGTGEMNIHSPSDVLGKSLADLQKQFSEILARSKWERDEAQVRERKLQEEMALQQEKLATGQEEFRQACERALEARMNFDKRQHEARIQQMENEIHYLQENLKSMEEIQGLTDLQLQEADEEKERILAQLRELEKKKKLEDAKSQEQVFGLDKELKKLKKAVATSDKLATAELTIAKDQLKSLHGTVMKINQERAEELQEAERFSRKAAQAARDLTRAEAEIELLQNLLRQKGEQFRLEMEKTGVGTGANSQVLEIEKLNETMERQRTEIARLQNVLDLTGSDNKGGFENVLEEIAELRREVSYQNDYISSMADPFKRRGYWYFMPPPPSSKVSSHSSQATKDSGVGLKYSASTPVRKPRPGQQDGKEGSQPPPASGYWVYSPIRSGLHKLFPSRDADSGGDSQEESELDDQEEPPFVPPPGYMMYTVLPDGSPVPQGMALYAPPPPLPNNSRPLTPGTVVYGPPPAGAPMVYGPPPPNFSIPFIPMGVLHCNVPEHHNLVSGKTYNSLSTLLPWVTDKVIYLMS

SEQ ID NO: 890173 - protein, 508 aa, Homo sapiens
MKAQKSGKEQQLDIMNKQYQQLESRLDEILSRIAKETEEIKDLEEQLTEGQIAANEALKKDLEGVISGLQEYLGTIKGQATQAQNECRKLRDEKETLLQRLTEVEQERDQLEIVAMDAENMRKELAELESALQEQHEVNASLQQTQGDLSAYEAELEARLNLRDAEANQLKEELEKVTRLTQLEQSALQAELEKERQALKNALGKAQFSEEKEQENSELHAKLKHLQDDNNLLKQQLKDFQNHLNHVVDGLVRPEEVAARVDELRRKLKLGTGEMNIHSPSDVLGKSLADLQKQFSEILARSKWERDEAQVRERKLQEEMALQQEKLATGQEEFRQACERALEARMNFDKRQHEARIQQMENEIHYLQENLKSMEEIQGLTDLQLQEADEEKERILAQLRELEKKKKLEDAKSQEQVFGLDKELKKLKKAVATSDKLATAELTIAKDQLKSLHGTVMKINQERAEVSSHVQNRFPSMMLLSKNMATCIIDLAIDIGYFINHCKVVCFS

SEQ ID NO: 890174 - protein, 409 aa, Homo sapiens
MKAQKSGKEQQLDIMNKQYQQLESRLDEILSRIAKETEEIKDLEEQLTEGQIAANEALKKDLEGVISGLQEYLGTIKGQATQAQNECRKLRDEKETLLQRLTEVEQERDQLEIVAMDAENMRKELAELESALQEQHEVNASLQQTQGDLSAYEAELEARLNLRDAEANQLKEELEKVTRLTQLEQSALQAELEKERQALKNALGKAQFSEEKEQENSELHAKLKHLQDDNNLLKQQLKDFQNHLNHVVDGLVRPEEVAARVDELRRKLKLGTGEMNIHSPSDVLGKSLADLQKQFSEILARSKWERDEAQVRERKLQEEMALQQEKLATGQEEFRQACERALEARMNFDKRQHEARIQQMENEIHYLQENLKSMEEIQGLTDLQLQEADEEKERILAQLRELEKKVGET

SEQ ID NO: 890175 - protein, 386 aa, Homo sapiens
MEELDALLEELERSTLQDSDEYSNPAPLPLDQHSRKETNLDETSEILSIQDNTSPLPAQLVYTTNIQELNVYSEAQEPKESPPPSKTSAAAQLDELMAHLTEMQAKVAVRADAGKKHLPDKQDHKASLDSMLGGLEQELQDLGIATVPKGHCASCQKPIAGKVIHALGQSWHPEHFVCTHCKEEIGSSPFFERSGLAYCPNDYHQLFSPRCAYCAAPILDKVLTAMNQTWHPEHFFCSHCGEVFGAEGFHEKDKKPYCRKDFLAMFSPKCGGCNRPVLENYLSAMDTVWHPECFVCGDCFTSFSTGSFFELDGRPFCELHYHHRRGTLCHGCGQPITGRCISAMGYKFHPEHFVCAFCLTQLSKGIFREQNDKTYCQPCFNKLFPL

SEQ ID NO: 890176 - protein, 391 aa, Homo sapiens
MSTLLISSSDALLEELERSTLQDSDEYSNPAPLPLDQHSRKETNLDETSEILSIQDNTSPLPAQLVYTTNIQELNVYSEAQEPKESPPPSKTSAAAQLDELMAHLTEMQAKVAVRADAGKKHLPDKQDHKASLDSMLGGLEQELQDLGIATVPKGHCASCQKPIAGKVIHALGQSWHPEHFVCTHCKEEIGSSPFFERSGLAYCPNDYHQLFSPRCAYCAAPILDKVLTAMNQTWHPEHFFCSHCGEVFGAEGFHEKDKKPYCRKDFLAMFSPKCGGCNRPVLENYLSAMDTVWHPECFVCGDCFTSFSTGSFFELDGRPFCELHYHHRRGTLCHGCGQPITGRCISAMGYKFHPEHFVCAFCLTQLSKGIFREQNDKTYCQPCFNKLFPL

SEQ ID NO: 890177 - protein, 152 aa, Homo sapiens
TRYRSICLSVLQAGNLVSICQEPEGNSCSWQVTVRNFKAENFTLLTFYLLTFAFFFSLFSLPQDCFTSFSTGSFFELDGRPFCELHYHHRRGTLCHGCGQPITGRCISAMGYKFHPEHFVCAFCLTQLSKGIFREQNDKTYCQPCFNKLFPL

SEQ ID NO: 890178 - protein, 366 aa, Homo sapiens
MPYWRNWNAPPFRTVMNIPTQLLFPWISIPERRLTLMRLRRSFLFRITQVPCREAQEPKESPPPSKTSAAAQLDELMAHLTEMQAKVAVRADAGKKHLPDKQDHKASLDSMLGGLEQELQDLGIATVPKGHCASCQKPIAGKVIHALGQSWHPEHFVCTHCKEEIGSSPFFERSGLAYCPNDYHQLFSPRCAYCAAPILDKVLTAMNQTWHPEHFFCSHCGEVFGAEGFHEKDKKPYCRKDFLAMFSPKCGGCNRPVLENYLSAMDTVWHPECFVCGDCFTSFSTGSFFELDGRPFCELHYHHRRGTLCHGCGQPITGRCISAMGYKFHPEHFVCAFCLTQLSKGIFREQNDKTYCQPCFNKLFPL

SEQ ID NO: 890179 - protein, 256 aa, Homo sapiens
MLGGLEQELQDLGIATVPKGHCASCQKPIAGKVIHALGQSWHPEHFVCTHCKEEIGSSPFFERSGLAYCPNDYHQLFSPRCAYCAAPILDKVLTAMNQTWHPEHFFCSHCGEVFGAEGFHEKDKKPYCRKDFLAMFSPKCGGCNRPVLENYLSAMDTVWHPECFVCGDCFTSFSTGSFFELDGRPFCELHYHHRRGTLCHGCGQPITGRCISAMGYKFHPEHFVCAFCLTQLSKGIFREQNDKTYCQPCFNKLFPL

SEQ ID NO: 890180 - protein, 858 aa, Homo sapiens
SPLPKPEPELEEAPRCQDLPGSAPAPAGTMDSEAFQSARDFLDMNFQSLAMKHMDLKQMELDTAAAKVDELTKQLESLWSDSPAPPGPQAGPPSRPPRYSSSSIPEPFGSRGSPPEGGHRRRRHPVRTIRECPNPTPLQPAVPQGTAVVAAHPALPAAGRLRQPGPRDLAPAPRLRWRRQLPRPCALPADPGQARCRQQGPPTPFDFLGRAGSPRGSPLAEGPQAFFPERGPSPRPPATAYDAPASAFGSSLLGSGGSAFAPPLRAQDDLTLRRRPPKAWNESDLDVAYEKKPSQTASYERLDVFARPASPSLQLLPWRESSLDGLGGTGKDNLTSATLPRNYKVSPLASDRRSDAGSYRRSLGSAGPSGTLPRSWQPVSRIPMPPSSPQPRGAPRQRPIPLSMIFKLQNAFWEHGASRAMLPGSPLFTRAPPPKLQPQPQPQPQPQSQPQPQLPPQPQTQPQTPTPAPQHPQQTWPPVNEGPPKPPTELEPEPEIEGLLTPVLEAGDVDEGPVARPLSPTRLQPALPPEAQSVPELEEVARVLAEIPRPLKRRGSMEQAPAVALPPTHKKQYQQIISRLFHRHGGPGPGGPEPELSPITEGSEARAGPPAPAPPAPIPPPAPSQSSPPEQPQSMEMRSVLRKAGSPRKARRARLNPLVLLLDAALTGELEVVQQAVKEMNDPSQPNEEGITALHNAICGANYSIVDFLITAGANVNSPDSHGWTPLHCAASCNDTVICMALVQHGAAIFATTLSDGATAFEKCDPYREGYADCATYLADVEQSMGLMNSGAVYALWDYSAEFGDELSFREGESVTVLRRDGPEETDWWWAALHGQEGYVPRNYFGLFPRVKPQRSKV

SEQ ID NO: 890181 - protein, 403 aa, Homo sapiens
MPWKLWRGSVGCLPGDLSSDGLLFRLGPPKPPTELEPEPEIEGLLTPVLEAGDVDEGPVARPLSPTRLQPALPPEAQSVPELEEVARVLAEIPRPLKRRGSMEQAPAVALPPTHKKQYQQIISRLFHRHGGPGPGGPEPELSPITEGSEARAGPPAPAPPAPIPPPAPSQSSPPEQPQSMEMRSVLRKAGSPRKARRARLNPLVLLLDAALTGELEVVQQAVKEMNDPSQPNEEGITALHNAICGANYSIVDFLITAGANVNSPDSHGWTPLHCAASCNDTVICMALVQHGAAIFATTLSDGATAFEKCDPYREGYADCATYLADVEQSMGLMNSGAVYALWDYSAEFGDELSFREGESVTVLRRDGPEETDWWWAALHGQEGYVPRNYFGLFPRVKPQRSKV

SEQ ID NO: 890182 - protein, 858 aa, Homo sapiens; identical to SEQ ID NO: 890180

SEQ ID NO: 890183 - protein, 189 aa, Homo sapiens
MDRHGQHEEGMNDPSQPNEEGITALHNAICGANYSIVDFLITAGANVNSPDSHGWTPLHCAASCNDTVICMALVQHGAAIFATTLSDGATAFEKCDPYREGYADCATYLADVEQSMGLMNSGAVYALWDYSAEFGDELSFREGESVTVLRRDGPEETDWWWAALHGQEGYVPRNYFGLFPRVKPQRSKV

SEQ ID NO: 890184 - protein, 57 aa, Homo sapiens
MDRARYLIFKNPEEFSHVDFTVNLNRSWKKDFKHSPVLWNKYTFFWTYTLSVSMYHN

SEQ ID NO: 890185 - protein, 92 aa, Homo sapiens
VGGNADLGECAAGLGLGQLPWEARCLLEGRWSVLLNHKGPAESWSLCGLASRVHLMLVDCSGWVPKVFKVVSSPTAQPVVSNVLPLQMCLDR

SEQ ID NO: 890186 - protein, 164 aa, Homo sapiens
RKEFVEAVRVRYVAFRYRTPRAVCLRLWSCRREVIMSGRGKQGGKVRAKAKSRSSRAGLQFPVGRVHRLLRKGNYAERVGAGAPVYLAAVLEYLTAEILELAGNAARDNKKTRIIPRHLQLAIRNDEELNKLLGKVTIAQGGVLPNIQAVLLPKKTESQKTKSK

SEQ ID NO: 890187 - protein, 164 aa, Homo sapiens; identical to SEQ ID NO: 890186

SEQ ID NO: 890188 - protein, 205 aa, Homo sapiens
RKEFVEAVRVRYVAFRYRTPRAVCLRLWSCRREVIMSGRGKQGGKVRAKAKSRSSRAGLQFPVGRVHRLLRKGNYAERVGAGAPVYLAAVLEYLTAEILELAGNAARDNKKTRIIPRHLQLAIRNDEELNKLLGKVTIAQGGVLPNIQAVLASLSCQFVSTQDQVLGRYRRIELSSGQEVSAAIFFKKWSNFPSWKGGSDGTMST

SEQ ID NO: 890189 - protein, 164 aa, Homo sapiens; identical to SEQ ID NO: 890186

SEQ ID NO: 890190 - protein, 164 aa, Homo sapiens; identical to SEQ ID NO: 890186

SEQ ID NO: 890191 - protein, 935 aa, Homo sapiens
NQFVSLGSMCFPEAVLLSDERNILSNVDDILAATAAACGVTPTDFSKSTSNETMQAVEDGDSKSHFQQSLDVRHVTSDFNSMTATVGKPQNINDTSLNGNQVTVNLSPVPALQSKMTLDQQHIETPGQNIPTKVTSAVVGPSHEVQEQSSGPFKKQSATNLESEEDSEAPVDSTLNNNRNQEFVSSSRSISGESATSESEFTLGGDDSGVSMNPARSALALLAMAQSGDAVSVKIEEENQDLMHFNLQKKRAKGKGQVKEEDNSNQKQLKRPAQGKRQNPRGTDIYLPYTPPSSESCHDGYQHQEKMRQKIKEVEEKQPEVKTGFIASFLDFLKSGPKQQFSTLAVRMPNRTRRPGTQMVRTFCPPPLPKPSSTTPTPLVSETGGNSPSDKVDNELKNLEHLSSFSSDEDDPGYSQDAYKSVSTPLTTLDATSDKKKKTEALQVATTSPTANTTGTATTSSTTVGAVKQEPLHSTSYAVNILENISSSESSKPIELDGLPSDQFAKGQDTVAIEGFTDEEDTESGGEGQYRERDEFVVKIEDIETFKEALKTGKEPPAIWKVQKALLQKFVPEIRDGQREFAATNSYLGYFGDAKSKYKRIYVKFIENANKKEYVRVCSKKPRNKPSQTIRTVQAKPSSSSKTSDPLASKTTTTKAPSVKPKVKQPKVKAEPPPKKRKKWKEEFSSSQSDSSPEIHTSSSDDEEFEPPAPFVTRFLNTRAMKETFKSYMELLVSIALDPDTMQALEKSNDELLLPHMKKIDGMLNDNRKRLLLNLHLDQSFKNALESFPELTIITRDSKAKSGGTAISKIKMNGKAYNKKTLRTSKTTTKSAQEFAVDPEKIQLYSLYHSLHHYKYHVYLICKDEVLSSHLLKKNVFQNVKETLAIVFWSVLKRVVKYMCVCILSMYSVNNDLIYCSESLCYVLCSDLPEPHHLL

SEQ ID NO: 890192 - protein, 911 aa, Homo sapiens
NQFVSLGSMCFPEAVLLSDERNILSNVDDILAATAAACGVTPTDFSKSTSNETMQAVEDGDSKSHFQQSLDVRHVTSDFNSMTATVGKPQNINDTSLNGNQVTVNLSPVPALQSKMTLDQQHIETPGQNIPTKVTSAVVGPSHEVQEQSSGPFKKQSATNLESEEDSEAPVDSTLNNNRNQEFVSSSRSISGESATSESEFTLGGDDSGVSMNPARSALALLAMAQSGDAVSVKIEEENQDLMHFNLQKKRAKGKGQVKEEDNSNQKQLKRPAQGKRQNPRGTDIYLPYTPPSSESCHDGYQHQEKMRQKIKEVEEKQPEVKTGFIASFLDFLKSGPKQQFSTLAVRMPNRTRRPGTQMVRTFCPPPLPKPSSTTPTPLVSETGGNSPSDKVDNELKNLEHLSSFSSDEDDPGYSQDAYKSVSTPLTTLDATSDKKKKTEALQVATTSPTANTTGTATTSSTTVGAVKQEPLHSTSYAVNILENISSSESSKPIELDGLPSDQFAKGQDTVAIEGFTDEEDTESGGEGQYRERDEFVVKIEDIETFKEALKTGKEPPAIWKVQKALLQKFVPEIRDGQREFAATNSYLGYFGDAKSKYKRIYVKFIENANKKEYVRVCSKKPRNKPSQTIRTVQAKPSSSSKTSDPLASKTTTTKAPSVKPKVKQPKVKAEPPPKKRKKWKEEFSSSQSDSSPEIHTSSSDDEEFEPPAPFVTRFLNTRAMKETFKSYMELLVSIALDPDTMQALEKSNDELLLPHMKKIDGMLNDNRKRLLLNLHLDQSFKNALESFPELTIITRDSKAKSGGTAISKIKMNGKAYNKKTLRTSKTTTKSAQEFAVDPEKIQLYSLYHSLHHYKYHVYLICKDEISSVQKKNEDLGQEEIVQLCMKNVKWVEDLFEKFGELLNHVQQKCS

SEQ ID NO: 890193 - protein, 633 aa, Homo sapiens
MPETSHLIDLPTCELNKLEEIADLVTSVLSSPIRREKLALALENEGYIKKLLQLFQACENLENTEGLHHLYEIIRGILFLNKATLFEVMFSDECIMDVVGCLEYDPALAQPKRHREFLTKTAKFKEVIPITDSELRQKIHQTYRVQYIQDIILPTPSVFEENFLSTLTSFIFFNKVEIVSMLQEDEKFLSEVFAQLTDEATDDDKRRELVNFFKEFCAFSQTLQPQNRDAFFKTLAKLGILPALEIVMGMDDLQVRSAATDIFSYLVEFSPSMVREFVMQEAQQSDDDILLINVVIEQMICDTDPELGGAVQLMGLLRTLIDPENMLATTNKTEKSEFLNFFYNHCMHVLTAPLLTNTSEDKCEKDNIVGSNKNNTICPGALRFMRRIIGLKDEFYNRYITKGNLFEPVINALLDNGTRYNLLNSAVIELFEFIRVEDIKSLTAHIVENFYKALESIEYVQTFKGLKTKYEQEKDRQNQKLNSNRFRRDAKALEEDEEMWFNEDEEEEGKAVVAPVEKPKPEDDFPDNYEKFMETKKAKESEDKENLPKRTSPGGFKFTFSHSASAANGTNSKSVVAQIPPATSNGSSSKTTNLPTSVTATKGSLVGLVDYPDDEEEDEEEESSPRKRPRLGS

SEQ ID NO: 890194 - protein, 963 aa, Homo sapiens
MKKRKAERVGLQDGGSVVVTAAAGEQASPGGQRDGRVGVCAGEVRGNGASGRRGLSGSCHPFSRLNLWSHGEFGPLRSRRRRHRHYCLYRLLRVRSADEVSEEAAARAVETAATMSDTRRRVKVYTLNEDRQWDDRGTGHVSSTYVEELKGMSLLVRAESDGSLLLESKINPNTAYQKQQDTLIVWSEAENYDLALSFQEKAGCDEIWEKICQVQGKDPSVEVTQDLIDESEEERFEEMPETSHLIDLPTCELNKLEEIADLVTSVLSSPIRREKLALALENEGYIKKLLQLFQACENLENTEGLHHLYEIIRGILFLNKATLFEVMFSDECIMDVVGCLEYDPALAQPKRHREFLTKTAKFKEVIPITDSELRQKIHQTYRVQYIQDIILPTPSVFEENFLSTLTSFIFFNKVEIVSMLQEDEKFLSEVFAQLTDEATDDDKRRELVNFFKEFCAFSQTLQPQNRDAFFKTLAKLGILPALEIVMGMDDLQVRSAATDIFSYLVEFSPSMVREFVMQEAQQSDDDILLINVVIEQMICDTDPELGGAVQLMGLLRTLIDPENMLATTNKTEKSEFLNFFYNHCMHVLTAPLLTNTSEDKCEKDFFLKHYRYSWSFVCTPSHSHSHSTPSSSISQDNIVGSNKNNTICPDNYQTAQLLALILELLTFCVEHHTYHIKNYIMNKDLLRRVLVLMNSKHTFLALCALRFMRRIIGLKDEFYNRYITKGNLFEPVINALLDNGTRYNLLNSAVIELFEFIRVEDIKSLTAHIVENFYKALESIEYVQTFKGLKTKYEQEKDRQNQKLNSVPSILRSNRFRRDAKALEEDEEMWFNEDEEEEGKAVVAPVEKPKPEDDFPDNYEKFMETKKAKESEDKENLPKRTSPGGFKFTFSHSASAANGTNSKSVVAQIPPATSNGSSSKTTNLPTSVTATKGSLVGLVDYPDDEEEDEEEESSPRKRPRLGS

SEQ ID NO: 890195 - protein, 956 aa, Homo sapiens
MKKRKAERVGLQDGGSVVVTAAAGEQASPGGQRDGRVGVCAGEVRGNGASGRRGLSGSCHPFSRLNLWSHGEFGPLRSRRRRHRHYCLYRLLRVRSADEVSEEAAARAVETAATMSDTRRRVKVYTLNEDRQWDDRGTGHVSSTYVEELKGMSLLVRAESDGSLLLESKINPNTAYQKQQDTLIVWSEAENYDLALSFQEKAGCDEIWEKICQVQGKDPSVEVTQDLIDESEEERFEEMPETSHLIDLPTCELNKLEEIADLVTSVLSSPIRREKLALALENEGYIKKLLQLFQACENLENTEGLHHLYEIIRGILFLNKATLFEVMFSDECIMDVVGCLEYDPALAQPKRHREFLTKTAKFKEVIPITDSELRQKIHQTYRVQYIQDIILPTPSVFEENFLSTLTSFIFFNKVEIVSMLQEDEKFLSEVFAQLTDEATDDDKRRELVNFFKEFCAFSQTLQPQNRDAFFKTLAKLGILPALEIVMGMDDLQVRSAATDIFSYLVEFSPSMVREFVMQEAQQSDDDILLINVVIEQMICDTDPELGGAVQLMGLLRTLIDPENMLATTNKTEKSEFLNFFYNHCMHVLTAPLLTNTSEDKCEKDFFLKHYRYSWSFVCTPSHSHSHSTPSSSISQDNIVGSNKNNTICPDNYQTAQLLALILELLTFCVEHHTYHIKNYIMNKDLLRRVLVLMNSKHTFLALCALRFMRRIIGLKDEFYNRYITKGNLFEPVINALLDNGTRYNLLNSAVIELFEFIRVEDIKSLTAHIVENFYKALESIEYVQTFKGLKTKYEQEKDRQNQKLNSNRFRRDAKALEEDEEMWFNEDEEEEGKAVVAPVEKPKPEDDFPDNYEKFMETKKAKESEDKENLPKRTSPGGFKFTFSHSASAANGTNSKSVVAQIPPATSNGSSSKTTNLPTSVTATKGSLVGLVDYPDDEEEDEEEESSPRKRPRLGS

SEQ ID NO: 890196 - protein, 931 aa, Homo sapiens
MKKRKAERVGLQDGGSVVVTAAAGEQASPGGQRDGRVGVCAGEVRGNGASGRRGLSGSCHPFSRLNLWSHGEFGPLRSRRRRHRHYCLYRLLRVRSADEVSEEAAARAVETAATMSDTRRRVKVYTLNEDRQWDDRGTGHVSSTYVEELKGMSLLVRAESDGSLLLESKINPNTAYQKQQDTLIVWSEAENYDLALSFQEKAGCDEIWEKICQVQGKDPSVEVTQDLIDESEEERFEEMPETSHLIDLPTCELNKLEEIADLVTSVLSSPIRREKLALALENEGYIKKLLQLFQACENLENTEGLHHLYEIIRGILFLNKATLFEVMFSDECIMDVVGCLEYDPALAQPKRHREFLTKTAKFKEVIPITDSELRQKIHQTYRVQYIQDIILPTPSVFEENFLSTLTSFIFFNKVEIVSMLQEDEKFLSEVFAQLTDEATDDDKRRELVNFFKEFCAFSQTLQPQNRDAFFKTLAKLGILPALEIVMGMDDLQVRSAATDIFSYLVEFSPSMVREFVMQEAQQSDDDILLINVVIEQMICDTDPELGGAVQLMGLLRTLIDPENMLATTNKTEKSEFLNFFYNHCMHVLTAPLLTNTSEDKCEKDNIVGSNKNNTICPDNYQTAQLLALILELLTFCVEHHTYHIKNYIMNKDLLRRVLVLMNSKHTFLALCALRFMRRIIGLKDEFYNRYITKGNLFEPVINALLDNGTRYNLLNSAVIELFEFIRVEDIKSLTAHIVENFYKALESIEYVQTFKGLKTKYEQEKDRQNQKLNSVPSILRSNRFRRDAKALEEDEEMWFNEDEEEEGKAVVAPVEKPKPEDDFPDNYEKFMETKKAKESEDKENLPKRTSPGGFKFTFSHSASAANGTNSKSVVAQIPPATSNGSSSKTTNLPTSVTATKGSLVGLVDYPDDEEEDEEEESSPRKRPRLGS

SEQ ID NO: 890197 - protein, 977 aa, Homo sapiens
MAVSVVLNVSEDRSIRCSCVGTYHDDRLGCVVTACMQVEKSDTGGRYTRTLDYVHIKIAHHWYDPRMRSTVTGESYAKHDRCNSRLSSLKTLTPRALRHYCLYRLLRVRSADEVSEEAAARAVETAATMSDTRRRVKVYTLNEDRQWDDRGTGHVSSTYVEELKGMSLLVRAESDGSLLLESKINPNTAYQKQQDTLIVWSEAENYDLALSFQEKAGCDEIWEKICQVQGKDPSVEVTQDLIDESEEERFEEMPETSHLIDLPTCELNKLEEIADLVTSVLSSPIRREKLALALENEGYIKKLLQLFQACENLENTEGLHHLYEIIRGILFLNKATLFEVMFSDECIMDVVGCLEYDPALAQPKRHREFLTKTAKFKEVIPITDSELRQKIHQTYRVQYIQDIILPTPSVFEENFLSTLTSFIFFNKVEIVSMLQEDEKFLSEVFAQLTDEATDDDKRRELVNFFKEFCAFSQTLQPQNRDAFFKTLAKLGILPALEIVMGMDDLQVRSAATDIFSYLVEFSPSMVREFVMQEAQQSDDDILLINVVIEQMICDTDPELGGAVQLMGLLRTLIDPENMLATTNKTEKSEFLNFFYNHCMHVLTAPLLTNTSEDKCEKDFFLKHYRYSWSFVCTPSHSHSHSTPSSSISQDNIVGSNKNNTICPDNYQTAQLLALILELLTFCVEHHTYHIKNYIMNKDLLRRVLVLMNSKHTFLALCALRFMRRIIGLKDEFYNRYITKGNLFEPVINALLDNGTRYNLLNSAVIELFEFIRVEDIKSLTAHIVENFYKALESIEYVQTFKGLKTKYEQEKDRQNQKLNSVPSILRSNRFRRDAKALEEDEEMWFNEDEEEEGKAVVAPVEKPKPEDDFPDNYEKFMETKKAKESEDKENLPKRTSPGGFKFTFSHSASAANGTNSKSVVAQIPPATSNGSSSKTTNLPTSVTATKGSLVGLVDYPDDEEEDEEEESSPRKRPRLGS

SEQ ID NO: 890198 - protein, 723 aa, Homo sapiens
MKKRKAERVGLQDGGSVVVTAAAGEQASPGGQRDGRVGVCAGEVRGNGASGRRGLSGSCHPFSRLNLWSHGEFGPLRSRRRRHRHYCLYRLLRVRSADEVSEEAAARAVETAATMSDTRRRVKVYTLNEDRQWDDRGTGHVSSTYVEELKGMSLLVRAESDGSLLLESKINPNTAYQKQQDTLIVWSEAENYDLALSFQEKAGCDEIWEKICQEDEKFLSEVFAQLTDEATDDDKRRELVNFFKEFCAFSQTLQPQNRDAFFKTLAKLGILPALEIVMGMDDLQVRSAATDIFSYLVEFSPSMVREFVMQEAQQSDDDILLINVVIEQMICDTDPELGGAVQLMGLLRTLIDPENMLATTNKTEKSEFLNFFYNHCMHVLTAPLLTNTSEDKCEKDNIVGSNKNNTICPDNYQTAQLLALILELLTFCVEHHTYHIKNYIMNKDLLRRVLVLMNSKHTFLALCALRFMRRIIGLKDEFYNRYITKGNLFEPVINALLDNGTRYNLLNSAVIELFEFIRVEDIKSLTAHIVENFYKALESIEYVQTFKGLKTKYEQEKDRQNQKLNSVPSILRSNRFRRDAKALEEDEEMWFNEDEEEEGKAVVAPVEKPKPEDDFPDNYEKFMETKKAKESEDKENLPKRTSPGGFKFTFSHSASAANGTNSKSVVAQIPPATSNGSSSKTTNLPTSVTATKGSLVGLVDYPDDEEEDEEEESSPRKRPRLGS

SEQ ID NO: 890199 - protein, 512 aa, Homo sapiens
MQEDEKFLSEVFAQLTDEATDDDKRRELVNFFKEFCAFSQTLQPQNRDAFFKTLAKLGILPALEIVMGMDDLQVRSAATDIFSYLVEFSPSMVREFVMQEAQQSDDDILLINVVIEQMICDTDPELGGAVQLMGLLRTLIDPENMLATTNKTEKSEFLNFFYNHCMHVLTAPLLTNTSEDKCEKDNIVGSNKNNTICPDNYQTAQLLALILELLTFCVEHHTYHIKNYIMNKDLLRRVLVLMNSKHTFLALCALRFMRRIIGLKDEFYNRYITKGNLFEPVINALLDNGTRYNLLNSAVIELFEFIRVEDIKSLTAHIVENFYKALESIEYVQTFKGLKTKYEQEKDRQNQKLNSVPSILRSNRFRRDAKALEEDEEMWFNEDEEEEGKAVVAPVEKPKPEDDFPDNYEKFMETKKAKESEDKENLPKRTSPGGFKFTFSHSASAANGTNSKSVVAQIPPATSNGSSSKTTNLPTSVTATKGSLVGLVDYPDDEEEDEEEESSPRKRPRLGS

SEQ ID NO: 890200 - protein, 878 aa, Homo sapiens
MKKRKAERVGLQDGGSVVVTAAAGEQASPGGQRDGRVGVCAGEVRGNGASGRRGLSGSCHPFSRLNLWSHGEFGPLRSRRRRHRHYCLYRLLRVRSADEVSEEAAARAVETAATMSDTRRRVKVYTLNEDRQWDDRGTGHVSSTYVEELKGMSLLVRAESDGSLLLESKINPNTAYQKQQDTLIVWSEAENYDLALSFQEKAGCDEIWEKICQVQGKDPSVEVTQDLIDESEEERFEEMPETSHLIDLPTCELNKLEEIADLVTSVLSSPIRREKLALALENEGYIKKLLQLFQACENLENTEGLHHLYEIIRGILFLNKATLFEVMFSDECIMDVVGCLEYDPALAQPKRHREFLTKTAKFKEVIPITDSELRQKIHQTYRVQYIQDIILPTPSVFEENFLSTLTSFIFFNKVEIVSMLQEDEKFLSEVFAQLTDEATDDDKRRELVNFFKEFCAFSQTLQPQNRDAFFKTLAKLGILPALEIVMGMDDLQVRSAATDIFSYLVEFSPSMVREFVMQEAQQSDDDILLINVVIEQMICDTDPELGGAVQLMGLLRTLIDPENMLATTNKTEKSEFLNFFYNHCMHVLTAPLLTNTSEDKCEKDNIVGSNKNNTICPGALRFMRRIIGLKDEFYNRYITKGNLFEPVINALLDNGTRYNLLNSAVIELFEFIRVEDIKSLTAHIVENFYKALESIEYVQTFKGLKTKYEQEKDRQNQKLNSVPSILRSNRFRRDAKALEEDEEMWFNEDEEEEGKAVVAPVEKPKPEDDFPDNYEKFMETKKAKESEDKENLPKRTSPGGFKFTFSHSASAANGTNSKSVVAQIPPATSNGSSSKTTNLPTSVTATKGSLVGLVDYPDDEEEDEEEESSPRKRPRLGS

SEQ ID NO: 890201 - protein, 956 aa, Homo sapiens; identical to SEQ ID NO: 890195

SEQ ID NO: 890202 - protein, 205 aa, Homo sapiens
  misc_feature (18)..(18): Xaa can be any naturally occurring amino acid
YVQTSKDLSVFFLLIFSXSNAFECLNIFKGLKTKYEQEKDRQNQKLNSVPSILRSNRFRRDAKALEEDEEMWFNEDEEEEGKAVVAPVEKPKPEDDFPDNYEKFMETKKAKESEDKENLPKRTSPGGFKFTFSHSASAANGTNSKSVVAQIPPATSNGSSSKTTNLPTSVTATKGSLVGLVDYPDDEEEDEEEESSPRKRPRLGS

SEQ ID NO: 890203 - protein, 956 aa, Homo sapiens; identical to SEQ ID NO: 890195

SEQ ID NO: 890204 - protein, 956 aa, Homo sapiens; identical to SEQ ID NO: 890195

SEQ ID NO: 890205 - protein, 931 aa, Homo sapiens; identical to SEQ ID NO: 890196

SEQ ID NO: 890206 - protein, 865 aa, Homo sapiens
  misc_feature (862)..(862): Xaa can be any naturally occurring amino acid
MKKRKAERVGLQDGGSVVVTAAAGEQASPGGQRDGRVGVCAGEVRGNGASGRRGLSGSCHPFSRLNLWSHGEFGPLRSRRRRHRHYCLYRLLRVRSADEVSEEAAARAVETAATMSDTRRRVKVYTLNEDRQWDDRGTGHVSSTYVEELKGMSLLVRAESDGSLLLESKINPNTAYQKQQDTLIVWSEAENYDLALSFQEKAGCDEIWEKICQVQGKDPSVEVTQDLIDESEEERFEEMPETSHLIDLPTCELNKLEEIADLVTSVLSSPIRREKLALALENEGYIKKLLQLFQACENLENTEGLHHLYEIIRGILFLNKATLFEVMFSDECIMDVVGCLEYDPALAQPKRHREFLTKTAKFKEVIPITDSELRQKIHQTYRVQYIQDIILPTPSVFEENFLSTLTSFIFFNKVEIVSMLQEDEKFLSEVFAQLTDEATDDDKRRELVNFFKEFCAFSQTLQPQNRDAFFKTLAKLGILPALEIVMGMDDLQVRSAATDIFSYLVEFSPSMVREFVMQEAQQSDDDILLINVVIEQMICDTDPELGGAVQLMGLLRTLIDPENMLATTNKTEKSEFLNFFYNHCMHVLTAPLLTNTSEDKCEKDFFLKHYRYSWSFVCTPSHSHSHSTPSSSISQDNIVGSNKNNTICPDNYQTAQLLALILELLTFCVEHHTYHIKNYIMNKDLLRRVLVLMNSKHTFLALCALRFMRRIIGLKDEFYNRYITKGNLFEPVINALLDNGTRYNLLNSAVIELFEFIRVEDIKSLTAHIVENFYKALESIEYVQTFKGLKTKYEQEKDRQNQKLNSVPSILRSNRFRRDAKALEEDEEMWFNEDEEEEGKSIFWLRFFHWCHNCFSFPLPAXTTH

SEQ ID NO: 890207 - protein, 676 aa, Homo sapiens
MKKRKAERVGLQDGGSVVVTAAAGEQASPGGQRDGRVGVCAGEVRGNGASGRRGLSGSCHPFSRLNLWSHGEFGPLRSRRRRHRHYCLYRLLRVRSADEVSEEAAARAVETAATMSDTRRRVKVYTLNEDRQWDDRGTGHVSSTYVEELKGMSLLVRAESDGSLLLESKINPNTAYQKQQDTLIVWSEAENYDLALSFQEKAGCDEIWEKICQVQGKDPSVEVTQDLIDESEEERFEEMPETSHLIDLPTCELNKLEEIADLVTSVLSSPIRREKLALALENEGYIKKLLQLFQACENLENTEGLHHLYEIIRGILFLNKATLFEVMFSDECIMDVVGCLEYDPALAQPKRHREFLTKTAKFKEVIPITDSELRQKIHQTYRVQYIQDIILPTPSVFEENFLSTLTSFIFFNKVEIVSMLQEDEKFLSEVFAQLTDEATDDDKRRELVNFFKEFCAFSQTLQPQNRDAFFKTLAKLGILPALEIVMGMDDLQVRSAATDIFSYLVEFSPSMVREFVMQEAQQSDDDILLINVVIEQMICDTDPELGGAVQLMGLLRTLIDPENMLATTNKTEKSEFLNFFYNHCMHVLTAPLLTNTSEDKCEKDNIVGSNKNNTICPDNYQTAQLLALILELLTFCVEHHTYHIKNYIMNKDLLRRVLVLMNSKHTFLALCKYKMF

SEQ ID NO: 890208 - protein, 188 aa, Homo sapiens
MKKRKAERVGLQDGGSVVVTAAAGEQASPGGQRDGRVGVCAGEVRGNGASGRRGLSGSCHPFSRLNLWSHGEFGPLRSRRRRHRHYCLYRLLRVRSADEVSEEAAARAVETAATMSDTRRRVKVYTLNEDRQWDDRGTGHVSSTYVEELKGMSLLVRAESDGSLLLESKINPNTAYQKQQASSCLSLI

SEQ ID NO: 890209 - protein, 218 aa, Homo sapiens
MKKRKAERVGLQDGGSVVVTAAAGEQASPGGQRDGRVGVCAGEVRGNGASGRRGLSGSCHPFSRLNLWSHGEFGPLRSRRRRHRHYCLYRLLRVRSADEVSEEAAARAVETAATMSDTRRRVKVYTLNEDRQWDDRGTGHVSSTYVEELKGMSLLVRAESDGSLLLESKINPNTAYQKQQDTLIVWSEAENYDLALSFQEKAGCDEIWEKICQVSFFL

SEQ ID NO: 890210 - protein, 221 aa, Homo sapiens
GATQVSAQRAYPGSTGATAPRRERAKFLGRAPSLPGCPPPPGAWVPGAVAAAASSGQAAGGGGGTGLRKRGHGAQRVGEGRTGRPGGRPLPPEDPRAGLGRGGAARAEAPQMSQACREGLAGPPSLPALRRPTPGGWRRGADASVRCPRILPELPSVRWVDAGLGDPRVERCEGASCFPHHLRRFEEALLRLGVWIGRQWELQGGTLEGLTLPRSSLPRKG

SEQ ID NO: 890211 - protein, 309 aa, Homo sapiens
MATELQCPDSMPCHNQQVNSASTPSPEQLRPGDLILDHAGGNRASRAKVILLTGYAHSSLPAELDSGACGGSSLNSEGNSGSGDSSSYDAPAGNSFLEDCELSRQIGAQLKLLPMNDQIRELQTIIRDKTASRGDFMFSADRLIRLVVEEGLNQLPYKECMVTTPTGYKYEGVKFEKGNCGVSIMRSGEAMEQGLRDCCRSIRIGKILIQSDEETQRAKVYYAKFPPDIYRRKVLLMYPILSTGNTVIEAVKVLIEHGVQPSVIILLSLFSTPHGAKSIIQEFPEITILTTEVHPVAPTHFGQKYFGTD

SEQ ID NO: 890212 - protein, 328 aa, Homo sapiens
MATELQCPDSMPCHNQQVNSASTPSPEQLRPGDLILDHAGGNRASRAKVILLTGYAHSSLPAELDSGACGGSSLNSEGNSGSGDSSSYDAPAGNSFLEDCELSRQIGAQLKLLPMNDQIRELQTIIRDKTASRGDFMFSADRLVLPEDLFQKSIDNSCSVFIIRLVVEEGLNQLPYKECMVTTPTGYKYEGVKFEKGNCGVSIMRSGEAMEQGLRDCCRSIRIGKILIQSDEETQRAKVYYAKFPPDIYRRKVLLMYPILSTGNTVIEAVKVLIEHGVQPSVIILLSLFSTPHGAKSIIQEFPEITILTTEVHPVAPTHFGQKYFGTD

SEQ ID NO: 890213 - protein, 198 aa, Homo sapiens
VKGLRDSVLGLGKLWRLGTASRGDFMFSADRLIRLVVEEGLNQLPYKECMVTTPTGYKYEGVKFEKGNCGVSIMRSGEAMEQGLRDCCRSIRIGKILIQSDEETQRAKVYYAKFPPDIYRRKVLLMYPILSTGNTVIEAVKVLIEHGVQPSVIILLSLFSTPHGAKSIIQEFPEITILTTEVHPVAPTHFGQKYFGTD

SEQ ID NO: 890214 - protein, 281 aa, Homo sapiens
MATELQCPDSMPCHNQQVNSASTPSPEQLRPGDLILDHAGGNRASRAKVILLTGYAHSSLPAELDSGACGGSSLNSEGNSGSGDSSSYDAPAGNSFLEDCELSRQIGAQLKLLPMNDQIRELQTIIRDKTASRGDFMFSADRLIRLVVEEGLNQLPYKECMVTTPTGYKYEGVKFEKGNCGVSIMRSGEAMEQGLRDCCRSIRIGKILIQSDEETQRAKVYYAKFPPDIYRRKVLLMYPILSTGNTVIEAVKVLIEHGVQPSVIILLSLFSTPHGEFSMRQ

SEQ ID NO: 890215 - protein, 149 aa, Homo sapiens
MATELQCPDSMPCHNQQVNSASTPSPEQLRPGDLILDHAGGNRASRAKVILLTGYAHSSLPAELDSGACGGSSLNSEGNSGSGDSSSYDAPAGNSFLEDCELSRQIGAQLKLLPMNDQIRELQTIIRDKTASRGDFMFSADRLGTSMKE

SEQ ID NO: 890216 - protein, 557 aa, Homo sapiens
MESERSKRMGNACIPLKRIAYFLCLLSALLLTEGKKPAKPKCPAVCTCTKDNALCENARSIPRTVPPDVISLSFVRSGFTEISEGSFLFTPSLQLLLFTSNSFDVISDDAFIGLPHLEYLFIENNNIKSISRHTFRGLKSLIHLSLANNNLQTLPKDIFKGLDSLTNVDLRGNSFNCDCKLKWLVEWLGHTNATVEDIYCEGPPEYKKRKINSLSSKDFDCIITEFAKSQDLPYQSLSIDTFSYLNDEYVVIAQPFTGKCIFLEWDHVEKTFRNYDNITGTSTVVCKPIVIETQLYVIVAQLFGGSHIYKRDSFANKFIKIQDIEILKIRKPNDIETFKIENNWYFVVADSSKAGFTTIYKWNGNGFYSHQSLHAWYRDTDVEYLEIVRTPQTLRTPHLILSSSSQRPVIYQWNKATQLFTNQTDIPNMEDVYAVKHFSVKGDVYICLTRFIGDSKVMKWGGSSFQDIQRMPSRGSMVFQPLQINNYQYAILGSDYSFTQVYNWDAEKAKFVKFQELNVQAPRSFTHVSINKRNFLFASSFKGNTQIYKHVIVDLSA

SEQ ID NO: 890217 - protein, 195 aa, Homo sapiens
MESERSKRMGNACIPLKRIAYFLCLLSALLLTEGKKPAKPKCPAVCTCTKDNALCENARSIPRTVPPDVISLSFVRSGFTEISEGSFLFTPSLQLLLFTSNSFDVISDDAFIGLPHLEYLFIENNNIKSISRHTFRGLKSLIHFSALGPRMQQGTKETKMPVLGLSLISSVSTRLSLCLHQAPFSPVACFVAKRS

SEQ ID NO: 890218 - protein, 291 aa, Homo sapiens
MESERSKRMGNACIPLKRIAYFLCLLSALLLTEGKKPAKPKCPAVCTCTKDNALCENARSIPRTVPPDVISLSFVRSGFTEISEGSFLFTPSLQLLLFTSNSFDVISDDAFIGLPHLEYLFIENNNIKSISRHTFRGLKSLIHLSLANNNLQTLPKDIFKGLDSLTNVDLRGNSFNCDCKLKWLVEWLGHTNATVEDIYCEGPPEYKKRKINSLSSKDFDCIITEFAKSQDLPYQSLSIDTFSYLNDEYVVIAQPFTGKCIFLEWDHVEKTFRNYDNITVLREIHRFTNMS

SEQ ID NO: 890219 - protein, 487 aa, Homo sapiens
MALERLCSVLKVLLITVLVVEGIAVAQKTQDGQNIGIKHIPATQCGIWVRTSNGGHFASPNYPDSYPPNKECIYILEAAPRQRIELTFDEHYYIEPSFECRFDHLEVRDGPFGFSPLIDRYCGVKSPPLIRSTGRFMWIKFSSDEELEGLGFRAKYSFIPDPDFTYLGGILNPIPDCQFELSGADGIVRSSQVEQEEKTKPGQAVDCIWTIKATPKAKIYLRFLDYQMEHSNECKRNFVAVYDGSSSIENLKAKFCSTVANDVMLKTGIGVIRMWADEGSRLSRFRMLFTSFVEQKKKAGVFEQITKTHGTIIGITSGIVLVLLIISILVQVKQPRKKVMACKTAFNKTGFQEVFDPPHYELFSLRDKEISADLADLSEELDNYQKMRRSSTASRCIHDHHCGSQASSVKQSRTNLSSMELPFRNDFAQPQPMKTFNSTFKKSSYTFKQGHECPEQALEDRVMEEIPCEIYVRGREDSAQASISIDF

SEQ ID NO: 890220 - protein, 518 aa, Homo sapiens
MALERLCSVLKVLLITVLVVEGIAVAQKTQDGQNIGIKHIPATQCGIWVRTSNGGHFASPNYPDSYPPNKECIYILEAAPRQRIELTFDEHYYIEPSFECRFDHLEVRDGPFGFSPLIDRYCGVKSPPLIRSTGRFMWIKFSSDEELEGLGFRAKYSFIPDPDFTYLGDCQFELSGADGIVRSSQVEQEEKTKPGQAVDCIWTIKATPKAKIYLRFLDYQMEHSNECKRNFVAVYDGSSSIENLKAKFCSTVANDVMLKTGIGVIRMWADEGSRLSRFRMLFTSFVEPPCTSSTFFCHSNMCINNSLVCNGVQNCAYPWDENHCKEKKKAGVFEQITKTHGTIIGITSGIVLVLLIISILVQVKQPRKKVMACKTAFNKTGFQEVFDPPHYELFSLRDKEISADLADLSEELDNYQKMRRSSTASRCIHDHHCGSQASSVKQSRTNLSSMELPFRNDFAQPQPMKTFNSTFKKSSYTFKQGHECPEQALEDRVMEEIPCEIYVRGREDSAQASISIDF

SEQ ID NO: 890221 - protein, 525 aa, Homo sapiens
MALERLCSVLKVLLITVLVVEGIAVAQKTQDGQNIGIKHIPATQCGIWVRTSNGGHFASPNYPDSYPPNKECIYILEAAPRQRIELTFDEHYYIEPSFECRFDHLEVRDGPFGFSPLIDRYCGVKSPPLIRSTGRFMWIKFSSDEELEGLGFRAKYSFIPDPDFTYLGGILNPIPDCQFELSGADGIVRSSQVEQEEKTKPGQAVDCIWTIKATPKAKIYLRFLDYQMEHSNECKRNFVAVYDGSSSIENLKAKFCSTVANDVMLKTGIGVIRMWADEGSRLSRFRMLFTSFVEPPCTSSTFFCHSNMCINNSLVCNGVQNCAYPWDENHCKEKKKAGVFEQITKTHGTIIGITSGIVLVLLIISILVQVKQPRKKVMACKTAFNKTGFQEVFDPPHYELFSLRDKEISADLADLSEELDNYQKMRRSSTASRCIHDHHCGSQASSVKQSRTNLSSMELPFRNDFAQPQPMKTFNSTFKKSSYTFKQGHECPEQALEDRVMEEIPCEIYVRGREDSAQASISIDF

SEQ ID NO: 890222 - protein, 525 aa, Homo sapiens; identical to SEQ ID NO: 890221

SEQ ID NO: 890223 - protein, 525 aa, Homo sapiens; identical to SEQ ID NO: 890221

SEQ ID NO: 890224 - protein, 487 aa, Homo sapiens; identical to SEQ ID NO: 890219

SEQ ID NO: 890225 - protein, 525 aa, Homo sapiens; identical to SEQ ID NO: 890221

SEQ ID NO: 890226 - protein, 296 aa, Homo sapiens [sequence omitted]

SEQ ID NO: 890227 - protein, 1495 aa, Homo sapiens
PALLSAWPPTASAAPPEQREILHEIQRRKEEIKEEKKRKEMAKQERLEIASLSNQDHTSKKDPGGHRTAAILHGGSPDFVGNGKHRANSSGRSRRERQYSVCNSEDSPGSCEILYFNMGSPDQLMVHKGKCIGSDEQLGKLVYNALETATGGFVLLYEWVLQWQKKMGPFLTSQEKEKIDKCKKQIQGTETEFNSLVKLSHPNVVRYLAMNLKEQDDSIVVDILVEHISGVSLAAHLSHSGPIPVHQLRRYTAQLLSGLDYLHSNSVVHKVLSASNVLVDAEGTVKITDYSISKRLADICKEDVFEQTRVRFSDNALPYKTGKKGDVWRLGLLLLSLSQGQECGEYPVTIPSDLPADFQDFLKKCVCLDDKERWSPQQLLKHSFINPQPKMPLVEQSPEDSGGQDYVETVIPSNRLPSAAFFSETQRQFSRYFIEFEELQLLGKGAFGAVIKVQNKLDGCCYAVKRIPINPASRQFRRIKGEVTLLSRLHHENIVRYYNAWIERHERPAGPGTPPPDSGPLAKDDRAARGQPASDTDGLDSVEAAAPPPILSSSVEWSTSGERSASARFPATGPGSSDDEDDDEDEHGGVFSQSFLPASDSESDIIFDNEDENSKSQNQDEDCNEKNGCHESEPSVTTEAVHYLYIQMEYCEKSTLRDTIDQGLYRDTVRLWRLFREILDGLAYIHEKGMIHRDLKPVNIFLDSDDHVKIGDFGLATDHLAFSADSKQDDQTGDLIKSDPSGHLTGMVGTALYVSPEVQGSTKSAYNQKVDLFSLGIIFFEMSYHPMVTASERIFVLNQLRDPTSPKFPEDFDDGEHAKQKSVISWLLNHDPAKRPTATELLKSELLPPPQMEESELHEVLHHTLTNVDGKAYRTMMAQIFSQRISPAIDYTYDSDILKGNFSIRTAKMQQHVCETIIRIFKRHGAVQLCTPLLLPRNRQIYEHNEAALFMDHSGMLVMLPFDLRIPFARYVARNNILNLKRYCIERVFRPRKLDRFHPKELLECAFDIVTSTTNSFLPTAEIIYTIYEIIQEFPALQERNYSIYLNHTMLLKAILLHCGIPEDKLSQVYIILYDAVTEKLTRREVEAKFCNLSLSSNSLCRLYKFIEQKGDLQDLMPTINSLIKQKTGIAQLVKYGLKDLEEVVGLLKKLGIKLQVLINLGLVYKVQQHNGIIFQFVAFIKRRQRAVPEILAAGGRYDLLIPQFRGPQALGPVPTAIGVSIAIDKISAAVLNMEESVTISSCDLLVVSVGQMSMSRAINLTQKLWTAGITAEIMYDWSQSQEELQEYCRHHEITYVALVSDKEGSHVKVKSFEKERQTEKRVLETELVDHVLQKLRTKVTDERNGREASDNLAVQNLKGSFSNASGLFEIHGATVVPIVSVLAPEKLSASTRRRYETQVQTRLQTSLANLHQKSSEIEILAVDLPKETILQFLSLEWDADEQAFNTTVKQLLSRLPKQRYLKLVCDEIYNIKVEKKVSVLFLYSYRDDYYRILF

SEQ ID NO: 890228 - protein, 1632 aa, Homo sapiens
SYPQRQDHELQALEAIYGADFQDLRPDACGPVKEPPEINLVLYPQGLTGEEVYVKVDLRVKCPPTYPDVVPEIELKNAKGLSNESVNLLKSRLEELAKKHCGEVMIFELAYHVQSFLSEHNKPPPKSFHEEMLERRAQEEQQRLLEAKRKEEQEQREILHEIQRRKEEIKEEKKRKEMAKQERLEIASLSNQDHTSKKDPGGHRTAAILHGGSPDFVGNGKHRANSSGRSRRERQYSVCNSEDSPGSCEILYFNMGSPDQLMVHKGKCIGSDEQLGKLVYNALETATGGFVLLYEWVLQWQKKMGPFLTSQEKEKIDKCKKQIQGTETEFNSLVKLSHPNVVRYLAMNLKEQDDSIVVDILVEHISGVSLAAHLSHSGPIPVHQLRRYTAQLLSGLDYLHSNSVVHKVLSASNVLVDAEGTVKITDYSISKRLADICKEDVFEQTRVRFSDNALPYKTGKKGDVWRLGLLLLSLSQGQECGEYPVTIPSDLPADFQDFLKKCVCLDDKERWSPQQLLKHSFINPQPKMPLVEQSPEDSGGQDYVETVIPSNRLPSAAFFSETQRQFSRYFIEFEELQLLGKGAFGAVIKVQNKLDGCCYAVKRIPINPASRQFRRIKGEVTLLSRLHHENIVRYYNAWIERHERPAGPGTPPPDSGPLAKDDRAARGQPASDTDGLDSVEAAAPPPILSSSVEWSTSGERSASARFPATGPGSSDDEDDDEDEHGGVFSQSFLPASDSESDIIFDNEDENSKSQNQDEDCNEKNGCHESEPSVTTEAVHYLYIQMEYCEKSTLRDTIDQGLYRDTVRLWRLFREILDGLAYIHEKGMIHRDLKPVNIFLDSDDHVKIGDFGLATDHLAFSADSKQDDQTGDLIKSDPSGHLTGMVGTALYVSPEVQGSTKSAYNQKVDLFSLGIIFFEMSYHPMVTASERIFVLNQLRDPTSPKFPEDFDDGEHAKQKSVISWLLNHDPAKRPTATELLKSELLPPPQMEESELHEVLHHTLTNVDGKAYRTMMAQIFSQRISPAIDYTYDSDILKGNFSIRTAKMQQHVCETIIRIFKRHGAVQLCTPLLLPRNRQIYEHNEAALFMDHSGMLVMLPFDLRIPFARYVARNNILNLKRYCIERVFRPRKLDRFHPKELLECAFDIVTSTTNSFLPTAEIIYTIYEIIQEFPALQERNYSIYLNHTMLLKAILLHCGIPEDKLSQVYIILYDAVTEKLTRREVEAKFCNLSLSSNSLCRLYKFIEQKGDLQDLMPTINSLIKQKTGIAQLVKYGLKDLEEVVGLLKKLGIKLQVLINLGLVYKVQQHNGIIFQFVAFIKRRQRAVPEILAAGGRYDLLIPQFRGPQALGPVPTAIGVSIAIDKISAAVLNMEESVTISSCDLLVVSVGQMSMSRAINLTQKLWTAGITAEIMYDWSQSQEELQEYCRHHEITYVALVSDKEGSHVKVKSFEKERQTEKRVLETELVDHVLQKLRTKVTDERNGREASDNLAVQNLKGSFSNASGLFEIHGATVVPIVSVLAPEKLSASTRRRYETQVQTRLQTSLANLHQKSSEIEILAVDLPKETILQFLSLEWDADEQAFNTTVKQLLSRLPKQRYLKLVCDEIYNIKVEKKVSVLFLYSYRDDYYRILF

SEQ ID NO: 890229 - protein, 1061 aa, Homo sapiens
MPVCARLRAADLPLAVPQVQNKLDGCCYAVKRIPINPASRQFRRIKGEVTLLSRLHHENIVRYYNAWIERHERPAGPGTPPPDSGPLAKDDRAARGQPASDTDGLDSVEAAAPPPILSSSVEWSTSGERSASARFPATGPGSSDDEDDDEDEHGGVFSQSFLPASDSESDIIFDNEDENSKSQNQDEDCNEKNGCHESEPSVTTEAVHYLYIQMEYCEKSTLRDTIDQGLYRDTVRLWRLFREILDGLAYIHEKGMIHRDLKPVNIFLDSDDHVKIGDFGLATDHLAFSADSKQDDQTGDLIKSDPSGHLTGMVGTALYVSPEVQGSTKSAYNQKVDLFSLGIIFFEMSYHPMVTASERIFVLNQLRDPTSPKFPEDFDDGEHAKQKSVISWLLNHDPAKRPTATELLKSELLPPPQMEESELHEVLHHTLTNVDGKAYRTMMAQIFSQRISPAIDYTYDSDILKGNFSIRTAKMQQHVCETIIRIFKRHGAVQLCTPLLLPRNRQIYEHNEAALFMDHSGMLVMLPFDLRIPFARYVARNNILNLKRYCIERVFRPRKLDRFHPKELLECAFDIVTSTTNSFLPTAEIIYTIYEIIQEFPALQERNYSIYLNHTMLLKAILLHCGIPEDKLSQVYIILYDAVTEKLTRREVEAKFCNLSLSSNSLCRLYKFIEQKGDLQDLMPTINSLIKQKTGIAQLVKYGLKDLEEVVGLLKKLGIKLQVLINLGLVYKVQQHNGIIFQFVAFIKRRQRAVPEILAAGGRYDLLIPQFRGPQALGPVPTAIGVSIAIDKISAAVLNMEESVTISSCDLLVVSVGQMSMSRAINLTQKLWTAGITAEIMYDWSQSQEELQEYCRHHEITYVALVSDKEGSHVKVKSFEKERQTEKRVLETELVDHVLQKLRTKVTDERNGREASDNLAVQNLKGSFSNASGLFEIHGATVVPIVSVLAPEKLSASTRRRYETQVQTRLQTSLANLHQKSSEIEILAVDLPKETILQFLSLEWDADEQAFNTTVKQLLSRLPKQRYLKLVCDEIYNIKVEKKVSVLFLYSYRDDYYRILF

SEQ ID NO: 890230 - protein, 623 aa, Homo sapiens
  misc_feature (5)..(6): Xaa can be any naturally occurring amino acid
  misc_feature (8)..(8): Xaa can be any naturally occurring amino acid
YSLVXXEXWHIVDPAPRLHRRHSDILKGNFSIRTAKMQQHVCETIIRIFKRHGAVQLCTPLLLPRNRQIYEHNEAALFMDHSGMLVMLPFDLRIPFARYVARNNILNLKRYCIERVFRPRKLDRFHPKELLECAFDIVTSTTNSFLPTAEIIYTIYEIIQEFPALQERNYSIYLNHTMLLKAILLHCGIPEDKLSQVYIILYDAVTEKLTRREVEAKFCNLSLSSNSLCRLYKFIEQKGDLQDLMPTINSLIKQKTGIAQLVKYGLKDLEEVVGLLKKLGIKLQVLINLGLVYKVQQHNGIIFQFVAFIKRRQRAVPEILAAGGRYDLLIPQFRGPQALGPVPTAIGVSIAIDKISAAVLNMEESVTISSCDLLVVSVGQMSMSRAINLTQKLWTAGITAEIMYDWSQSQEELQEYCRHHEITYVALVSDKEGSHVKVKSFEKERQTEKRVLETELVDHVLQKLRTKVTDERNGREASDNLAVQNLKGSFSNASGLFEIHGATVVPIVSVLAPEKLSASTRRRYETQVQTRLQTSLANLHQKSSEIEILAVDLPKETILQFLSLEWDADEQAFNTTVKQLLSRLPKQRYLKLVCDEIYNIKVEKKVSVLFLYSYRDDYYRILF

SEQ ID NO: 890231 - protein, 1575 aa, Homo sapiens
SYPQRQDHELQALEAIYGADFQDLRPDACGPVKEPPEINLVLYPQGLTGEEVYVKVDLRVKCPPTYPDVVPEIELKNAKGLSNESVNLLKSRLEELAKKHCGEVMIFELAYHVQSFLSEHNKPPPKSFHEEMLERRAQEEQQRLLEAKRKEEQEQREILHEIQRRKEEIKEEKKRKEMAKQERLEIASLSNQDHTSKKDPGGHRTAAILHGGSPDFVGNGKHRANSSGRSRRERQYSVCNSEDSPGSCEILYFNMGSPDQLMVHKGKCIGSDEQLGKLVYNALETATGGFVLLYEWVLQWQKKMGPFLTSQEKEKIDKCKKQIQGTETEFNSLVKLSHPNVVRYLAMNLKEQDDSIVVDILVEHISGVSLAAHLSHSGPIPVHQLRRYTAQLLSGLDYLHSNSVVHKVLSASNVLVDAEGTVKITDYSISKRLADICKEDVFEQTRVRFSDNALPYKTGKKGDVWRLGLLLLSLSQGQECGEYPVTIPSDLPADFQDFLKKCVCLDDKERWSPQQLLKHSFINPQPKMPLVEQSPEDSGGQDYVETVIPSNRLPSAAFFSETQRQFSRYFIEFEELQLLGKGAFGAVIKVQNKLDGCCYAVKRIPINPASRQFRRIKGEVTLLSRLHHENIVRYYNAWIERHERPAGPGTPPPDSGPLAKDDRAARGQPASDTDGLDSVEAAAPPPILSSSVEWSTSGERSASARFPATGPGSSDDEDDDEDEHGGVFSQSFLPASDSESDIIFDNEDENSKSQNQDEDCNEKNGCHESEPSVTTEAVHYLYIQMEYCEKSTLRDTIDQGLYRDTVRLWRLFREILDGLAYIHEKGMIHRDLKPVNIFLDSDDHVKIGDFGLATDHLAFSADSKQDDQTGDLIKSDPSGHLTGMVGTALYVSPEVQGSTKSAYNQKVDLFSLGIIFFEMSYHPMVTASERIFVLNQLRDPTSPKFPEDFDDGEHAKQKSVISWLLNHDPAKRPTATELLKSELLPPPQMEESELHEVLHHTLTNVDGKAYRTMMAQIFSQRISPAIDYTYDSDILKGNFSIRTAKMQQHVCETIIRIFKRHGAVQLCTPLLLPRNRQIYEHNEAALFMDHSGMLVMLPFDLRIPFARYVARNNILNLKRYCIERVFRPRKLDRFHPKELLECAFDIVTSTTNSFLPTAEIIYTIYEIIQEFPALQERNYSIYLNHTMLLKAILLHCGIPEDKLSQVYIILYDAVTEKLTRREVEAKFCNLSLSSNSVLINLGLVYKVQQHNGIIFQFVAFIKRRQRAVPEILAAGGRYDLLIPQFRGPQALGPVPTAIGVSIAIDKISAAVLNMEESVTISSCDLLVVSVGQMSMSRAINLTQKLWTAGITAEIMYDWSQSQEELQEYCRHHEITYVALVSDKEGSHVKVKSFEKERQTEKRVLETELVDHVLQKLRTKVTDERNGREASDNLAVQNLKGSFSNASGLFEIHGATVVPIVSVLAPEKLSASTRRRYETQVQTRLQTSLANLHQKSSEIEILAVDLPKETILQFLSLEWDADEQAFNTTVKQLLSRLPKQRYLKLVCDEIYNIKVEKKVSVLFLYSYRDDYYRILF

SEQ ID NO: 890232 - protein, 1450 aa, Homo sapiens
SYPQRQDHELQALEAIYGADFQDLRPDACGPVKEPPEINLVLYPQGLTGEEVYVKVDLRVKCPPTYPDVVPEIELKNAKGLSNESVNLLKSRLEELAKKHCGEVMIFELAYHVQSFLSEHNKPPPKSFHEEMLERRAQEEQQRLLEAKRKEEQEQREILHEIQRRKEEIKEEKKRKEMAKQERLEIASLSNQDHTSKKDPGGHRTAAILHGGSPDFVGNGKHRANSSGRSRRERQYSVCNSEDSPGSCEILYFNMGSPDQLMVHKGKCIGSDEQLGKLVYNALETATGGFVLLYEWVLQWQKKMGPFLTSQEKEKIDKCKKQIQGTETEFNSLVKLSHPNVVRYLAMNLKEQDDSIVVDILVEHISGVSLAAHLSHSGPIPVHQLRRYTAQLLSGLDYLHSNSVVHKVLSASNVLVDAEGTVKITDYSISKRLADICKEDVFEQTRVRFSDNALPYKTGKKGDVWRLGLLLLSLSQGQECGEYPVTIPSDLPADFQDFLKKCVCLDDKERWSPQQLLKHSFINPQPKMPLVEQSPEDSGGQDYVETVIPSNRLPSAAFFSETQRQFSRYFIEFEELQLLGKGAFGAVIKVQNKLDGCCYAVKRIPINPASRQFRRIKGEVTLLSRLHHENIVRYYNAWIERHERPAGPGTPPPDSGPLAKDDRAARGQPASDTDGLDSVEAAAPPPILSSSVEWSTSGERSASARFPATGPGSSDDEDDDEDEHGGVFSQSFLPASDSESDIIFDNEDENSKSQNQDEDCNEKNGCHESEPSVTTEAVHYLYIQMEYCEKSTLRDTIDQGLYRDTVRLWRLFREILDGLAYIHEKGMIHRDLKPVNIFLDSDDHVKIGDFGLATDHLAFSADSKQDDQTGDLIKSDPSGHLTGMVGTALYVSPEVQGSTKSAYNQKVDLFSLGIIFFEMSYHPMVTASERIFVLNQLRDPTSPKFPEDFDDGEHAKQKSVISWLLNHDPAKRPTATELLKSELLPPPQMEESELHEVLHHTLTNVDGKAYRTMMAQIFSQRISPAIDYTYDSDILKGNFSIRTAKMQQHVCETIIRIFKRHGAVQLCTPLLLPRNRQIYEHNEAALFMDHSGMLVMLPFDLRIPFARYVARNNILNLKRYCIERVFRPRKLDRFHPKELLECAFDIVTSTTNSFLPTAEIIYTIYEIIQEFPALQERNYSIYLNHTMLLKAILLHCGIPEDKLSQVYIILYDAVTEKLTRREVEAKFCNLSLSSNSLCRLYKFIEQKGDLQDLMPTINSLIKQKTGIAQLVKYGLKDLEEVVGLLKKLGIKLQVLINLGLVYKVQQHNGIIFQFVAFIKRRQRAVPEILAAGGRYDLLIPQFRGPQALGPVPTAIGVSIAIDKISAAVLNMEESVTISSCDLLVVSVGQMSMSRAINLTQKLWTAGITAEIMYDWSQSQEELQEYCRHHEITYVALVSDKEGSHVKRSFR

SEQ ID NO: 890233 - protein, 1594 aa, Homo sapiens
SYPQRQDHELQALEAIYGADFQDLRPDACGPVKEPPEINLVLYPQGLTGEEVYVKVDLRVKCPPTYPDVVPEIELKNAKGLSNESVNLLKSRLEELAKKHCGEVMIFELAYHVQSFLSEHNKPPPKSFHEEMLERRAQEEQQRLLEAKRKEEQEQREILHEIQRRKEEIKEEKKRKEMAKQERLEIASLSNQDHTSKKDPGGHRTAAILHGGSPDFVGNGKHRANSSGRSRRERQYSVCNSEDSPGSCEILYFNMGSPDQLMVHKGKCIGSDEQLGKLVYNALETATGGFVLLYEWVLQWQKKMGPFLTSQEKEKIDKCKKQIQGTETEFNSLVKLSHPNVVRYLAMNLKEQDDSIVVDILVEHISGVSLAAHLSHSGPIPVHQLRRYTAQLLSGLDYLHSNSVVHKVLSASNVLVDAEGTVKITDYSISKRLADICKEDVFEQTRVRFSDNALPYKTGKKGDVWRLGLLLLSLSQGQECGEYPVTIPSDLPADFQDFLKKCVCLDDKERWSPQQLLKHSFINPQPKMPLVEQSPEDSGGQDYVETVIPSNRLPSAAFFSETQRQFSRYFIEFEELQLLGKGAFGAVIKVQNKLDGCCYAVKRIPINPASRQFRRIKGEVTLLSRLHHENIVRYYNAWIERHERPAGPGTPPPDSGPLAKDDRAARGQPASDTDGLDSVEAAAPPPILSSSVEWSTSGERSASARFPATGPGSSDDEDDDEDEHGGVFSQSFLPASDSESDIIFDNEDENSKSQNQDEDCNEKNGCHESEPSVTTEAVHYLYIQMEYCEKSTLRDTIDQGLYRDTVRLWRLFREILDGLAYIHEKGMIHRDLKPVNIFLDSDDHVKIGDFGLATDHLAFSADSKQDDQTGDLIKSDPSGHLTGMVGTALYVSPEVQGSTKSAYNQKVDLFSLGIIFFEMSYHPMVTASERIFVLNQLRDPTSPKFPEDFDDGEHAKQKSVISWLLNHDPAKRPTATELLKSELLPPPQMEESELHEVLHHTLTNVDGKAYRTMMAQIFSQRISPAIDYTYDSDILKGNFSIRTAKMQQHVCETIIRIFKRHGAVQLCTPLLLPRNRQIYEHNEAALFMDHSGMLVMLPFDLRIPFARYVARNNILNLKRYCIERVFRPRKLDRFHPKELLECAFDIVTSTTNSFLPTAEIIYTIYEIIQEFPALQERNYSIYLNHTMLLKAILLHCGIPEDKLSQVYIILYDAVTEKLTRREVEAKFCNLSLSSNSLCRLYKFIEQKGDLQDLMPTINSLIKQKTGIAQLVKYGLKDLEEVVGLLKKLGIKLQVLINLGLVYKVQQHNGIIFQFVAFIKRRQRAVPEILAAGGRYDLLIPQFRGPQALGPVPTAIGVSIAIDKISAAVLNMEESVTISSCDLLVVSVGQMSMSRAINLTQKLWTAGITAEIMYDWSQSQEELQEYCRHHEITYVALVSDKEGSHVKVKSFEKERQTEKRVLETELVDHVLQKLRTKVTDERNGREASDNLAVQNLKGSFSNASGLFEIHGATVVPIVSVLAPEKLSASTRRRYETQWDADEQAFNTTVKQLLSRLPKQRYLKLVCDEIYNIKVEKKVSVLFLYSYRDDYYRILF

SEQ ID NO: 890234 - protein, 1632 aa, Homo sapiens; identical to SEQ ID NO: 890228

SEQ ID NO: 890235 - protein, 1632 aa, Homo sapiens; identical to SEQ ID NO: 890228

SEQ ID NO: 890236 - protein, 182 aa, Homo sapiens
MVMRQTEKRVLETELVDHVLQKLRTKVTDERNGREASDNLAVQNLKGSFSNASGLFEIHGATVVPIVSVLAPEKLSASTRRRYETQVQTRLQTSLANLHQKSSEIEILAVDLPKETILQFLSLEWDADEQAFNTTVKQLLSRLPKQRYLKLVCDEIYNIKVEKKVSVLFLYSYRDDYYRILF

SEQ ID NO: 890237 - protein, 1052 aa, Homo sapiens
SYPQRQDHELQALEAIYGADFQDLRPDACGPVKEPPEINLVLYPQGLTGEEVYVKVDLRVKCPPTYPDVVPEIELKNAKGLSNESVNLLKSRLEELAKKHCGEVMIFELAYHVQSFLSEHNKPPPKSFHEEMLERRAQEEQQRLLEAKRKEEQEQREILHEIQRRKEEIKEEKKRKEMAKQERLEIASLSNQDHTSKKDPGGHRTAAILHGGSPDFVGNGKHRANSSGRSRRERQYSVCNSEDSPGSCEILYFNMGSPDQLMVHKGKCIGSDEQLGKLVYNALETATGGFVLLYEWVLQWQKKMGPFLTSQEKEKIDKCKKQIQGTETEFNSLVKLSHPNVVRYLAMNLKEQDDSIVVDILVEHISGVSLAAHLSHSGPIPVHQLRRYTAQLLSGLDYLHSNSVVHKVLSASNVLVDAEGTVKITDYSISKRLADICKEDVFEQTRVRFSDNALPYKTGKKGDVWRLGLLLLSLSQGQECGEYPVTIPSDLPADFQDFLKKCVCLDDKERWSPQQLLKHSFINPQPKMPLVEQSPEDSGGQDYVETVIPSNRLPSAAFFSETQRQFSRYFIEFEELQLLGKGAFGAVIKVQNKLDGCCYAVKRIPINPASRQFRRIKGEVTLLSRLHHENIVRYYNAWIERHERPAGPGTPPPDSGPLAKDDRAARGQPASDTDGLDSVEAAAPPPILSSSVEWSTSGERSASARFPATGPGSSDDEDDDEDEHGGVFSQSFLPASDSESDIIFDNEDENSKSQNQDEDCNEKNGCHESEPSVTTEAVHYLYIQMEYCEKSTLRDTIDQGLYRDTVRLWRLFREILDGLAYIHEKGMIHRDLKPVNIFLDSDDHVKIGDFGLATDHLAFSADSKQDDQTGDLIKSDPSGHLTGMVGTALYVSPEVQGSTKSAYNQKVDLFSLGIIFFEMSYHPMVTASERIFVLNQLRDPTSPKFPEDFDDGEHAKQKSVISWLLNHDPAKRPTATELLKSELLPPPQMEESELHEVLHHTLTNVDGKAYRTMMAQIFSQRISFYNKGKSNGRDILNGRFVNPYSQDAMRMR

SEQ ID NO: 890238 - protein, 114 aa, Homo sapiens
SSLAKSKGVVLMALCALTRALRSLNLAPPTVAAPAPSLFPAAQMMNNGLLQQPSALMLLPCRPVLTSVALNANFVSWKSRTKYTITPVKMRKSGGRDHTGAGNVRSNSRPSIQR

SEQ ID NO: 890239 - protein, 107 aa, Homo sapiens
SSLAKSKGVVLMALCALTRALRSLNLAPPTVAAPAPSLFPAAQMMNNGLLQQPSALMLLPCRPVLTSVALNANFVSWKSRTKYTITPVKMRKSGGRDHTGGNKDRGI

SEQ ID NO: 890240 - protein, 149 aa, Homo sapiens
MQAGDTILNSNHIGRMAVAAREGDAHPLGALPVGTLINNVESEPGRGAQYIRAAGTCGVLLRKVNGTAIIQLPSKRQMQVLETCVATVGRVSNVDHNKRVIGKAGRNRWLGKRPNSGRWHRKGGWAGRKIRPLPPMKSYVKLPSASAQS

SEQ ID NO: 890241 - protein, 236 aa, Homo sapiens
SSLAKSKGVVLMALCALTRALRSLNLAPPTVAAPAPSLFPAAQMMNNGLLQQPSALMLLPCRPVLTSVALNANFVSWKSRTKYTITPVKMRKSGGRDHTGRIRVHGIGGGHKQRYRMIDFLRFRPEETKSGPFEEKVIQVRYDPCRSADIALVAGGSRKRWIIATENMQAGDTILNSNHIGRMAVAAREGDAHPLGALPVGTLINNVESEPGRGAQYIRAAGAGNVRSNSRPSIQR

SEQ ID NO: 890242 - protein, 107 aa, Homo sapiens; identical to SEQ ID NO: 890239

SEQ ID NO: 890243 - protein, 316 aa, Homo sapiens
SSLAKSKGVVLMALCALTRALRSLNLAPPTVAAPAPSLFPAAQMMNNGLLQQPSALMLLPCRPVLTSVALNANFVSWKSRTKYTITPVKMRKSGGRDHTGRIRVHGIGGGHKQRYRMIDFLRFRPEETKSGPFEEKVIQVRYDPCRSADIALVAGGSRKRWIIATENMQAGDTILNSNHIGRMAVAAREGDAHPLGALPVGTLINNVESEPGRGAQYIRAAGTCGVLLRKVNGTAIIQLPSKRQMQVLETCVATVGRVSNVDHNKRVIGKAGRNRWLGKRPNSGRWHRKGGWAGRKIRPLPPMKSYVKLPSASAQS

SEQ ID NO: 890244 - protein, 127 aa, Homo sapiens
RAKQGQHVGYVPCVSPSAPPCFVEGGKSAFSPGTCGVLLRKVNGTAIIQLPSKRQMQVLETCVATVGRVSNVDHNKRVIGKAGRNRWLGKRPNSGRWHRKGGWAGRKIRPLPPMKSYVKLPSASAQS

SEQ ID NO: 890245 - protein, 380 aa, Homo sapiens [sequence omitted]

SEQ ID NO: 890246 - protein, 308 aa, Homo sapiens
MPFCAPKYSVDPKEKIDIGLPPPKVSRTQQLLERKQAIQELRANVEEERAARLRTASVPLDAVRAEWERTCGPYHKQRLAEYYGLYRDLFHGATFVPRVPLHVAYAVGEDDLMPVYCGNEVTPTEAAQAPEVTYEAEEGSLWTLLLTSLDGHLLEPDAEYLHWLLTNIPGNRVAEGQVTCPYLPPFPARGSGIHRLAFLLFKQDQPIDFSEDARPSPCYQLAQRTFRTFDFYKKHQETMTPAGLSFFQCRWDDSVTYIFHQLLDMREPVFEFVRPPPYHPKQKRFPHRQPLRYLDRYRDSHEPTYGIY

SEQ ID NO: 890247 - protein, 380 aa, Homo sapiens [sequence omitted]

SEQ ID NO: 890248 - protein, 380 aa, Homo sapiens [sequence omitted]

SEQ ID NO: 890249 - protein, 290 aa, Homo sapiens
MAAPWWRAALCECRRWRGFSTSAVLGRRTPPLGPMPNSDIDLSNLERLEKYRSFDRYRRRAEQEAQAPHWWRTYREYFGEKTDPKEKIDIGLPPPKVSRTQQLLERKQAIQELRANVEEERAARLRTASVPLDAVRAEWERTCGPYHKQRLAEYYGLYRDLFHGATFVPRVPLHVAYAVGEDDLMPVYCGNEVTPTEAAQAPEVTYEAEEGSLWTLLLTSLDGHLLEPDAEYLHWLLTNIPGNRVAEGQVTCPYLPPFPARGSGIHRLAFLLFKQDQPIDFSEDARPSPW

SEQ ID NO: 890250 - protein, 337 aa, Homo sapiens
MAAPWWRAALCECRRWRGFSTSAVLGRRTPPLGPMPNSDIDLSNLERLEKYRSFDRYRRRAEQEAQAPHWWRTYREYFGEKTDPKEKIDIGLPPPKVSRTQQLLERKQAIQELRANVEEERAARLRTASVPLDAVRAEWERTCGPYHKQRLAEYYGLYRDLFHGATFVPRVPLHVAYAVGEDDLMPVYCGNEVTPTEAAQAPEVTYEAEEGSLWTLLLTSLDGHLLEPDAEYLHWLLTNIPGNRVAEGQVTCPYLPPFPARGSGIHRLAFLLFKQDQPIDFSEDARPSPWYSAWPKGLSDFDFYRTQNMIPAGVFSWRGCPYYFHVWIRTCDWGPYQ

SEQ ID NO: 890251 - protein, 375 aa, Homo sapiens
  misc_feature (1)..(1): Xaa can be any naturally occurring amino acid
  misc_feature (3)..(4): Xaa can be any naturally occurring amino acid
XPXXWNNRLRPTRPGRAPVLGRRTPPLGPMPNSDIDLSNLERLEKYRSFDRYRRRAEQEAQAPHWWRTYREYFGEKTDPKEKIDIGLPPPKVSRTQQLLERKQAIQELRANVEEERAARLRTASVPLDAVRAEWERTCGPYHKQRLAEYYGLYRDLFHGATFVPRVPLHVAYAVGEDDLMPVYCGNEVTPTEAAQAPEVTYEAEEGSLWTLLLTSLDGHLLEPDAEYLHWLLTNIPGNRVAEGQVTCPYLPPFPARGSGIHRLAFLLFKQDQPIDFSEDARPSPCYQLAQRTFRTFDFYKKHQETMTPAGLSFFQCRWDDSVTYIFHQLLDMREPVFEFVRPPPYHPKQKRFPHRQPLRYLDRYRDSHEPTYGIY

SEQ ID NO: 890252 - protein, 527 aa, Homo sapiens
MAAPWWRAALCECRRWRGFSTSAVLGRRTPPLGPMPNSDIDLSNLERLEKYRSFDRYRRRAEQEAQAPHWWRTYREYFGEKTDPKEKIDIGLPPPKVSRTQQLLERKQAIQELRANVEEERAARLRTASVPLDAVRAEWERTCGPYHKQRLAEYYGLYRDLFHGATFVPRVPLHVAYAVGEDDLMPVYCGNEVTPTEVTTHLCPSSLPCANTDTSHLSVTDTPGFGILLFSVIFDFLEDDTMTISKKIEQNEGKRGSVLAHSCDQPAVCGVALLARPWHMFVFVVVAWTGNSARAASLRIPLPACLCQGLSRAFGSEWAPLSPRLPATAGLSLVGLTASFSPCQAAQAPEVTYEAEEGSLWTLLLTSLDGHLLEPDAEYLHWLLTNIPGNRVAEGQVTCPYLPPFPARGSGIHRLAFLLFKQDQPIDFSEDARPSPCYQLAQRTFRTFDFYKKHQETMTPAGLSFFQCRWDDSVTYIFHQLLDMREPVFEFVRPPPYHPKQKRFPHRQPLRYLDRYRDSHEPTYGIY

SEQ ID NO: 890253 - protein, 237 aa, Homo sapiens
MAAPWWRAALCECRRWRGFSTSAVLGRRTPPLGPMPNSDIDLSNLERLEKYRSFDRYRRRAEQEAQAPHWWRTYREYFGEKTDPKEKIDIGLPPPKVSRTQQLLERKQAIQELRANVEEERAARLRTASVPLDAVRAEWERTCGPYHKQRLAEYYGLYRDLFHGATFVPRVPLHVAYAVGEDDLMPVYCGNEVTPTEAAQAPEVTYEAEEGSLWTLLLTSLDGHLLEPDAEYLHWLL

SEQ ID NO: 890254 - protein, 237 aa, Homo sapiens; identical to SEQ ID NO: 890253

SEQ ID NO: 890255 - protein, 467 aa, Homo sapiens
MAAPWWRAALCECRRWRGFSTSDPKEKIDIGLPPPKVSRTQQLLERKQAIQELRANVEEERAARLRTASVPLDAVRAEWERTCGPYHKQRLAEYYGLYRDLFHGATFVPRVPLHVAYAVGEDDLMPVYCGNEVTPTEVTTHLCPSSLPCANTDTSHLSVTDTPGFGILLFSVIFDFLEDDTMTISKKIEQNEGKRGSVLAHSCDQPAVCGVALLARPWHMFVFVVVAWTGNSARAASLRIPLPACLCQGLSRAFGSEWAPLSPRLPATAGLSLVGLTASFSPCQAAQAPEVTYEAEEGSLWTLLLTSLDGHLLEPDAEYLHWLLTNIPGNRVAEGQVTCPYLPPFPARGSGIHRLAFLLFKQDQPIDFSEDARPSPCYQLAQRTFRTFDFYKKHQETMTPAGLSFFQCRWDDSVTYIFHQLLDMREPVFEFVRPPPYHPKQKRFPHRQPLRYLDRYRDSHEPTYGIY

SEQ ID NO: 890256 - protein, 243 aa, Homo sapiens
MAAPWWRAALCECRRWRGFSTSAVLGRRTPPLGPMPNSDIDLSNLERLEKYRSFDRYRRRAEQEAQAPHWWRTYREYFGEKTDPKEKIDIGLPPPKVSRTQQLLERKQAIQELRANVEEERAARLRTASVPLDAVRAEWERTCGPYHKQRLAEYYGLYRDLFHGATFVPRVPLHVAYAVGEDDLMPVYCGNEVTPTEAAQAPEVTYEAEEGSLWTLLLTSLDGHLLEPDAEYLTGGNQSGYGW

SEQ ID NO: 890257 - protein, 199 aa, Homo sapiens
MSRRSQSLAASSVPGERCLELSSQGVMSASRVCMELRGHSCCLPGVVINRDFPPPRTNIPGNRVAEGQVTCPYLPPFPARGSGIHRLAFLLFKQDQPIDFSEDARPSPCYQLAQRTFRTFDFYKKHQETMTPAGLSFFQCRWDDSVTYIFHQLLDMREPVFEFVRPPPYHPKQKRFPHRQPLRYLDRYRDSHEPTYGIY

SEQ ID NO: 890258 - protein, 131 aa, Homo sapiens
MAAPWWRAALCECRRWRGFSTSAVLGRRTPPLGPMPNSDIDLSNLERLEKYRSFDRYRRRAEQEAQAPHWWRTYREYFGEKTDPKEKIDIGLPPPKVSRTQQLLERKQAIQELRANVEEERAARLRTVKDR

SEQ ID NO: 890259 - protein, 135 aa, Homo sapiens
MAAPWWRAALCECRRWRGFSTSAVLGRRTPPLGPMPNSDIDLSNLERLEKYRSFDRYRRRAEQEAQAPHWWRTYREYFGEKTDPKEKIDIGLPPPKVSRTQQLLERKQAIQELRANVEEERAARLRTELRRRRYG

SEQ ID NO: 890260 - protein, 113 aa, Homo sapiens
MTLFFPHIFPLQIPKRRLILGCLHPKSPGPNSYWNGNRPSRSFGPMWKRSGLPASAQPVSRWMPCGPSGRGPVAPTTSSVWLSITASTETCSTVPPLCPESPCTWPTLWVRMT

SEQ ID NO: 890261 - protein, 380 aa, Homo sapiens [sequence omitted]

SEQ ID NO: 890262 - protein, 361 aa, Homo sapiens
MAAPWWRAALCECRRWRGFSTSAVLGRRTPPLGPMPNSDIDLSNLERLEKYRSFDRYRRRAEQEAQAPHWWRTYREYFGEKTDPKEKIDIGLPPPKVSRTQQLLERKQAIQELRANVEEERAARLRTASVPLDAVRAEWERTCGPYHKQRLAEYYGLYRDLFHGATFVPRVPLHVAYAVGEDDLMPVYCGNEVTPTEAAQAPEVTYEAEEGSLWTLLLTSLDGHLLEPDAEYLHWLLTNIPGNRVAEGQVTCPYLPPFPARGSGIHRLAFLLFKQDQPIDFSEDARPSPCYQLAQRTFRTFDFYKKHQETMTPAGLSFFQCRWDDSVTYIFHQLLGKGHGAGALGGPELPGLACPAREKLC

SEQ ID NO: 890263 - protein, 366 aa, Homo sapiens
MAAPWWRAALCECRRWRGFSTSAVLGRRTPPLGPMPNSDIDLSNLERLEKYRSFDRYRRRAEQEAQAPHWWRTYREYFGEKTDPKEKIDIGLPPPKVSRTQQLLERKQAIQELRANVEEERAARLRTASVPLDAVRAEWERTCGPYHKQRLAEYYGLYRDLFHGATFVPRVPLHVAYAVGEDDLMPVYCGNEVTPTEAAQAPEVTYEAEEGSLWTLLLTSLDGHLLEPDAEYLHWLLTNIPGNRVAEGQVTCPYLPPFPARGSGIHRLAFLLFKQDQPIDFSEDARPSPCISGQRTSTLDSTENQKQIQRLSSPLPGMTRYYISTDSEAGARRVVGAINTERLQGTANERRDKTTDKKQGEHAHAQ

SEQ ID NO: 890264 - protein, 237 aa, Homo sapiens; identical to SEQ ID NO: 890253

SEQ ID NO: 890265 - protein, 237 aa, Homo sapiens; identical to SEQ ID NO: 890253

SEQ ID NO: 890266 - protein, 237 aa, Homo sapiens; identical to SEQ ID NO: 890253

SEQ ID NO: 890267 - protein, 191 aa, Homo sapiens
HEVYCGNEAAQAPEVTYEAEEGSLWTLLLTSLDGHLLEPDAEYLHWLLTNIPGNRVAEGQVTCPYLPPFPARGSGIHRLAFLLFKQDQPIDFSEDARPSPCYQLAQRTFRTFDFYKKHQETMTPAGLSFFQCRWDDSVTYIFHQLLDMREPVFEFVRPPPYHPKQKRFPHRQPLRYLDRYRDSHEPTYGIY

SEQ ID NO: 890268 - protein, 197 aa, Homo sapiens
PGGLMTVPVPVQVAQGLPEGEALLLGVVRGRPHELKHSCCLPGVVINRDFPPPRTNIPGNRVAEGQVTCPYLPPFPARGSGIHRLAFLLFKQDQPIDFSEDARPSPCYQLAQRTFRTFDFYKKHQETMTPAGLSFFQCRWDDSVTYIFHQLLDMREPVFEFVRPPPYHPKQKRFPHRQPLRYLDRYRDSHEPTYGIY

SEQ ID NO: 890269 - protein, 95 aa, Homo sapiens
GLTRPPAPLTSYEPGPWGAGGGARWRSPALAPNKGGGGRAVVGWAVVSRCVFVQMGTCWSQMLSTSTGCCEYWSTGGRGCCPGGKRSWEPGLSCS

SEQ ID NO: 890270 - protein, 220 aa, Homo sapiens
MGIIRFLLLYCPTNILTVCVLERQIFDFLGYQWAPILANFVHIIIVILGLFGTIQYRPRYITGYAVWLVLWVTWNVFVICFYLEAGDLSKETDLILTFNISMHRSWWMENGPGCTVTSVTPAPDWAPEDHRYITVSGCLLEYQYIEVAHSSLQIVLALAGFIYACYVVKCITEEEDSFDFHQVALTLMANHGPQKTSHLQLTAYVHVKISPDDFGMSGPW

SEQ ID NO: 890271 - protein, 221 aa, Homo sapiens
MGYCSGRCTLIFICGMQLVCVLERQIFDFLGYQWAPILANFVHIIIVILGLFGTIQYRPRYITGYAVWLVLWVTWNVFVICFYLEAGDLSKETDLILTFNISMHRSWWMENGPGCTVTSVTPAPDWAPEDHRYITVSGCLLEYQYIEVAHSSLQIVLALAGFIYACYVVKCITEEEDSFDFHQVALTLMANHGPQKTSHLQLTAYVHVKISPDDFGMSGPW

SEQ ID NO: 890272 - protein, 134 aa, Homo sapiens
MGIIRFLLLYCPTNILTVCVLERQIFDFLGYQWAPILANFVHIIIVILGLFGTIQYRPRYITGYAVWLVLWVTWNVFVICFYLEAGDLSKHPSVNWWKEPCLSNREWKKAPELQIQNFSLQSKEGTRLALHLFL

SEQ ID NO: 890273 - protein, 86 aa, Homo sapiens
  misc_feature (13)..(13): Xaa can be any naturally occurring amino acid
QCSARRAARGQGXGGSGVDGEYFFKKKEDKQKRKKMTYILMKSVHSSGRIFMSQIKSVIDWSSLNPKTSEELEDPEELFSSKYKVL

SEQ ID NO: 890274 - protein, 70 aa, Homo sapiens
YTSSSYRSAEVVALLGPYRTARYRLVPSSKYDCEELHVGIIRLWTVSSKEENLQVLQRWETCVSPFPMLD

SEQ ID NO: 890275 - protein, 129 aa, Homo sapiens
RACAETLGTGGGNCSKSRLALESTRIFEAGAGKRPLDTTLQSSAHFLAEQREAAAASRVPPWPRICPGFFCPCSLARLVLGVRAEADSEVLLPYWDLLVRLSAAPPCIPSSLLYLGALKLAHYESWTRP

SEQ ID NO: 890276 - protein, 400 aa, Homo sapiens
MAANYSSTSTRREHVKVKTSSQPGFLERLSETSGGMFVGLMAFLLSFYLIFTNEGRALKTATSLAEGLSLVVSPDSIHSVAPENEGRLVHIIGALRTSKLLSDPNYGVHLPAVKLRRHVEMYQWVETEESREYTEDGQVKKETRYSYNTEWRSEIINSKNFDREIGHKNPSAMAVESFMATAPFVQIGRFFLSSGLIDKVDNFKSLSLSKLEDPHVDIIRRGDFFYHSENPKYPEVGDLRVSFSYAGLSGDDPDLGPAHVVTVIARQRGDQLVPFSTKSGDTLLLLHHGDFSAEEVFHRELRSNSMKTWGLRAAGWMAMFMGLNLMTRILYTLVDWFPVFRDLVNIGLKAFAFCVATSLTLLTVAAGWLFYRPLWALLIAGLALVPILVARTRVPAKKLE

SEQ ID NO: 890277 - protein, 400 aa, Homo sapiens; identical to SEQ ID NO: 890276

SEQ ID NO: 890278 - protein, 400 aa, Homo sapiens; identical to SEQ ID NO: 890276

SEQ ID NO: 890279 - protein, 400 aa, Homo sapiens; identical to SEQ ID NO: 890276

SEQ ID NO: 890280 - protein, 89 aa, Homo sapiens
RACAETLGTGGGNCSKSRLALESTRIFEAGAGKRPLDTTLQSSAHFLAEQREAAAASRVPPWPRIIPVPVPGENMSKLKPAPSQASWNG

SEQ ID NO: 890281 - protein, 125 aa, Homo sapiens
TGDRVRVLSPGEGAQGPWGWTGQDVCCAWANLDLQEPPGGDPAQHKQPKGTRAAPTPVPISDSFLSPTVPWQWSHSWQQPPLSKLAGFSSRQVSLRPLQRSSCQKHKAPLGPELPVLSLQRAKGT

SEQ ID NO: 890282 - protein, 400 aa, Homo sapiens; identical to SEQ ID NO: 890276

SEQ ID NO: 890283 - protein, 86 aa, Homo sapiens
SPGFLTTLVPSGLIDKVDNFKSLSLSKLEDPHVDIIRRGDFFYHSENPKYPEVGDLRVSFSYAGLSGDDPDLGPAHVVTWLPRGRH

SEQ ID NO: 890284 - protein, 400 aa, Homo sapiens; identical to SEQ ID NO: 890276

SEQ ID NO: 890285 - protein, 400 aa, Homo sapiens; identical to SEQ ID NO: 890276

SEQ ID NO: 890286 - protein, 400 aa, Homo sapiens; identical to SEQ ID NO: 890276

SEQ ID NO: 890287 - protein, 400 aa, Homo sapiens; identical to SEQ ID NO: 890276

SEQ ID NO: 890288 - protein, 75 aa, Homo sapiens
HSLGTGVEVGEEPEGRSRGILDLGLGQLLRSSLSLLLFHPQVGDLRVSFSYAGLSGDDPDLGPAHVVTWLPRGRH

SEQ ID NO: 890289 - protein, 401 aa, Homo sapiens
PGPHADPGPGGGSATSAPPQAPSEPPGPIKAPGRLPGGPPAGVWASLRAATARRRRPGEEVQLGPAGLRRRRPGEEVQLGPAGLQRRRAGAASRRVLPKPAPGPALVRPCPRLAPPGPRALAGSGSCDRSGGVSGRGGGLAGLGGVSAAAGGAAAEREAGQGARLGVEARPTAAALMAGGGAGDPGLGAAAAPAPETREHLFKVLVIGELGVGKTSIIKRYVHQLFSQHYRATIGVDFALKVLNWDSRTLVRLQLWDIAGQERFGNMTRVYYKEAVGAFVVFDISRSSTFEAVLKWKSDLDSKVHLPNGSPIPAVLLANKCDQNKDSSQSPSQVDQFCKEHGFAGWFETSAKDNINIEEAARFLVEKILVNHQSFPNEENDVDKIKLDQETLRAENKSQCC

SEQ ID NO: 890290 - protein, 352 aa, Homo sapiens
PGPHADPGPGGGSATSAPPQAPSEPPGPIKAPGRLPGGPPAGVWASLRAATARRRRPGEEVQLGPAGLRRRRPGEEVQLGPAGLQRRRAGAASRRVLPKPAPGPALVRPCPRLAPPGPRALAGSGSCDRSGGVSGRGGGLAGLGGVSAAAGGAAAEREAGQGARLGVEARPTAAALMAGGGAGDPGLGAAAAPAPETREHLFKVLVIGELGVGKTSIIKRYVHQLFSQHYRATIGVDFALKVLNWDSRTLVRLQLWDIAGKRGREFPTPEPRRAAWLLSASFLFLFCLNSSAWVPLGEERGPIQGRDAMDAVGWTRWGPEDGMGSRSWSRSCTPELALLKGGEEARGPFPEV

SEQ ID NO: 890291 - protein, 281 aa, Homo sapiens
PGPHADPGPGGGSATSAPPQAPSEPPGPIKAPGRLPGGPPAGVWASLRAATARRRRPGEEVQLGPAGLRRRRPGEEVQLGPAGLQRRRAGAASRRVLPKPAPGPALVRPCPRLAPPGPRALAGSGSCDRSGGVSGRGGGLAGLGGVSAAAGGAAAEREAGQGARLGVEARPTAAALMAGGGAGDPGLGAAAAPAPETREHLFKVLVIGELGVGKTSIIKRYVHQLFSQHYRATIGVDFALKSSWLTNVTRTRTVARVLPRWTNSAKNMALPDGLKPLQRIT

SEQ ID NO: 890292 - protein, 286 aa, Homo sapiens
PGPHADPGPGGGSATSAPPQAPSEPPGPIKAPGRLPGGPPAGVWASLRAATARRRRPGEEVQLGPAGLRRRRPGEEVQLGPAGLQRRRAGAASRRVLPKPAPGPALVRPCPRLAPPGPRALAGSGSCDRSGGVSGRGGGLAGLGGVSAAAGGAAAEREAGQGARLGVEARPTAAALMAGGGAGDPGLGAAAAPAPETREHLFKVLVIGELGVGKTSIIKRYVHQLFSQHYRATIGVDFALKVLNWDSRTLVRLQLWDIAGQERFGNMTRVYYMALPDGLKPLQRIT

SEQ ID NO: 890293 - protein, 355 aa, Homo sapiens
PGPHADPGPGGGSATSAPPQAPSEPPGPIKAPGRLPGGPPAGVWASLRAATARRRRPGEEVQLGPAGLRRRRPGEEVQLGPAGLQRRRAGAASRRVLPKPAPGPALVRPCPRLAPPGPRALAGSGSCDRSGGVSGRGGGLAGLGGVSAAAGGAAAEREAGQGARLGVEARPTAAALMAGGGAGDPGLGAAAAPAPETREHLFKVLVIGELGVGKTSIIKRYVHQLFSQHYRATIGVDFALKVLNWDSRTLVRLQLWDIAGQERFGNMTRVYYKEAVGAFVVFDISRSSTFEAVLKWKSDLDSKVHLPNGSPIPAALVCASALKKFLRMGYRCHVSWESSHMWHFKRQHHWAPALI

SEQ ID NO: 890294 - protein, 726 aa, Homo sapiens
APKMASIMEGPLSKWTNVMKGWQYRWFVLDYNAGLLSYYTSKDKMMRGSRRGCVRLRGAVIGIDDEDDSTFTITVDQKTFHFQARDADEREKWIHALEETILRHTLQLQGLDSGFVPSVQDFDKKLTEADAYLQILIEQLKLFDDKLQNCKEDEQRKKIETLKETTNSMVESIKHCIVLLQIAKSTINPVDAIYQPSPLEPVISTMPSQTVLPPEPVQLCKSEQRPSSLPVGPVLATLGHHQTPTPNSTGSGHSPPSSSLTSPSHVNLSPNTVPEFSYSSSEDEFYDADEFHQSGSSPKRLIDSSGSASVLTHSSSGNSLKRPDTTESLNSSLSNGTSDADLFDSHDDRDDDAEAGSVEEHKSVIMHLLSQVRLGMDLTKVVLPTFILERRSLLEMYADFFAHPDLFVSISDQKDPKDRMVQVVKWYLSAFHAGRKGSVAKKPYNPILGEIFQCHWTLPNDTEENTELVSEGPVPWVSKNSVTFVAEQVSHHPPISAFYAECFNKKIQFNAHIWTKSKFLGMSIGVHNIGQGCVSCLDYDEHYILTFPNGYGRSILTVPWVELGGECNINCSKTGYSANIIFHTKPFYGGKKHRITAEIFSPNDKKSFCSIEGEWNGVMYAKYATGENTVFVDTKKLPIIKKKVRKLEDQNEYESRSLWKDVTFNLKIRDIDAATEAKHRLEERQRAEARERKEKEIQWETRLFHEDGECWVYDEPLLKRLGAAKH

SEQ ID NO: 890295 - protein, 626 aa, Homo sapiens
MAFLLATCGGLDSGFVPSVQDFDKKLTEADAYLQILIEQLKLFDDKLQNCKEDEQRKKIETLKETTNSMVESIKHCIVLLQIAKSTINPVDAIYQPSPLEPVISTMPSQTVLPPEPVQLCKSEQRPSSLPVGPVLATLGHHQTPTPNSTGSGHSPPSSSLTSPSHVNLSPNTVPEFSYSSSEDEFYDADEFHQSGSSPKRLIDSSGSASVLTHSSSGNSLKRPDTTESLNSSLSNGTSDADLFDSHDDRDDDAEAGSVEEHKSVIMHLLSQVRLGMDLTKVVLPTFILERRSLLEMYADFFAHPDLFVSISDQKDPKDRMVQVVKWYLSAFHAGRKGSVAKKPYNPILGEIFQCHWTLPNDTEENTELVSEGPVPWVSKNSVTFVAEQVSHHPPISAFYAECFNKKIQFNAHIWTKSKFLGMSIGVHNIGQGCVSCLDYDEHYILTFPNGYGRSILTVPWVELGGECNINCSKTGYSANIIFHTKPFYGGKKHRITAEIFSPNDKKSFCSIEGEWNGVMYAKYATGENTVFVDTKKLPIIKKKVRKLEDQNEYESRSLWKDVTFNLKIRDIDAATEAKHRLEERQRAEARERKEKEIQWETRLFHEDGECWVYDEPLLKRLGAAKH

SEQ ID NO: 890296 - protein, 558 aa, Homo sapiens
MVESIKHCIVLLQIAKSTINPVDAIYQPSPLEPVISTMPSQTVLPPEPVQLCKSEQRPSSLPVGPVLATLGHHQTPTPNSTGSGHSPPSSSLTSPSHVNLSPNTVPEFSYSSSEDEFYDADEFHQSGSSPKRLIDSSGSASVLTHSSSGNSLKRPDTTESLNSSLSNGTSDADLFDSHDDRDDDAEAGSVEEHKSVIMHLLSQVRLGMDLTKVVLPTFILERRSLLEMYADFFAHPDLFVSISDQKDPKDRMVQVVKWYLSAFHAGRKGSVAKKPYNPILGEIFQCHWTLPNDTEENTELVSEGPVPWVSKNSVTFVAEQVSHHPPISAFYAECFNKKIQFNAHIWTKSKFLGMSIGVHNIGQGCVSCLDYDEHYILTFPNGYGRSILTVPWVELGGECNINCSKTGYSANIIFHTKPFYGGKKHRITAEIFSPNDKKSFCSIEGEWNGVMYAKYATGENTVFVDTKKLPIIKKKVRKLEDQNEYESRSLWKDVTFNLKIRDIDAATEAKHRLEERQRAEARERKEKEIQWETRLFHEDGECWVYDEPLLKRLGAAKH

SEQ ID NO: 890297 - protein, 571 aa, Homo sapiens
MVESIKHCIVLLQIAKDQSNAEKHADGMISTINPVDAIYQPSPLEPVISTMPSQTVLPPEPVQLCKSEQRPSSLPVGPVLATLGHHQTPTPNSTGSGHSPPSSSLTSPSHVNLSPNTVPEFSYSSSEDEFYDADEFHQSGSSPKRLIDSSGSASVLTHSSSGNSLKRPDTTESLNSSLSNGTSDADLFDSHDDRDDDAEAGSVEEHKSVIMHLLSQVRLGMDLTKVVLPTFILERRSLLEMYADFFAHPDLFVSISDQKDPKDRMVQVVKWYLSAFHAGRKGSVAKKPYNPILGEIFQCHWTLPNDTEENTELVSEGPVPWVSKNSVTFVAEQVSHHPPISAFYAECFNKKIQFNAHIWTKSKFLGMSIGVHNIGQGCVSCLDYDEHYILTFPNGYGRSILTVPWVELGGECNINCSKTGYSANIIFHTKPFYGGKKHRITAEIFSPNDKKSFCSIEGEWNGVMYAKYATGENTVFVDTKKLPIIKKKVRKLEDQNEYESRSLWKDVTFNLKIRDIDAATEAKHRLEERQRAEARERKEKEIQWETRLFHEDGECWVYDEPLLKRLGAAKH

SEQ ID NO: 890298 - protein, 558 aa, Homo sapiens; identical to SEQ ID NO: 890296

SEQ ID NO: 890299 - protein, 739 aa, Homo sapiens
APKMASIMEGPLSKWTNVMKGWQYRWFVLDYNAGLLSYYTSKDKMMRGSRRGCVRLRGAVIGIDDEDDSTFTITVDQKTFHFQARDADEREKWIHALEETILRHTLQLQGLDSGFVPSVQDFDKKLTEADAYLQILIEQLKLFDDKLQNCKEDEQRKKIETLKETTNSMVESIKHCIVLLQIAKDQSNAEKHADGMISTINPVDAIYQPSPLEPVISTMPSQTVLPPEPVQLCKSEQRPSSLPVGPVLATLGHHQTPTPNSTGSGHSPPSSSLTSPSHVNLSPNTVPEFSYSSSEDEFYDADEFHQSGSSPKRLIDSSGSASVLTHSSSGNSLKRPDTTESLNSSLSNGTSDADLFDSHDDRDDDAEAGSVEEHKSVIMHLLSQVRLGMDLTKVVLPTFILERRSLLEMYADFFAHPDLFVSISDQKDPKDRMVQVVKWYLSAFHAGRKGSVAKKPYNPILGEIFQCHWTLPNDTEENTELVSEGPVPWVSKNSVTFVAEQVSHHPPISAFYAECFNKKIQFNAHIWTKSKFLGMSIGVHNIGQGCVSCLDYDEHYILTFPNGYGRSILTVPWVELGGECNINCSKTGYSANIIFHTKPFYGGKKHRITAEIFSPNDKKSFCSIEGEWNGVMYAKYATGENTVFVDTKKLPIIKKKVRKLEDQNEYESRSLWKDVTFNLKIRDIDAATEAKHRLEERQRAEARERKEKEIQWETRLFHEDGECWVYDEPLLKRLGAAKH

SEQ ID NO: 890300 - protein, 571 aa, Homo sapiens; identical to SEQ ID NO: 890297

SEQ ID NO: 890301 - protein, 725 aa, Homo sapiens
VRARCILMDALSKWTNVMKGWQYRWFVLDYNAGLLSYYTSKDKMMRGSRRGCVRLRGAVIGIDDEDDSTFTITVDQKTFHFQARDADEREKWIHALEETILRHTLQLQGLDSGFVPSVQDFDKKLTEADAYLQILIEQLKLFDDKLQNCKEDEQRKKIETLKETTNSMVESIKHCIVLLQIAKSTINPVDAIYQPSPLEPVISTMPSQTVLPPEPVQLCKSEQRPSSLPVGPVLATLGHHQTPTPNSTGSGHSPPSSSLTSPSHVNLSPNTVPEFSYSSSEDEFYDADEFHQSGSSPKRLIDSSGSASVLTHSSSGNSLKRPDTTESLNSSLSNGTSDADLFDSHDDRDDDAEAGSVEEHKSVIMHLLSQVRLGMDLTKVVLPTFILERRSLLEMYADFFAHPDLFVSISDQKDPKDRMVQVVKWYLSAFHAGRKGSVAKKPYNPILGEIFQCHWTLPNDTEENTELVSEGPVPWVSKNSVTFVAEQVSHHPPISAFYAECFNKKIQFNAHIWTKSKFLGMSIGVHNIGQGCVSCLDYDEHYILTFPNGYGRSILTVPWVELGGECNINCSKTGYSANIIFHTKPFYGGKKHRITAEIFSPNDKKSFCSIEGEWNGVMYAKYATGENTVFVDTKKLPIIKKKVRKLEDQNEYESRSLWKDVTFNLKIRDIDAATEAKHRLEERQRAEARERKEKEIQWETRLFHEDGECWVYDEPLLKRLGAAKH

SEQ ID NO: 890302 - protein, 640 aa, Homo sapiens
PRDRRPTRSQGLDSGFVPSVQDFDKKLTEADAYLQILIEQLKLFDDKLQNCKEDEQRKKIETLKETTNSMVESIKHCIVLLQIAKDQSNAEKHADGMISTINPVDAIYQPSPLEPVISTMPSQTVLPPEPVQLCKSEQRPSSLPVGPVLATLGHHQTPTPNSTGSGHSPPSSSLTSPSHVNLSPNTVPEFSYSSSEDEFYDADEFHQSGSSPKRLIDSSGSASVLTHSSSGNSLKRPDTTESLNSSLSNGTSDADLFDSHDDRDDDAEAGSVEEHKSVIMHLLSQVRLGMDLTKVVLPTFILERRSLLEMYADFFAHPDLFVSISDQKDPKDRMVQVVKWYLSAFHAGRKGSVAKKPYNPILGEIFQCHWTLPNDTEENTELVSEGPVPWVSKNSVTFVAEQVSHHPPISAFYAECFNKKIQFNAHIWTKSKFLGMSIGVHNIGQGCVSCLDYDEHYILTFPNGYGRSILTVPWVELGGECNINCSKTGYSANIIFHTKPFYGGKKHRITAEIFSPNDKKSFCSIEGEWNGVMYAKYATGENTVFVDTKKLPIIKKKVRKLEDQNEYESRSLWKDVTFNLKIRDIDAATEAKHRLEERQRAEARERKEKEIQWETRLFHEDGECWVYDEPLLKRLGAAKH

SEQ ID NO: 890303 - protein, 361 aa, Homo sapiens
MHLLSQVRLGMDLTKVVLPTFILERRSLLEMYADFFAHPDLFVSISDQKDPKDRMVQVVKWYLSAFHAGRKGSVAKKPYNPILGEIFQCHWTLPNDTEENTELVSEGPVPWVSKNSVTFVAEQVSHHPPISAFYAECFNKKIQFNAHIWTKSKFLGMSIGVHNIGQGCVSCLDYDEHYILTFPNGYGRSILTVPWVELGGECNINCSKTGYSANIIFHTKPFYGGKKHRITAEIFSPNDKKSFCSIEGEWNGVMYAKYATGENTVFVDTKKLPIIKKKVRKLEDQNEYESRSLWKDVTFNLKIRDIDAATEAKHRLEERQRAEARERKEKEIQWETRLFHEDGECWVYDEPLLKRLGAAKH

SEQ ID NO: 890304 - protein, 571 aa, Homo sapiens; identical to SEQ ID NO: 890297

SEQ ID NO: 890305 - protein, 571 aa, Homo sapiens; identical to SEQ ID NO: 890297

SEQ ID NO: 890306 - protein, 571 aa, Homo sapiens; identical to SEQ ID NO: 890297

SEQ ID NO: 890307 - protein, 214 aa, Homo sapiens
ESLVATWHYSSEILSLLSTGCVSCLDYDEHYILTFPNGYGRSILTVPWVELGGECNINCSKTGYSANIIFHTKPFYGGKKHRITAEIFSPNDKKSFCSIEGEWNGVMYAKYATGENTVFVDTKKLPIIKKKVRKLEDQNEYESRSLWKDVTFNLKIRDIDAATEAKHRLEERQRAEARERKEKEIQWETRLFHEDGECWVYDEPLLKRLGAAKH

SEQ ID NO: 890308 - protein, 348 aa, Homo sapiens
MVESIKHCIVLLQIAKDQSNAEKHADGMISTINPVDAIYQPSPLEPVISTMPSQTVLPPEPVQLCKSEQRPSSLPVGPVLATLGHHQTPTPNSTGSGHSPPSSSLTSPSHVNLSPNTVPEFSYSSSEDEFYDADEFHQSGSSPKRLIDSSGSASVLTHSSSGNSLKRPDTTESLNSSLSNGTSDADLFDSHDDRDDDAEAGSVEEHKSVIMHLLSQVRLGMDLTKVVLPTFILERRSLLEMYADFFAHPDLFVSISDQKDPKDRMVQVVKWYLSAFHAGRKGSVAKKPYNPILGEIFQCHWTLPNDTEENTELVSEGPVPWVSKNSVTFGPDMSIELYLLVKTLSIKG

SEQ ID NO: 890309 - protein, 200 aa, Homo sapiens
VRARCILMDALSKWTNVMKGWQYRWFVLDYNAGLLSYYTSKDKMMRGSRRGCVRLRGAVIGIDDEDDSTFTITVDQKTFHFQARDADEREKWIHALEETILRHTLQLQGLDSGFVPSVQDFDKKLTEADAYLQILIEQLKLFDDKLQNCKEDEQRKKIETLKETTNSMVESIKHCIVLLQIAKDQSNAEKHADGMIVSLM

SEQ ID NO: 890310 - protein, 284 aa, Homo sapiens
GLGGARAPAPAQLRRPQVPKRVRAAAARAPRTAAPGPGPPPTSALLPRLGQAPKARTKQLSGNLRRSRIYVQLPATTGSKMVCGGFACSKNCLCALNLLYTLVSLLLIGIAAWGIGFGLISSLRVVGVVIAVGIFLFLIALVGLIGAVKHHQVLLFFYMIILLLVFIVQFSVSCACLALNQEQQGQLLEVGWNNTASARNDIQRNLNCCGFRSVNPNDTCLASCVKSDHSCSPCAPIIGEYAGEVLRFVGGIGLFFSFTEILGVWLTYRYRNQKDPRANPSAFL

SEQ ID NO: 890311 - protein, 284 aa, Homo sapiens; identical to SEQ ID NO: 890310

SEQ ID NO: 890312 - protein, 284 aa, Homo sapiens; identical to SEQ ID NO: 890310

SEQ ID NO: 890313 - protein, 262 aa, Homo sapiens
RRFKRVERGARGMARAASTTSALLPRLGQAPKARTKQLSGNLRRSRIYVQLPATTGSKMVCGGFACSKNCLCALNLLYTLVSLLLIGIAAWGIGFGLISSLRVVGVVIAVGIFLFLIALVGLIGAVKHHQVLLFFYMIILLLVFIVQFSVSCACLALNQEQQGQLLEVGWNNTASARNDIQRNLNCCGFRSVNPNDTCLASCVKSDHSCSPCAPIIGEYAGEVLRFVGGIGLFFSFTEILGVWLTYRYRNQKDPRANPSAFL

SEQ ID NO: 890314 - protein, 299 aa, Homo sapiens
ISSEPRPPSSPAPGETTPRPPLWPGAPSHTALALSPSPRDRSAPPGSRSAERIYLHISTFVPRLGQAPKARTKQLSGNLRRSRIYVQLPATTGSKMVCGGFACSKNCLCALNLLYTLVSLLLIGIAAWGIGFGLISSLRVVGVVIAVGIFLFLIALVGLIGAVKHHQVLLFFYMIILLLVFIVQFSVSCACLALNQEQQGQLLEVGWNNTASARNDIQRNLNCCGFRSVNPNDTCLASCVKSDHSCSPCAPIIGEYAGEVLRFVGGIGLFFSFTEILGVWLTYRYRNQKDPRANPSAFL

SEQ ID NO: 890315 - protein, 506 aa, Homo sapiens
MALIPDLAMETWLLLAVSLVLLYLYGTHSHGLFKKLGIPGPTPLPFLGNILSYHKGFCMFDMECHKKYGKVWGFYDGQQPVLAITDPDMIKTVLVKECYSVFTNRRPFGPVGFMKSAISIAEDEEWKRLRSLLSPTFTSGKLKEMVPIIAQYGDVLVRNLRREAETGKPVTLKDVFGAYSMDVITSTSFGVNIDSLNNPQDPFVENTKKLLRFDFLDPFFLSITVFPFLIPILEVLNICVFPREVTNFLRKSVKRMKESRLEDTQKHRVDFLQLMIDSQNSKETESHKALSDLELVAQSIIFIFAGYETTSSVLSFIMYELATHPDVQQKLQEEIDAVLPNKAPPTYDTVLQMEYLDMVVNETLRLFPIAMRLERVCKKDVEINGMFIPKGVGGDDSNPSYALHRDPKYWTEPEKFLPERFSKKNKDNIDPYIYTPFGSGPRNCIGMRFALMNMKLALIRVLQNFSFKPCKETQIPLKLRLRQGLLQPEKPVVLKVESRDGTVSGA

SEQ ID NO: 890316 - protein, 102 aa, Homo sapiens
MYELATHPDVQQKLQEEIDAVLPNKAPPTYDTVLQMEYLDMVVNETLRLFPIAMRLERVCKNPSYALHRDPKYWTEPEKFLPERYKAPGKGALPEPAWFKHI

SEQ ID NO: 890317 - protein, 165 aa, Homo sapiens
MDVITGTSFGVNIDSLNNPQDPFVESTKKFLKFGFLDPLFLSIILFPFLTPVFEALNVSLFPKDTINFLSKSVNRMKKSRLNDKQKHRLDFLQLMIDSQNSKETESHKALSDLELAAQSIIFIFAGYETTSSVLSFTLYELATHPDVQQKLQKEIDAVLPNKVRG

SEQ ID NO: 890318 - protein, 165 aa, Homo sapiens; identical to SEQ ID NO: 890317

SEQ ID NO: 890319 - protein, 506 aa, Homo sapiens; identical to SEQ ID NO: 890315

SEQ ID NO: 890320 - protein, 506 aa, Homo sapiens; identical to SEQ ID NO: 890315

SEQ ID NO: 890321 - protein, 506 aa, Homo sapiens; identical to SEQ ID NO: 890315

SEQ ID NO: 890322 - protein, 506 aa, Homo sapiens; identical to SEQ ID NO: 890315

SEQ ID NO: 890323 - protein, 506 aa, Homo sapiens; identical to SEQ ID NO: 890315

SEQ ID NO: 890324 - protein, 506 aa, Homo sapiens; identical to SEQ ID NO: 890315

SEQ ID NO: 890325 - protein, 506 aa, Homo sapiens; identical to SEQ ID NO: 890315

SEQ ID NO: 890326 - protein, 506 aa, Homo sapiens; identical to SEQ ID NO: 890315

SEQ ID NO: 890327 - protein, 506 aa, Homo sapiens; identical to SEQ ID NO: 890315

SEQ ID NO: 890328 - protein, 493 aa, Homo sapiens
MALIPDLAMETWLLLAVSLVLLYLYGTHSHGLFKKLGIPGPTPLPFLGNILSYHKGFCMFDMECHKKYGKVWGFYDGQQPVLAITDPDMIKTVLVKECYSVFTNRRPFGPVGFMKSAISIAEDEEWKRLRSLLSPTFTSGKLKERNLRREAETGKPVTLKDVFGAYSMDVITSTSFGVNIDSLNNPQDPFVENTKKLLRFDFLDPFFLSITVFPFLIPILEVLNICVFPREVTNFLRKSVKRMKESRLEDTQKHRVDFLQLMIDSQNSKETESHKALSDLELVAQSIIFIFAGYETTSSVLSFIMYELATHPDVQQKLQEEIDAVLPNKAPPTYDTVLQMEYLDMVVNETLRLFPIAMRLERVCKKDVEINGMFIPKGVGGDDSNPSYALHRDPKYWTEPEKFLPERFSKKNKDNIDPYIYTPFGSGPRNCIGMRFALMNMKLALIRVLQNFSFKPCKETQIPLKLRLRQGLLQPEKPVVLKVESRDGTVSGA

SEQ ID NO: 890329 - protein, 488 aa, Homo sapiens
MALIPDLAMETWLLLAVSLVLLYLYGTHSHGLFKKLGIPGPTPLPFLGNILSYHKGFCMFDMECHKKYGKVWGFYDGQQPVLAITDPDMIKTVLVKECYSVFTNRRPFGPVGFMKSAISIAEDEEWKRLRSLLSPTFTSGKLKEMVPIIAQYGDVLVRNLRREAETGKPVTLKDVFGAYSMDVITSTSFGVNIDSLNNPQDPFVETVFPFLIPILEVLNICVFPREVTNFLRKSVKRMKESRLEDTQKHRVDFLQLMIDSQNSKETESHKALSDLELVAQSIIFIFAGYETTSSVLSFIMYELATHPDVQQKLQEEIDAVLPNKAPPTYDTVLQMEYLDMVVNETLRLFPIAMRLERVCKKDVEINGMFIPKGVGGDDSNPSYALHRDPKYWTEPEKFLPERFSKKNKDNIDPYIYTPFGSGPRNCIGMRFALMNMKLALIRVLQNFSFKPCKETQIPLKLRLRQGLLQPEKPVVLKVESRDGTVSGA

SEQ ID NO: 890330 - protein, 307 aa, Homo sapiens
SVNVSNDVDKRGLSLHRLSYLPPLPVFPFLIPILEVLNICVFPREVTNFLRKSVKRMKESRLEDTQKHRVDFLQLMIDSQNSKETESHKALSDLELVAQSIIFIFAGYETTSSVLSFIMYELATHPDVQQKLQEEIDAVLPNKAPPTYDTVLQMEYLDMVVNETLRLFPIAMRLERVCKKDVEINGMFIPKGVGGDDSNPSYALHRDPKYWTEPEKFLPERFSKKNKDNIDPYIYTPFGSGPRNCIGMRFALMNMKLALIRVLQNFSFKPCKETQIPLKLRLRQGLLQPEKPVVLKVESRDGTVSGA

SEQ ID NO: 890331 - protein, 506 aa, Homo sapiens; identical to SEQ ID NO: 890315

SEQ ID NO: 890332 - protein, 491 aa, Homo sapiens
MALIPDLAMETWLLLAVSLVLLYLYGTHSHGLFKKLGIPGPTPLPFLGNILSYHKGFCMFDMECHKKYGKVWGFYDGQQPVLAITDPDMIKTVLVKECYSVFTNRRPFGPVGFMKSAISIAEDEEWKRLRSLLSPTFTSGKLKERNLRREAETGKPVTLKDVFGAYSMDVITSTSFGVNIDSLNNPQDPFVENTKKLLRFDFLDPFFLSITVFPFLIPILEVLNICVFPREVTNFLRKSVKRMKESRLEDTQKHRVDFLQLMIDSQNSKETESHKALSDLELVAQSIIFIFAGYETTSSVLSFIMYELATHPDVQQKLQEEIDAVLPNKAPPTYDTVLQMEYLDMVVNETLRLFPIAMRLERVCKKDVEINGMFIPKGVGGDDSNPSYALHRDPKYWTEPEKFLPERFSKKNKDNIDPYIYTPFGSGPRNCIGMRFALMNMKLALIRVLQNFSFKPCKETQIPLKLRLRQGLLQPEIIPKDFCFALQEICA

SEQ ID NO: 890333 - protein, 474 aa, Homo sapiens
MALIPDLAMETWLLLAVSLVLLYLYGTHSHGLFKKLGIPGPTPLPFLGNILSYHKGFCMFDMECHKKYGKVWGFYDGQQPVLAITDPDMIKTVLVKECYSVFTNRRPFGPVGFMKSAISIAEDEEWKRLRSLLSPTFTSGKLKERNLRREAETGKPVTLKDVFGAYSMDVITSTSFGVNIDSLNNPQDPFVENTKKLLRFDFLDPFFLSITVFPFLIPILEVLNICVFPREVTNFLRKSVKRMKESRLEDTQKHRVDFLQLMIDSQNSKETESHKALSDLELVAQSIIFIFAGYETTSSVLSFIMYELATHPDVQQKLQEEIDAVLPNKAPPTYDTVLQMEYLDMVVNETLRLFPIAMRLERVCKNPSYALHRDPKYWTEPEKFLPERFSKKNKDNIDPYIYTPFGSGPRNCIGMRFALMNMKLALIRVLQNFSFKPCKETQIPLKLRLRQGLLQPEKPVVLKVESRDGTVSGA

SEQ ID NO: 890334 - protein, 475 aa, Homo sapiens
MALIPDLAMETWLLLAVSLVLLYLYGTHSHGLFKKLGIPGPTPLPFLGNILSYHKGFCMFDMECHKKYGKVWGFYDGQQPVLAITDPDMIKTVLVKECYSVFTNRRPFGPVGFMKSAISIAEDEEWKRLRSLLSPTFTSGKLKERNLRREAETGKPVTLKDVFGAYSMDVITSTSFGVNIDSLNNPQDPFVENTKKLLRFDFLDPFFLSITVFPFLIPILEVLNICVFPREVTNFLRKSVKRMKESRLEDTQKHRVDFLQLMIDSQNSIIFIFAGYETTSSVLSFIMYELATHPDVQQKLQEEIDAVLPNKAPPTYDTVLQMEYLDMVVNETLRLFPIAMRLERVCKKDVEINGMFIPKGVGGDDSNPSYALHRDPKYWTEPEKFLPERFSKKNKDNIDPYIYTPFGSGPRNCIGMRFALMNMKLALIRVLQNFSFKPCKETQIPLKLRLRQGLLQPEKPVVLKVESRDGTVSGA

SEQ ID NO: 890335 - protein, 491 aa, Homo sapiens; identical to SEQ ID NO: 890332

SEQ ID NO: 890336 - protein, 463 aa, Homo sapiens
MALIPDLAMETWLLLAVSLVLLYLYGTHSHGLFKKLGIPGPTPLPFLGNILSYHKGFCMFDMECHKKYGKVWGFYDGQQPVLAITDPDMIKTVLVKECYSVFTNRRPFGPVGFMKSAISIAEDEEWKRLRSLLSPTFTSGKLKERNLRREAETGKPVTLKDVFGAYSMDVITSTSFGVNIDSLNNPQDPFVENTKKLLRFDFLDPFFLSITVFPFLIPILEVLNICVFPREVTNFLRKSVKRMKESRLEDTQKHRVDFLQLMIDSQNSKETESHKALSDLELVAQSIIFIFAGYETTSSVLSFIMYELATHPDVQQKLQEEIDAVLPNKAPPTYDTVLQMEYLDMVVNETLRLFPIAMRLERVCKKDVEINGMFIPKGVGGDDSNPSYALHRDPKYWTEPEKFLPERFSKKNKDNIDPYIYTPFGSGPRNCIGMRFALMNMKLALIRVLQNFSFKPCKETQSS

SEQ ID NO: 890337 - protein, 337 aa, Homo sapiens
MALIPDLAMETWLLLAVSLVLLYLYGTHSHGLFKKLGIPGPTPLPFLGNILSYHKGFCMFDMECHKKYGKVWGFYDGQQPVLAITDPDMIKTVLVKECYSVFTNRRPFGPVGFMKSAISIAEDEEWKRLRSLLSPTFTSGKLKERNLRREAETGKPVTLKDVFGAYSMDVITSTSFGVNIDSLNNPQDPFVENTKKLLRFDFLDPFFLSITVFPFLIPILEVLNICVFPREVTNFLRKSVKRMKESRLEDTQKHRVDFLQLMIDSQNSKETESHKALSDLELVAQSIIFIFAGYETTSSVLSFIMYELATHPDVQQKLQEEIDAVLPNKIIPNCYET

SEQ ID NO: 890338 - protein, 397 aa, Homo sapiens
MALIPDLAMETWLLLAVSLVLLYLYGTHSHGLFKKLGIPGPTPLPFLGNILSYHKGFCMFDMECHKKYGKVWGFYDGQQPVLAITDPDMIKTVLVKECYSVFTNRRPFGPVGFMKSAISIAEDEEWKRLRSLLSPTFTSGKLKERNLRREAETGKPVTLKDVFGAYSMDVITSTSFGVNIDSLNNPQDPFVENTKKLLRFDFLDPFFLSITVFPFLIPILEVLNICVFPREVTNFLRKSVKRMKESRLEDTQKHRVDFLQLMIDSQNSKETESHKALSDLELVAQSIIFIFAGYETTSSVLSFIMYELATHPDVQQKLQEEIDAVLPNKAPPTYDTVLQMDLPTWNQIQQEEQGQHRSLHIHTLWKWTQKLHWHEVCSHEHETCSNQSPSELLLQTL

SEQ ID NO: 890339 - protein, 489 aa, Homo sapiens
MALIPDLAMETWLLLAVSLVLLYLYGTHSHGLFKKLGIPGPTPLPFLGNILSYHKGFCMFDMECHKKYGKVWGFYDGQQPVLAITDPDMIKTVLVKECYSVFTNRRPFGPVGFMKSAISIAEDEEWKRLRSLLSPTFTSGKLKERNLRREAETGKPVTLKDVFGAYSMDVITSTSFGVNIDSLNNPQDPFVENTKKLLRFDFLDPFFLSITVFPFLIPILEVLNICVFPREVTNFLRKSVKRMKESRLEDTQKHRVDFLQLMIDSQNSKETESHKALSDLELVAQSIIFIFAGYETTSSVLSFIMYELATHPDVQQKLQEEIDAVLPNKAPPTYDAVVQMEYLDMVVNETLRLFPVAIRLERTCKKDVEINGVFIPKGSMVVIPTYALHHDPKYWTEPEEFRPERFSKKKDSIDPYIYTPFGTGPRNCIGMRFALMNMKLALIRVLQNFSFKPCKETQIPLKLDTQGLLQPEKPIVLKVDSRDGTLSGE

SEQ ID NO: 890340 - protein, 489 aa, Homo sapiens; identical to SEQ ID NO: 890339

SEQ ID NO: 890341 - protein, 393 aa, Homo sapiens
MALIPDLAMETWLLLAVSLVLLYLYGTHSHGLFKKLGIPGPTPLPFLGNILSYHKGFCMFDMECHKKYGKVWGFYDGQQPVLAITDPDMIKTVLVKECYSVFTNRRPFGPVGFMKSAISIAEDEEWKRLRSLLSPTFTSGKLKERNLRREAETGKPVTLKDVFGAYSMDVITSTSFGVNIDSLNNPQDPFVENTKKLLRFDFLDPFFLSITVFPFLIPILEVLNICVFPREVTNFLRKSVKRMKESRLEDTQKHRVDFLQLMIDSQNSKETESHKALSDLELVAQSIIFIFAGYETTSSVLSFIMYELATHPDVQQKLQEEIDAVLPNKAPPTYDTVLQMEYLDMVVNETLRLFPIAMRLERVCKKDVEINGMFIPKGVGGDDSNFALQEICA

SEQ ID NO: 890342 - protein, 207 aa, Homo sapiens
SVNVSNDVDKRGLSLHRLSYLPPLPVFPFLIPILEVLNICVFPREVTNFLRKSVKRMKESRLEDTQKHRVDFLQLMIDSQNSKETESHKALSDLELVAQSIIFIFAGYETTSSVLSFIMYELATHPDVQQKLQEEIDAVLPNKAPPTYDTVLQMEYLDMVVNETLRLFPIAMRLERVCKKDVEINGMFIPKGVGGDDSNFALQEICA

SEQ ID NO: 890343 - protein, 471 aa, Homo sapiens
MALIPDLAMETWLLLAVSLVLLYLYGTHSHGLFKKLGIPGPTPLPFLGNILSYHKGFCMFDMECHKKYGKVWGFYDGQQPVLAITDPDMIKTVLVKECYSVFTNRRPFGPVGFMKSAISIAEDEEWKRLRSLLSPTFTSGKLKERNLRREAETGKPVTLKDVFGAYSMDVITSTSFGVNIDSLNNPQDPFVENTKKLLRFDFLDPFFLSITVFPFLIPILEVLNICVFPREVTNFLRKSVKRMKESRLEDTQKHRVDFLQLMIDSQNSIIFIFAGYETTSSVLSFIMYELATHPDVQQKLQEEIDAVLPNKAPPTYDAVVQMEYLDMVVNETLRLFPVAIRLERTCKKDVEINGVFIPKGSMVVIPTYALHHDPKYWTEPEEFRPERFSKKKDSIDPYIYTPFGTGPRNCIGMRFALMNMKLALIRVLQNFSFKPCKETQIPLKLDTQGLLQPEKPIVLKVDSRDGTLSGE

SEQ ID NO: 890344 - protein, 443 aa, Homo sapiens
GTAKAPARPGSEARGCMEWPARLCGLWALLLCAGGGGGGGGAAPTETQPPVTNLSVSVENLCTVIWTWNPPEGASSNCSLWYFSHFGDKQDKKIAPETRRSIEVPLNERICLQVGSQCSTNESEKPSILVEKCISPPEGDPESAVTELQCIWHNLSYMKCSWLPGRNTSPDTNYTLYYWHRSLEKIHQCENIFREGQYFGCSFDLTKVKDSSFEQHSVQIMVKDNAGKIKPSFNIVPLTSRVKPDPPHIKNLSFHNDDLYVQWENPQNFISRCLFYEVEVNNSQTETHNVFYVQEAKCENPEFERNVENTSCFMVPGVLPDTLNTVRIRVKTNKLCYEDDKLWSNWSQEMSIGKKRNSTLYITMLLIVPVIVAGAIIVLLLYLKRLKIIIFPPIPDPGKIFKEMFGDQNDDTLHWKKYDIYEKQTKEETDSVVLIENLKKASQ

SEQ ID NO: 890345 - protein, 443 aa, Homo sapiens; identical to SEQ ID NO: 890344

SEQ ID NO: 890346 - protein, 295 aa, Homo sapiens
GTAKAPARPGSEARGCMEWPARLCGLWALLLCAGGGGGGGGAAPTETQPPVTNLSVSVENLCTVIWTWNPPEGASSNCSLWYFSHFGDKQDKKIAPETRRSIEVPLNERICLQVGSQCSTNESEKPSILVEKCISPPEGDPESAVTELQCIWHNLSYMKCSWLPGRNTSPDTNYTLYYWHRSLEKIHQCENIFREGQYFGCSFDLTKVKDSSFEQHSVQIMVKDNAGKIKPSFNIVPLTSRVKPDPPHIKNLSFHNDDLYVQWENPQNFISRCLFYEVEVNNSQTETHNVFYVRF

SEQ ID NO: 890347 - protein, 70 aa, Homo sapiens
LITGSVATSAKYFDAGGDSDDYGSGECLETRMMISGNKPSGLPESIRDLKITKSPHPDSEKPDPSPFLIG

SEQ ID NO: 890348 - protein, 443 aa, Homo sapiens; identical to SEQ ID NO: 890344

SEQ ID NO: 890349 - protein, 443 aa, Homo sapiens; identical to SEQ ID NO: 890344

SEQ ID NO: 890350 - protein, 443 aa, Homo sapiens; identical to SEQ ID NO: 890344

SEQ ID NO: 890351 - protein, 443 aa, Homo sapiens; identical to SEQ ID NO: 890344

SEQ ID NO: 890352 - protein, 256 aa, Homo sapiens
GTAKAPARPGSEARGCMEWPARLCGLWALLLCAGGGGGGGGAAPTETQPPVTNLSVSVENLCTVIWTWNPPEGASSNCSLWYFSHFGDKQDKKIAPETRRSIEVPLNERICLQVGSQCSTNESEKPSILVEKCISPPEGDPESAVTELQCIWHNLSYMKCSWLPGRNTSPDTNYTLYYWHRSLEKIHQCENIFREGQYFGCSFDLTKVKDSSFEQHSVQIMVKDNAGKIKPSFNIVPLTSRGPTSPYCHIGDEVST

SEQ ID NO: 890353 - protein, 443 aa, Homo sapiens; identical to SEQ ID NO: 890344

SEQ ID NO: 890354 - protein, 443 aa, Homo sapiens; identical to SEQ ID NO: 890344

SEQ ID NO: 890355 - protein, 426 aa, Homo sapiens
GTAKAPARPGSEARGCMEWPARLCGLWALLLCAGGGGGGGGAAPTETQPPVTNLSVSVENLCTVIWTWNPPEGASSNCSLWYFSHFGDKQDKKIAPETRRSIEVPLNERICLQVGSQCSTNESEKPSILVEKCISPPEGDPESAVTELQCIWHNLSYMKCSWLPGRNTSPDTNYTLYYWHRSLEKIHQCENIFREGQYFGCSFDLTKVKDSSFEQHSVQIMVKDNAGKIKPSFNIVPLTSRVKPDPPHIKNLSFHNDDLYVQWENPQNFISRCLFYEVEVNNSQTETHNVFYVQEAKCENPEFERNVENTSCFMVPGVLPDTLNTVRIRVKTNKLCYEDDKLWSNWSQEMSIGKKRNSTLYITMLLIVPVIVAGAIIVLLLYLKRLKIIIFPPIPDPGKIFKEMFGDQNDDTLETNHQASQKVSGI

SEQ ID NO: 890356 - protein, 444 aa, Homo sapiens
GTAKAPARPGSEARGCMEWPARLCGLWALLLCAGGGGGGGGAAPTETQPPVTNLSVSVENLCTVIWTWNPPEGASSNCSLWYFSHFGDKQDKKIAPETRRSIEVPLNERICLQVGSQCSTNESEKPSILVEKCISPPEGDPESAVTELQCIWHNLSYMKCSWLPGRNTSPDTNYTLYYWHRSLEKIHQCENIFREGQYFGCSFDLTKVKDSSFEQHSVQIMVKDNAGKIKPSFNIVPLTSRVKPDPPHIKNLSFHNDDLYVQWENPQNFISRCLFYEVEVNNSQTETHNVFYVQEAKCENPEFERNVENTSCFMVPGVLPDTLNTVRIRVKTNKLCYEDDKLWSNWSQEMSIGKKRNSTLYITMLLIVPVIVAGAIIVLLLYLKRLKIIIFPPIPDPGKIFKEMFGDQNDDTLPWKKISLIRLREVKLLVQGHTIHSFFSLILP

SEQ ID NO: 890357 - protein, 369 aa, Homo sapiens
GTAKAPARPGSEARGCMEWPARLCGLWALLLCAGGGGGGGGAAPTETQPPVTNLSVSVENLCTVIWTWNPPEGASSNCSLWYFSHFGDKQDKKIAPETRRSIEVPLNERICLQVGSQCSTNESEKPSILVEKCISPPEGDPESAVTELQCIWHNLSYMKCSWLPGRNTSPDTNYTLYYWHRSLEKIHQCENIFREGQYFGCSFDLTKVKDSSFEQHSVQIMVKDNAGKIKPSFNIVPLTSRVKPDPPHIKNLSFHNDDLYVQWENPQNFISRCLFYEVEVNNSQTETHNVFYVQEAKCENPEFERNVENTSCFMVPGVLPDTLNTVRIRVKTNKLCYEDDKLWSNWSQEMSIGKRTEFLLKFKTLMYKN

SEQ ID NO: 890358 - protein, 549 aa, Homo sapiens [sequence omitted]

SEQ ID NO: 890359 - protein, 549 aa, Homo sapiens [sequence omitted]

SEQ ID NO: 890360 - protein, 549 aa, Homo sapiens [sequence omitted]

SEQ ID NO: 890361 - protein, 397 aa, Homo sapiens
MMVKDEYVHDFEGQPSLSTEGHSIQTIQHPPSNRASTETYSTPALLAPSESNATSTANFPNIPVASTSQPASILGGSHSEGLLQIASGPQPGQQQNGFTGQPATYHHNSTTTWTGSRTAPYTPNLPHHQNGHLQHHPPMPPHPGHYWPVHNELAFQPPISNHPAPEYWCSIAYFEMDVQVGETFKVPSSCPIVTVDGYVDPSGGDRFCLGQLSNVHRTEAIERARLHIGKGVQLECKGEGDVWVRCLSDHAVFVQSYYLDREAGRAPGDAVHKIYPSAYIKVFDLRQCHRQMQQQAATAQAAAAAQAAAVAGNIPGPGSVGGIAPAISLSAAAGIGVDDLRRLCILRMSFVKGWGPDYPRQSIKETPCWIEIHLHRALQLLDEVLHTMPIADPQPLD

SEQ ID NO: 890362 - protein, 397 aa, Homo sapiens; identical to SEQ ID NO: 890361

SEQ ID NO: 890363 - protein, 397 aa, Homo sapiens; identical to SEQ ID NO: 890361

SEQ ID NO: 890364 - protein, 549 aa, Homo sapiens [sequence omitted]

SEQ ID NO: 890365 - protein, 439 aa, Homo sapiens
MSITNTPTSNDACLSIVHSLMCHRQGGESETFAKRAIESLVKKLKEKKDELDSLITAITTNGAHPSKCVTIQRTLDGRLQVAGRKGFPHVIYARLWRWPDLHKNELKHVKYCQYAFDLKCDSVCVNPYHYERVVSPGIDLSGLTLQSNAPSSMMVKDEYVHDFEGQPSLSTEGHSIQTIQHPPSNRASTETYSTPALLAPSESNATSTANFPNIPVASTSQPASILGGSHSEGLLQIASGPQPGQQQNGFTGQPATYHHNSTTTWTGSRTAPYTPNLPHHQNGHLQHHPPMPPHPGHYWPVHNELAFQPPISNHPAPEYWCSIAYFEMDVQVGETFKVPSSCPIVTVDGYVDPSGGDRFCLGQLSNVHRTEAIERARLHIGKGVQLECKGEGDVWVRCLSDHAVFVQSYYLDREAGRAPGDAVHKIYPSAYIKVSYNFI

SEQ ID NO: 890366 - protein, 330 aa, Homo sapiens
MSITNTPTSNDACLSIVHSLMCHRQGGESETFAKRAIESLVKKLKEKKDELDSLITAITTNGAHPSKCVTIQRTLDGRLQVAGRKGFPHVIYARLWRWPDLHKNELKHVKYCQYAFDLKCDSVCVNPYHYERVVSPGIDLSGLTLQSNAPSSMMVKDEYVHDFEGQPSLSTEGHSIQTIQHPPSNRASTETYSTPALLAPSESNATSTANFPNIPVASTSQPASILGGSHSEGLLQIASGPQPGQQQNGFTGQPATYHHNSTTTWTGSRTAPYTPNLPQMGLTELGCCPRVRLNVLLCYYLLHANFTYISMNIQHSLNTVPPALVIAFQK

SEQ ID NO: 890367 - protein, 253 aa, Homo sapiens
MSITNTPTSNDACLSIVHSLMCHRQGGESETFAKRAIESLVKKLKEKKDELDSLITAITTNGAHPSKCVTIQRTLDGRLQVAGRKGFPHVIYARLWRWPDLHKNELKHVKYCQYAFDLKCDSVCVNPYHYERVVSPGIDLSGLTLQSNAPSSMMVKDEYVHDFEGQPSLSTEGHSIQTIQHPPSNRASTETYSTPALLAPSESNATSTANFPNIPVASTSQPASILGGSHSEGLLQIASGPQPGQHPSSVSPI

SEQ ID NO: 890368 - protein, 107 aa, Homo sapiens
MSITNTPTSNDACLSIVHSLMCHRQGGESETFAKRAIESLVKKLKEKKDELDSLITAITTNGAHPSKCVTIQRTLDGRLQVSLIRVFPSSLPASLPYFSLGHSETLS

SEQ ID NO: 890369 - protein, 549 aa, Homo sapiens [sequence omitted]

SEQ ID NO: 890370 - protein, 531 aa, Homo sapiens
MSITNTPTSNDACLSIVHSLMCHRQGGESETFAKRAIESLVKKLKEKKDELDSLITAITTNGAHPSKCVTIQRTLDGRLQVAGRKGFPHVIYARLWRWPDLHKNELKHVKYCQYAFDLKCDLSGLTLQSNAPSSMMVKDEYVHDFEGQPSLSTEGHSIQTIQHPPSNRASTETYSTPALLAPSESNATSTANFPNIPVASTSQPASILGGSHSEGLLQIASGPQPGQQQNGFTGQPATYHHNSTTTWTGSRTAPYTPNLPHHQNGHLQHHPPMPPHPGHYWPVHNELAFQPPISNHPAPEYWCSIAYFEMDVQVGETFKVPSSCPIVTVDGYVDPSGGDRFCLGQLSNVHRTEAIERARLHIGKGVQLECKGEGDVWVRCLSDHAVFVQSYYLDREAGRAPGDAVHKIYPSAYIKVFDLRQCHRQMQQQAATAQAAAAAQAAAVAGNIPGPGSVGGIAPAISLSAAAGIGVDDLRRLCILRMSFVKGWGPDYPRQSIKETPCWIEIHLHRALQLLDEVLHTMPIADPQPLD

SEQ ID NO: 890371 - protein, 397 aa, Homo sapiens; identical to SEQ ID NO: 890361

SEQ ID NO: 890372 - protein, 322 aa, Homo sapiens
TYPVQRRKISQRAQPGQQQNGINQSTTTTYHHNSTTTWTGSRTAPYTPNLPHHQNGHLQHHPPMPPHPGHYWPVHNELAFQPPISNHPAPEYWCSIAYFEMDVQVGETFKVPSSCPIVTVDGYVDPSGGDRFCLGQLSNVHRTEAIERARLHIGKGVQLECKGEGDVWVRCLSDHAVFVQSYYLDREAGRAPGDAVHKIYPSAYIKVFDLRQCHRQMQQQAATAQAAAAAQAAAVAGNIPGPGSVGGIAPAISLSAAAGIGVDDLRRLCILRMSFVKGWGPDYPRQSIKETPCWIEIHLHRALQLLDEVLHTMPIADPQPLD

SEQ ID NO: 890373 - protein, 549 aa, Homo sapiens [sequence omitted]

SEQ ID NO: 890374 - protein, 310 aa, Homo sapiens
MSITNTPTSNDACLSIVHSLMCHRQGGESETFAKRAIESLVKKLKEKKDELDSLITAITTNGAHPSKCVTIQRTLDGRLQVAGRKGFPHVIYARLWRWPDLHKNELKHVKYCQYAFDLKCDSVCVNPYHYERVVSPGIDLSGLTLQSNAPSSMMVKDEYVHDFEGQPSLSTEGHSIQTIQHPPSNRASTETYSTPALLAPSESNATSTANFPNIPVASTSQPASILGGSHSEGLLQIASGPQPGQQQNGFTGQPATYHHNSTTTWTGSRTAPYTPNLPHHQNGHLQHHPSFARTRDRARNPNHPKAVPGG

SEQ ID NO: 890375 - protein, 140 aa, Homo sapiens
MSITNTPTSNDACLSIVHSLMCHRQGGESETFAKRAIESLVKKLKEKKDELDSLITAITTNGAHPSKCVTIQRTLDGRLQVAGRKGFPHVIYARLWRWPDLHKNELKHVKYCQYAFDLKCDSVCVNPYHYERVVSPGIGK

SEQ ID NO: 890376 - protein, 121 aa, Homo sapiens
ATTPSNRPSPPPALRPRPRSRFRAARRLALPCRRLRRATLPVTRSGRRGQPGERKAAGEKGQTLKLPGCGPRARMLSGFSTSWQQQHGPGRRRRCGNGAVWVAEPAFAPSRSPREALPALP

SEQ ID NO: 890377 - protein, 934 aa, Homo sapiens
MSAVGEPLFSFEQERLGPLSSRTFSMADPGSAERTAQKRKFPSPPHSSNGHSPQDTSTSPIKKKKKPGLLNSNNKEQDGRNDFYCWVCHREGQVLCCELCPRVYHAKCLRLTSEPEGDWFCPECEKITVAECIETQSKAMTMLTIEQLSYLLKFAIQKMKQPGTDAFQKPVPLEQHPDYAEYIFHPMDLCTLEKNAKKKMYGCTEAFLADAKWILHNCIIYNGGNHKLTQIAKVVIKICEHEMNEIEVCPECYLAACQKRDNWFCEPCSNPHPLVWAKLKGFPFWPAKALRDKDGQVDARFFGQHDRAWVPINNCYLMSKEIPFSVKKTKSIFNSAMQEMEVYVENIRRKFGVFNYSPFRTPYTPNSQYQMLLDPTNPSAGTAKIDKQEKVKLNFDMTASPKILMSKPVLSGGTGRRISLSDMPRSPMSTNSSVHTGSDVEQDAEKKATSSHFSASEESMDFLDKSTASPASTKTGQAGSLSGSPKPFSPQLSAPITTKTDKTSTTGSILNLNLDRSKAEMDLKELSESVQQQSTPVPLISPKRQIRSRFQLNLDKTIESCKAQLGINEISEDVYTAVEHSDSEDSEKSDSSDSEYISDDEQKSKNEPEDTEDKEGCQMDKEPSAVKKKPKPTNPVEIKEELKSTSPASEKADPGAVKDKASPEPEKDFSEKAKPSPHPIKDKLKGKDETDSPTVHLGLDSDSESELVIDLGEDHSGREGRKNKKEPKEPSPKQDVVGKTPPSTTVGSHSPPETPVLTRSSAQTSAAGATATTSTSSTVTVTAPAPAATGSPVKKQRPLLPKETAPAVQRVVWNSSSKFQTSSQKWHMQKMQRQQQQQQQQNQQQQPQSSQGTRYQTRQAVKGTEPPLLFSVAPAPILPHRQEKVIALLFFFFSSRLFPGHCILKALHIPFGIIFKNCFATCFFTFKKFFLFIL

SEQ ID NO: 890378 - protein, 1135 aa, Homo sapiens
MHPQSLAEEEIKTEQEVVEGMDISTRSKDPGSAERTAQKRKFPSPPHSSNGHSPQDTSTSPIKKKKKPGLLNSNNKEQDGRNDFYCWVCHREGQVLCCELCPRVYHAKCLRLTSEPEGDWFCPECEKITVAECIETQSKAMTMLTIEQLSYLLKFAIQKMKQPGTDAFQKPVPLEQHPDYAEYIFHPMDLCTLEKNAKKKMYGCTEAFLADAKWILHNCIIYNGGNHKLTQIAKVVIKICEHEMNEIEVCPECYLAACQKRDNWFCEPCSNPHPLVWAKLKGFPFWPAKALRDKDGQVDARFFGQHDRAWVPINNCYLMSKEIPFSVKKTKSIFNSAMQEMEVYVENIRRKFGVFNYSPFRTPYTPNSQYQMLLDPTNPSAGTAKIDKQEKVKLNFDMTASPKILMSKPVLSGGTGRRISLSDMPRSPMSTNSSVHTGSDVEQDAEKKATSSHFSASEESMDFLDKSTASPASTKTGQAGSLSGSPKPFSPQLSAPITTKTDKTSTTGSILNLNLDRSKAEMDLKELSESVQQQSTPVPLISPKRQIRSRFQLNLDKTIESCKAQLGINEISEDVYTAVEHSDSEDSEKSDSSDSEYISDDEQKSKNEPEDTEDKEGCQMDKEPSAVKKKPKPTNPVEIKEELKSTSPASEKADPGAVKDKASPEPEKDFSEKAKPSPHPIKDKLKGKDETDSPTVHLGLDSDSESELVIDLGEDHSGREGRKNKKEPKEPSPKQDVVGKTPPSTTVGSHSPPETPVLTRSSAQTSAAGATATTSTSSTVTVTAPAPAATGSPVKKQRPLLPKETAPAVQRVVWNSSTVQQKEITQSPSTSTITLVTSTQSSPLVTSSGSMSTLVSSVNADLPIATASADVAADIAKYTSKMMDAIKGTMTEIYNDLSKNTTGSTIAEIRRLRIEIEKLQWLHQQELSEMKHNLELTMAEMRQSLEQERDRLIAEVKKQLELEKQQAVDETKKKQWCANCKKEAIFYCCWNTSYCDYPCQQAHWPEHMKSCTQSATAPQQEADAEVNTETLNKSSQGSSSSTQSAPSETASASKEKETSAEKSKESGSTLDLSGSRETPSSILLGSNQGSDHSRSNKSSWSSSDEKRGSTRSDHNTSTSTKSLLPKESRLDTFWD

SEQ ID NO: 890379 - protein, 1072 aa, Homo sapiens
MKQPLTTDPVDVVPQDGRNDFYCWVCHREGQVLCCELCPRVYHAKCLRLTSEPEGDWFCPECEKITVAECIETQSKAMTMLTIEQLSYLLKFAIQKMKQPGTDAFQKPVPLEQHPDYAEYIFHPMDLCTLEKNAKKKMYGCTEAFLADAKWILHNCIIYNGGNHKLTQIAKVVIKICEHEMNEIEVCPECYLAACQKRDNWFCEPCSNPHPLVWAKLKGFPFWPAKALRDKDGQVDARFFGQHDRAWVPINNCYLMSKEIPFSVKKTKSIFNSAMQEMEVYVENIRRKFGVFNYSPFRTPYTPNSQYQMLLDPTNPSAGTAKIDKQEKVKLNFDMTASPKILMSKPVLSGGTGRRISLSDMPRSPMSTNSSVHTGSDVEQDAEKKATSSHFSASEESMDFLDKSTASPASTKTGQAGSLSGSPKPFSPQLSAPITTKTDKTSTTGSILNLNLDRSKAEMDLKELSESVQQQSTPVPLISPKRQIRSRFQLNLDKTIESCKAQLGINEISEDVYTAVEHSDSEDSEKSDSSDSEYISDDEQKSKNEPEDTEDKEGCQMDKEPSAVKKKPKPTNPVEIKEELKSTSPASEKADPGAVKDKASPEPEKDFSEKAKPSPHPIKDKLKGKDETDSPTVHLGLDSDSESELVIDLGEDHSGREGRKNKKEPKEPSPKQDVVGKTPPSTTVGSHSPPETPVLTRSSAQTSAAGATATTSTSSTVTVTAPAPAATGSPVKKQRPLLPKETAPAVQRVVWNSSTVQQKEITQSPSTSTITLVTSTQSSPLVTSSGSMSTLVSSVNADLPIATASADVAADIAKYTSKMMDAIKGTMTEIYNDLSKNTTGSTIAEIRRLRIEIEKLQWLHQQELSEMKHNLELTMAEMRQSLEQERDRLIAEVKKQLELEKQQAVDETKKKQWCANCKKEAIFYCCWNTSYCDYPCQQAHWPEHMKSCTQSATAPQQEADAEVNTETLNKSSQGSSSSTQSAPSETASASKEKETSAEKSKESGSTLDLSGSRETPSSILLGSNQGSDHSRSNKSSWSSSDEKRGSTRSDHNTSTSTKSLLPKESRLDTFWD

SEQ ID NO: 890380 - protein, 1196 aa, Homo sapiens
RIVTVRTRIAVLSLLEIHCALKIRCGFPPPALDKDEGMSLSLAEEEIKTEQEVVEGMDISTRSKDPGSAERTAQKRKFPSPPHSSNGHSPQDTSTSPIKKKKKPGLLNSNNKEQSELRHGPFYYMKQPLTTDPVDVVPQDGRNDFYCWVCHREGQVLCCELCPRVYHAKCLRLTSEPEGDWFCPECEKITVAECIETQSKAMTMLTIEQLSYLLKFAIQKMKQPGTDAFQKPVPLEQHPDYAEYIFHPMDLCTLEKNAKKKMYGCTEAFLADAKWILHNCIIYNGGNHKLTQIAKVVIKICEHEMNEIEVCPECYLAACQKRDNWFCEPCSNPHPLVWAKLKGFPFWPAKALRDKDGQVDARFFGQHDRAWVPINNCYLMSKEIPFSVKKTKSIFNSAMQEMEVYVENIRRKFGVFNYSPFRTPYTPNSQYQMLLDPTNPSAGTAKIDKQEKVKLNFDMTASPKILMSKPVLSGGTGRRISLSDMPRSPMSTNSSVHTGSDVEQDAEKKATSSHFSASEESMDFLDKSTASPASTKTGQAGSLSGSPKPFSPQLSAPITTKTDKTSTTGSILNLNLDRSKAEMDLKELSESVQQQSTPVPLISPKRQIRSRFQLNLDKTIESCKAQLGINEISEDVYTAVEHSDSEDSEKSDSSDSEYISDDEQKSKNEPEDTEDKEGCQMDKEPSAVKKKPKPTNPVEIKEELKSTSPASEKADPGAVKDKASPEPEKDFSEKAKPSPHPIKDKLKGKDETDSPTVHLGLDSDSESELVIDLGEDHSGREGRKNKKEPKEPSPKQDVVGKTPPSTTVGSHSPPETPVLTRSSAQTSAAGATATTSTSSTVTVTAPAPAATGSPVKKQRPLLPKETAPAVQRVVWNSSTVQQKEITQSPSTSTITLVTSTQSSPLVTSSGSMSTLVSSVNADLPIATASADVAADIAKYTSKMMDAIKGTMTEIYNDLSKNTTGSTIAEIRRLRIEIEKLQWLHQQELSEMKHNLELTMAEMRQSLEQERDRLIAEVKKQLELEKQQAVDETKKKQWCANCKKEAIFYCCWNTSYCDYPCQQAHWPEHMKSCTQSATAPQQEADAEVNTETLNKSSQGSSSSTQSAPSETASASKEKETSAEKSKESGSTLDLSGSRETPSSILLGSNQGSDHSRSNKSSWSSSDEKRGSTRSDHNTSTSTKSLLPKESRLDTFWD

SEQ ID NO: 890381 - protein, 1159 aa, Homo sapiens
MSAVGEPLFSFEQERLGPLSSRTFSMADPGSAERTAQKRKFPSPPHSSNGHSPQDTSTSPIKKKKKPGLLNSNNKEQSELRHGPFYYMKQPLTTDPVDVVPQDGRNDFYCWVCHREGQVLCCELCPRVYHAKCLRLTSEPEGDWFCPECEKITVAECIETQSKAMTMLTIEQLSYLLKFAIQKMKQPGTDAFQKPVPLEQHPDYAEYIFHPMDLCTLEKNAKKKMYGCTEAFLADAKWILHNCIIYNGGNHKLTQIAKVVIKICEHEMNEIEVCPECYLAACQKRDNWFCEPCSNPHPLVWAKLKGFPFWPAKALRDKDGQVDARFFGQHDRAWVPINNCYLMSKEIPFSVKKTKSIFNSAMQEMEVYVENIRRKFGVFNYSPFRTPYTPNSQYQMLLDPTNPSAGTAKIDKQEKVKLNFDMTASPKILMSKPVLSGGTGRRISLSDMPRSPMSTNSSVHTGSDVEQDAEKKATSSHFSASEESMDFLDKSTASPASTKTGQAGSLSGSPKPFSPQLSAPITTKTDKTSTTGSILNLNLDRSKAEMDLKELSESVQQQSTPVPLISPKRQIRSRFQLNLDKTIESCKAQLGINEISEDVYTAVEHSDSEDSEKSDSSDSEYISDDEQKSKNEPEDTEDKEGCQMDKEPSAVKKKPKPTNPVEIKEELKSTSPASEKADPGAVKDKASPEPEKDFSEKAKPSPHPIKDKLKGKDETDSPTVHLGLDSDSESELVIDLGEDHSGREGRKNKKEPKEPSPKQDVVGKTPPSTTVGSHSPPETPVLTRSSAQTSAAGATATTSTSSTVTVTAPAPAATGSPVKKQRPLLPKETAPAVQRVVWNSSTVQQKEITQSPSTSTITLVTSTQSSPLVTSSGSMSTLVSSVNADLPIATASADVAADIAKYTSKMMDAIKGTMTEIYNDLSKNTTGSTIAEIRRLRIEIEKLQWLHQQELSEMKHNLELTMAEMRQSLEQERDRLIAEVKKQLELEKQQAVDETKKKQWCANCKKEAIFYCCWNTSYCDYPCQQAHWPEHMKSCTQSATAPQQEADAEVNTETLNKSSQGSSSSTQSAPSETASASKEKETSAEKSKESGSTLDLSGSRETPSSILLGSNQGSDHSRSNKSSWSSSDEKRGSTRSDHNTSTSTKSLLPKESRLDTFWD

SEQ ID NO: 890382 - protein, 1140 aa, Homo sapiens
MDISTRSKDPGSAERTAQKRKFPSPPHSSNGHSPQDTSTSPIKKKKKPGLLNSNNKEQSELRHGPFYYMKQPLTTDPVDVVPQDGRNDFYCWVCHREGQVLCCELCPRVYHAKCLRLTSEPEGDWFCPECEKITVAECIETQSKAMTMLTIEQLSYLLKFAIQKMKQPGTDAFQKPVPLEQHPDYAEYIFHPMDLCTLEKNAKKKMYGCTEAFLADAKWILHNCIIYNGGNHKLTQIAKVVIKICEHEMNEIEVCPECYLAACQKRDNWFCEPCSNPHPLVWAKLKGFPFWPAKALRDKDGQVDARFFGQHDRAWVPINNCYLMSKEIPFSVKKTKSIFNSAMQEMEVYVENIRRKFGVFNYSPFRTPYTPNSQYQMLLDPTNPSAGTAKIDKQEKVKLNFDMTASPKILMSKPVLSGGTGRRISLSDMPRSPMSTNSSVHTGSDVEQDAEKKATSSHFSASEESMDFLDKSTASPASTKTGQAGSLSGSPKPFSPQLSAPITTKTDKTSTTGSILNLNLDRSKAEMDLKELSESVQQQSTPVPLISPKRQIRSRFQLNLDKTIESCKAQLGINEISEDVYTAVEHSDSEDSEKSDSSDSEYISDDEQKSKNEPEDTEDKEGCQMDKEPSAVKKKPKPTNPVEIKEELKSTSPASEKADPGAVKDKASPEPEKDFSEKAKPSPHPIKDKLKGKDETDSPTVHLGLDSDSESELVIDLGEDHSGREGRKNKKEPKEPSPKQDVVGKTPPSTTVGSHSPPETPVLTRSSAQTSAAGATATTSTSSTVTVTAPAPAATGSPVKKQRPLLPKETAPAVQRVVWNSSTVQQKEITQSPSTSTITLVTSTQSSPLVTSSGSMSTLVSSVNADLPIATASADVAADIAKYTSKMMDAIKGTMTEIYNDLSKNTTGSTIAEIRRLRIEIEKLQWLHQQELSEMKHNLELTMAEMRQSLEQERDRLIAEVKKQLELEKQQAVDETKKKQWCANCKKEAIFYCCWNTSYCDYPCQQAHWPEHMKSCTQSATAPQQEADAEVNTETLNKSSQGSSSSTQSAPSETASASKEKETSAEKSKESGSTLDLSGSRETPSSILLGSNQGSDHSRSNKSSWSSSDEKRGSTRSDHNTSTSTKSLLPKESRLDTFWD

SEQ ID NO: 890383 - protein, 647 aa, Homo sapiens
IDLGEDHSGREGRKNKKEPKEPSPKQDDRSKAEMDLKELSESVQQQSTPVPLISPKRQIRSRFQLNLDKTIESCKAQLGINEISEDVYTAVEHSDSEDSEKSDSSDSEYISDDEQKSKNEPEDTEDKEGCQMDKEPSAVKKKPKPTNPVEIKEELKSTSPASEKADPGAVKDKASPEPEKDFSEKAKPSPHPIKDKLKGKDETDSPTVHLGLDSDSESELVIDLGEDHSGREGRKNKKEPKEPSPKQDVVGKTPPSTTVGSHSPPETPVLTRSSAQTSAAGATATTSTSSTVTVTAPAPAATGSPVKKQRPLLPKETAPAVQRVVWNSSTVQQKEITQSPSTSTITLVTSTQSSPLVTSSGSMSTLVSSVNADLPIATASADVAADIAKYTSKMMDAIKGTMTEIYNDLSKNTTGSTIAEIRRLRIEIEKLQWLHQQELSEMKHNLELTMAEMRQSLEQERDRLIAEVKKQLELEKQQAVDETKKKQWCANCKKEAIFYCCWNTSYCDYPCQQAHWPEHMKSCTQSATAPQQEADAEVNTETLNKSSQGSSSSTQSAPSETASASKEKETSAEKSKESGSTLDLSGSRETPSSILLGSNQGSDHSRSNKSSWSSSDEKRGSTRSDHNTSTSTKSLLPKESRLDTFWD

SEQ ID NO: 890384 - protein, 1186 aa, Homo sapiens
MDISTRSKDPGSAERTAQKRKFPSPPHSSNGHSPQDTSTSPIKKKKKPGLLNSNNKEQSELRHGPFYYMKQPLTTDPVDVVPQDGRNDFYCWVCHREGQVLCCELCPRVYHAKCLRLTSEPEGDWFCPECEKITVAECIETQSKAMTMLTIEQLSYLLKFAIQKMKQPGTDAFQKPVPLEQHPDYAEYIFHPMDLCTLEKNAKKKMYGCTEAFLADAKWILHNCIIYNGGNHKLTQIAKVVIKICEHEMNEIEVCPECYLAACQKRDNWFCEPCSNPHPLVWAKLKGFPFWPAKALRDKDGQVDARFFGQHDRAWVPINNCYLMSKEIPFSVKKTKSIFNSAMQEMEVYVENIRRKFGVFNYSPFRTPYTPNSQYQMLLDPTNPSAGTAKIDKQEKVKLNFDMTASPKILMSKPVLSGGTGRRISLSDMPRSPMSTNSSVHTGSDVEQDAEKKATSSHFSASEESMDFLDKSTASPASTKTGQAGSLSGSPKPFSPQLSAPITTKTDKTSTTGSILNLNLDRSKAEMDLKELSESVQQQSTPVPLISPKRQIRSRFQLNLDKTIESCKAQLGINEISEDVYTAVEHSDSEDSEKSDSSDSEYISDDEQKSKNEPEDTEDKEGCQMDKEPSAVKKKPKPTNPVEIKEELKSTSPASEKADPGAVKDKASPEPEKDFSEKAKPSPHPIKDKLKGKDETDSPTVHLGLDSDSESELVIDLGEDHSGREGRKNKKEPKEPSPKQDVVGKTPPSTTVGSHSPPETPVLTRSSAQTSAAGATATTSTSSTVTVTAPAPAATGSPVKKQRPLLPKETAPAVQRVVWNSSSKFQTSSQKWHMQKMQRQQQQQQQQNQQQQPQSSQGTRYQTRQAVKAVQQKEITQSPSTSTITLVTSTQSSPLVTSSGSMSTLVSSVNADLPIATASADVAADIAKYTSKMMDAIKGTMTEIYNDLSKNTTGSTIAEIRRLRIEIEKLQWLHQQELSEMKHNLELTMAEMRQSLEQERDRLIAEVKKQLELEKQQAVDETKKKQWCANCKKEAIFYCCWNTSYCDYPCQQAHWPEHMKSCTQSATAPQQEADAEVNTETLNKSSQGSSSSTQSAPSETASASKEKETSAEKSKESGSTLDLSGSRETPSSILLGSNQGSDHSRSNKSSWSSSDEKRGSTRSDHNTSTSTKSLLPKESRLDTFWD

SEQ ID NO: 890385 - protein, 960 aa, Homo sapiens
MHPQSLAEEEIKTEQEVVEGMDISTRSKDPGSAERTAQKRKFPSPPHSSNGHSPQDTSTSPIKKKKKPGLLNSNNKEQSELRHGPFYYMKQPLTTDPVDVVPQDGRNDFYCWVCHREGQVLCCELCPRVYHAKCLRLTSEPEGDWFCPECEKITVAECIETQSKAMTMLTIEQLSYLLKFAIQKMKQPGTDAFQKPVPLEQHPDYAEYIFHPMDLCTLEKNAKKKMYGCTEAFLADAKWILHNCIIYNGGNHKLTQIAKVVIKICEHEMNEIEVCPECYLAACQKRDNWFCEPCSNPHPLVWAKLKGFPFWPAKALRDKDGQVDARFFGQHDRAWVPINNCYLMSKEIPFSVKKTKSIFNSAMQEMEVYVENIRRKFGVFNYSPFRTPYTPNSQYQMLLDPTNPSAGTAKIDKQEKVKLNFDMTASPKILMSKPVLSGGTGRRISLSDMPRSPMSTNSSVHTGSDVEQDAEKKATSSHFSASEESMDFLDKSTASPASTKTGQAGSLSGSPKPFSPQLSAPITTKTDKTSTTGSILNLNLDRSKAEMDLKELSESVQQQSTPVPLISPKRQIRSRFQLNLDKTIESCKAQLGINEISEDVYTAVEHSDSEDSEKSDSSDSEYISDDEQKSKNEPEDTEDKEGCQMDKEPSAVKKKPKPTNPVEIKEELKSTSPASEKADPGAVKDKASPEPEKDFSEKAKPSPHPIKDKLKGKDETDSPTVHLGLDSDSESELVIDLGEDHSGREGRKNKKEPKEPSPKQDVVGKTPPSTTVGSHSPPETPVLTRSSAQTSAAGATATTSTSSTVTVTAPAPAATGSPVKKQRPLLPKETAPAVQRVVWNSSSKFQTSSQKWHMQKMQRQQQQQQQQNQQQQPQSSQGTRYQTRQAVKGTEPPLLFSVAPAPILPHRQEKVIALLFFFFSSRLFPGHCILKALHIPFGIIFKNCFATCFFTFKKFFLFIL

SEQ ID NO: 890386 - protein, 1142 aa, Homo sapiens
MHPQSLAEEEIKTEQEVVEGMDISTRSKDPGSAERTAQKRKFPSPPHSSNGHSPQDTSTSPIKKKKKPGLLNSNNKEQSELRHGPFYYMKQPLTTDPVDVVPQDGRNDFYCWVCHREGQVLCCELCPRVYHAKCLRLTSEPEGDWFCPECEKITVAECIETQSKAMTMLTIEQLSYLLKFAIQKMKQPGTDAFQKPVPLEQHPDYAEYIFHPMDLCTLEKNAKKKMYGCTEAFLADAKWILHNCIIYNGGNHKLTQIAKVVIKICEHEMNEIEVCPECYLAACQKRDNWFCEPCSNPHPLVWAKLKGFPFWPAKALRDKDGQVDARFFGQHDRAWVPINNCYLMSKEIPFSVKKTKSIFNSAMQEMEVYVENIRRKFGVFNYSPFRTPYTPNSQYQMLLDPTNPSAGTAKIDKQEKVKLNFDMTASPKILMSKPVLSGGTGRRISLSDMPRSPMSTNSSVHTGSDVEQDAEKKATSSHFSASEESMDFLDKSTASPASTKTGQAGSLSGSPKPFSPQLSAPITTKTDKTSTTGSILNLNLDRSKAEMDLKELSESVQQQSTPVPLISPKRQIRSRFQLNLDKTIESCKAQLGINEISEDVYTAVEHSDSEDSEKSDSSDSEYISDDEQKSKNEPEDTEDKEGCQMDKEPSAVKKKPKPTNPVEIKEELKSTSPASEKADPGAVKDKASPEPEKDFSEKAKPSPHPIKDKLKGKDETDSPTVHLGLDSDSESELVIDLGEDHSGREGRKNKKEPKEPSPKQDVVGKTPPSTTVGSHSPPETPVLTRSSAQTSAAGATATTSTSSTVTVTAPAPAATGSPVKKQRPLLPKETAPAVQRVVWNSSTVQQKEITQSPSTSTITLVTSTQSSPLVTSSGSMSTLVSSVNADLPIATASADVAADIAKYTSKMMDAIKGTMTEIYNDLSKNTTGSTIAEIRRLRIEIEKLQWLHQQELSEMKHNLELTMAEMRQSLEQERDRLIAEVKKQLELEKQQAVDETKKKQWCANCKKEAIFYCCWNTSYCDYPCQQAHWPEHMKSCTQSATAPQQEADAEVNTETLNKSSQGSSSSTQSAPSETASASKEKETSAESSILLGSNQGSDHSRSNKSSWSSSDEKRGSTRSDHNTSTSTKSLLPKESRLDTFWD

SEQ ID NO: 890387 - protein, 313 aa, Homo sapiens [sequence omitted]

SEQ ID NO: 890388 - protein, 313 aa, Homo sapiens [sequence omitted]

SEQ ID NO: 890389 - protein, 244 aa, Homo sapiens
MGTQPGLLPARSCIHVCLNLGAGITPHPRLGSGDERCSSPPPPELTMAEMRQSLEQERDRLIAEVKKQLELEKQQAVDETKKKQWCANCKKEAIFYCCWNTSYCDYPCQQAHWPEHMKSCTQSATAPQQEADAEVNTETLNKSSQGSSSSTQSAPSETASASKEKETSAEKSKESGSTLDLSGSRETPSSILLGSNQGSDHSRSNKSSWSSSDEKRGSTRSDHNTSTSTKSLLPKESRLDTFWD

SEQ ID NO: 890390 - protein, 1143 aa, Homo sapiens
MHPQSLAEEEIKTEQEVVEGMDISTRSKDPGSAERTAQKRKFPSPPHSSNGHSPQDTSTSPIKKKKKPGLLNSNNKEQSELRHGPFYYMKQPLTTDPVDVVPQDGRNDFYCWVCHREGQVLCCELCPRVYHAKCLRLTSEPEGDWFCPECEKITVAECIETQSKAMTMLTIEQLSYLLKFAIQKMKQPGTDAFQKPVPLEQHPDYAEYIFHPMDLCTLEKNAKKKMYGCTEAFLADAKWILHNCIIYNGGNHKLTQIAKVVIKICEHEMNEIEVCPECYLAACQKRDNWFCEPCSNPHPLVWAKLKGFPFWPAKALRDKDGQVDARFFGQHDRAWVPINNCYLMSKEIPFSVKKTKSIFNSAMQEMEVYVENIRRKFGVFNYSPFRTPYTPNSQYQMLLDPTNPSAGTAKIDKQEKVKLNFDMTASPKILMSKPVLSGGTGRRISLSDMPRSPMSTNSSVHTGSDVEQDAEKKATSSHFSASEESMDFLDKSTASPASTKTGQAGSLSGSPKPFSPQLSAPITTKTDKTSTTGSILNLNLDRSKAEMDLKELSESVQQQSTPVPLISPKRQIRSRFQLNLDKTIESCKAQLGINEISEDVYTAVEHSDSEDSEKSDSSDSEYISDDEQKSKNEPEDTEDKEGCQMDKEPSAVKKKPKPTNPVEIKEELKSTSPASEKADPGAVKDKASPEPEKDFSEKAKPSPHPIKDKLKGKDETDSPTVHLGLDSDSESELVIDLGEDHSGREGRKNKKEPKEPSPKQDVVGKTPPSTTVGSHSPPETPVLTRSSAQTSAAGATATTSTSSTVTVTAPAPAATGSPVKKQRPLLPKETAPAVQRVVWNSSTVQQKEITQSPSTSTITLVTSTQSSPLVTSSGSMSTLVSSVNADLPIATASADVAADIAKYTSKMMDAIKGTMTEIYNDLSKNTTGSTIAEIRRLRIEIEKLQWLHQQELSEMKHNLELTMAEMRQSLEQERDRLIAEVKKQLELEKQQAVDETKKKQWCANCKKEAIFYCCWNTSYCDYPCQQAHWPEHMKSCTQSATAPQQEADAEVNTETLNKSSQGSSSSTQSAPSETASASKEKETSAEKSKESGSTLDLSGSRETPSSILLGSNQGSVSNRCARHWVWPTTGHRGAIKPAEYLRV

SEQ ID NO: 890391 - protein, 763 aa, Homo sapiens [sequence omitted]

SEQ ID NO: 890392 - protein, 1135 aa, Homo sapiens; identical to SEQ ID NO: 890378

SEQ ID NO: 890393 - protein, 1160 aa, Homo sapiens
MHPQSLAEEEIKTEQEVVEGMDISTRSKDPGSAERTAQKRKFPSPPHSSNGHSPQDTSTSPIKKKKKPGLLNSNNKEQSELRHGPFYYMKQPLTTDPVDVVPQDGRNDFYCWVCHREGQVLCCELCPRVYHAKCLRLTSEPEGDWFCPECEKITVAECIETQSKAMTMLTIEQLSYLLKFAIQKMKQPGTDAFQKPVPLEQHPDYAEYIFHPMDLCTLEKNAKKKMYGCTEAFLADAKWILHNCIIYNGGNHKLTQIAKVVIKICEHEMNEIEVCPECYLAACQKRDNWFCEPCSNPHPLVWAKLKGFPFWPAKALRDKDGQVDARFFGQHDRAWVPINNCYLMSKEIPFSVKKTKSIFNSAMQEMEVYVENIRRKFGVFNYSPFRTPYTPNSQYQMLLDPTNPSAGTAKIDKQEKVKLNFDMTASPKILMSKPVLSGGTGRRISLSDMPRSPMSTNSSVHTGSDVEQDAEKKATSSHFSASEESMDFLDKSTASPASTKTGQAGSLSGSPKPFSPQLSAPITTKTDKTSTTGSILNLNLDRSKAEMDLKELSESVQQQSTPVPLISPKRQIRSRFQLNLDKTIESCKAQLGINEISEDVYTAVEHSDSEDSEKSDSSDSEYISDDEQKSKNEPEDTEDKEGCQMDKEPSAVKKKPKPTNPVEIKEELKSTSPASEKADPGAVKDKASPEPEKDFSEKAKPSPHPIKDKLKGKDETDSPTVHLGLDSDSESELVIDLGEDHSGREGRKNKKEPKEPSPKQDVVGKTPPSTTVGSHSPPETPVLTRSSAQTSAAGATATTSTSSTVTVTAPAPAATGSPVKKQRPLLPKETAPAVQRVVWNSSTVQQKEITQSPSTSTITLVTSTQSSPLVTSSGSMSTLVSSVNADLPIATASADVAADIAKYTSKMMDAIKGTMTEIYNDLSKNTTGSTIAEIRRLRIEIEKLQWLHQQELSEMKHNLELTMAEMRQSLEQERDRLIAEVKKQLELEKQQAVDETKKKQWCANCKKEAIFYCCWNTSYCDYPCQQAHWPEHMKSCTQSATAPQQEADAEVNTETLNKSSQGSSSSTQSAPSETASASKEKETSAEKSKESGSTLDLSGSRETPSSILLGSNQGSDHSRSNKSSWSSSDEKRGSTRSDHNTSTSTKSLLPKESRLDTFWD

SEQ ID NO: 890394 - protein, 1140 aa, Homo sapiens; identical to SEQ ID NO: 890382

SEQ ID NO: 890395 - protein, 1072 aa, Homo sapiens; identical to SEQ ID NO: 890379

SEQ ID NO: 890396 - protein, 1115 aa, Homo sapiens
MDISTRSKDPGSAERTAQKRKFPSPPHSSNGHSPQDTSTSPIKKKKKPGLLNSNNKEQDGRNDFYCWVCHREGQVLCCELCPRVYHAKCLRLTSEPEGDWFCPECEKITVAECIETQSKAMTMLTIEQLSYLLKFAIQKMKQPGTDAFQKPVPLEQHPDYAEYIFHPMDLCTLEKNAKKKMYGCTEAFLADAKWILHNCIIYNGGNHKLTQIAKVVIKICEHEMNEIEVCPECYLAACQKRDNWFCEPCSNPHPLVWAKLKGFPFWPAKALRDKDGQVDARFFGQHDRAWVPINNCYLMSKEIPFSVKKTKSIFNSAMQEMEVYVENIRRKFGVFNYSPFRTPYTPNSQYQMLLDPTNPSAGTAKIDKQEKVKLNFDMTASPKILMSKPVLSGGTGRRISLSDMPRSPMSTNSSVHTGSDVEQDAEKKATSSHFSASEESMDFLDKSTASPASTKTGQAGSLSGSPKPFSPQLSAPITTKTDKTSTTGSILNLNLDRSKAEMDLKELSESVQQQSTPVPLISPKRQIRSRFQLNLDKTIESCKAQLGINEISEDVYTAVEHSDSEDSEKSDSSDSEYISDDEQKSKNEPEDTEDKEGCQMDKEPSAVKKKPKPTNPVEIKEELKSTSPASEKADPGAVKDKASPEPEKDFSEKAKPSPHPIKDKLKGKDETDSPTVHLGLDSDSESELVIDLGEDHSGREGRKNKKEPKEPSPKQDVVGKTPPSTTVGSHSPPETPVLTRSSAQTSAAGATATTSTSSTVTVTAPAPAATGSPVKKQRPLLPKETAPAVQRVVWNSSTVQQKEITQSPSTSTITLVTSTQSSPLVTSSGSMSTLVSSVNADLPIATASADVAADIAKYTSKMMDAIKGTMTEIYNDLSKNTTGSTIAEIRRLRIEIEKLQWLHQQELSEMKHNLELTMAEMRQSLEQERDRLIAEVKKQLELEKQQAVDETKKKQWCANCKKEAIFYCCWNTSYCDYPCQQAHWPEHMKSCTQSATAPQQEADAEVNTETLNKSSQGSSSSTQSAPSETASASKEKETSAEKSKESGSTLDLSGSRETPSSILLGSNQGSDHSRSNKSSWSSSDEKRGSTRSDHNTSTSTKSLLPKESRLDTFWD

SEQ ID NO: 890397 - protein, 1188 aa, Homo sapiens
MHPQSLAEEEIKTEQEVVEGMDISTRSKDPGSAERTAQKRKFPSPPHSSNGHSPQDTSTSPIKKKKKPGLLNSNNKEQSELRHGPFYYMKQPLTTDPVDVVPQDGRNDFYCWVCHREGQVLCCELCPRVYHAKCLRLTSEPEGDWFCPECEKITVAECIETQSKAMTMLTIEQLSYLLKFAIQKMKQPGTDAFQKPVPLEQHPDYAEYIFHPMDLCTLEKNAKKKMYGCTEAFLADAKWILHNCIIYNGGNHKLTQIAKVVIKICEHEMNEIEVCPECYLAACQKRDNWFCEPCSNPHPLVWAKLKGFPFWPAKALRDKDGQVDARFFGQHDRAWVPINNCYLMSKEIPFSVKKTKSIFNSAMQEMEVYVENIRRKFGVFNYSPFRTPYTPNSQYQMLLDPTNPSAGTAKIDKQEKVKLNFDMTASPKILMSKPVLSGGTGRRISLSDMPRSPMSTNSSVHTGSDVEQDAEKKATSSHFSASEESMDFLDKSTASPASTKTGQAGSLSGSPKPFSPQLSAPITTKTDKTSTTGSILNLNLDRSKAEMDLKELSESVQQQSTPVPLISPKRQIRSRFQLNLDKTIESCKAQLGINEISEDVYTAVEHSDSEDSEKSDSSDSEYISDDEQKSKNEPEDTEDKEGCQMDKEPSAVKKKPKPTNPVEIKEELKSTSPASEKADPGAVKDKASPEPEKDFSEKAKPSPHPIKDKLKGKDETDSPTVHLGLDSDSESELVIDLGEDHSGREGRKNKKEPKEPSPKQDVVGKTPPSTTVGSHSPPETPVLTRSSAQTSAAGATATTSTSSTVTVTAPAPAATGSPVKKQRPLLPKETAPAVQRVVWNSSTVQQKEITQSPSTSTITLVTSTQSSPLVTSSGSMSTLVSSVNADLPIATASADVAADIAKYTSKMMDAIKGTMTEIYNDLSKNTTGSTIAEIRRLRIEIEKLQWLHQQELSEMKHNLELTMAEMRQSLEQERDRLIAEVKKQLELEKQQAVDETKKKQWCANCKKEAIFYCCWNTSYCDYPCQQAHWPEHMKSCTQSATAPQQEADAEVNTETLNKSSQGSSSSTQSAPSETASASKEKETSAEKSKESGSTLDLSGSRETPSSILLGSNQGSVSKRCDKQPAYAPTTTDHQPHPNYPAQKYHSRSNKSSWSSSDEKRGSTRSDHNTSTSTKSLLPKESRLDTFWD

SEQ ID NO: 890398 - protein, 1170 aa, Homo sapiens
MHPQSLAEEEIKTEQEVVEGMDISTRSKDPGSAERTAQKRKFPSPPHSSNGHSPQDTSTSPIKKKKKPGLLNSNNKEQSELRHGPFYYMKQPLTTDPVDVVPQDGRNDFYCWVCHREGQVLCCELCPRVYHAKCLRLTSEPEGDWFCPECEKITVAECIETQSKAMTMLTIEQLSYLLKFAIQKMKQPGTDAFQKPVPLEQHPDYAEYIFHPMDLCTLEKNAKKKMYGCTEAFLADAKWILHNCIIYNGGNHKLTQIAKVVIKICEHEMNEIEVCPECYLAACQKRDNWFCEPCSNPHPLVWAKLKGFPFWPAKALRDKDGQVDARFFGQHDRAWVPINNCYLMSKEIPFSVKKTKSIFNSAMQEMEVYVENIRRKFGVFNYSPFRTPYTPNSQYQMLLDPTNPSAGTAKIDKQEKVKLNFDMTASPKILMSKPVLSGGTGRRISLSDMPRSPMSTNSSVHTGSDVEQDAEKKATSSHFSASEESMDFLDKSTASPASTKTGQAGSLSGSPKPFSPQLSAPITTKTDKTSTTGSILNLNLDRSKAEMDLKELSESVQQQSTPVPLISPKRQIRSRFQLNLDKTIESCKAQLGINEISEDVYTAVEHSDSEDSEKSDSSDSEYISDDEQKSKNEPEDTEDKEGCQMDKEPSAVKKKPKPTNPVEIKEELKSTSPASEKADPGAVKDKASPEPEKDFSEKAKPSPHPIKDKLKGKDETDSPTVHLGLDSDSESELVIDLGEDHSGREGRKNKKEPKEPSPKQDVVGKTPPSTTVGSHSPPETPVLTRSSAQTSAAGATATTSTSSTVTVTAPAPAATGSPVKKQRPLLPKETAPAVQRVVWNSSSKFQTSSQKWHMQKMQRQQQQQQQQNQQQQPQSSQGTRYQTRQAVKMMDAIKGTMTEIYNDLSKNTTGSTIAEIRRLRIEIEKLQWLHQQELSEMKHNLELTMAEMRQSLEQERDRLIAEVKKQLELEKQQAVDETKKKQWCANCKKEAIFYCCWNTSYCDYPCQQAHWPEHMKSCTQSATAPQQEADAEVNTETLNKSSQGSSSSTQSAPSETASASKEKETSAEKSKESGSTLDLSGSRETPSSILLGSNQGSVSKRCDKQPAYAPTTTDHQPHPNYPAQKYHSRSNKSSWSSSDEKRGSTRSDHNTSTSTKSLLPKESRLDTFWD

SEQ ID NO: 890399 - protein, 1107 aa, Homo sapiens
MHPQSLAEEEIKTEQEVVEGMDISTRSKDPGSAERTAQKRKFPSPPHSSNGHSPQDTSTSPIKKKKKPGLLNSNNKEQSELRHGPFYYMKQPLTTDPVDVVPQDGRNDFYCWVCHREGQVLCCELCPRVYHAKCLRLTSEPEGDWFCPECEKITVAECIETQSKAMTMLTIEQLSYLLKFAIQKMKQPGTDAFQKPVPLEQHPDYAEYIFHPMDLCTLEKNAKKKMYGCTEAFLADAKWILHNCIIYNGGNHKLTQIAKVVIKICEHEMNEIEVCPECYLAACQKRDNWFCEPCSNPHPLVWAKLKGFPFWPAKALRDKDGQVDARFFGQHDRAWVPINNCYLMSKEIPFSVKKTKSIFNSAMQEMEVYVENIRRKFGVFNYSPFRTPYTPNSQYQMLLDPTNPSAGTAKIDKQEKVKLNFDMTASPKILMSKPVLSGGTGRRISLSDMPRSPMSTNSSVHTGSDVEQDAEKKATSSHFSASEESMDFLDKSTASPASTKTGQAGSLSGSPKPFSPQLSAPITTKTDKTSTTGSILNLNLDRSKAEMDLKELSESVQQQSTPVPLISPKRQIRSRFQLNLDKTIESCKAQLGINEISEDVYTAVEHSDSEDSEKSDSSDSEYISDDEQKSKNEPEDTEDKEGCQMDKEPSAVKKKPKPTNPVEIKEELKSTSPASEKADPGAVKDKASPEPEKDFSEKAKPSPHPIKDKLKGKDETDSPTVHLGLDSDSESELVIDLGEDHSGREGRKNKKEPKEPSPKQDAVQQKEITQSPSTSTITLVTSTQSSPLVTSSGSMSTLVSSVNADLPIATASADVAADIAKYTSKMMDAIKGTMTEIYNDLSKNTTGSTIAEIRRLRIEIEKLQWLHQQELSEMKHNLELTMAEMRQSLEQERDRLIAEVKKQLELEKQQAVDETKKKQWCANCKKEAIFYCCWNTSYCDYPCQQAHWPEHMKSCTQSATAPQQEADAEVNTETLNKSSQGSSSSTQSAPSETASASKEKETSAEKSKESGSTLDLSGSRETPSSILLGSNQGSVSKRCDKQPAYAPTTTDHQPHPNYPAQKYHSRSNKSSWSSSDEKRGSTRSDHNTSTSTKSLLPKESRLDTFWD

SEQ ID NO: 890400 - protein, 226 aa, Homo sapiens
MAEMRQSLEQERDRLIAEVKKQLELEKQQAVDETKKKQWCANCKKEAIFYCCWNTSYCDYPCQQAHWPEHMKSCTQSATAPQQEADAEVNTETLNKSSQGSSSSTQSAPSETASASKEKETSAEKSKESGSTLDLSGSRETPSSILLGSNQGSVSKRCDKQPAYAPTTTDHQPHPNYPAQKYHSRSNKSSWSSSDEKRGSTRSDHNTSTSTKSLLPKESRLDTFWD

SEQ ID NO: 890401 - protein, 133 aa, Homo sapiens [sequence omitted]

SEQ ID NO: 890402 - protein, 1125 aa, Homo sapiens
MHPQSLAEEEIKTEQEVVEGMDISTRSKDPGSAERTAQKRKFPSPPHSSNGHSPQDTSTSPIKKKKKPGLLNSNNKEQSELRHGPFYYMKQPLTTDPVDVVPQDGRNDFYCWVCHREGQVLCCELCPRVYHAKCLRLTSEPEGDWFCPECEKITVAECIETQSKAMTMLTIEQLSYLLKFAIQKMKQPGTDAFQKPVPLEQHPDYAEYIFHPMDLCTLEKNAKKKMYGCTEAFLADAKWILHNCIIYNGGNHKLTQIAKVVIKICEHEMNEIEVCPECYLAACQKRDNWFCEPCSNPHPLVWAKLKGFPFWPAKALRDKDGQVDARFFGQHDRAWVPINNCYLMSKEIPFSVKKTKSIFNSAMQEMEVYVENIRRKFGVFNYSPFRTPYTPNSQYQMLLDPTNPSAGTAKIDKQEKVKLNFDMTASPKILMSKPVLSGGTGRRISLSDMPRSPMSTNSSVHTGSDVEQDAEKKATSSHFSASEESMDFLDKSTASPASTKTGQAGSLSGSPKPFSPQLSAPITTKTDKTSTTGSILNLNLDRSKAEMDLKELSESVQQQSTPVPLISPKRQIRSRFQLNLDKTIESCKAQLGINEISEDVYTAVEHSDSEDSEKSDSSDSEYISDDEQKSKNEPEDTEDKEGCQMDKEPSAVKKKPKPTNPVEIKEELKSTSPASEKADPGAVKDKASPEPEKDFSEKAKPSPHPIKDKLKGKDETDSPTVHLGLDSDSESELVIDLGEDHSGREGRKNKKEPKEPSPKQDVVGKTPPSTTVGSHSPPETPVLTRSSAQTSAAGATATTSTSSTVTVTAPAPAATGSPVKKQRPLLPKETAPAVQRVVWNSSTVQQKEITQSPSTSTITLVTSTQSSPLVTSSGSMSTLVSSVNADLPIATASADVAADIAKYTSKMMDAIKGTMTEIYNDLSKNTTGSTIAEIRRLRIEIEKLQWLHQQELSEMKHNLELTMAEMRQSLEQERDRLIAEVKKQLELEKQQAVDETKKKQWCANCKKEAIFYCCWNTSYCDYPCQQAHWPEHMKSCTQSATAPQQEADAEVNTETLNKSSQGSSSSTQSAPSETASASKEKETSAEKSKESGSTLDLSGSRETPSSILLGSNQGSVSTRCDRATC

SEQ ID NO: 890403 - protein, 441 aa, Homo sapiens
MLPHNTTEAPGPHSAKQDSYEQGDSSQQSLKGHLRNNFQKQLLSNKELILDKVYTHPKWNTQTKARSYSYPHCTGISQQDPESDSQGQGNGLFYSSGPQSWYPKANNQDFIPFTKKRVGVDRAFPLKPMVHRKSCSTGEAGTDGDHNVYPRPPEPREFSSRNFGVRNQGNFSVVGTVLAATQAEKAVANFDRTEWVQIRRLEAAGESLEEEIRRKQILLRGKLKKTEEELRRIQTQKEQAKENENGELQKIILPRSRVKGNKSNTMYKPIFSPEFEFEEEFSRDRREDETWGRSQQNSVPFQFSDYRIQRLKRERLVASNNKIRDPVSEPSVEKFSPPSETPVGALQGSARNSSLSMAPDSSGSSGSIEEPQLGECSHCGRKFLSFRLERHSNICSRMRGSKRKVFDSSRARAKGTELEQYLNWKGPASAKAEPPQKSNWR

SEQ ID NO: 890404 - protein, 275 aa, Homo sapiens
MLPHNTTEAPGPHSAKQDSYEQGDSSQQSLKGHLRNNFQKQLLSNKELILDKVYTHPKWNTQTKARSYSYPHCTGISQQDPESDSQGQGNGLFYSSGPQSWYPKANNQDFIPFTKKRVGVDRAFPLKPMVHRKSCSTGEAGTDGDHNVYPRPPEPREFSSRNFGVRNQGNFSVVGTVLAATQAEKAVANFDRTEWVQIRRLEAAGESLEEEIRRKQILLRGKLKKTEEELRRIQTQKEQAKENENGELQKIILPRSRVKVLCLWKLSGCTFLSFL

SEQ ID NO: 890405 - protein, 275 aa, Homo sapiens; identical to SEQ ID NO: 890404

SEQ ID NO: 890406 - protein, 260 aa, Homo sapiens
MLPHNTTEAPGPHSAKQDSYEQGDSSQQSLKGHLRNNFQKQLLSNKELILDKVYTHPKWNTQTKARSYSYPHCTGISQQDPESDSQGQGNGLFYSSGPQSWYPKANNQDFIPFTKKRVGVDRAFPLKPMVHRKSCSTGEAGTDGDHNVYPRPPEPREFSSRNFGVRNQGNFSVVGTVLAATQAEKAVANFDRTEWVQIRRLEAAGESLEEEIRRKQILLRGKLKKTEEELRRIQTQKEQAKENENGELQKIILPRSRVKG

SEQ ID NO: 890407 - protein, 487 aa, Homo sapiens
EKGFTNLCGMLEQASWRKQDSVTKIFQKKKILVTYSFRQSFPLVEMHMQLFQNSYYQFGIKLLSAVPGGERKVLIIFNAPSLQDRLRFTSDLRESIAEVQEMEKYRVESELEKQKGMMRPNASQPGGAKDSVNGTMARSSLEDTYGAGDGLKRGALTVPCETSLMQGSVISSPRPHQRMPPPPPPPPPEEYKSQRPVSNSSSFLGSLFGSKRGKGPFQMPPPPTGQASASSSSASSTHHHHHHHHHGHSHGGLGVLPDGQSKLQALHAQYCQGPGPAPPPYLPPQQPSLPPPPQQPPPLPQLGSIPPPPASAPPVGPHRHFHAHGPVPGPQHYTLGRPGRAPRRGAGGHPQFAPHGRHPLHQPTSPLPLYSPAPQHPPAHKQGPKHFIFSHHPQMMPAAGAAGGPGSRPPGGSYSHPHHPQSPLSPHSPIPPHPSYPPLPPPSPHTPHSPLPPTSPHGPLHASGPPGTANPPSANPKAKPSRISTVV

SEQ ID NO: 890408 - protein, 1161 aa, Homo sapiens
RQPQLLLPVPPAPALSPGPPRAPGPSSPVRALASRRPPPPAGPGGGWRRERAGTGLSCPFPCPWAARMEAGSGPPGGPGSESPNRAVEYLLELNNIIESQQQLLETQRRRIEELEGQLDQLTQENRDLREESQLHRGELHRDPHGARDSPGRESQYQNLRETQFHHRELRESQFHQAARDVGYPNREGAYQNREAVYRDKERDASYPLQDTTGYTARERDVAQCHLHHENPALGRERGGREAGPAHPGREKEAGYSAAVGVGPRPPRERGQLSRGASRSSSPGAGGGHSTSTSTSPATTLQRKSDGENSRTVSVEGDAPGSDLSTAVDSPGSQPPYRLSQLPPSSSHMGGPPAGVGLPWAQRARLQPASVALRKQEEEEIKRSKALSDSYELSTDLQDKKVEMLERKYGGSFLSRRAARTIQTAFRQYRMNKNFERLRSSASESRMSRRIILSNMRMQFSFEEYEKAQNPAYFEGKPASLDEGAMAGARSHRLERGLPYGGSCGGGIDGGGSSVTTSGEFSNDITELEDSFSKQVKSLAESIDEALNCHPSGPMSEEPGSAQLEKRESKEQQEDSSATSFSDLPLYLDDTVPQQSPERLPSTEPPPQGRPEFWAPAPLPPVPPPVPSGTREDGSREEGTRRGPGCLECRDFRLRAAHLPLLTIEPPSDSSVDLSDRSDRGSVHRQLVYEADGCSPHGTLKHKGPPGRAPIPHRHYPAPEGPAPAPPGPLPPAPNSGTGPSGVAGGRRLGKCEAAGENSDGGDNESLESSSNSNETINCSSGSSSRDSLREPPATGLCKQTYQRETRHSWDSPAFNNDVVQRRHYRIGLNLFNKKPEKGIQYLIERGFLSDTPVGVAHFILERKGLSRQMIGEFLGNRQKQFNRDVLDCVVDEMDFSSMDLDDALRKFQSHIRVQGEAQKVERLIEAFSQRYCVCNPALVRQFRNPDTIFILAFAIILLNTDMYSPSVKAERKMKLDDFIKNLRGVDNGEDIPRDLLVGIYQRIQGRELRTNDDHVSQVQAVERMIVGKKPVLSLPHRRLVCCCQLYEVPDPNRPQRLGLHQREVFLFNDLLVVTKIFQKKKILVTYSFRQSFPLVEMHMQLFQNSYYQFGIKLLSAVPGGERKVLIIFNAPSLQDRLRFTSDLRESIAEVQEMEKYRVECE

SEQ ID NO: 890409 - protein, 1555 aa, Homo sapiens
RQPQLLLPVPPAPALSPGPPRAPGPSSPVRALASRRPPPPAGPGGGWRRERAGTGLSCPFPCPWAARMEAGSGPPGGPGSESPNRAVEYLLELNNIIESQQQLLETQRRRIEELEGQLDQLTQENRDLREESQLHRGELHRDPHGARDSPGRESQYQNLRETQFHHRELRESQFHQAARDVGYPNREGAYQNREAVYRDKERDASYPLQDTTGYTARERDVAQCHLHHENPALGRERGGREAGPAHPGREKEAGYSAAVGVGPRPPRERGQLSRGASRSSSPGAGGGHSTSTSTSPATTLQRKSDGENSRTVSVEGDAPGSDLSTAVDSPGSQPPYRLSQLPPSSSHMGGPPAGVGLPWAQRARLQPASVALRKQEEEEIKRSKALSDSYELSTDLQDKKVEMLERKYGGSFLSRRAARTIQTAFRQYRMNKNFERLRSSASESRMSRRIILSNMRMQFSFEEYEKAQNPAYFEGKPASLDEGAMAGARSHRLERGLPYGGSCGGGIDGGGSSVTTSGEFSNDITELEDSFSKQVKSLAESIDEALNCHPSGPMSEEPGSAQLEKRESKEQQEDSSATSFSDLPLYLDDTVPQQSPERLPSTEPPPQGRPEFWAPAPLPPVPPPVPSGTREDGSREEGTRRGPGCLECRDFRLRAAHLPLLTIEPPSDSSVDLSDRSDRGSVHRQLVYEADGCSPHGTLKHKGPPGRAPIPHRHYPAPEGPAPAPPGPLPPAPNSGTGPSGVAGGRRLGKCEAAGENSDGGDNESLESSSNSNETINCSSGSSSRDSLREPPATGLCKQTYQRETRHSWDSPAFNNDVVQRRHYRIGLNLFNKKPEKGIQYLIERGFLSDTPVGVAHFILERKGLSRQMIGEFLGNRQKQFNRDVLDCVVDEMDFSSMDLDDALRKFQSHIRVQGEAQKVERLIEAFSQRYCVCNPALVRQFRNPDTIFILAFAIILLNTDMYSPSVKAERKMKLDDFIKNLRGVDNGEDIPRDLLVGIYQRIQGRELRTNDDHVSQVQAVERMIVGKKPVLSLPHRRLVCCCQLYEVPDPNRPQRLGLHQREVFLFNDLLVVTKIFQKKKILVTYSFRQSFPLVEMHMQLFQNSYYQFGIKLLSAVPGGERKVLIIFNAPSLQDRLRFTSDLRESIAEVQEMEKYRVESELEKQKGMMRPNASQPGGAKDSVNGTMARSSLEDTYGAGDGLKRGALSSSLRDLSDAGKRGRRNSVGSLDSTIEGSVISSPRPHQRMPPPPPPPPPEEYKSQRPVSNSSSFLGSLFGSKRGKGPFQMPPPPTGQASASSSSASSTHHHHHHHHHGHSHGGLGVLPDGQSKLQALHAQYCQGPGPAPPPYLPPQQPSLPPPPQQPPPLPQLGSIPPPPASAPPVGPHRHFHAHGPVPGPQHYTLGRPGRAPRRGAGGHPQFAPHGRHPLHQPTSPLPLYSPAPQHPPAHKQGPKHFIFSHHPQMMPAAGAAGGPGSRPPGGSYSHPHHPQSPLSPHSPIPPHPSYPPLPPPSPHTPHSPLPPTSPHGPLHASGPPGTANPPSANPKAKPSRISTVV

SEQ ID NO: 890410 - protein, 388 aa, Homo sapiens
MMRPNASQPGGAKDSVNGTMARSSLEDTYGAGDGLKRGALSSSLRDLSDAGKRGRRNSVGSLDSTIEGSVISSPRPHQRMPPPPPPPPPEEYKSQRPVSNSSSFLGSLFGSKRGKGPFQMPPPPTGQASASSSSASSTHHHHHHHHHGHSHGGLGVLPDGQSKLQALHAQYCQGPGPAPPPYLPPQQPSLPPPPQQPPPLPQLGSIPPPPASAPPVGPHRHFHAHGPVPGPQHYTLGRPGRAPRRGAGGHPQFAPHGRHPLHQPTSPLPLYSPAPQHPPAHKQGPKHFIFSHHPQMMPAAGAAGGPGSRPPGGSYSHPHHPQSPLSPHSPIPPHPSYPPLPPPSPHTPHSPLPPTSPHGPLHASGPPGTANPPSANPKAKPSRISTVV

SEQ ID NO: 890411 - protein, 1118 aa, Homo sapiens
RQPQLLLPVPPAPALSPGPPRAPGPSSPVRALASRRPPPPAGPGGGWRRERAGTGLSCPFPCPWAARMEAGSGPPGGPGSESPNRAVEYLLELNNIIESQQQLLETQRRRIEELEGQLDQLTQENRDLREESQLHRGELHRDPHGARDSPGRESQYQNLRETQFHHRELRESQFHQAARDVGYPNREGAYQNREAVYRDKERDASYPLQDTTGYTARERDVAQCHLHHENPALGRERGGREAGPAHPGREKEAGYSAAVGVGPRPPRERGQLSRGASRSSSPGAGGGHSTSTSTSPATTLQRKSDGENSRTVSVEGDAPGSDLSTAVDSPGSQPPYRLSQLPPSSSHMGGPPAGVGLPWAQRARLQPASVALRKQEEEEIKRSKALSDSYELSTDLQDKKVEMLERKYGGSFLSRRAARTIQTAFRQYRMNKNFERLRSSASESRMSRRIILSNMRMQFSFEEYEKAQNPAYFEGKPASLDEGAMAGARSHRLERGLPYGGSCGGGIDGGGSSVTTSGEFSNDITELEDSFSKQVKSLAESIDEALNCHPSGPMSEEPGSAQLEKRESKEQQEDSSATSFSDLPLYLDDTVPQQSPERLPSTEPPPQGRPEFWAPAPLPPVPPPVPSGTREDGSREEGTRRGPGCLECRDFRLRAAHLPLLTIEPPSDSSVDLSDRSDRGSVHRQLVYEADGCSPHGTLKHKGPPGRAPIPHRHYPAPEGPAPAPPGPLPPAPNSGTGPSGVAGGRRLGKCEAAGENSDGGDNESLESSSNSNETINCSSGSSSRDSLREPPATGLCKQTYQRETRHSWDSPAFNNDVVQRRHYRIGLNLFNKKPEKGIQYLIERGFLSDTPVGVAHFILERKGLSRQMIGEFLGNRQKQFNRDVLDCVVDEMDFSSMDLDDALRKFQSHIRVQGEAQKVERLIEAFSQRYCVCNPALVRQFRNPDTIFILAFAIILLNTDMYSPSVKAERKMKLDDFIKNLRGVDNGEDIPRDLLVGIYQRIQGRELRTNDDHVSQVQAVERMIVGKKPVLSLPHRRLVCCCQLYEVPDPNRPQRLGLHQREVFLFNDLLVVTKIFQKKKILVTYSFRQSFPLVEMHIVQRLTSDAELCDFVTAQDS

SEQ ID NO: 890412 - protein, 228 aa, Homo sapiens
MSVSEIFVELQGFLAAEQDIREEIRKVVQSLEQTAREILTLLQGVHQGAGFQDIPKRCLKAREHFGTVKTHLTSLKTKFPAEQYYRFHEHWRFVLQRLVFLAAFVVYLETETLVTREAVTEILGIEPDREKGFHLDVEDYLSGVLILASELSRLSVNSVTAGDYSRPLHISTFINELDSGFRLLNLKNDSLRKRYDGLKYDVKKVEEVVYDLSIRGFNKETAAACVEK

SEQ ID NO: 890413 - protein, 228 aa, Homo sapiens; identical to SEQ ID NO: 890412

SEQ ID NO: 890414 - protein, 148 aa, Homo sapiens
MSVSEIFVELQGFLAAEQDIREEIRKVVQSLEQTAREILTLLQGVHQGAGFQDIPKRCLKAREHFGTVKTHLTSLKTKFPAEQYYRFHEHWRFVLQRLVFLAAFVVYLETETLVTREAVTEILGIEAVCQQRDCWRLLPTPPHLHLHQ

SEQ ID NO: 890415 - protein, 228 aa, Homo sapiens; identical to SEQ ID NO: 890412

SEQ ID NO: 890416 - protein, 174 aa, Homo sapiens
YNSSYNSSSYNSYVKTHLTSLKTKFPAEQYYRFHEHWRFVLQRLVFLAAFVVYLETETLVTREAVTEILGIEPDREKGFHLDVEDYLSGVLILASELSRLSVNSVTAGDYSRPLHISTFINELDSGFRLLNLKNDSLRKRYDGLKYDVKKVEEVVYDLSIRGFNKETAAACVEK

SEQ ID NO: 890417 - protein, 120 aa, Homo sapiens
SLLNTVYQEAFEKILGIEPDREKGFHLDVEDYLSGVLILASELSRLSVNSVTAGDYSRPLHISTFINELDSGFRLLNLKNDSLRKRYDGLKYDVKKVEEVVYDLSIRGFNKETAAACVEK

SEQ ID NO: 890418 - protein, 433 aa, Homo sapiens
MRQSHQLPLVGLLLFSFIPSQLCEICEVSEENYIRLKPLLNTMIQSNYNRGTSAVNVVLSLKLVGIQIQTLMQKMIQQIKYNVKSRLSDVSSGELALIILALGVCRNAEENLIYDYHLIDKLENKFQAEIENMEAHNGTPLTNYYQLSLDVLALCLFNGNYSTAEVVNHFTPENKNYYFGSQFSVDTGAMAVLALTCVKKSLINGQIKADEGSLKNISIYTKSLVEKILSEKKENGLIGNTFSTGEAMQALFVSSDYYNENDWNCQQTLNTVLTEISQGAFSNPNAAAQVLPALMGKTFLDINKDSSCVSASGNFNISADEPITVTPPDSQSYISVNYSVRINETYFTNVTVLNGSVFLSVMEKAQKMNDTIFGFTMEERSWGPYITCIQGLCANNNDRTYWELLSGGEPLSQGAGSYVVRNGENLEVRWSKY

SEQ ID NO: 890419 - protein, 306 aa, Homo sapiens
MRQSHQLPLVGLLLFSFIPSQLCEICEVSEENYIRLKPLLNTMIQSNYNRGTSAVNVVLSLKLVGIQIQTLMQKMIQQIKYNVKSRLSDVSSGELALIILALGVCRNAEENLIYDYHLIDKLENKFQAEIENMEAHNGTPLTNYYQLSLDVLALCLFNGNYSTAEVVNHFTPENKNYYFGSQFSVGNFNISADEPITVTPPDSQSYISVNYSVRINETYFTNVTVLNGSVFLSVMEKAQKMNDTIFGFTMEERSWGPYITCIQGLCANNNDRTYWELLSGGEPLSQGAGSYVVRNGENLEVRWSKY

SEQ ID NO: 890420 - protein, 373 aa, Homo sapiens
MRQSHQLPLVGLLLFSFIPSQLCEICVSDVSSGELALIILALGVCRNAEENLIYDYHLIDKLENKFQAEIENMEAHNGTPLTNYYQLSLDVLALCLFNGNYSTAEVVNHFTPENKNYYFGSQFSVDTGAMAVLALTCVKKSLINGQIKADEGSLKNISIYTKSLVEKILSEKKENGLIGNTFSTGEAMQALFVSSDYYNENDWNCQQTLNTVLTEISQGAFSNPNAAAQVLPALMGKTFLDINKDSSCVSASGNFNISADEPITVTPPDSQSYISVNYSVRINETYFTNVTVLNGSVFLSVMEKAQKMNDTIFGFTMEERSWGPYITCIQGLCANNNDRTYWELLSGGEPLSQGAGSYVVRNGENLEVRWSKY

SEQ ID NO: 890421 - protein, 362 aa, Homo sapiens
KYRHFFEACRLLQQMIDIAIDGFLLTPVQKICKYPLQLAELLKYTTQEHGDYSNIKAAYEAMKNVACLINERKRKLESIDKIARWQVSIVGWEGLDILDRSSELIHSGELTKITKQGKSQQRTFFLFDHQLVSCKKDLLRRDMLYYKGRLDMDEMELVDLGDGRDKDCNLSVKNAFKLVSRTTDEVYLFCAKKQEDKARWLQACADERRRVQEDKEMGMEISENQKKLAMLNAQKAGHGKSKVRLQQVPCGPTAPGPAPHPPAPHHYAHKRPPAAGLWPGGTQEEVLALLAHLQQAHPLPEMKTGGCASMELGVKRRTVFVSCVLQSRESFLDPVISLETQLPLWKGGDGHDTKLYPTQKHP

SEQ ID NO: 890422 - protein, 362 aa, Homo sapiens; identical to SEQ ID NO: 890421

SEQ ID NO: 890423 - protein, 270 aa, Homo sapiens
KYRHFFEACRLLQQMIDIAIDGFLLTPVQKICKYPLQLAELLKYTTQEHGDYSNIKAAYEAMKNVACLINERKRKLESIDKIARWQVSIVGWEGLDILDRSSELIHSGELTKITKQGKSQQRTFFLFDHQLVSCKKDLLRRDMLYYKGRLDMDEMELVDLGDGRDKDCNLSVKNAFKLVSRTTDEVYLFCAKKQEDKARWLQACADERRRVQEDKEMGMEISENQKKLAMLNAQKAGHGKSKGKLWRRLCPLNAYQYSPENGSIPQVVSL

SEQ ID NO: 890424 - protein, 71 aa, Homo sapiens
LPVLICQGACYVIKINLPSCSDYSNIKAAYEAMKNVACLINERKRKLESIDKIARWQVSIVGWEVSGKHPT

SEQ ID NO: 890425 - protein, 340 aa, Homo sapiens
KYRHFFEACRLLQQMIDIAIDGFLLTPVQKICKYPLQLAELLKYTTQEHGDYSNIKAAYEAMKNVACLINERKRKLESIDKIARWQVSIVGWEGLDILDRSSELIHSGELTKITKQGKSQQRTFFLFDHQLVSCKKDLLRRDMLYYKGRLDMDEMELVDLGDGRDKDCNLSVKNAFKLVSRTTDEVYLFCAKKQEDKARWLQACADERRRVQEDKEMGMEISENQKKLAMLNAQKAGHGKSKVRLQQVPCGPTAPGPAPHPPAPHHYAHKRPPAAGLWPGGTQEEVLALLAHLQQAHPLPEMKTGGCASMELGVKRRTVFVSCVLQSRESFLDPVIKTSF

SEQ ID NO: 890426 - protein, 362 aa, Homo sapiens; identical to SEQ ID NO: 890421

SEQ ID NO: 890427 - protein, 160 aa, Homo sapiens
LDMDEMELVDLGDGRDKDCNLSVKNAFKLVSRTTDEVYLFCAKKQEDKARWLQACADERRRVQEDKEMGEQPLALQAPVPLLAVIASFSTPMGLLCPAFSLRAESHHGERTRDLQTLNTSECTYKTDHVRCSYYRQHLFSIYLVPDILWPIYRDCLIESL

SEQ ID NO: 890428 - protein, 246 aa, Homo sapiens
ITRIRYRQIHIDIPRTNPLIPLFQQPLVQEIFERILFIWAIRHPASGYVQGINDLVTPFFVVFLSEYVEEDVENFDVTNLSQDMLRSIEADSFWCMSKLLDGIQDNYTFAQPGIQKKVKALEELVSRIDEQVHNHFRRYEVEYLQFAFRWMNNLLMRELPLRCTIRLWDTYQSEPEGFSHFHLYVCAAFLIKWRKEILDEEDFQGLLMLLQNLPTIHWGNEEIGLLLAEAYRLKYMFADAPNHYRR

SEQ ID NO: 890429 - protein, 246 aa, Homo sapiens; identical to SEQ ID NO: 890428

SEQ ID NO: 890430 - protein, 53 aa, Homo sapiens
MLRSIEADSFWCMSKLLDGIQVSCFCPCGNKRLGPEAPSRALVSFLLFCIRQD

SEQ ID NO: 890431 - protein, 246 aa, Homo sapiens; identical to SEQ ID NO: 890428

SEQ ID NO: 890432 - protein, 228 aa, Homo sapiens
ITRIRYRQIHIDIPRTNPLIPLFQQPLVQEIFERILFIWAIRHPASGYVQGINDLVTPFFVVFLSEYVEEDVENFDVTNLSQDMLRSIEADSFWCMSKLLDGIQDNYTFAQPGIQKKVKALEELVSRIDEQVHNHFRRYEVEYLQFAFRWMNNLLMRELPLRCTIRLWDTYQSEPEGFSHFHLYVCAAFLIKWRKEILDEEDFQCFSGILPNPLPFPLRCASVVSFIE

SEQ ID NO: 890433 - protein, 373 aa, Homo sapiens
PVCSEIPVSLLPSPGGCPWVLPSLPDTQTDLDRPPGRSRTGRPDAAMAELPGPFLCGALLGFLCLSGLAVEVKVPTEPLSTPLGKTAELTCTYSTSVGDSFALEWSFVQPGKPISESHPILYFTNGHLYPTGSKSKRVSLLQNPPTVGVATLKLTDVHPSDTGTYLCQVNNPPDFYTNGLGLINLTVLVPPSNPLCSQSGQTSVGGSTALRCSSSEGAPKPVYNWVRLGTFPTPSPGSMVQDEVSGQLILTNLSLTSSGTYRCVATNQMGSASCELTLSVTEPSQGRVAGALIGVLLGVLLLSVAAFCLVRFQKERGKKPKETYGGSDLREDAIAPGISEHTCMRADSSKGFLERPSSASTVTTTKSKLPMVV

SEQ ID NO: 890434 - protein, 135 aa, Homo sapiens
MVQDEVSGQLILTNLSLTSSGTYRCVATNQMGSASCELTLSVTEPSQGRVAGALIGVLLGVLLLSVAAFCLVRFQKERGKKPKETYGGSDLREDAIAPGISEHTCMRADSSKGFLERPSSASTVTTTKSKLPMVV

SEQ ID NO: 890435 - protein, 58 aa, Homo sapiens
MSRGTLPLHPLDEVSGQLILTNLSLTSSGTYRCVATNQMGSASCELTLSVTGRDAGWR

SEQ ID NO: 890436 - protein, 331 aa, Homo sapiens
MPGGGPDLQITGIWVPTSLWSPAPGLAVEVKVPTEPLSTPLGKTAELTCTYSTSVGDSFALEWSFVQPGKPISESHPILYFTNGHLYPTGSKSKRVSLLQNPPTVGVATLKLTDVHPSDTGTYLCQVNNPPDFYTNGLGLINLTVLVPPSNPLCSQSGQTSVGGSTALRCSSSEGAPKPVYNWVRLGTFPTPSPGSMVQDEVSGQLILTNLSLTSSGTYRCVATNQMGSASCELTLSVTEPSQGRVAGALIGVLLGVLLLSVAAFCLVRFQKERGKKPKETYGGSDLREDAIAPGISEHTCMRADSSKGFLERPSSASTVTTTKSKLPMVV

SEQ ID NO: 890437 - protein, 390 aa, Homo sapiens
PVCSEIPVSLLPSPGGCPWVLPSLPDTQTDLDRPPGRSRTGRPDAAMAELPGPFLCGALLGFLCLSGLAVEVKVPTEPLSTPLGKTAELTCTYSTSVGDSFALEWSFVQPGKPISESHPILYFTNGHLYPTGSKSKRVSLLQNPPTVGVATLKLTDVHPSDTGTYLCQVNNPPDFYTNGLGLINLTVLVPPSNPLCSQSGQTSVGGSTALRCSSSEGAPKPVYNWVRLGTFPTPSPGSMVQELLTELNESGTLPLHPLDEVSGQLILTNLSLTSSGTYRCVATNQMGSASCELTLSVTEPSQGRVAGALIGVLLGVLLLSVAAFCLVRFQKERGKKPKETYGGSDLREDAIAPGISEHTCMRADSSKGFLERPSSASTVTTTKSKLPMVV

SEQ ID NO: 890438 - protein, 135 aa, Homo sapiens; identical to SEQ ID NO: 890434

SEQ ID NO: 890439 - protein, 74 aa, Homo sapiens
YPQTLIIDIPPHRPQEMGKKPKETYGGSDLREDAIAPGISEHTCMRADSSKGFLERPSSASTVTTTKSKLPMVV

SEQ ID NO: 890440 - protein, 330 aa, Homo sapiens
PVCSEIPVSLLPSPGGCPWVLPSLPDTQTDLDRPPGRSRTGRPDAAMAELPGPFLCGALLGFLCLSGLAVEVKVPTEPLSTPLGKTAELTCTYSTSVGDSFALEWSFVQPGKPISESHPILYFTNGHLYPTGSKSKRVSLLQNPPTVGVATLKLTDVHPSDTGTYLCQVNNPPDFYTNGLGLINLTVLVPPSNPLCSQSGQTSVGGSTALRCSSSEGAPKPVYNWVRLGTFPTPSPGSMVQDEVSGQLILTNLSLTSSGTYRCVATNQMGSASCELTLSVTEPSQGRVAGALIGVLLGVLLLSVAAFCLVRFQKERGKKPKETYGGSDLR

SEQ ID NO: 890441 - protein, 373 aa, Homo sapiens; identical to SEQ ID NO: 890433

SEQ ID NO: 890442 - protein, 135 aa, Homo sapiens; identical to SEQ ID NO: 890434

SEQ ID NO: 890443 - protein, 218 aa, Homo sapiens
MPGGGPDLQITGIWVPTSLWSPAPGLAVEVKVPTEPLSTPLGKTAELTCTYSTSVGDSFALEWSFVQPGKPISESHPILYFTNGHLYPTGSKSKRVSLLQNPPTVGVATLKLTDVHPSDTGTYLCQVNNPPDFYTNGLGLINLTVLVPPSNPLCSQSGQTSVGGSTALRCSSSEGAPKPVYNWVRLGTFPTPSPGSMVQGKGPGHQEEGTGDLGKSGL

SEQ ID NO: 890444 - protein, 126 aa, Homo sapiens [sequence omitted]

SEQ ID NO: 890445 - protein, 126 aa, Homo sapiens [sequence omitted]

SEQ ID NO: 890446 - protein, 847 aa, Homo sapiens
AALLGSPRRPGRRPLLRALFRTCCPRPARSAAAMRLALLWALGLLGAGSPLPSWPLPNIGGTEEQQAESEKAPREPLEPQVLQDDLPISLKKVLQTSLPEPLRIKLELDGDSHILELLQNRELVPGRPTLVWYQPDGTRVVSEGHTLENCCYQGRVRGYAGSWVSICTCSGLRGLVVLTPERSYTLEQGPGDLQGPPIISRIQDLHLPGHTCALSWRESVHTQTPPEHPLGQRHIRRRRDVVTETKTVELVIVADHSEAQKYRDFQHLLNRTLEVALLLDTFFRPLNVRVALVGLEAWTQRDLVEISPNPAVTLENFLHWRRAHLLPRLPHDSAQLVTGTSFSGPTVGMAIQNSICSPDFSGGVNMDHSTSILGVASSIAHELGHSLGLDHDLPGNSCPCPGPAPAKTCIMEASTDFLPGLNFSNCSRRALEKALLDGMGSCLFERLPSLPPMAAFCGNMFVEPGEQCDCGFLDDCVDPCCDSLTCQLRPGAQCASDGPCCQNCQLRPSGWQCRPTRGDCDLPEFCPGDSSQCPPDVSLGDGEPCAGGQAVCMHGRCASYAQQCQSLWGPGAQPAAPLCLQTANTRGNAFGSCGRNPSGSYVSCTPRDAICGQLQCQTGRTQPLLGSIRDLLWETIDVNGTELNCSWVHLDLGSDVAQPLLTLPGTACGPGLVCIDHRCQRVDLLGAQECRSKCHGHGVCDSNRHCYCEEGWAPPDCTTQLKATSSLTTGLLLSLLVLLVLVMLGASYWYRARLHQRLCQLKGPTCQYRAAQSGPSERPGPPQRALLARGTKSQGPAKPPPPRKPLPADPQGRCPSGDLPGPGAGIPPLVVPSRPAPPPPTVSSLYL

SEQ ID NO: 890447 - protein, 398 aa, Homo sapiens
AALLGSPRRPGRRPLLRALFRTCCPRPARSAAAMRLALLWALGLLGAGSPLPSWPLPNIGGTEEQQAESEKAPREPLEPQVLQDDLPISLKKVLQTSLPEPLRIKLELDGDSHILELLQNRELVPGRPTLVWYQPDGTRVVSEGHTLENCCYQGRVRGYAGSWVSICTCSGLRGLVVLTPERSYTLEQGPGDLQGPPIISRIQDLHLPGHTCALSWRESVHTQTPPEHPLGQRHIRRRRDVVTETKTVELVIVADHSEAQKYRDFQHLLNRTLEVALLLDTFFRPLNVRVALVGLEAWTQRDLVEISPNPAVTLENFLHWRRAHLLPRLPHDSAQLVTGTSFSGPTVGMAIQNSICSPDFSGGVNMDHSTSILGVASSIAHELGHSLGLDHDLLESRP

SEQ ID NO: 890448 - protein, 83 aa, Homo sapiens
RHPLADILHRGCPLLRRWLCRRCVVCQAPETPESYVCRTLDCEAVYCWSCWDDMRQRCPVCTPREELSSSAFSDSNDDTAYAG

SEQ ID NO: 890449 - protein, 805 aa, Homo sapiens
AALLGSPRRPGRRPLLRALFRTCCPRPARSAAAMRLALLWALGLLGAGSPLPSWPLPNIGGTEEQQAESEKAPREPLEPQVLQDDLPISLKKVLQTSLPEPLRIKLELDGDSHILELLQNRELVPGRPTLVWYQPDGTRVVSEGHTLENCCYQGRVRGYAGSWVSICTCSGLRGLVVLTPERSYTLEQGPGDLQGPPIISRIQDLHLPGHTCALSWRESVHTQTPPEHPLGQRHIRRRRDVVTETKTVELVIVADHSEAQKYRDFQHLLNRTLEVALLLDTFFRPLNVRVALVGLEAWTQRDLVEISPNPAVTLENFLHWRRAHLLPRLPHDSAQLVTGTSFSGPTVGMAIQNSICSPDFSGGVNMDHSTSILGVASSIAHELGHSLGLDHDLPGNSCPCPGPAPAKTCIMEASTDFLPGLNFSNCSRRALEKALLDGMGSCLFERLPSLPPMAAFCGNMFVEPGEQCDCGFLDDCVDPCCDSLTCQLRPGAQCASDGPCCQNCQLRPSGWQCRPTRGDCDLPEFCPGDSSQCPPDVSLGDGEPCAGGQAVCMHGRCASYAQQCQSLWGPGAQPAAPLCLQTANTRGNAFGSCGRNPSGSYVSCTPRDAICGQLQCQTGRTQPLLGSIRDLLWETIDVNGTELNCSWVHLDLGSDVAQPLLTLPGTACGPGLVCIDHRCQRVDLLGAQECRSKCHGHGVCDSNRHCYCEEGWAPPDCTTQLKATSSLTTGLLLSLLVLLVLVMLGASYWYRARLHQRLCQLKGPTCQYSLRGQPSPHPQGSHCLPTPRAGAHRVTCPAQGLESRP

SEQ ID NO: 890450 - protein, 895 aa, Homo sapiens
AALLGSPRRPGRRPLLRALFRTCCPRPARSAAAMRLALLWALGLLGAGSPLPSWPLPNIGGTEEQQAESEKAPREPLEPQVLQDDLPISLKKVLQTSLPEPLRIKLELDGDSHILELLQNRELVPGRPTLVWYQPDGTRVVSEGHTLENCCYQGRVRGYAGSWVSICTCSGLRGLVVLTPERSYTLEQGPGDLQGPPIISRIQDLHLPGHTCALSWRESVHTQTPPEHPLGQRHIRRRRDVVTETKTVELVIVADHSEAQKYRDFQHLLNRTLEVALLLDTFFRPLNVRVALVGLEAWTQRDLVEISPNPAVTLENFLHWRRAHLLPRLPHDSAQLVTGTSFSGPTVGMAIQNSICSPDFSGGVNMDHSTSILGVASSIAHELGHSLGLDHDLPGNSCPCPGPAPAKTCIMEASTDFLPGLNFSNCSRRALEKALLDGMGSCLFERLPSLPPMAAFCGNMFVEPGEQCDCGFLDDCVDPCCDSLTCQLRPGAQCASDGPCCQNCQLRPSGWQCRPTRGDCDLPEFCPGDSSQCPPDVSLGDGEPCAGGQAVCMHGRCASYAQQCQSLWGPGAQPAAPLCLQTANTRGNAFGSCGRNPSGSYVSCTPRDAICGQLQCQTGRTQPLLGSIRDLLWETIDVNGTELNCSWVHLDLGSDVAQPLLTLPGTACGPGLVCIDHRCQRVDLLGAQECRSKCHGHGVCDSNRHCYCEEGWAPPDCTTQLKATSSLTTGLLLSLLVLLVLVMLGASYWYRARLHQRLCQLKGPTCQYRAAQSGPSERPGPPQRALLARGTKASALSFPAPPSRPLPPDPVSKRLQAELADRPNPPTRPLPADPVVRSPKSQGPAKPPPPRKPLPADPQGRCPSGDLPGPGAGIPPLVVPSRPAPPPPTVSSLYL

SEQ ID NO: 890451 - protein, 790 aa, Homo sapiens
MPCGTEEQQAESEKAPREPLEPQVLQDDLPISLKKVLQTSLPEPLRIKLELDGDSHILELLQNRELVPGRPTLVWYQPDGTRVVSEGHTLENCCYQGRVRGYAGSWVSICTCSGLRGLVVLTPERSYTLEQGPGDLQGPPIISRIQDLHLPGHTCALSWRESVHTQTPPEHPLGQRHIRRRRDVVTETKTVELVIVADHSEAQKYRDFQHLLNRTLEVALLLDTFFRPLNVRVALVGLEAWTQRDLVEISPNPAVTLENFLHWRRAHLLPRLPHDSAQLVTGTSFSGPTVGMAIQNSICSPDFSGGVNMDHSTSILGVASSIAHELGHSLGLDHDLPGNSCPCPGPAPAKTCIMEASTDFLPGLNFSNCSRRALEKALLDGMGSCLFERLPSLPPMAAFCGNMFVEPGEQCDCGFLDDCVDPCCDSLTCQLRPGAQCASDGPCCQNCQLRPSGWQCRPTRGDCDLPEFCPGDSSQCPPDVSLGDGEPCAGGQAVCMHGRCASYAQQCQSLWGPGAQPAAPLCLQTANTRGNAFGSCGRNPSGSYVSCTPRDAICGQLQCQTGRTQPLLGSIRDLLWETIDVNGTELNCSWVHLDLGSDVAQPLLTLPGTACGPGLVCIDHRCQRVDLLGAQECRSKCHGHGVCDSNRHCYCEEGWAPPDCTTQLKATSSLTTGLLLSLLVLLVLVMLGASYWYRARLHQRLCQLKGPTCQYRAAQSGPSERPGPPQRALLARGTKSQGPAKPPPPRKPLPADPQGRCPSGDLPGPGAGIPPLVVPSRPAPPPPTVSSLYL

SEQ ID NO: 890452 - protein, 826 aa, Homo sapiens
AALLGSPRRPGRRPLLRALFRTCCPRPARSAAAMRLALLWALGLLGAGSPLPSWPLPNIGGTEEQQAESEKAPREPLEPQVLQDDLPISLKKVLQTSLPEPLRIKLELDGDSHILELLQNRELVPGRPTLVWYQPDGTRVVSEGHTLENCCYQGRVRGYAGSWVSICTCSGLRGLVVLTPERSYTLEQGPGDLQGPPIISRIQDLHLPGHTCALSWRESVHTQTPPEHPLGQRHIRRAQKYRDFQHLLNRTLEVALLLDTFFRPLNVRVALVGLEAWTQRDLVEISPNPAVTLENFLHWRRAHLLPRLPHDSAQLVTGTSFSGPTVGMAIQNSICSPDFSGGVNMDHSTSILGVASSIAHELGHSLGLDHDLPGNSCPCPGPAPAKTCIMEASTDFLPGLNFSNCSRRALEKALLDGMGSCLFERLPSLPPMAAFCGNMFVEPGEQCDCGFLDDCVDPCCDSLTCQLRPGAQCASDGPCCQNCQLRPSGWQCRPTRGDCDLPEFCPGDSSQCPPDVSLGDGEPCAGGQAVCMHGRCASYAQQCQSLWGPGAQPAAPLCLQTANTRGNAFGSCGRNPSGSYVSCTPRDAICGQLQCQTGRTQPLLGSIRDLLWETIDVNGTELNCSWVHLDLGSDVAQPLLTLPGTACGPGLVCIDHRCQRVDLLGAQECRSKCHGHGVCDSNRHCYCEEGWAPPDCTTQLKATSSLTTGLLLSLLVLLVLVMLGASYWYRARLHQRLCQLKGPTCQYRAAQSGPSERPGPPQRALLARGTKSQGPAKPPPPRKPLPADPQGRCPSGDLPGPGAGIPPLVVPSRPAPPPPTVSSLYL

SEQ ID NO: 890453 - protein, 820 aa, Homo sapiens
MPCGTEEQQAESEKAPREPLEPQVLQDDLPISLKKVLQTSLPEPLRIKLELDGDSHILELLQNRELVPGRPTLVWYQPDGTRVVSEGHTLENCCYQGRVRGYAGSWVSICTCSGLRGLVVLTPERSYTLEQGPGDLQGPPIISRIQDLHLPGHTCALSWRESVHTQTPPEHPLGQRHIRRSRSGCLLVSPAQLLAASGRFAWIILLVHSERRDVVTETKTVELVIVADHSEAQKYRDFQHLLNRTLEVALLLDTFFRPLNVRVALVGLEAWTQRDLVEISPNPAVTLENFLHWRRAHLLPRLPHDSAQLVTGTSFSGPTVGMAIQNSICSPDFSGGVNMDHSTSILGVASSIAHELGHSLGLDHDLPGNSCPCPGPAPAKTCIMEASTDFLPGLNFSNCSRRALEKALLDGMGSCLFERLPSLPPMAAFCGNMFVEPGEQCDCGFLDDCVDPCCDSLTCQLRPGAQCASDGPCCQNCQLRPSGWQCRPTRGDCDLPEFCPGDSSQCPPDVSLGDGEPCAGGQAVCMHGRCASYAQQCQSLWGPGAQPAAPLCLQTANTRGNAFGSCGRNPSGSYVSCTPRDAICGQLQCQTGRTQPLLGSIRDLLWETIDVNGTELNCSWVHLDLGSDVAQPLLTLPGTACGPGLVCIDHRCQRVDLLGAQECRSKCHGHGVCDSNRHCYCEEGWAPPDCTTQLKATSSLTTGLLLSLLVLLVLVMLGASYWYRARLHQRLCQLKGPTCQYRAAQSGPSERPGPPQRALLARGTKSQGPAKPPPPRKPLPADPQGRCPSGDLPGPGAGIPPLVVPSRPAPPPPTVSSLYL

SEQ ID NO: 890454 - protein, 250 aa, Homo sapiens
AALLGSPRRPGRRPLLRALFRTCCPRPARSAAAMRLALLWALGLLGAGSPLPSWPLPNIGGTEEQQAESEKAPREPLEPQVLQDDLPISLKKVLQTSLPEPLRIKLELDGDSHILELLQNRELVPGRPTLVWYQPDGTRVVSEGHTLENCCYQGRVRGYAGSWVSICTCSGLRGLVVLTPERSYTLEQGPGDLQGPPIISRIQDLHLPGHTCALSWRESVHTQTPPEHPLGQRHIRRVRMNGRGGGLWLS

SEQ ID NO: 890455 - protein, 847 aa, Homo sapiens; identical to SEQ ID NO: 890446

SEQ ID NO: 890456 - protein, 188 aa, Homo sapiens
MRPPKQPRTISNATSRQHANHKHNATATHDDPRNPKNQRTSRHTRSPTTDKKKISGKTHADKKTHDTTNTHSEGKQMHTFRQRHCVPKTPERKADNSWKNHNRPRLSRDQVDTPPPQLSYSPQGRLLTPSHCTKTQSYAKTAARTDKQNPRHLINTGQEIEKTPDNSTAASRINKDTHKNTKTTPLCS

SEQ ID NO: 890457 - protein, 912 aa, Homo sapiens
AALLGSPRRPGRRPLLRALFRTCCPRPARSAAAMRLALLWALGLLGAGSPLPSWPLPNIGGTEEQQAESEKAPREPLEPQVLQDDLPISLKKVLQTSLPEPLRIKLELDGDSHILELLQNRELVPGRPTLVWYQPDGTRVVSEGHTLENCCYQGRVRGYAGSWVSICTCSGLRGLVVLTPERSYTLEQGPGDLQGPPIISRIQDLHLPGHTCALSWRESVHTQTPPEHPLGQRHIRRRRDVVTETKTVELVIVADHSEAQKYRDFQHLLNRTLEVALLLDTFFRPLNVRVALVGLEAWTQRDLVEISPNPAVTLENFLHWRRAHLLPRLPHDSAQLVTGTSFSGPTVGMAIQNSICSPDFSGGVNMDHSTSILGVASSIAHELGHSLGLDHDLPGNSCPCPGPAPAKTCIMEASTDFLPGLNFSNCSRRALEKALLDGMGSCLFERLPSLPPMAAFCGNMFVEPGEQCDCGFLDDCVDPCCDSLTCQLRPGAQCASDGPCCQNCQLRPSGWQCRPTRGDCDLPEFCPGDSSQCPPDVSLGDGEPCAGGQAVCMHGRCASYAQQCQSLWGPGAQPAAPLCLQTANTRGNAFGSCGRNPSGSYVSCTPRDAICGQLQCQTGRTQPLLGSIRDLLWETIDVNGTELNCSWVHLDLGSDVAQPLLTLPGTACGPGLVCIDHRCQRVDLLGAQECRSKCHGHGVCDSNRHCYCEEGWAPPDCTTQLKATSSLTTGLLLSLLVLLVLVMLGASYWYRARLHQRLCQLKGPTCQYRAAQSGPSERPGPPQRALLARGTKASALSFPAPPSRPLPPDPVSKRLQAELADRPNPPTRPLPADPVVRSPKVTVGGEKGTASPPTQGCGAGSHDGGGRGEMPPQCMRAHIPVVPLMVTVSGASQAPTPKEATACRPPGPVPIG

SEQ ID NO: 890458 - protein, 812 aa, Homo sapiens
AALLGSPRRPGRRPLLRALFRTCCPRPARSAAAMRLALLWALGLLGAGSPLPSWPLPNIGGTEEQQAESEKAPREPLEPQVLQDDLPISLKKVLQTSLPEPLRIKLELDGDSHILELLQNRELVPGRPTLVWYQPDGTRVVSEGHTLENCCYQGRVRGYAGSWVSICTCSGLRGLVVLTPERSYTLEQGPGDLQGPPIISRIQDLHLPGHTCALSWRESVHTQTPPEHPLGQRHIRRRRDVVTETKTVELVIVADHSEAQKYRDFQHLLNRTLEVALLLDTFFRPLNVRVALVGLEAWTQRDLVEISPNPAVTLENFLHWRRAHLLPRLPHDSAQLVTGTSFSGPTVGMAIQNSICSPDFSGGVNMDHSTSILGVASSIAHELGHSLGLDHDLPGNSCPCPGPAPAKTCIMEASTDFLPGLNFSNCSRRALEKALLDGMGSCLFERLPSLPPMAAFCGNMFVEPGEQCDCGFLDDCVDPCCDSLTCQLRPGAQCASDGPCCQNCQLRPSGWQCRPTRGDCDLPEFCPGDSSQCPPDVSLGDGEPCAGGQAVCMHGRCASYAQQCQSLWGPGAQPAAPLCLQTANTRGNAFGSCGRNPSGSYVSCTPRDAICGQLQCQTGRTQPLLGSIRDLLWETIDVNGTELNCSWVHLDLGSDVAQPLLTLPGTACGPGLVCIDHRCQRVDLLGAQECRSKCHGHGVCDSNRHCYCEEGWAPPDCTTQLKATSSLTTGLLLSLLVLLVLVMLGASYWYRARLHQRLCQLKGPTCQYRAAQSGPSERPGPPQRALLARGTKRLSWLTDPIPLPALCPLTRW

SEQ ID NO: 890459 - protein, 873 aa, Homo sapiens
AALLGSPRRPGRRPLLRALFRTCCPRPARSAAAMRLALLWALGLLGAGSPLPSWPLPNIGGTEEQQAESEKAPREPLEPQVLQDDLPISLKKVLQTSLPEPLRIKLELDGDSHILELLQNRELVPGRPTLVWYQPDGTRVVSEGHTLENCCYQGRVRGYAGSWVSICTCSGLRGLVVLTPERSYTLEQGPGDLQGPPIISRIQDLHLPGHTCALSWRESVHTQTPPEHPLGQRHIRRRRDVVTETKTVELVIVADHSEAQKYRDFQHLLNRTLEVALLLDTVSAGQGNPHPRPLTMATPLLSPSCLQFFRPLNVRVALVGLEAWTQRDLVEISPNPAVTLENFLHWRRAHLLPRLPHDSAQLVTGTSFSGPTVGMAIQNSICSPDFSGGVNMDHSTSILGVASSIAHELGHSLGLDHDLPGNSCPCPGPAPAKTCIMEASTDFLPGLNFSNCSRRALEKALLDGMGSCLFERLPSLPPMAAFCGNMFVEPGEQCDCGFLDDCVDPCCDSLTCQLRPGAQCASDGPCCQNCQLRPSGWQCRPTRGDCDLPEFCPGDSSQCPPDVSLGDGEPCAGGQAVCMHGRCASYAQQCQSLWGPGAQPAAPLCLQTANTRGNAFGSCGRNPSGSYVSCTPRDAICGQLQCQTGRTQPLLGSIRDLLWETIDVNGTELNCSWVHLDLGSDVAQPLLTLPGTACGPGLVCIDHRCQRVDLLGAQECRSKCHGHGVCDSNRHCYCEEGWAPPDCTTQLKATSSLTTGLLLSLLVLLVLVMLGASYWYRARLHQRLCQLKGPTCQYRAAQSGPSERPGPPQRALLARGTKSQGPAKPPPPRKPLPADPQGRCPSGDLPGPGAGIPPLVVPSRPAPPPPTVSSLYL

SEQ ID NO: 890460 - protein, 327 aa, Homo sapiens
AALLGSPRRPGRRPLLRALFRTCCPRPARSAAAMRLALLWALGLLGAGSPLPSWPLPNIGGTEEQQAESEKAPREPLEPQVLQDDLPISLKKVLQTSLPEPLRIKLELDGDSHILELLQNRELVPGRPTLVWYQPDGTRVVSEGHTLENCCYQGRVRGYAGSWVSICTCSGLRGLVVLTPERSYTLEQGPGDLQGPPIISRIQDLHLPGHTCALSWRESVHTQTPPEHPLGQRHIRRRRDVVTETKTVELVIVADHSEAQKYRDFQHLLNRTLEVALLLDTVSAGQGNPHPRPLTMATPLLSPSCLSVLPAPECTSGTSGPGGLDPA

SEQ ID NO: 890461 - protein, 212 aa, Homo sapiens
AALLGSPRRPGRRPLLRALFRTCCPRPARSAAAMRLALLWALGLLGAGSPLPSWPLPNIGGTEEQQAESEKAPREPLEPQVLQDDLPISLKKVLQTSLPEPLRIKLELDGDSHILELLQNRELVPGRPTLVWYQPDGTRVVSEGHTLENCCYQGRVRGYAGSWVSICTCSGLRGLVVLTPERSYTRGGGGRQITRPQEFETSLGNTVRSRLC

SEQ ID NO: 890462 - protein, 333 aa, Homo sapiens
TKARYEAGLCGPADMAAAVAAALARLLAAFLLLAAQVACEYGMVHVVSQAGGPEGKDYCILYNPQWAHLPHDLSKASFLQLRNWTASLLCSAADLPARGFSNQIPLVARGNCTFYEKVRLAQGSGARGLLIVSRERLVPPGGNKTQYDEIGIPVALLSYKDMLDIFTRFGRTVRAALYAPKEPVLDYNMVIIFIMAVGTVAIGGYWAGSRDVKKRYMKHKRDDGPEKQEDEAVDVTPVMTCVFVVMCCSMLVLLYYFYDLLVYVVIGIFCLASATGLYSCLAPCVRRLPFGKCRIPNNSLPYFHKRPQARMLLLALFCVAVSVVWGVFRNEDQ

SEQ ID NO: 890463 - protein, 392 aa, Homo sapiens
RGGSLRFSPPRVPSCSRVFCPVPPGGCGLPSPVSASRPQGPTTPWCLPRRYMKHKRDDGPEKQEDEAVDVTPVMTCVFVVMCCSMLVLLYYFYDLLVYVVIGIFCLASATGLYSCLAPCVRRLPFGKCSARRPVCCSWRSSAWPSAWCGASSATRTSKCCFPRAPAGSGVLGRTRAPGALTPCPPWRPPQPGAASAPRDEEPWPRAALTGLRGRFTWGLSGCHGNPDWNPGGEAGAPVARSHVLQPGWDSFVGHRCPGPQSVPRCPFPGTHVHAAGSRPRVWAPGHPVLLVMTAAASEQWWRWGRHCSPHAHLPRGLDLWLPPAGRASPMRPSAWCRVGRTELARPRPVPTAVADTIWHFLPAFLRQPSTLGFGVYWSHGTFNWQKEDVKIF

SEQ ID NO: 890464 - protein, 112 aa, Homo sapiens [sequence omitted]

SEQ ID NO: 890465 - protein, 226 aa, Homo sapiens
MAAAVAAALARLLAAFLLLAAQVACEYGMVHVVSQAGGPEGKDYCILYNPQWAHLPHDLSKAYFPCKLAQSGTGPPLARATASATYPAPCASSNQDPCCVAAAGTCTVLLRTVMAWPMEHAVRHAGLAQSYSMWMMCLVSPWGWYIQTHVVTDDLDLSLLRRCSGYQKTLAGPSFLLFRAGTVEVLAADIAAIMDAVCLELTSIGPSYFSQWSVRHPVANRQATWA

SEQ ID NO: 890466 - protein, 592 aa, Homo sapiens
MAAAVAAALARLLAAFLLLAAQVACEYGMVHVVSQAGGPEGKDYCILYNPQWAHLPHDLSKASFLQLRNWTASLLCSAADLPARGFSNQIPLVARGNCTFYEKVRLAQGSGARGLLIVSRERLVPPGGNKTQYDEIGIPVALLSYKDMLDIFTRFGRTVRAALYAPKEPVLDYNMVIIFIMAVGTVAIGGYWAGSRDVKKRYMKHKRDDGPEKQEDEAVDVTPVMTCVFVVMCCSMLVLLYYFYDLLVYVVIGIFCLASATGLYSCLAPCVRRLPFGKCRIPNNSLPYFHKRPQARMLLLALFCVAVSVVWGVFRNEDQWAWVLQDALGIAFCLYMLKTIRLPTFKACTLLLLVLFLYDIFFVFITPFLTKSGSSIMVEVATGPSDSATREKLPMVLKVPRLNSSPLALCDRPFSLLGFGDILVPGLLVAYCHRFDIQVQSSRVYFVACTIAYGVGLLVTFVALALMQRGQPALLYLVPCTLVTSCAVALWRRELGVFWTGSGFAKVLPPSPWAPAPADGPQPPKDSATPLSPQPPSEEPATSPWPAEQSPKSRTSEEMGAGAPMREPGSPAESEGRDQAQPSPVTQPGASA

SEQ ID NO: 890467 - protein, 592 aa, Homo sapiens; identical to SEQ ID NO: 890466

SEQ ID NO: 890468 - protein, 605 aa, Homo sapiens
MARYEAGLCGPADMAAAVAAALARLLAAFLLLAAQVACEYGMVHVVSQAGGPEGKDYCILYNPQWAHLPHDLSKASFLQLRNWTASLLCSAADLPARGFSNQIPLVARGNCTFYEKVRLAQGSGARGLLIVSRERLVPPGGNKTQYDEIGIPVALLSYKDMLDIFTRFGRTVRAALYAPKEPVLDYNMVIIFIMAVGTVAIGGYWAGSRDVKKRYMKHKRDDGPEKQEDEAVDVTPVMTCVFVVMCCSMLVLLYYFYDLLVYVVIGIFCLASATGLYSCLAPCVRRLPFGKCRIPNNSLPYFHKRPQARMLLLALFCVAVSVVWGVFRNEDQWAWVLQDALGIAFCLYMLKTIRLPTFKACTLLLLVLFLYDIFFVFITPFLTKSGSSIMVEVATGPSDSATREKLPMVLKVPRLNSSPLALCDRPFSLLGFGDILVPGLLVAYCHRFDIQVQSSRVYFVACTIAYGVGLLVTFVALALMQRGQPALLYLVPCTLVTSCAVALWRRELGVFWTGSGFAKVLPPSPWAPAPADGPQPPKDSATPLSPQPPSEEPATSPWPAEQSPKSRTSEEMGAGAPMREPGSPAESEGRDQAQPSPVTQPGASA

SEQ ID NO: 890469 - protein, 511 aa, Homo sapiens
MAAAVAAALARLLAAFLLLAAQVACEYGMVHVVSQAGGPEGKDYCILYNPQWAHLPHDLSKASFLQLRNWTASLLCSAADLPARGFSNQIPLVARGNCTFYEKVRLAQGSGARGLLIVSRERLVPPGGNKTQYDEIGIPVALLSYKDMLDIFTRFGRTVRAALYAPKEPVLDYNMVIIFIMAVGTVAIGGYWAGSRDVKKRYMKHKRDDGPEKQEDEAVDVTPVMTCVFVVMCCSMLVLLYYFYDLLVYVVIGIFCLASATGLYSCLAPCVRRLPFGKCRIPNNSLPYFHKRPQARMLLLALFCVAVSVVWGVFRNEDQWAWVLQDALGIAFCLYMLKTIRLPTFKACTLLLLVLFLYDIFFVFITPFLTKSGSSIMVEVATGPSDSATREKLPMVLKVPRLNSSPLALCDRPFSLLGFGDILVPGLLVAYCHRFDIQVQSSRVYFVACTIAYGVGLLVTFVALALMQRGQPALLYLVPCTLVTSCAVALWRRELGVFWTGSGFAVNTSLL

SEQ ID NO: 890470 - protein, 445 aa, Homo sapiens
MLDIFTRFGRTVRAALYAPKEPVLDYNMVIIFIMAVGTVAIGGYWAGSRDVKKRYMKHKRDDGPEKQEDEAVDVTPVMTCVFVVMCCSMLVLLYYFYDLLVYVVIGIFCLASATGLYSCLAPCVRRLPFGKCRIPNNSLPYFHKRPQARMLLLALFCVAVSVVWGVFRNEDQWAWVLQDALGIAFCLYMLKTIRLPTFKACTLLLLVLFLYDIFFVFITPFLTKSGSSIMVEVATGPSDSATREKLPMVLKVPRLNSSPLALCDRPFSLLGFGDILVPGLLVAYCHRFDIQVQSSRVYFVACTIAYGVGLLVTFVALALMQRGQPALLYLVPCTLVTSCAVALWRRELGVFWTGSGFAKVLPPSPWAPAPADGPQPPKDSATPLSPQPPSEEPATSPWPAEQSPKSRTSEEMGAGAPMREPGSPAESEGRDQAQPSPVTQPGASA

SEQ ID NO: 890471 - protein, 445 aa, Homo sapiens; identical to SEQ ID NO: 890470

SEQ ID NO: 890472 - protein, 592 aa, Homo sapiens; identical to SEQ ID NO: 890466

SEQ ID NO: 890473 - protein, 441 aa, Homo sapiens
RGGSLRFSPPRVPSCSRVFCPVPPGGCGLPSPVSASRPQGPTTPWCLPRRYMKHKRDDGPEKQEDEAVDVTPVMTCVFVVMCCSMLVLLYYFYDLLVYVVIGIFCLASATGLYSCLAPCVRRLPFGKCRIPNNSLPYFHKRPQARMLLLALFCVAVSVVWGVFRNEDQWAWVLQDALGIAFCLYMLKTIRLPTFKACTLLLLVLFLYDIFFVFITPFLTKSGSSIMVEVATGPSDSATREKLPMVLKVPRLNSSPLALCDRPFSLLGFGDILVPGLLVAYCHRFDIQVQSSRVYFVACTIAYGVGLLVTFVALALMQRGQPALLYLVPCTLVTSCAVALWRRELGVFWTGSGFAKVLPPSPWAPAPADGPQPPKDSATPLSPQPPSEEPATSPWPAEQSPKSRTSEEMGAGAPMREPGSPAESEGRDQAQPSPVTQPGASA

SEQ ID NO: 890474 - protein, 232 aa, Homo sapiens
EEVKNLAEKLARFIADGGPEVETIALQNNREKLPMVLKVPRLNSSPLALCDRPFSLLGFGDILVPGLLVAYCHRFDIQVQSSRVYFVACTIAYGVGLLVTFVALALMQRGQPALLYLVPCTLVTSCAVALWRRELGVFWTGSGFAKVLPPSPWAPAPADGPQPPKDSATPLSPQPPSEEPATSPWPAEQSPKSRTSEEMGAGAPMREPGSPAESEGRDQAQPSPVTQPGASA

SEQ ID NO: 890475 - protein, 511 aa, Homo sapiens; identical to SEQ ID NO: 890469

SEQ ID NO: 890476 - protein, 592 aa, Homo sapiens; identical to SEQ ID NO: 890466

SEQ ID NO: 890477 - protein, 573 aa, Homo sapiens
MAAAVAAALARLLAAFLLLAAQVACEYGMVHVVSQAGGPEGKDYCILYNPQWAHLPHDLSKASFLQLRNWTASLLCSAADLPARGFSNQIPLVARGNCTFYEKVRLAQGSGARGLLIVSRERLVPPGGNKTQYDEIGIPVALLSYKDMLDIFTRFGRTVRAALYAPKEPVLDYNMVIIFIMAVGTVAIGGYWAGSRDVKKRYMKHKRDDGPEKQEDEAVDVTPVMTCVFVVMCCSMLVLLYYFYDLLVYVVIGIFCLASATGLYSCLAPCVRRLPFGKCRIPNNSLPYFHKRPQARMLLLALFCVAVSVVWGVFRNEDQWAWVLQDALGIAFCLYMLKTIRLPTFKACTLLLLVLFLYDIFFVFITPFLTKSGSSIMVEVATGPSDSATREKLPMVLKVPRLNSSPLALCDRPFSLLGFGDILVPGLLVAYCHRFDIQVQSSRVYFVACTIAYGVGLLVTFVALALMQRGQPALLYLVPCTLVTSCAVALWRRELGVFWTGSGFAKVLPPSPWAPAPADGPQPPAETEPAPWLSVVPGPQLPPATRPVECGLQTRVQNLFLSSQSSPAAHGDC

SEQ ID NO: 890478 - protein, 38 aa, Homo sapiens
AYCHRFDIQVQSSRVYFVACTIGKCLGWARAGLSGSSP

SEQ ID NO: 890479 - protein, 408 aa, Homo sapiens
YKSWAGAGRAIRDPEVRGRGRAGSPGGRRRRPAQAGGRRGSPCRENSNSPMESADFYEAEPRPPMSSHLQSPPHAPSSAAFGFPRGAGPAQPPAPPAAPEPLGGICEHETSIDISAYIDPAAFNDEFLADLFQHSRQQEKAKAAVGPTGGGGGGDFDYPGAPAGPGGAVMPGGAHGPPPGYGCAAAGYLDGRLEPLYERVGAPALRPLVIKQEPREEDEAKQLALAGLFPYQPPPPPPPSHPHPHPPPAHLAAPHLQFQIAHCGQTTMHLQPGHPTPPPTPVPSPHPAPALGAAGLPGPGSALKGLGAAHPDLRASGGSGAGKAKKSVDKNSNEYRVRRERNNIAVRKSRDKAKQRNVETQQKVLELTSDNDRLRKRVEQLSRELDTLRGIFRQLPESSLVKAMGNCA

SEQ ID NO: 890480 - protein, 379 aa, Homo sapiens
LQVAAHRGPRLRLVEVGRLHGGVRVLPAWRALAPPACAGRRRRPPGDPARPRPRTSGSPPAQPPAPPAAPEPLGGICEHETSIDISAYIDPAAFNDEFLADLFQHSRQQEKAKAAVGPTGGGGGGDFDYPGAPAGPGGAVMPGGAHGPPPGYGCAAAGYLDGRLEPLYERVGAPALRPLVIKQEPREEDEAKQLALAGLFPYQPPPPPPPSHPHPHPPPAHLAAPHLQFQIAHCGQTTMHLQPGHPTPPPTPVPSPHPAPALGAAGLPGPGSALKGLGAAHPDLRASGGSGAGKAKKSVDKNSNEYRVRRERNNIAVRKSRDKAKQRNVETQQKVLELTSDNDRLRKRVEQLSRELDTLRGIFRQLPESSLVKAMGNCA

SEQ ID NO: 890481 - protein, 348 aa, Homo sapiens
YKSWAGAGRAIRDPEVRGRGRAGSPGGRRRRPAQAGGRRGSPCRENSNSPMESADFYEAEPRPPMSSHLQSPPHAPSSAAFGFPRGAGPAQPPAPPAAPEPLGGICEHETSIDISAYIDPAAFNDEFLADLFQHSRQQEKAKAAVGPTGGGGGGDFDYPGAPAGPGGAVMPGGAHGPPPGYGCAAAGYLDGRLEPLYERVGAPALRPLVIKQEPREEDEAKQLALAGLFPYQPPPPPPPSHPHPHPPPAHPDLRASGGSGAGKAKKSVDKNSNEYRVRRERNNIAVRKSRDKAKQRNVETQQKVLELTSDNDRLRKRVEQLSRELDTLRGIFRQLPESSLVKAMGNCA

SEQ ID NO: 890482 - protein, 69 aa, Homo sapiens
AAVIKDPLHMADKAKQRNVETQQKVLELTSDNDRLRKRVEQLSRELDTLRGIFRQLPESSLVKAMGNCA

SEQ ID NO: 890483 - protein, 80 aa, Homo sapiens
SIYRIPSYANVAWPFHMQLHMADKAKQRNVETQQKVLELTSDNDRLRKRVEQLSRELDTLRGIFRQLPESSLVKAMGNCA

SEQ ID NO: 890484 - protein, 408 aa, Homo sapiens; identical to SEQ ID NO: 890479

SEQ ID NO: 890485 - protein, 408 aa, Homo sapiens; identical to SEQ ID NO: 890479

SEQ ID NO: 890486 - protein, 408 aa, Homo sapiens; identical to SEQ ID NO: 890479

SEQ ID NO: 890487 - protein, 68 aa, Homo sapiens
YRIQRGPFILHVKQLLEVDDIKMVLELTSDNDRLRKRVEQLSRELDTLRGIFRQLPESSLVKAMGNCA

SEQ ID NO: 890488 - protein, 408 aa, Homo sapiens; identical to SEQ ID NO: 890479

SEQ ID NO: 890489 - protein, 161 aa, Homo sapiens
SCLSLLSRWGNRYVPPHPAKFLKIFCRHRVLICCLSWSGTPGFKQSSCLSLVCTVCLQHCLGTRSTISPSQRDRSYDKLSKYFALSADINTCIWPLCPSSALCNVNVRVSAKPPFYLVFVLFWFCSDTCQNETLRRQLGEGSETPFPFGFGITFDPGGPMR

SEQ ID NO: 890490 - protein, 1025 aa, Homo sapiens
GDGGSAMEPGEVKDRILENISLSVKKLQSYFAACEDEIPAIRNHDKVLQRLCEHLDHALLYGLQDLSSGYWVLVVHFTRREAIKQIEVLQHVATNLGRSRAWLYLALNENSLESYLRLFQENLGLLHKYYVKNALVCSHDHLTLFLTLVSGLEFIRFELDLDAPYLDLAPYMPDYYKPQYLLDFEDRLPSSVHGSDSLSLNSFNSVTSTNLEWDDSAIAPSSEDYDFGDVFPAVPSVPSTDWEDGDLTDTVSGPRSTASDLTSSKASTRSPTQRQNPFNEEPAETVSSSDTTPVHTTSQEKEEAQALDPPDACTELEVIRVTKKKKIGKKKKSRSDEEASPLHPACSQKKCAKQGDGDSRNGSPSLGRDSPDTMLASPQEEGEGPSSTTESSERSEPGLLIPEMKDTSMERLGQPLSKVIDQLNGQLDPSTWCSRAEPPDQSFRTGSPGDAPERPPLCDFSEGLSAPMDFYRFTVESPSTVTSGGGHHDPAGLGQPLHVPSSPEAAGQEEEGGGGEGQTPRPLEDTTREAQELEAQLSLVREGPVSEPEPGTQEVLCQLKRDQPSPCLSSAEDSGVDEGQGSPSEMVHSSEFRVDNNHLLLLMIHVFRENEEQLFKMIRMSTGHMEGNLQLLYVLLTDCYVYLLRKGATEKPYLVEEAVSYNELDYVSVGLDQQTVKLVCTNRRKQFLLDTADVALAEFFLASLKSAMIKGCREPPYPSILTDATMEKLALAKFVAQESKCEASAVTVRFYGLVHWEDPTDESLGPTPCHCSPPEGTITKEGMLHYKAGTSYLGKEHWKTCFVVLSNGILYQYPDRTDVIPLLSVNMGGEQCGGCRRANTTDRPHAFQVILSDRPCLELSAESEAEMAEWMQHLCQAVSKGVIPQGVAPSPCIPCCLVLTDDRLFTCHEDCQTSFFRSLGTAKLGDISAVSTEPGKEYCVLEFSQDSQQLLPPWVIYLSCTSELDRLLSALNSGWKTIYQVDLPHTAIQEASNKKKFEDALSLIHSAWQRSDSLCRGRASRDPWC

SEQ ID NO: 890491 - protein, 911 aa, Homo sapiens
SSSVPVSGELGCCISTIKNALVCSHDHLTLFLTLVSGLEFIRFELDLDAPYLDLAPYMPDYYKPQYLLDFEDRLPSSVHGSDSLSLNSFNSVTSTNLEWDDSAIAPSSEDYDFGDVFPAVPSVPSTDWEDGDLTDTVSGPRSTASDLTSSKASTRSPTQRQNPFNEEPAETVSSSDTTPVHTTSQEKEEAQALDPPDACTELEVIRVTKKKKIGKKKKSRSDEEASPLHPACSQKKCAKQGDGDSRNGSPSLGRDSPDTMLASPQEEGEGPSSTTESSERSEPGLLIPEMKDTSMERLGQPLSKVIDQLNGQLDPSTWCSRAEPPDQSFRTGSPGDAPERPPLCDFSEGLSAPMDFYRFTVESPSTVTSGGGHHDPAGLGQPLHVPSSPEAAGQEEEGGGGEGQTPRPLEDTTREAQELEAQLSLVREGPVSEPEPGTQEVLCQLKRDQPSPCLSSAEDSGVDEGQGSPSEMVHSSEFRVDNNHLLLLMIHVFRENEEQLFKMIRMSTGHMEGNLQLLYVLLTDCYVYLLRKGATEKPYLVEEAVSYNELDYVSVGLDQQTVKLVCTNRRKQFLLDTADVALAEFFLASLKSAMIKGCREPPYPSILTDATMEKLALAKFVAQESKCEASAVTVRFYGLVHWEDPTDESLGPTPCHCSPPEGTITKEGMLHYKAGTSYLGKEHWKTCFVVLSNGILYQYPDRTDVIPLLSVNMGGEQCGGCRRANTTDRPHAFQVILSDRPCLELSAESEAEMAEWMQHLCQAVSKGVIPQGVAPSPCIPCCLVLTDDRLFTCHEDCQTSFFRSLGTAKLGDISAVSTEPGKEYCVLEFSQDSQQLLPPWVIYLSCTSELDRLLSALNSGWKTIYQVDLPHTAIQEASNKKKFEDALSLIHSAWQRSDSLCRGRASRDPWC

SEQ ID NO: 890492 - protein, 867 aa, Homo sapiens
GDGGSAMEPGEVKDRILENISLSVKKLQSYFAACEDEIPAIRNHDKVLQRLCEHLDHALLYGLQDLSSGYWVLVVHFTRREAIKQIEVLQHVATNLGRSRAWLYLALNENSLESYLRLFQENLGLLHKYYVKNALVCSHDHLTLFLTLVSGLEFIRFELDLDAPYLDLAPYMPDTTNLSTCWTLKTACSQKKCAKQGDGDSRNGSPSLGRDSPDTMLASPQEEGEGPSSTTESSERSEPGLLIPEMKDTSMERLGQPLSKVIDQLNGQLDPSTWCSRAEPPDQSFRTGSPGDAPERPPLCDFSEGLSAPMDFYRFTVESPSTVTSGGGHHDPAGLGQPLHVPSSPEAAGQEEEGGGGEGQTPRPLEDTTREAQELEAQLSLVREGPVSEPEPGTQEVLCQLKRDQPSPCLSSAEDSGVDEGQGSPSEMVHSSEFRVDNNHLLLLMIHVFRENEEQLFKMIRMSTGHMEGNLQLLYVLLTDCYVYLLRKGATEKPYLVEEAVSYNELDYVSVGLDQQTVKLVCTNRRKQFLLDTADVALAEFFLASLKSAMIKGCREPPYPSILTDATMEKLALAKFVAQESKCEASAVTVRFYGLVHWEDPTDESLGPTPCHCSPPEGTITKEGMLHYKAGTSYLGKEHWKTCFVVLSNGILYQYPDRTDVIPLLSVNMGGEQCGGCRRANTTDRPHAFQVILSDRPCLELSAESEAEMAEWMQHLCQAVSKGVIPQGVAPSPCIPCCLVLTDDRLFTCHEDCQTSFFRSLGTAKLGDISAVSTEPGKEYCVLEFSQDSQQLLPPWVIYLSCTSELDRLLSALNSGWKTIYQVDLPHTAIQEASNKKKFEDALSLIHSAWQRSDSLCRGRASRDPWC

SEQ ID NO: 890493 - protein, 1035 aa, Homo sapiens
GDGGSAMEPGEVKDRILENISLSVKKLQSYFAACEDEIPAIRNHDKVLQRLCEHLDHALLYGLQDLSSGYWVLVVHFTRREAIKQIEVLQHVATNLGRSRAWLYLALNENSLESYLRLFQENLGLLHKYYVKNALVCSHDHLTLFLTLVSGLEFIRFELDLDAPYLDLAPYMPDYYKPQYLLDFEDRLPSSVHGSDSLSLNSFNSVTSTNLEWDDSAIAPSSEDYDFGDVFPAVPSVPSTDWEDGDLTDTVSGPRSTASDLTSSKASTRSPTQRQNPFNEEPAETVSSSDTTPVHTTSQEKEEAQALDPPDACTELEVIRVTKKKKIGKKKKSRSDEEASPLHPACSQKKCAKQGDGDSRNGSPSLGRDSPDTMLASPQEEGEGPSSTTESSERSEPGLLIPEMKDTSMERLGQPLSKVIDQLNGQLDPSTWCSRAEPPDQSFRTGSPGDAPERPPLCDFSEGLSAPMDFYRFTVESPSTVTSGGGHHDPAGLGQPLHVPSSPEAAGQEEEGGGGEGQTPRPLEDTTREAQELEAQLSLVREGPVSEPEPGTQEVLCQLKRDQPSPCLSSAEDSGVDEGQGSPSEMVHSSEFRVDNNHLLLLMIHVFRENEEQLFKVILDEDRAMEGKQQLLFVLLIRLLCLPAPDRGHMRIHNLSEKRPVSLATETVDYVDTAWNLHTWIRRKLDVQPNSRKRFHDMDTADVALELRFFLASLKSAMIKGCREPPYPSILTDATMEKLALAKFVAQESKCEASAVTVRFYGLVHWEDPTDESLGPTPCHCSPPEGTITKEGMLHYKAGTSYLGKEHWKTCFVVLSNGILYQYPDRTDVIPLLSVNMGGEQCGGCRRANTTDRPHAFQVILSDRPCLELSAESEAEMAEWMQHLCQAVSKGVIPQGVAPSPCIPCCLVLTDDRLFTCHEDCQTSFFRSLGTAKLGDISAVSTEPGKEYCVLEFSQDSQQLLPPWVIYLSCTSELDRLLSALNSGWKTIYQVDLPHTAIQEASNKKKFEDALSLIHSAWQRSDSLCRGRASRDPWC

SEQ ID NO: 890494 - protein, 919 aa, Homo sapiens
GDGGSAMEPGEVKDRILENISLSVKKLQSYFAACEDEIPAIRNHDKVLQRLCEHLDHALLYGLQDLSSGYWVLVVHFTRREAIKQIEVLQHVATNLGRSRAWLYLALNENSLESYLRLFQENLGLLHKYYVKNALVCSHDHLTLFLTLVSGLEFIRFELDLDAPYLDLAPYMPDYYKPQYLLDFEDRLPSSVHGSDSLSLNSFNSVTSTNLEWDDSAIAPSSEDYDFGDVFPAVPSVPSTDWEDGDLTDTVSGPRSTASDLTSSKASTRSPTQRQNPFNEEPAETVSSSDTTPVHTTSQEKEEAQALDPPDACTELEVIRVTKKKKIGKKKKSRSDEEASPLHPACSQKKCAKQGDGDSRNGSPSLGRDSPDTMLASPQEEGEGPSSTTESSERSEPGLLIPEMKDTSMERLGQPLSKVIDQLNGQLDPSTWCSRAEPPDQSFRTGSPGDAPERPPLCDFSEGLSAPMDFYRFTVESPSTVTSGGGHHDPAGLGQPLHVPSSPEAAGQEEEGGGGEGQTPRPLEDTTREAQELEAQLSLVREGPVSEPEPGTQEVLCQLKRDQPSPCLSSAEDSGVDEGQGSPSEMVHSSEFRKQDSAASAMIKGCREPPYPSILTDATMEKLALAKFVAQESKCEASAVTVRFYGLVHWEDPTDESLGPTPCHCSPPEGTITKEGMLHYKAGTSYLGKEHWKTCFVVLSNGILYQYPDRTDVIPLLSVNMGGEQCGGCRRANTTDRPHAFQVILSDRPCLELSAESEAEMAEWMQHLCQAVSKGVIPQGVAPSPCIPCCLVLTDDRLFTCHEDCQTSFFRSLGTAKLGDISAVSTEPGKEYCVLEFSQDSQQLLPPWVIYLSCTSELDRLLSALNSGWKTIYQVDLPHTAIQEASNKKKFEDALSLIHSAWQRSDSLCRGRASRDPWC

SEQ ID NO: 890495 - protein, 833 aa, Homo sapiens
GDGGSAMEPGEVKDRILENISLSVKKLQSYFAACEDEIPAIRNHDKVLQRLCEHLDHALLYGLQDLSSGYWVLVVHFTRREAIKQIEVLQHVATNLGRSRAWLYLALNENSLESYLRLFQENLGLLHKYYVKNALVCSHDHLTLFLTLVSGLEFIRFELDLDAPYLDLAPYMPDYYKPQYLLDFEDRLPSSVHGSDSLSLNSFNSVTSTNLEWDDSAIAPSSEDYDFGDVFPAVPSVPSTDWEDGDLTDTVSGPRSTASDLTSSKASTRSPTQRQNPFNEEPAETVSSSDTTPVHTTSQEKEEAQALDPPDACTELEVIRVTKKKKIGKKKKSRSDEEASPLHPACSQKKCAKQGDGDSRNGSPSLGRDSPDTMLASPQEEGEGPSSTTESSERSEPGLLIPEMKDTSMERLGQPLSKVIDQLNGQLDPSTWCSRAEPPDQSFRTGSPGDAPERPPLCDFSEGLSAPMDFYRFTVESPSTVTSGGGHHDPAGLGQPLHVPSSPEAAGQEEEGGGGEGQTPRPLEDTTREAQELEAQLSLVREGPVSEPEPGTQEVLCQLKRDQPSPCLSSAEDSGVDEGQGSPSEMVHSSEFRVDNNHLLLLMIHVFRENEEQLFKMIRMSTGHMEGNLQLLYVLLTDCYVYLLRKGATEKPYLVEEAVSYNELDYVSVGLDQQTVKLVCTNRRKQFLLDTADVALAEFFLASLKSAMIKGCREPPYPSILTDATMEKLALAKFVAQESKCEASAVTVRFYGLVHWEDPTDESLGPTPCHCSPPEGTITKEGMLHYKAGTSYLGKEHWKTCFVVLSNGILYQYPDRTDVIPLLSVNMGSSPRA

SEQ ID NO: 890496 - protein, 1025 aa, Homo sapiens; identical to SEQ ID NO: 890490

SEQ ID NO: 890497 - protein, 1025 aa, Homo sapiens; identical to SEQ ID NO: 890490

SEQ ID NO: 890498 - protein, 1025 aa, Homo sapiens; identical to SEQ ID NO: 890490

SEQ ID NO: 890499 - protein, 203 aa, Homo sapiens
NKKLYTNPENQNEANRFSTDRPHAFQVILSDRPCLELSAESEAEMAEWMQHLCQAVSKGVIPQGVAPSPCIPCCLVLTDDRLFTCHEDCQTSFFRSLGTAKLGDISAVSTEPGKEYCVLEFSQDSQQLLPPWVIYLSCTSELDRLLSALNSGWKTIYQVDLPHTAIQEASNKKKFEDALSLIHSAWQRSDSLCRGRASRDPWC

SEQ ID NO: 890500 - protein, 937 aa, Homo sapiens
GDGGSAMEPGEVKDRILENISLSVKKLQSYFAACEDEIPAIRNHDKVLQRLCEHLDHALLYGLQDLSSGYWVLVVHFTRREAIKQIEVLQHVATNLGRSRAWLYLALNENSLESYLRLFQENLGLLHKYYVKNALVCSHDHLTLFLTLVSGLEFIRFELDLDAPYLDLAPYMPDYYKPQYLLDFEDRLPSSVHGSDSLSLNSFNSVTSTNLEWDDSAIAPSSEDYDFGDVFPAVPSVPSTDWEDGDLTDTVSGPRSTASDLTSSKASTRSPTQRQNPFNEEPAETVSSSDTTPVHTTSQEKEEAQALDPPDACTELEVIRVTKKKKIGKKKKSRSDEEASPLHPACSQKKCAKQGDGDSRNGSPSLGRDSPDTMLASPQEEGEGPSSTTESSERSEPGLLIPEMKDTSMERLGQPLSKVIDQLNGQLDPSTWCSRAEPPDQSFRTGSPGDAPERPPLCDFSEGLSAPMDFYRFTVESPSTVTSGGGHHDPAGLGQPLHVPSSPEAAGQEEEGGGGEGQTPRPLEDTTREAQELEAQLSLVREGPVSEPEPGTQEVLCQLKRDQPSPCLSSAEDSGVDEGQGSPSEMVHSSEFRVDNNHLLLLMIHVFRENEEQLFKMIRMSTGHMEGNLQLLYVLLTDCYVYLLRKGATEKPYLVEEAVSYNELDYVSVGLDQQTVKLVCTNRRKQFLLDTADVALAEFFLASLKSAMIKGCREPPYPSILTDATMEKLALAKFVAQESKCEASAVTVRFYGLVHWEDPTDESLGPTPCHCSPPEGTITKEGMLHYKAGTSYLGKEHWKTCFVVLSNGILYQYPDRTDVIPLLSVNMGGEQCGGCRRANTTDRPHAFQVILSDRPCLELSAESEAEMAEWMQHLCQAVSKGVIPQGVAPSPCIPCCLVLTDDRLFTCHEDCQTSFFRSLGTAKLGDISAMGILLESD

SEQ ID NO: 890501 - protein, 160 aa, Homo sapiens
FPGRDGEGLTGAPWPRQRQAWCPQALKTPVALSGPHLFSARPNTGGPPPHGDPGSLQQEEIRGCLEPHPQRLAAERQSLPRPSLPRPLVLRQSWLASLVGRKGRHASRQAHCHGCCHAVGSLQSTPALGGRTTECGLRQGPSTPGIQIRCPAPLGILPDR

SEQ ID NO: 890502 - protein, 631 aa, Homo sapiens
GDGGSAMEPGEVKDRILENISLSVKKLQSYFAACEDEIPAIRNHDKVLQRLCEHLDHALLYGLQDLSSGYWVLVVHFTRREAIKQIEVLQHVATNLGRSRAWLYLALNENSLESYLRLFQENLGLLHKYYVKNALVCSHDHLTLFLTLVSGLEFIRFELDLDAPYLDLAPYMPDYYKPQYLLDFEDRLPSSVHGSDSLSLNSFNSVTSTNLEWDDSAIAPSSEDYDFGDVFPAVPSVPSTDWEDGDLTDTVSGPRSTASDLTSSKASTRSPTQRQNPFNEEPAETVSSSDTTPVHTTSQEKEEAQALDPPDACTELEVIRVTKKKKIGKKKKSRSDEEASPLHPACSQKKCAKQGDGDSRNGSPSLGRDSPDTMLASPQEEGEGPSSTTESSERSEPGLLIPEMKDTSMERLGQPLSKVIDQLNGQLDPSTWCSRAEPPDQSFRTGSPGDAPERPPLCDFSEGLSAPMDFYRFTVESPSTVTSGGGHHDPAGLGQPLHVPSSPEAAGQEEEGGGGEGQTPRHPCSCLNTLLATWGSGNTGCLRMFPPPSSITAHTAACLARCRGAGSPPWLPGGSACPQSCPACPLNPAVPVAPRSKGGGWGAWRRAEPTSLASMLTSSDCPLLGWSQALP

SEQ ID NO: 890503 - protein, 832 aa, Homo sapiens
GDGGSAMEPGEVKDRILENISLSVKKLQSYFAACEDEIPAIRNHDKVLQRLCEHLDHALLYGLQDLSSGYWVLVVHFTRREAIKQIEVLQHVATNLGRSRAWLYLALNENSLESYLRLFQENLGLLHKYYVKNALVCSHDHLTLFLTLVSGLEFIRFELDLDAPYLDLAPYMPDYYKPQYLLDFEDRLPSSVHGSDSLSLNSFNSVTSTNLEWDDSAIAPSSEDYDFGDVFPAVPSVPSTDWEDGDLTDTVSGPRSTASDLTSSKASTRSPTQRQNPFNEEPAETVSSSDTTPVHTTSQEKEEAQALDPPDACTELEVIRVTKKKKIGKKKKSRSDEEASPLHPACSQKKCAKQGDGDSRNGSPSLGRDSPDTMLASPQEEGEGPSSTTESSERSEPGLLIPEMKDTSMERLGQPLSKVIDQLNGQLDPSTWCSRAEPPDQSFRTGSPGDAPERPPLCDFSEGLSAPMDFYRFTVESPSTVTSGGGHHDPAGLGQPLHVPSSPEAAGQEEEGGGGEGQTPRPLEDTTREAQELEAQLSLVREGPVSEPEPGTQEVLCQLKRDQPSPCLSSAEDSGVDEGQGSPSEMVHSSEFRVDNNHLLLLMIHVFRENEEQLFKMIRMSTGHMEGNLQLLYVLLTDCYVYLLRKGATEKPYLVEEAVSYNELDYVSVGLDQQTVKLVCTNRRKQFLLDTADVALAEFFLASLKSAMIKGCREPPYPSILTDATMEKLALAKFVAQESKCEASAVTVRFYGLVHWEDPTDESLGPTPCHCSPPEGTITKEGMLHYKAGTTNKIGGAASAEPQSKNLDSGHCVPEPSSSGQRLYPEVFYGSA

SEQ ID NO: 890504 - protein, 616 aa, Homo sapiens
GDGGSAMEPGEVKDRILENISLSVKKLQSYFAACEDEIPAIRNHDKVLQRLCEHLDHALLYGLQDLSSGYWVLVVHFTRREAIKQIEVLQHVATNLGRSRAWLYLALNENSLESYLRLFQENLGLLHKYYVKNALVCSHDHLTLFLTLVSGLEFIRFELDLDAPYLDLAPYMPDYYKPQYLLDFEDRLPSSVHGSDSLSLNSFNSVTSTNLEWDDSAIAPSSEDYDFGDVFPAVPSVPSTDWEDGDLTDTVSGPRSTASDLTSSKASTRSPTQRQNPFNEEPAETVSSSDTTPVHTTSQEKEEAQALDPPDACTELEVIRVTKKKKIGKKKKSRSDEEASPLHPACSQKKCAKQGDGDSRNGSPSLGRDSPDTMLASPQEEGEGPSSTTESSERSEPGLLIPEMKDTSMERLGQPLSKVIDQLNGQLDPSTWCSRAEPPDQSFRTGSPGDAPERPPLCDFSEGLSAPMDFYRFTVESPSTVTSGGGHHDPAGLGQPLHVPSSPEAAGQEEEGGGGEGQTPRPLEDTTREAQELEAQLSLVREGPVSEPEPGTQEVLCQLKRDQPSPCLSSAEDSGVDEGQGSPSEMVHSSEFRVDNNHLLLLMIHVFRENEEQLFK

SEQ ID NO: 890505 - protein, 118 aa, Homo sapiens
QIVVSSGGPRGGGDGVPSKLLLKYKTPCPVRLWLLLEMGPPLSGFPGRNWPACLPPGLTHALGVGDPGGCLTGCLLLPCPPRWRPHRHGQWSPLHSLRPDQQQGLHQEPHPAPEPLQR

SEQ ID NO: 890506 - protein, 94 aa, Homo sapiens
CLVLTDDRLFTCHEDCQTSFFRSLGTAKLGDISAVSTEPGKEYCVLVSFEWGRGCKACRRKALAAHPGAWLSLGVLPGQPAAPPALGHLPELHF

SEQ ID NO: 890507 - protein, 633 aa, Homo sapiens
GDGGSAMEPGEVKDRILENISLSVKKLQSYFAACEDEIPAIRNHDKVLQRLCEHLDHALLYGLQDLSSGYWVLVVHFTRREAIKQIEVLQHVATNLGRSRAWLYLALNENSLESYLRLFQENLGLLHKYYVKNALVCSHDHLTLFLTLVSGLEFIRFELDLDAPYLDLAPYMPDYYKPQYLLDFEDRLPSSVHGSDSLSLNSFNSVTSTNLEWDDSAIAPSSEDYDFGDVFPAVPSVPSTDWEDGDLTDTVSGPRSTASDLTSSKASTRSPTQRQNPFNEEPAETVSSSDTTPVHTTSQEKEEAQALDPPDACTELEVIRVTKKKKIGKKKKSRSDEEASPLHPACSQKKCAKQGDGDSRNGSPSLGRDSPDTMLASPQEEGEGPSSTTESSERSEPGLLIPEMKDTSMERLGQPLSKVIDQLNGQLDPSTWCSRAEPPDQSFRTGSPGDAPERPPLCDFSEGLSAPMDFYRFTVESPSTVTSGGGHHDPAGLGQPLHVPSSPEAAGQEEEGGGGEGQTPRPLEDTTREAQELEAQLSLVREGPVSEPEPGTQEVLCQLKRDQPSPCLSSAEDSGVDEGQGSPSEMVHSSEFRVDNNHLLLLMIHVFRENEEQLFKSGGRGWGTWCAVPRYTA

SEQ ID NO: 890508 - protein, 351 aa, Homo sapiens
GDGGSAMEPGEVKDRILENISLSVKKLQSYFAACEDEIPAIRNHDKVLQRLCEHLDHALLYGLQDLSSGYWVLVVHFTRREAIKQIEVLQHVATNLGRSRAWLYLALNENSLESYLRLFQENLGLLHKYYVKNALVCSHDHLTLFLTLVSGLEFIRFELDLDAPYLDLAPYMPDYYKPQYLLDFEDRLPSSVHGSDSLSLNSFNSVTSTNLEWDDSAIAPSSEDGDLTDTVSGPRSTASDLTSSKASTRSPTQRQNPFNEEPAETVSSSDTTPVHTTSQEKEEAQALDPPDACTELEVIRVTKKKKEDALNETRESETKLKELPGVCNETMMALWEECKPCLKQTCMKFYA

SEQ ID NO: 890509 - protein, 461 aa, Homo sapiens
MHQRYFWTDQGQVALGGHYMAEGEGYFAMSEDELACSPYIPLGGDFGGGDFGGGDFGGGDFGGGGSFGGHCLDYCESPTAHCNVLNWEQVQRLDGILSETIPIHGRGNFPTLELQPSLIVKVVRRRLAEKRIGVRDVRLNGSAASHVLHQDSGLGYKDLDLIFCADLRGEGEFQTVKDVVLDCLLDFLPEGVNKEKITPLTLKEAYVQKMVKVCNDSDRWSLISLSNNSGKNVELKFVDSLRRQFEFSVDSFQIKLDSLLLFYECSENPMTETFHPTIIGESVYGDFQEAFDHLCNKIIATRNPEEIRGGGLLKYCNLLVRGFRPASDEIKTLQRYMCSRFFIDFSDIGEQQRKLESYLQNHFVGLEDRKYEYLMTLHGVVNESTVCLMGHERRQTLNLITMLAIRVLADQNVIPNVANVTCYYQPAPYVADANFSNYYIAQVQPVFTCQQQTYSTWLPCN

SEQ ID NO: 890510 - protein, 461 aa, Homo sapiens; identical to SEQ ID NO: 890509

SEQ ID NO: 890511 - protein, 252 aa, Homo sapiens [sequence omitted]

SEQ ID NO: 890512 - protein, 495 aa, Homo sapiens
IFPAQLLKLQRHERVWQQEPPVRDHRSWGGSGAGGVAGREWTDQGQVALGGHYMAEGEGYFAMSEDELACSPYIPLGGDFGGGDFGGGDFGGGDFGGGGSFGGHCLDYCESPTAHCNVLNWEQVQRLDGILSETIPIHGRGNFPTLELQPSLIVKVVRRRLAEKRIGVRDVRLNGSAASHVLHQDSGLGYKDLDLIFCADLRGEGEFQTVKDVVLDCLLDFLPEGVNKEKITPLTLKEAYVQKMVKVCNDSDRWSLISLSNNSGKNVELKFVDSLRRQFEFSVDSFQIKLDSLLLFYECSENPMTETFHPTIIGESVYGDFQEAFDHLCNKIIATRNPEEIRGGGLLKYCNLLVRGFRPASDEIKTLQRYMCSRFFIDFSDIGEQQRKLESYLQNHFVGLEDRKYEYLMTLHGVVNESTVCLMGHERRQTLNLITMLAIRVLADQNVIPNVANVTCYYQPAPYVADANFSNYYIAQVQPVFTCQQQTYSTWLPCN

SEQ ID NO: 890513 - protein, 109 aa, Homo sapiens
HVLHQDSGLGYKDLDLIFCADLRGEGEFQTVKDVVLDCLLDFLPEGVNKEKITPLTLKVTPPEMHLGPDPVWAGCDGERAEGHRLNAMNLWPSRVWARVISLIFDFLNQ

SEQ ID NO: 890514 - protein, 159 aa, Homo sapiens
MSGARSKLALFLCGCYVVALGAHTGEESVADHHEAEYYVAAVYEHPSILSLNPLALISRQEALELMNQNLDIYEQQVMTAAQKDVQIIVFPEDGIHGFNFTRTSIYPFLDFMPSPQVVRWNPCLEPHRFNDTEVIPAFFLSRLRVHRGDLSQGPEAVTC

SEQ ID NO: 890515 - protein, 159 aa, Homo sapiens; identical to SEQ ID NO: 890514

SEQ ID NO: 890516 - protein, 586 aa, Homo sapiens
MPEGAGLAGDCCLCKAGKKPNSEASRHCLRVGQLERFRGCKGRMAHAHIQGGRRAKSRFVVCIMSGARSKLALFLCGCYVVALGAHTGEESVADHHEAEYYVAAVYEHPSILSLNPLALISRQEALELMNQNLDIYEQQVMTAAQKDVQIIVFPEDGIHGFNFTRTSIYPFLDFMPSPQVVRWNPCLEPHRFNDTEVLQRLSCMAIRGDMFLVANLGTKEPCHSSDPRCPKDGRYQFNTNVVFSNNGTLVDRYRKHNLYFEAAFDVPLKVDLITFDTPFAGRFGIFTCFDILFFDPAIRVLRDYKVKHVVYPTAWMNQLPLLAAIEIQKAFAVAFGINVLAANVHHPVLGMTGSGIHTPLESFWYHDMENPKSHLIIAQVAKNPVGLIGAENATGETDPSHSKFLKILSGDPYCEKDAQEVHCDEATKWNVNAPPTFHSEMMYDNFTLVPVWGKEGYLHVCSNGLCCYLLYERPTLSKELYALGVFDGLHTVHGTYYIQVCALVRCGGLGFDTCGQEITEATGIFEFHLWGNFSTSYIFPLFLTSGMTLEVPDQLGWENDHYFLRKSRLSSGLVTAALYGRLYERD

SEQ ID NO: 890517 - protein, 523 aa, Homo sapiens
MSGARSKLALFLCGCYVVALGAHTGEESVADHHEAEYYVAAVYEHPSILSLNPLALISRQEALELMNQNLDIYEQQVMTAAQKDVQIIVFPEDGIHGFNFTRTSIYPFLDFMPSPQVVRWNPCLEPHRFNDTEVLQRLSCMAIRGDMFLVANLGTKEPCHSSDPRCPKDGRYQFNTNVVFSNNGTLVDRYRKHNLYFEAAFDVPLKVDLITFDTPFAGRFGIFTCFDILFFDPAIRVLRDYKVKHVVYPTAWMNQLPLLAAIEIQKAFAVAFGINVLAANVHHPVLGMTGSGIHTPLESFWYHDMENPKSHLIIAQVAKNPVGLIGAENATGETDPSHSKFLKILSGDPYCEKDAQEVHCDEATKWNVNAPPTFHSEMMYDNFTLVPVWGKEGYLHVCSNGLCCYLLYERPTLSKELYALGVFDGLHTVHGTYYIQVCALVRCGGLGFDTCGQEITEATGIFEFHLWGNFSTSYIFPLFLTSGMTLEVPDQLGWENDHYFLRKSRLSSGLVTAALYGRLYERD

SEQ ID NO: 890518 - protein, 545 aa, Homo sapiens
MPEGGGTSRRLLPMQSRFVVCIMSGARSKLALFLCGCYVVALGAHTGEESVADHHEAEYYVAAVYEHPSILSLNPLALISRQEALELMNQNLDIYEQQVMTAAQKDVQIIVFPEDGIHGFNFTRTSIYPFLDFMPSPQVVRWNPCLEPHRFNDTEVLQRLSCMAIRGDMFLVANLGTKEPCHSSDPRCPKDGRYQFNTNVVFSNNGTLVDRYRKHNLYFEAAFDVPLKVDLITFDTPFAGRFGIFTCFDILFFDPAIRVLRDYKVKHVVYPTAWMNQLPLLAAIEIQKAFAVAFGINVLAANVHHPVLGMTGSGIHTPLESFWYHDMENPKSHLIIAQVAKNPVGLIGAENATGETDPSHSKFLKILSGDPYCEKDAQEVHCDEATKWNVNAPPTFHSEMMYDNFTLVPVWGKEGYLHVCSNGLCCYLLYERPTLSKELYALGVFDGLHTVHGTYYIQVCALVRCGGLGFDTCGQEITEATGIFEFHLWGNFSTSYIFPLFLTSGMTLEVPDQLGWENDHYFLRKSRLSSGLVTAALYGRLYERD

SEQ ID NO: 890519 - protein, 401 aa, Homo sapiens
MPEGAGLAGDCCLCKAGKKPNSEASRHCLRVGQLERFRGCKGRMAHAHIQGGRRAKSRFVVCIMSGARSKLALFLCGCYVVALGAHTGEESVADHHEAEYYVAAVYEHPSILSLNPLALISRQEALELMNQNLDIYEQQVMTAAQKDVQIIVFPEDGIHGFNFTRTSIYPFLDFMPSPQVVRWNPCLEPHRFNDTEVLQRLSCMAIRGDMFLVANLGTKEPCHSSDPRCPKDGRYQFNTNVVFSNNGTLVDRYRKHNLYFEAAFDVPLKVDLITFDTPFAGRFGIFTCFDILFFDPAIRVLRDYKVKHVVYPTAWMNQLPLLAAIEIQKAFAVAFGINVLAANVHHPVLGMTGSGIHTPLESFWYHDMENPKSHLIIAQVAKNPVGLIGAENATGETDGDI

SEQ ID NO: 890520 - protein, 222 aa, Homo sapiens
MPEGAGLAGDCCLCKAGKKPNSEASRHCLRVGQLERFRGCKGRMAHAHIQGGRRAKSRFVVCIMSGARSKLALFLCGCYVVALGAHTGEESVADHHEAEYYVAAVYEHPSILSLNPLALISRQEALELMNQNLDIYEQQVMTAAQKDVQIIVFPEDGIHGFNFTRTSIYPFLDFMPSPQVVRWNPCLEPHRFNDTEVIPAFFLSRLRVHRGDLSQGPEAVTC

SEQ ID NO: 890521 - protein, 316 aa, Homo sapiens
ESAPCPRRERGAGGRRPAGCMARCERLRGAALRDVLGRAQGVLFDCDGVLWNGERAVPGAPELLERLARAGKAALFVSNNSRRARPELALRFARLGFGGLRAEQLFSSALCAARLLRQRLPGPPDAPGAVFVLGGEGLRAELRAAGLRLAGDPSAGDGAAPRVRAVLVGYDEHFSFAKLREACAHLRDPECLLVATDRDPWHPLSDGSRTPGTGSLAAAVETASGRQALVVGKPSPYMFECITENFSIDPARTLMVGDRLETDILFGHRCGMTTVLTLTGVSRLEEAQAYLAAGQHDLVPHYYVESIADLTEGLED

SEQ ID NO: 890522 - protein, 316 aa, Homo sapiens; identical to SEQ ID NO: 890521

SEQ ID NO: 890523 - protein, 316 aa, Homo sapiens; identical to SEQ ID NO: 890521

SEQ ID NO: 890524 - protein, 115 aa, Homo sapiens
RAVRSPCDPAHSWRLRGRCVRAMAAANPWDPASAPNGAGLVLGHFIASGMVNQKNLEIELLKLEKDTADVVHPFFLEMKSCYVAQAGLELMASILPFQSPKTLRLQLRSVILCKA

SEQ ID NO: 890525 - protein, 146 aa, Homo sapiens
RAVRSPCDPAHSWRLRGRCVRAMAAANPWDPASAPNGAGLVLGHFIASGMVNQEMLNMSKKTVSCFVNFTRLQQITNIQAEIYQKNLEIELLKLEKDTADVVHPFFLEMKSCYVAQAGLELMASILPFQSPKTLRLQLRSVILCKA

SEQ ID NO: 890526 - protein, 257 aa, Homo sapiens
RAVRSPCDPAHSWRLRGRCVRAMAAANPWDPASAPNGAGLVLGHFIASGMVNQEMLNMSKKTVSCFVNFTRLQQITNIQAEIYQKNLEIELLKLEKDTADVVHPFFLAQKCHTLQSMNNHLEAVLKEKRSLRQRLLKPMCQENLPIEAVYHRYMVHLLELAVTFIERLETHLETIRNIPHLAANLKKMNQALAKMDILVTETEELAENILKWRKQQNEVSSCIPKILAEESYLYKHDIIMPPLPFTSKVHVQTINAK

SEQ ID NO: 890527 - protein, 257 aa, Homo sapiens; identical to SEQ ID NO: 890526

SEQ ID NO: 890528 - protein, 257 aa, Homo sapiens; identical to SEQ ID NO: 890526

SEQ ID NO: 890529 - protein, 141 aa, Homo sapiens
MNNHLEAVLKEKRSLRQRLLKPMCQENLPIEAVYHRYMVHLLELAVTFIERLETHLETIRNIPHLAANLKKMNQALAKMDILVTETEELAENILKWRKQQNEVSSCIPKILAEESYLYKHDIIMPPLPFTSKVHVQTINAK

SEQ ID NO: 890530 - protein, 257 aa, Homo sapiens; identical to SEQ ID NO: 890526

SEQ ID NO: 890531 - protein, 257 aa, Homo sapiens; identical to SEQ ID NO: 890526

SEQ ID NO: 890532 - protein, 154 aa, Homo sapiens
RAVRSPCDPAHSWRLRGRCVRAMAAANPWDPASAPNGAGLVLGHFIASGMVNQEMLNMSKKTVSCFVNFTRLQQITNIQAEIYQKNLEIELLKLEKDTADVVHPFFLAQKCHTLQSMNNHLEAVLKEKRSLRQRLLKPMCQENLPIEAVYHRLD

SEQ ID NO: 890533 - protein, 132 aa, Homo sapiens
RAVRSPCDPAHSWRLRGRCVRAMAAANPWDPASAPNGAGLVLGHFIASGMVNQEMLNMSKKTVSCFVNFTRLQQITNIQAEIYQKNLEIELLKLEKDTADVVHPFFLGGSDSVILLYAGISNTQRGHCSAGC

SEQ ID NO: 890534 - protein, 770 aa, Homo sapiens
MSNEVETSATNGQPDQQAAPKAPSKKEKKKGPEKTDEYLLARFKGDGVKYKAKLIGIDDVPDARGDKMSQDSMMKLKGMAAAGRSQGQHKQRIWVNISLSGIKIIDEKTGVIEHEHPVNKISFIARDVTDNRAFGYVCGGEGQHQFFAIKTGQQAEPLVVDLKDLFQVIYNVKKKEEEKKKIEEASKAVENGSEALMILDDQTNKLKSGVDQMDLFGDMSTPPDLNSPTESKDILLVDLNSEIDTNQNSLRENPFLTNGITSCSLPRPTPQASFLPENAFSANLNFFPTPNPDPFRDDPFTQPDQSTPSSFDSLKSPDQKKENSSSSSTPLSNGPLNGDVDYFGQQFDQISNRTGKQEAQAGPWPFSSSQTQPAVRTQNGVSEREQNGFSVKSSPNPFVGSPPKGLSIQNGVKQDLESSVQSSPHDSIAIIPPPQSTKPGRGRRTAKSSANDLLASDIFAPPVSEPSGQASPTGQPTALQPNPLDLFKTSAPAPVGPLVGLGGVTVTLPQAGPWNTASLVFNQSPSMAPGAMMGGQPSGFSQPVIFGTSPAVSGWNQPSPFAASTPPPVPVVWGPSASVAPNAWSTTSPLGNPFQSNIFPAPAVSTQPPSMHSSLLVTPPQPPPRAGPPKDISSDAFTALDPLGDKEIKDVKEMFKDFQLRQPPAVPARKGEQTSSGTLSAFASYFNSKVGIPQENADHDDFDANQLLNKINEPPKPAPRQVSLPVTKSTDNAFENPFFKDSFGSSQASVASSQPVSSEMYRDPFGNPFA

SEQ ID NO: 890535 - protein, 770 aa, Homo sapiens; identical to SEQ ID NO: 890534

SEQ ID NO: 890536 - protein, 770 aa, Homo sapiens; identical to SEQ ID NO: 890534

SEQ ID NO: 890537 - protein, 749 aa, Homo sapiens
MSNEVETSATNGQPDQQAAPKAPSKKEKKKGPEKTDEYLLARFKGDGVKYKAKLIGIDDVPDARGDKMSQDSMMKLKGMAAAGRSQGQHKQRIWVNISLSGIKIIDEKTGVIEHEHPVNKISFIARDVTDNRAFGYVCGGEGQHQFFAIKTGQQAEPLVVDLKDLFQVIYNVKKKEEEKKKIEEASKAVENGSEALMILDDQTNKLKSESKDILLVDLNSEIDTNQNSLRENPFLTNGITSCSLPRPTPQASFLPENAFSANLNFFPTPNPDPFRDDPFTQPDQSTPSSFDSLKSPDQKKENSSSSSTPLSNGPLNGDVDYFGQQFDQISNRTGKQEAQAGPWPFSSSQTQPAVRTQNGVSEREQNGFSVKSSPNPFVGSPPKGLSIQNGVKQDLESSVQSSPHDSIAIIPPPQSTKPGRGRRTAKSSANDLLASDIFAPPVSEPSGQASPTGQPTALQPNPLDLFKTSAPAPVGPLVGLGGVTVTLPQAGPWNTASLVFNQSPSMAPGAMMGGQPSGFSQPVIFGTSPAVSGWNQPSPFAASTPPPVPVVWGPSASVAPNAWSTTSPLGNPFQSNIFPAPAVSTQPPSMHSSLLVTPPQPPPRAGPPKDISSDAFTALDPLGDKEIKDVKEMFKDFQLRQPPAVPARKGEQTSSGTLSAFASYFNSKVGIPQENADHDDFDANQLLNKINEPPKPAPRQVSLPVTKSTDNAFENPFFKDSFGSSQASVASSQPVSSEMYRDPFGNPFA

SEQ ID NO: 890538 - protein, 574 aa, Homo sapiens [sequence omitted]

SEQ ID NO: 890539 - protein, 585 aa, Homo sapiens
WLDEAGVIGRGDDLDDQTNKLKSGVDQMDLFGDMSTPPDLNSPTESKDILLVDLNSEIDTNQNSLRENPFLTNGITSCSLPRPTPQASFLPENAFSANLNFFPTPNPDPFRDDPFTQPDQSTPSSFDSLKSPDQKKENSSSSSTPLSNGPLNGDVDYFGQQFDQISNRTGKQEAQAGPWPFSSSQTQPAVRTQNGVSEREQNGFSVKSSPNPFVGSPPKGLSIQNGVKQDLESSVQSSPHDSIAIIPPPQSTKPGRGRRTAKSSANDLLASDIFAPPVSEPSGQASPTGQPTALQPNPLDLFKTSAPAPVGPLVGLGGVTVTLPQAGPWNTASLVFNQSPSMAPGAMMGGQPSGFSQPVIFGTSPAVSGWNQPSPFAASTPPPVPVVWGPSASVAPNAWSTTSPLGNPFQSNIFPAPAVSTQPPSMHSSLLVTPPQPPPRAGPPKDISSDAFTALDPLGDKEIKDVKEMFKDFQLRQPPAVPARKGEQTSSGTLSAFASYFNSKVGIPQENADHDDFDANQLLNKINEPPKPAPRQVSLPVTKSTDNAFENPFFKDSFGSSQASVASSQPVSSEMYRDPFGNPFA

SEQ ID NO: 890540 - protein, 595 aa, Homo sapiens
  misc_feature (13)..(13): Xaa can be any naturally occurring amino acid
MRNVTPLRKSQPXIMVSHFTRDKNNHFNLPYIPYLIWPLASHSTPPELNSPTEEESKDILLVDLNSEIDTNQNSLRENPFLTNGITSCSLPRPTPQASFLPENAFSANLNFFPTPNPDPFRDDPFTQPDQSTPSSFDSLKSPDQKKENSSSSSTPLSNGPLNGDVDYFGQQFDQISNRTGKQEAQAGPWPFSSSQTQPAVRTQNGVSEREQNGFSVKSSPNPFVGSPPKGLSIQNGVKQDLESSVQSSPHDSIAIIPPPQSTKPGRGRRTAKSSANDLLASDIFAPPVSEPSGQASPTGQPTALQPNPLDLFKTSAPAPVGPLVGLGGVTVTLPQAGPWNTASLVFNQSPSMAPGAMMGGQPSGFSQPVIFGTSPAVSGWNQPSPFAASTPPPVPVVWGPSASVAPNAWSTTSPLGNPFQSNIFPAPAVSTQPPSMHSSLLVTPPQPPPRAGPPKDISSDAFTALDPLGDKEIKDVKEMFKDFQLRQPPAVPARKGEQTSSGTLSAFASYFNSKVGIPQENADHDDFDANQLLNKINEPPKPAPRQVSLPVTKSTDNAFENPFFKDSFGSSQASVASSQPVSSEMYRDPFGNPFA

SEQ ID NO: 890541 - protein, 649 aa, Homo sapiens
MSNEVETSATNGQPDQQAAPKAPSKKEKKKGPEKTDEYLLARFKGDGVKYKAKLIGIDDVPDARGDKMSQDSMMKLKGMAAAGRSQGQHKQRIWVNISLSGIKIIDEKTGVIEHEHPVNKISFIARDVTDNRAFGYVCGGEGQHQFFAIKTGQQAEPLVVDLKDLFQVIYNVKKKEEEKKKIEEASKAVENGSEALMILDDQTNKLKSGVDQMDLFGDMSTPPDLNSPTESKDILLVDLNSEIDTNQNSLRENPFLTNGITSCSLPRPTPQASFLPENAFSANLNFFPTPNPDPFRDDPFTQPDQSTPSSFDSLKSPDQKKENSSSSSTPLSNGPLNGDVDYFGQQFDQISNRTGKQEAQAGPWPFSSSQTQPAVRTQNGVSEREQNGFSVKSSPNPFVGSPPKGLSIQNGVKQDLESSVQSSPHDSIAIIPPPQSTKPGRGRRTAKVNCLLHISISRVHVRYQRVVDASSLSCCSRSFLCCCEIEGGISTLVLQEYFPQPPPRAGPPKDISSDAFTALDPLGDKEIKDVKEMFKDFQLRQPPAVPARKGEQTSSGTLSAFASYFNSKVGIPQENADHDDFDANQLLNKINEPPKPAPRQVSLPVTKSTDNAFENPFFKDSFGSSQASVASSQPVSSEMYRDPFGNPFA

SEQ ID NO: 890542 - protein, 239 aa, Homo sapiens
MMGGQPSGFSQPVIFGTSPAVSGWNQPSPFAASTPPPVPVVWGPSASVAPNAWSTTSPLGNPFQSNIFPAPAVSTQPPSMHSSLLVTPPQPPPRAGPPKDISSDAFTALDPLGDKEIKDVKEMFKDFQLRQPPAVPARKGEQTSSGTLSAFASYFNSKVGIPQENADHDDFDANQLLNKINEPPKPAPRQVSLPVTKSTDNAFENPFFKDSFGSSQASVASSQPVSSEMYRDPFGNPFA

SEQ ID NO: 890543 - protein, 239 aa, Homo sapiens; identical to SEQ ID NO: 890542

SEQ ID NO: 890544 - protein, 770 aa, Homo sapiens; identical to SEQ ID NO: 890534

SEQ ID NO: 890545 - protein, 770 aa, Homo sapiens; identical to SEQ ID NO: 890534

SEQ ID NO: 890546 - protein, 770 aa, Homo sapiens; identical to SEQ ID NO: 890534

SEQ ID NO: 890547 - protein, 235 aa, Homo sapiens
MSNEVETSATNGQPDQQAAPKAPSKKEKKKGPEKTDEYLLARFKGDGVKYKAKLIGIDDVPDARGDKMSQDSMMKLKGMAAAGRSQGQHKQRIWVNISLSGIKIIDEKTGVIEHEHPVNKISFIARDVTDNRAFGYVCGGEGQHQFFAIKTGQQAEPLVVDLKDLFQVIYNVKKKEEEKKKIEEASKAVENGSEALMILDDQTNKLKSGVDQMDLFGDMSTPPDLNSPTGDYSEV

SEQ ID NO: 890548 - protein, 72 aa, Homo sapiens
GFRCPTPRLQALLQGNQGSACQDAAGAQARAVGQLRPGVQLRFLWELISHIQRYLEGEEEGDAQKLNKTGAT

SEQ ID NO: 890549 - protein, 770 aa, Homo sapiens; identical to SEQ ID NO: 890534

SEQ ID NO: 890550 - protein, 770 aa, Homo sapiens; identical to SEQ ID NO: 890534

SEQ ID NO: 890551 - protein, 770 aa, Homo sapiens; identical to SEQ ID NO: 890534

SEQ ID NO: 890552 - protein, 752 aa, Homo sapiens
MSNEVETSATNGQPDQQAAPKAPSKKEKKKGPEKTDEYLLARFKGDGVKYKAKLIGIDDVPDARGDKMSQDSMMKLKGMAAAGRSQGQHKQRIWVNISLSGIKIIDEKTGVIEHEHPVNKISFIARDVTDNRAFGYVCGGEGQHQFFAIKTGQQAEPLVVDLKDLFQVIYNVKKKEEEKKKIEEASKAVENGSEALMILDDQTNKLKSGVDQMDLFGDMSTPPDLNSPTESKDILLVDLNSEIDTNQNSLRENPFLTNGITSCSLPRPTPQASFLPENAFSANLNFFPTPNPDPFRDDPFTQPDQSTPSSFDSLKSPDQKKENSSSSSTPLSNGPLNGDVDYFGQQFDQISNRTGKQEAQAGPWPFSSSQTQPAVRTQPFVGSPPKGLSIQNGVKQDLESSVQSSPHDSIAIIPPPQSTKPGRGRRTAKSSANDLLASDIFAPPVSEPSGQASPTGQPTALQPNPLDLFKTSAPAPVGPLVGLGGVTVTLPQAGPWNTASLVFNQSPSMAPGAMMGGQPSGFSQPVIFGTSPAVSGWNQPSPFAASTPPPVPVVWGPSASVAPNAWSTTSPLGNPFQSNIFPAPAVSTQPPSMHSSLLVTPPQPPPRAGPPKDISSDAFTALDPLGDKEIKDVKEMFKDFQLRQPPAVPARKGEQTSSGTLSAFASYFNSKVGIPQENADHDDFDANQLLNKINEPPKPAPRQVSLPVTKSTDNAFENPFFKDSFGSSQASVASSQPVSSEMYRDPFGNPFA

SEQ ID NO: 890553 - protein, 554 aa, Homo sapiens
MSTPPELNSPTEEESKDILLVDLNSEIDTNQNSLRENPFLTNGITSCSLPRPTPQASFLPENAFSANLNFFPTPNPDPFRDDPFTQPDQSTPSSFDSLKSPDQKKENSSSSSTPLSNGPLNGDVDYFGQQFDQISNRTGKQEAQAGPWPFSSSQTQPAVRTQNGVSEREQNGFSVKSSPNPFVGSPPKGLSIQNGVKQDLESSVQSSPHDSIAIIPPPQSTKPGRGRRTAKSSANDLLASDIFAPPVSEPSGQASPTGQPTALQPNPLDLFKTSAPAPVGPLVGLGGVTVTLPQAGPWNTASLVFNQSPSMAPGAMMGGQPSGFSQPVIFGTSPAVSGWNQPSPFAASTPPPVPVVWGPSASVAPNAWSTTSPLGNPFQSNIFPAPAVSTQPPSMHSSLLVTPPQPPPRAGPPKDISSDAFTALDPLGDKEIKDVKEMFKDFQLRQPPAVPARKGEQTSSGTLSAFASYFNSKVGIPQENADHDDFDANQLLNKINEPPKPAPRQVSLPVTKSTDNAFENPFFKDSFGSSQASVASSQPVSSEMYRDPFGNPFA

SEQ ID NO: 890554 - protein, 552 aa, Homo sapiens
MSNEVETSATNGQPDQQAAPKAPSKKEKKKGPEKTDEYLLARFKGDGVKYKAKLIGIDDVPDARGDKMSQDSMMKLKGMAAAGRSQGQHKQRIWVNISLSGIKIIDEKTGVIEHEHPVNKISFIARDVTDNRAFGYVCGGEGQHQFFAIKTGQQAEPLVVDLKDLFQVIYNVKKKEEEKKKIEEASKAVENGSEALMILDDQTNKLKSGVDQMDLFGDMSTPPDLNSPTSSANDLLASDIFAPPVSEPSGQASPTGQPTALQPNPLDLFKTSAPAPVGPLVGLGGVTVTLPQAGPWNTASLVFNQSPSMAPGAMMGGQPSGFSQPVIFGTSPAVSGWNQPSPFAASTPPPVPVVWGPSASVAPNAWSTTSPLGNPFQSNIFPAPAVSTQPPSMHSSLLVTPPQPPPRAGPPKDISSDAFTALDPLGDKEIKDVKEMFKDFQLRQPPAVPARKGEQTSSGTLSAFASYFNSKVGIPQENADHDDFDANQLLNKINEPPKPAPRQVSLPVTKSTDNAFENPFFKDSFGSSQASVASSQPVSSEMYRDPFGNPFA

SEQ ID NO: 890555 - protein, 382 aa, Homo sapiens
ARYPCSLTTTVFSGEDCGPPVSRAPRSGEDSVQSSPHDSIAIIPPPQSTKPGRGRRTAKSSANDLLASDIFAPPVSEPSGQASPTGQPTALQPNPLDLFKTSAPAPVGPLVGLGGVTVTLPQAGPWNTASLVFNQSPSMAPGAMMGGQPSGFSQPVIFGTSPAVSGWNQPSPFAASTPPPVPVVWGPSASVAPNAWSTTSPLGNPFQSNIFPAPAVSTQPPSMHSSLLVTPPQPPPRAGPPKDISSDAFTALDPLGDKEIKDVKEMFKDFQLRQPPAVPARKGEQTSSGTLSAFASYFNSKVGIPQENADHDDFDANQLLNKINEPPKPAPRQVSLPVTKSTDNAFENPFFKDSFGSSQASVASSQPVSSEMYRDPFGNPFA

SEQ ID NO: 890556 - protein, 239 aa, Homo sapiens; identical to SEQ ID NO: 890542

SEQ ID NO: 890557 - protein, 749 aa, Homo sapiens; identical to SEQ ID NO: 890537

SEQ ID NO: 890558 - protein, 234 aa, Homo sapiens
MSNEVETSATNGQPDQQAAPKAPSKKEKKKGPEKTDEYLLARFKGDGVKYKAKLIGIDDVPDARGDKMSQDSMMKLKGMAAAGRSQGQHKQRIWVNISLSGIKIIDEKTGVIEHEHPVNKISFIARDVTDNRAFGYVCGGEGQHQFFAIKTGQQAEPLVVDLKDLFQVIYNVKKKEEEKKKIEEASKAVENGSEALMILDDQTNKLKSGVDQMDLFGDMSTPPDLNSPTVSVCF

SEQ ID NO: 890559 - protein, 234 aa, Homo sapiens; identical to SEQ ID NO: 890558

SEQ ID NO: 890560 - protein, 108 aa, Homo sapiens
MSNEVETSATNGQPDQQAAPKAPSKKEKKKGPEKTDEYLLARFKGDGVKYKAKLIGIDDVPDARGDKMSHLPTSFTLKSFKSRGNCQTQGDSILDSCPRRAEHLHTEG

SEQ ID NO: 890561 - protein, 230 aa, Homo sapiens
MPPSLEGKVASSSLPVSAEKSHLVPLMDARINAYIEEEVQRRLQDLHRVISEGCSTSADTMKDNEKLHNGTIQRKLKYERMVSRSLGANPDDLKDPIKISIPRYVLCGQGKDAHFEFEVKITVLDETWTVFRRYSRFREMHKTLKLKYAELAALEFPPKKLFGNKDERVIAERRSHLEKYLRDFFSVMLQSATSPLHINKVGLTLSKHTICEFSPFFKKGVFDYSSHGTG

SEQ ID NO: 890562 - protein, 131 aa, Homo sapiens
TTYFRSQEMVFKTLGTDVVKSAFEGYNACVFAYGQTGSGKSYTMMGNSGDSGLIPRICEGLFSRINETTRWDEASFRTEVSYLEIYNERVRDLLRRKSSKTFNLRVREHPKEGPYVEDLSKHLGLHTSGLP

SEQ ID NO: 890563 - protein, 153 aa, Homo sapiens
  misc_feature (126)..(126): Xaa can be any naturally occurring amino acid
  misc_feature (137)..(138): Xaa can be any naturally occurring amino acid
  misc_feature (153)..(153): Xaa can be any naturally occurring amino acid
MASVKVAVRVRPMNRREKDLEAKFIIQMEKSKTTITNLKIPEGGTGDSGRERTKTFTYDFSFYSADTKSPDYVSQEMVFKTLGTDVVKSAFEGYNACVFAYGQTGSGKSYTMMGNSGNLLNTPICXRPSLRINETPXXMNSFQLNSLLKNFYX

SEQ ID NO: 890564 - protein, 1392 aa, Homo sapiens
MASVKVAVRVRPMNRREKDLEAKFIIQMEKSKTTITNLKIPEGGTGDSGRERTKTFTYDFSFYSADTKSPDYVSQEMVFKTLGTDVVKSAFEGYNACVFAYGQTGSGKSYTMMGNSGDSGLIPRICEGLFSRINETTRWDEASFRTEVSYLEIYNERVRDLLRRKSSKTFNLRVREHPKEGPYVEDLSKHLVQNYGDVEELMDAGNINRTTAATGMNDVSSRSHAIFTIKFTQAKFDSEMPCETVSKIHLVDLAGSERADATGATGVRLKEGGNINKSLVTLGNVISALADLSQDAANTLAKKKQVFVPYRDSVLTWLLKDSLGGNSKTIMIATISPADVNYGETLSTLRYANRAKNIINKPTINEDANVKLIRELRAEIARLKTLLAQGNQIALLDSPTALSMEEKLQQNEARVQELTKEWTNKWNETQNILKEQTLALRKEGIGVVLDSELPHLIGIDDDLLSTGIILYHLKEGQTYVGRDDASTEQDIVLHGLDLESEHCIFENIGGTVTLIPLSGSQCSVNGVQIVEATHLNQGAVILLGRTNMFRFNHPKEAAKLREKRKSGLLSSFSLSMTDLSKSRENLSAVMLYNPGLEFERQQREELEKLESKRKLIEEMEEKQKSDKAELERMQQEVETQRKETEIVQLQIRKQEESLKRRSFHIENKLKDLLAEKEKFEEERLREQQEIELQKKRQEEETFLRVQEELQRLKELNNNEKAEKFQIFQELDQLQKEKDEQYAKLELEKKRLEEQEKEQVMLVAHLEEQLREKQEMIQLLRRGEVQWVEEEKRDLEGIRESLLRVKEARAGGDEDGEELEKAQLRFFEFKRRQLVKLVNLEKDLVQQKDILKKEVQEEQEILECLKCEHDKESRLLEKHDESVTDVTEVPQDFEKIKPVEYRLQYKERQLQYLLQNHLPTLLEEKQRAFEILDRGPLSLDNTLYQVEKEMEEKEEQLAQYQANANQLQKLQATFEFTANIARQEEKVRKKEKEILESREKQQREALERALARLERRHSALQRHSTLGMEIEEQRQKLASLNSGSREQSGLQASLEAEQEALEKDQERLEYEIQQLKQKIYEVDGVQKDHHGTLEGKVASSSLPVSAEKSHLVPLMDARINAYIEEEVQRRLQDLHRVISEGCSTSADTMKDNEKLHNGTIQRKLKYELCRDLLCVLMPEPDAAACANHPLLQQDLVQLSLDWKTEIPDLVLPNGVQVSSKFQTTLVDMIYFLHGNMEVNVPSLAEVQLLLYTTVKVMGDSGHDQCQSLVLLNTHIALVKEDCVFYPRIRSRNIPPPGAQFDVIKCHALSEFRCVVVPEKKNVSTVELVFLQKLKPSVGSRNSPPEHLQEAPNVQLFTTPLYLQGSQNVAPEVWKLTFNSQDEALWLISHLTRL

SEQ ID NO: 890565 - protein, 1287 aa, Homo sapiens
MASVKVAVRVRPMNRREKDLEAKFIIQMEKSKTTITNLKIPEGGTGDSGRERTKTFTYDFSFYSADTKSPDYVSQEMVFKTLGTDVVKSAFEGYNACVFAYGQTGSGKSYTMMGNSGDSGLIPRICEGLFSRINETTRWDEASFRTEVSYLEIYNERVRDLLRRKSSKTFNLRVREHPKEGPYVEDLSKHLVQNYGDVEELMDAGNINRTTAATGMNDVSSRSHAIFTIKFTQAKFDSEMPCETVSKIHLVDLAGSERADATGATGVRLKEGGNINKSLVTLGNVISALADLSQDAANTLAKKKQVFVPYRDSVLTWLLKDSLGGNSKTIMIATISPADVNYGETLSTLRYANRAKNIINKPTINEDANVKLIRELRAEIARLKTLLAQGNQIALLDSPTALSMEEKLQQNEARVQELTKEWTNKWNETQNILKEQTLALRKEGIGVVLDSELPHLIGIDDDLLSTGIILYHLKEGQTYVGRDDASTEQDIVLHGLDLESEHCIFENIGGTVTLIPLSGSQCSVNGVQIVEATHLNQGAVILLGRTNMFRFNHPKEAAKLREKRKSGLLSSFSLSMTDLSKSRENLSAVMLYNPGLEFERQQREELEKLESKRKLIEEMEEKQKSDKAELERMQQEVETQRKETEIVQLQIRKQEESLKRRSFHIENKLKDLLAEKEKFEEERLREQQEIELQKKRQEEETFLRVQEELQRLKELNNNEKAEKFQIFQELDQLQKEKDEQYAKLELEKKRLEEQEKEQVMLVAHLEEQLREKQEMIQLLRRGEVQWVEEEKRDLEGIRESLLRVKEARAGGDEDGEELEKAQLRFFEFKRRQLVKLVNLEKDLVQQKDILKKEVQEEQEILECLKCEHDKESRLLEKHDESVTDVTEVPQDFEKIKPVEYRLQYKERQLQYLLQNHLPTLLEEKQRAFEILDRGPLSLDNTLYQVEKEMEEKEEQLAQYQANANQLQKLQATFEFTANIARQEEKVRKKEKEILESREKQQREALERALARLERRHSALQRHSTLGMEIEEQRQKLASLNSGSREQSGLQASLEAEQEALEKDQERLEYEIQQLKQKIYEVDGVQKDHHGTLEGKVASSSLPVSAEKSHLVPLMDARINAYIEEEVQRRLQDLHRVISEGCSTSADTMKDNEKLHNGTIQRKLKYERMVSRSLGANPDDLKDPIKISIPRYVLCGQGKDAHFEFEVKLAALEFPPKKLFGNKDERVIAERRSHLEKYLRDFFSVMLQSATSPLHINKVGLTLSKHTICEFSPFFKKGVFDYSSHGTG

SEQ ID NO: 890566 - protein, 1276 aa, Homo sapiens
MASVKVAVRVRPMNRREKDLEAKFIIQMEKSKTTITNLKIPEGGTGDSGRERTKTFTYDFSFYSADTKSPDYVSQEMVFKTLGTDVVKSAFEGYNACVFAYGQTGSGKSYTMMGNSGDSGLIPRICEGLFSRINETTRWDEASFRTEVSYLEIYNERVRDLLRRKSSKTFNLRVREHPKEGPYVEDLSKHLVQNYGDVEELMDAGNINRTTAATGMNDVSSRSHAIFTIKFTQAKFDSEMPCETVSKIHLVDLAGSERADATGATGVRLKEGGNINKSLVTLGNVISALADLSQDAANTLAKKKQVFVPYRDSVLTWLLKDSLGGNSKTIMIATISPADVNYGETLSTLRYANRAKNIINKPTINEDANVKLIRELRAEIARLKTLLAQGNQIALLDSPTALSMEEKLQQNEARVQELTKEWTNKWNETQNILKEQTLALRKEGIGVVLDSELPHLIGIDDDLLSTGIILYHLKEGQTYVGRDDASTEQDIVLHGLDLESEHCIFENIGGTVTLIPLSGSQCSVNGVQIVEATHLNQGAVILLGRTNMFRFNHPKEAAKLREKRKSGLLSSFSLSMTDLSKSRENLSAVMLYNPGLEFERQQREELEKLESKRKLIEEMEEKQKSDKAELERMQQEVETQRKETEIVQLQIRKQEESLKRRSFHIENKLKDLLAEKEKFEEERLREQQEIELQKKRQEEETFLRVQEELQRLKELNNNEKAEKFQIFQELDQLQKEKDEQYAKLELEKKRLEEQEKEQVMLVAHLEEQLREKQEMIQLLRRGEVQWVEEEKRDLEGIRESLLRVKEARAGGDEDGEELEKAQLRFFEFKRRQLVKLVNLEKDLVQQKDILKKEVQEEQEILECLKCEHDKESRLLEKHDESVTDVTEVPQDFEKIKPVEYRLQYKERQLQYLLQNHLPTLLEEKQRAFEILDRGPLSLDNTLYQVEKEMEEKEEQLAQYQANANQLQKLQATFEFTANIARQEEKVRKKEKEILESREKQQREALERALARLERRHSALQRHSTLGMEIEEQRQKLASLNSGSREQSGLQASLEAEQEALEKDQERLEYEIQQLKQKIYEVDGVQKDHHGTLEGKVASSSLPVSAEKSHLVPLMDARINAYIEEEVQRRLQDLHRVISEGCSTSADTMKDNEKLHNGTIQRKLKYEITVLDETWTVFRRYSRFREMHKTLKLKYAELAALEFPPKKLFGNKDERVIAERRSHLEKYLRDFFSVMLQSATSPLHINKVGLTLSKHTICEFSPFFKKGVFDYSSHGTG

SEQ ID NO: 890567 - protein, 395 aa, Homo sapiens
MASVKVAVRVRPMNRREKDLEAKFIIQMEKSKTTITNLKIPEGGTGDSGRERTKTFTYDFSFYSADTKSPDYVSQEMVFKTLGTDVVKSAFEGYNACVFAYGQTGSGKSYTMMGNSGDSGLIPRICEGLFSRINETTRWDEASFRTEVSYLEIYNERVRDLLRRKSSKTFNLRVREHPKEGPYVEDLSKHLVQNYGDVEELMDAGNINRTTAATGMNDVSSRSHAIFTIKFTQAKFDSEMPCETVSKIHLVDLAGSERADATGATGVRLKEGGNINKSLVTLGNVISALADLSQDAANTLAKKKQVFVPYRDSVLTWLLKDSLGGNSKTIMIATISPADVNYGETLSTLRYANRAKNIINKPTINEDANVKLIRELRAEIARLKTLLAQGNQGFF

SEQ ID NO: 890568 - protein, 414 aa, Homo sapiens
MASVKVAVRVRPMNRREKDLEAKFIIQMEKSKTTITNLKIPEGGTGDSGRERTKTFTYDFSFYSADTKSPDYVSQEMVFKTLGTDVVKSAFEGYNACVFAYGQTGSGKSYTMMGNSGDSGLIPRICEGLFSRINETTRWDEASFRTEVSYLEIYNERVRDLLRRKSSKTFNLRVREHPKEGPYVEDLSKHLVQNYGDVEELMDAGNINRTTAATGMNDVSSRSHAIFTIKFTQAKFDSEMPCETVSKIHLVDLAGSERADATGATGVRLKEGGNINKSLVTLGNVISALADLSQDAANTLAKKKQVFVPYRDSVLTWLLKDSLGGNSKTIMIATISPADVNYGETLSTLRYANRAKNIINKPTINEDANVKLIRELRAEIARLKTLLAQGNQSGPVGAVLSTWDYVALEALGIP

SEQ ID NO: 890569 - protein, 388 aa, Homo sapiens
MASVKVAVRVRPMNRREKDLEAKFIIQMEKSKTTITNLKIPEGGTGDSGRERTKTFTYDFSFYSADTKSPDYVSQEMVFKTLGTDVVKSAFEGYNACVFAYGQTGSGKSYTMMGNSGDSGLIPRICEGLFSRINETTRWDEASFRTEVSYLEIYNERVRDLLRRKSSKTFNLRVREHPKEGPYVEDLSKHLVQNYGDVEELMDAGNINRTTAATGMNDVSSRSHAIFTIKFTQAKFDSEMPCETVSKIHLVDLAGSERADATGATGVRLKEGGNINKSLVTLGNVISALADLSQDAANTLAKKKQVFVPYRDSVLTWLLKDSLGGNSKTIMIATISPADVNYGETLSTLRYANRAKNIINKPTINEDANVKLIRELRGVFLRFMDNFL

SEQ ID NO: 890570 - protein, 129 aa, Homo sapiens
GQSVRFLSSAEGLLLTVFSYNKYLSQQLCRDLLCVLMPEPDAAACANHPLLQQDLVQLSLDWKTEIPDLVLPNGVQVSSKFQTTLVDMIYFLHGNMEVNVPSLAEVQLLLYTTVKVMGDSGHDQCQSLV

SEQ ID NO: 890571 - protein, 313 aa, Homo sapiens
MPNTAMKKKVLLMGKSGSGKTSMRSIIFANYIARDTRRLGATIDVEHSHVRFLGNLVLNLWDCGGQDTFMENYFTSQRDNIFRNVEVLIYVFDVESRELEKDMHYYQSCLEAILQNSPDAKIFCLVHKMDLVQEDQRDLIFKEREEDLRRLSRPLECACFRTSIWDETLYKAWSSIVYQLIPNVQQLEMNLRNFAQIIEADEVLLFERATFLVISHYQCKEQRDVHRFEKISNIIKQFKLSCSKLAASFQSMEVRNSNFAAFIDIFTSNTYVMVVMSDPSIPSAATLINIRNARKHFEKLERVDGPKHSLLMR

SEQ ID NO: 890572 - protein, 398 aa, Homo sapiens
KEIGYVRLVLIGNEADSRGRSHLSKSQPVRGLSSPGFALSTLLPAQLRGGAERGAACESPAAPDPSLGAACRPRPQAQSAVPRRVMPNTAMKKKVLLMGKSGSGKTSMRSIIFANYIARDTRRLGATIDVEHSHVRFLGNLVLNLWDCGGQDTFMENYFTSQRDNIFRNVEVLIYVFDVESRELEKDMHYYQSCLEAILQNSPDAKIFCLVHKMDLVQEDQRDLIFKEREEDLRRLSRPLECACFRTSIWDETLYKAWSSIVYQLIPNVQQLEMNLRNFAQIIEADEVLLFERATFLVISHYQCKEQRDVHRFEKISNIIKQFKLSCSKLAASFQSMEVRNSNFAAFIDIFTSNTYVMVVMSDPSIPSAATLINIRNARKHFEKLERVDGPKHSLLMR

SEQ ID NO: 890573 - protein, 378 aa, Homo sapiens
VRVGSYGPVRGLSSPGFALSTLLPAQLRGGAERGAACESPAAPDPSLGAACRPRPQAQSAVPRRVMPNTAMKKKVLLMGKSGSGKTSMRSIIFANYIARDTRRLGATIDVEHSHVRFLGNLVLNLWDCGGQDTFMENYFTSQRDNIFRNVEVLIYVFDVESRELEKDMHYYQSCLEAILQNSPDAKIFCLVHKMDLVQEDQRDLIFKEREEDLRRLSRPLECACFRTSIWDETLYKAWSSIVYQLIPNVQQLEMNLRNFAQIIEADEVLLFERATFLVISHYQCKEQRDVHRFEKISNIIKQFKLSCSKLAASFQSMEVRNSNFAAFIDIFTSNTYVMVVMSDPSIPSAATLINIRNARKHFEKLERVDGPKHSLLMR

SEQ ID NO: 890574 - protein, 313 aa, Homo sapiens; identical to SEQ ID NO: 890571

SEQ ID NO: 890575 - protein, 313 aa, Homo sapiens; identical to SEQ ID NO: 890571

SEQ ID NO: 890576 - protein, 295 aa, Homo sapiens
MPNTAMKKKVLLMGKSGSGKTSMRSIIFANYIARDTRRLGATIDVEHSHVRFLGNLVLNLWDCGGQDTFMENYFTSQRDNIFRNVEVLIYVFDVESRELEKDMHYYQSCLEAILQNSPDAKIFCLVHEDLRRLSRPLECACFRTSIWDETLYKAWSSIVYQLIPNVQQLEMNLRNFAQIIEADEVLLFERATFLVISHYQCKEQRDVHRFEKISNIIKQFKLSCSKLAASFQSMEVRNSNFAAFIDIFTSNTYVMVVMSDPSIPSAATLINIRNARKHFEKLERVDGPKHSLLMR

SEQ ID NO: 890577 - protein, 162 aa, Homo sapiens
RGYNECDAYYTIAAYCQEYCGSTIDPADGGFDMGFSGVISGVRKRHLHRDEDAVFERATFLVISHYQCKEQRDVHRFEKISNIIKQFKLSCSKLAASFQSMEVRNSNFAAFIDIFTSNTYVMVVMSDPSIPSAATLINIRNARKHFEKLERVDGPKHSLLMR

SEQ ID NO: 890578 - protein, 504 aa, Homo sapiens
EAGHLQLARRTPLTVPTMLRAPGCLLRTSVAPAAALAAALLSSLARCSLLEPRDPVASSLSPYFGTKTRYEDVNPVLLSGPEAPWRDPELLEGTCTPVQLVALIRHGTRYPTVKQIRKLRQLHGLLQARGSRDGGASSTGSRDLGAALADWPLWYADWMDGQLVEKGRQDMRQLALRLASLFPALFSRENYGRLRLITSSKHRCMDSSAAFLQGLWQHYHPGLPPPDVADMEFGPPTVNDKLMRFFDHCEKFLTEVEKNATALYHVEAFKTGPEMQNILKKVAATLQVPVNDLNADLIQVAFFTCSFDLAIKGVKSPWCDVFDIDDAKVLEYLNDLKQYWKRGYGYTINSRSSCTLFQDIFQHLDKAVEQKQRSQPISSPVILQFGHAETLLPLLSLMGYFKDKEPLTAYNYKKQMHRKFRSGLIVPYASNLIFVLYHCENAKTPKEQFRVQMLLNEKVLPLAYSQETVSFYEDLKNHYKDILQSCQTSEECELARANSTSDEL

SEQ ID NO: 890579 - protein, 329 aa, Homo sapiens
EAGHLQLARRTPLTVPTMLRAPGCLLRTSVAPAAALAAALLSSLARCSLLEPRDPVASSLSPYFGTKTRYEDVNPVLLSGPEAPWRDPELLEGTCTPVQLVALIRHGTRYPTVKQIRKLRQLHGLLQARGSRDGGASSTGSRDLGAALADWPLWYADWMDGQLVEKGRQDMRQLALRLASLFPALFSRENYGRLRLITSSKHRCMDSSAAFLQGLWQHYHPGLPPPDVADMEFGPPTVNDKLMRFFDHCEKFLTEVEKNATALYHVEAFKTGPEMQNILKKVAATLQVPVNDLNAGLSQFLLQSSSSLVMQRLFFHCFLSWATSKTRNP

SEQ ID NO: 890580 - protein, 107 aa, Homo sapiens [sequence omitted]

SEQ ID NO: 890581 - protein, 401 aa, Homo sapiens
EAGHLQLARRTPLTVPTMLRAPGCLLRTSVAPAAALAAALLSSLARCSLLEPRDPVASSLSPYFGTKTRYEDVNPVLLSGPEAPWRDPELLEGTCTPVQLVALIRHGTRYPTVKQIRKLRQLHGLLQARGSRDGGASSTGSRDLGAALADWPLWYADWMDGQLVEKGRQDMRQLALRLASLFPALFSRENYGRLRLITSSKHRCMDSSAAFLQGLWQHYHPGLPPPDVADMEFGPPTVNDKLMRFFDHCEKFLTEVEKNATALYHVEAFKTGPEMQNILKKVAATLQVPVNDLNADLIQVAFFTCSFDLAIKGVKSPWCDVFDIDDAKVLEYLNDLKQYWKRGYGYTINSRSSCTLFQDIFQHLDKAVEQKQRSQPISSPVMQRLFFHCFLSWATSKTRNP

SEQ ID NO: 890582 - protein, 426 aa, Homo sapiens
MCDRNGGRRLRQWLIEQIDSSMYPGLIWENEEKSMFRIPWKHAGKQDYNQEVDASIFKAWAVFKGKFKEGDKAEPATWKTRLRCALNKSPDFEEVTDRSQLDISEPYKVYRIVPEEEQKCKLGVATAGCVNEVTEMECGRSEIDELIKEPSVDDYMGMIKRSPSPPEACRSQLLPDWWAQQPSTGVPLVTGYTTYDAHHSAFSQMVISFYYGGKLVGQATTTCPEGCRLSLSQPGLPGTKLYGPEGLELVRFPPADAIPSERQRQVTRKLFGHLERGVLLHSSRQGVFVKRLCQGRVFCSGNAVVCKGRPNKLERDEVVQVFDTSQFFRELQQFYNSQGRLPDGRVVLCFGEEFPDMAPLRSKLILVQIEQLYVRQLAEEAGKSCGAGSVMQAPEEPPPDQVFRMFPDICASHQRSFFRENQQITV

SEQ ID NO: 890583 - protein, 209 aa, Homo sapiens
MCDRNGGRRLRQWLIEQIDSSMYPGLIWENEEKSMFRIPWKHAGKQDYNQEVDASIFKAWAVFKGKFKEGDKAEPATWKTRLRCALNKSPDFEEVTDRSQLDISEPYKVYRIVPEEEQKCKLGVATAGCVNEVTEMECGRSEIDELIKESCSSSITARAGFLTAGWCCALGKSFRIWPPCAPNSFSCRLSSCMSGNWQKRLGRAVEPAL

SEQ ID NO: 890584 - protein, 454 aa, Homo sapiens
TSSGGDVMIHPVTNRPVDERSFQSRSLVEKEKVSRSGGYCHQWMELDPSPRTGLWRPPLPKLLLILVGPQDGLPICQCSGRHKMRVSAPRLALARTTPESYKPPPEYLARAKDVMRLGCREQARKQELFPSHTKFRRKLFLEERAQNCKLGVATAGCVNEVTEMECGRSEIDELIKEPSVDDYMGMIKRSPSPPEACRSQLLPDWWAQQPSTGVPLVTGYTTYDAHHSAFSQMVISFYYGGKLVGQATTTCPEGCRLSLSQPGLPGTKLYGPEGLELVRFPPADAIPSERQRQVTRKLFGHLERGVLLHSSRQGVFVKRLCQGRVFCSGNAVVCKGRPNKLERDEVVQVFDTSQFFRELQQFYNSQGRLPDGRVVLCFGEEFPDMAPLRSKLILVQIEQLYVRQLAEEAGKSCGAGSVMQAPEEPPPDQVFRMFPDICASHQRSFFRENQQITV

SEQ ID NO: 890585 - protein, 222 aa, Homo sapiens
MVISFYYGGKLVGQATTTCPEGCRLSLSQPGLPGTKLYGPEGLELVRFPPADAIPSERQRQVTRKLFGHLERGVLLHSSRQGVFVKRLCQGRVFCSGNAVVCKGRPNKLERDEVVQVFDTSQFFRELQQFYNSQGRLPDGRVVLCFGEEFPDMAPLRSKLILVQIEQLYVRQLAEEAGKSCGAGSVMQAPEEPPPDQVFRMFPDICASHQRSFFRENQQITV

SEQ ID NO: 890586 - protein, 445 aa, Homo sapiens
SAAASVGTRAARRRQDGGRMCDRNGGRRLRQWLIEQIDSSMYPGLIWENEEKSMFRIPWKHAGKQDYNQEVDASIFKAWAVFKGKFKEGDKAEPATWKTRLRCALNKSPDFEEVTDRSQLDISEPYKVYRIVPEEEQKCKLGVATAGCVNEVTEMECGRSEIDELIKEPSVDDYMGMIKRSPSPPEACRSQLLPDWWAQQPSTGVPLVTGYTTYDAHHSAFSQMVISFYYGGKLVGQATTTCPEGCRLSLSQPGLPGTKLYGPEGLELVRFPPADAIPSERQRQVTRKLFGHLERGVLLHSSRQGVFVKRLCQGRVFCSGNAVVCKGRPNKLERDEVVQVFDTSQFFRELQQFYNSQGRLPDGRVVLCFGEEFPDMAPLRSKLILVQIEQLYVRQLAEEAGKSCGAGSVMQAPEEPPPDQVFRMFPDICASHQRSFFRENQQITV

SEQ ID NO: 890587 - protein, 436 aa, Homo sapiens
MAGVPESLNLMCDRNGGRRLRQWLIEQIDSSMYPGLIWENEEKSMFRIPWKHAGKQDYNQEVDASIFKAWAVFKGKFKEGDKAEPATWKTRLRCALNKSPDFEEVTDRSQLDISEPYKVYRIVPEEEQKCKLGVATAGCVNEVTEMECGRSEIDELIKEPSVDDYMGMIKRSPSPPEACRSQLLPDWWAQQPSTGVPLVTGYTTYDAHHSAFSQMVISFYYGGKLVGQATTTCPEGCRLSLSQPGLPGTKLYGPEGLELVRFPPADAIPSERQRQVTRKLFGHLERGVLLHSSRQGVFVKRLCQGRVFCSGNAVVCKGRPNKLERDEVVQVFDTSQFFRELQQFYNSQGRLPDGRVVLCFGEEFPDMAPLRSKLILVQIEQLYVRQLAEEAGKSCGAGSVMQAPEEPPPDQVFRMFPDICASHQRSFFRENQQITV

SEQ ID NO: 890588 - protein, 222 aa, Homo sapiens; identical to SEQ ID NO: 890585

SEQ ID NO: 890589 - protein, 894 aa, Homo sapiens
MARQKKMGQSVLRAVFFLVLGLLGHSHGGFPNTISIGGLFMRNTVQEHSAFRFAVQLYNTNQNTTEKPFHLNYHVDHLDSSNSFSVTNAFCSQFSRGVYAIFGFYDQMSMNTLTSFCGALHTSFVTPSFPTDADVQFVIQMRPALKGAILSLLGHYKWEKFVYLYDTERGFSILQAIMEAAVQNNWQVTARSVGNIKDVQEFRRIIEEMDRRQEKRYLIDCEVERINTILEQVVILGKHSRGYHYMLANLGFTDILLERVMHGGANITGFQIVNNENPMVQQFIQRWVRLDEREFPEAKNAPLKYTSALTHDAILVIAEAFRYLRRQRVDVSRRGSAGDCLANPAVPWSQGIDIERALKMVQVQGMTGNIQFDTYGRRTNYTIDVYEMKVSGSRKAGYWNEYERFVPFSDQQISNDSASSENRTIVVTTILESPYVMYKKNHEQLEGNERYEGYCVDLAYEIAKHVRIKYKLSIVGDGKYGARDPETKIWNGMVGELVYGRADIAVAPLTITLVREEVIDFSKPFMSLGISIMIKKPQKSKPGVFSFLDPLAYEIWMCIVFAYIGVSVVLFLVSRFSPYEWHLEDNNEEPRDPQSPPDPPNEFGIFNSLWFSLGAFMQQGCDISPRSLSGRIVGGVWWFFTLIIISSYTANLAAFLTVERMVSPIESAEDLAKQTEIAYGTLDSGSTKEFFRRSKIAVYEKMWSYMKSAEPSVFTKTTADGVARVRKSKGKFAFLLESTMNEYIEQRKPCDTMKVGGNLDSKGYGVATPKGSALGNAVNLAVLKLNEQGLLDKLKNKWWYDKGECGSGGGDSKDKTSALSLSNVAGVFYILVGGLGLAMMVALIEFCYKSRAESKRMKLTKNTQNFKPAPATNTQNYATYREGYNVYGTESVKI

SEQ ID NO: 890590 - protein, 894 aa, Homo sapiens
MARQKKMGQSVLRAVFFLVLGLLGHSHGGFPNTISIGGLFMRNTVQEHSAFRFAVQLYNTNQNTTEKPFHLNYHVDHLDSSNSFSVTNAFCSQFSRGVYAIFGFYDQMSMNTLTSFCGALHTSFVTPSFPTDADVQFVIQMRPALKGAILSLLGHYKWEKFVYLYDTERGFSILQAIMEAAVQNNWQVTARSVGNIKDVQEFRRIIEEMDRRQEKRYLIDCEVERINTILEQVVILGKHSRGYHYMLANLGFTDILLERVMHGGANITGFQIVNNENPMVQQFIQRWVRLDEREFPEAKNAPLKYTSALTHDAILVIAEAFRYLRRQRVDVSRRGSAGDCLANPAVPWSQGIDIERALKMVQVQGMTGNIQFDTYGRRTNYTIDVYEMKVSGSRKAGYWNEYERFVPFSDQQISNDSASSENRTIVVTTILESPYVMYKKNHEQLEGNERYEGYCVDLAYEIAKHVRIKYKLSIVGDGKYGARDPETKIWNGMVGELVYGRADIAVAPLTITLVREEVIDFSKPFMSLGISIMIKKPQKSKPGVFSFLDPLAYEIWMCIVFAYIGVSVVLFLVSRFSPYEWHLEDNNEEPRDPQSPPDPPNEFGIFNSLWFSLGAFMQQGCDISPRSLSGRIVGGVWWFFTLIIISSYTANLAAFLTVERMVSPIESAEDLAKQTEIAYGTLDSGSTKEFFRRSKIAVYEKMWSYMKSAEPSVFTKTTADGVARVRKSKGKFAFLLESTMNEYIEQRKPCDTMKVGGNLDSKGYGVATPKGSALGTPVNLAVLKLSEQGILDKLKNKWWYDKGECGAKDSGSKDKTSALSLSNVAGVFYILVGGLGLAMMVALIEFCYKSRAESKRMKLTKNTQNFKPAPATNTQNYATYREGYNVYGTESVKI

SEQ ID NO: 890591 - protein, 369 aa, Homo sapiens
MSLGISIMIKKPQKSKPGVFSFLDPLAYEIWMCIVFAYIGVSVVLFLVSRFSPYEWHLEDNNEEPRDPQSPPDPPNEFGIFNSLWFSLGAFMQQGCDISPRSLSGRIVGGVWWFFTLIIISSYTANLAAFLTVERMVSPIESAEDLAKQTEIAYGTLDSGSTKEFFRRSKIAVYEKMWSYMKSAEPSVFTKTTADGVARVRKSKGKFAFLLESTMNEYIEQRKPCDTMKVGGNLDSKGYGVATPKGSALGTPVNLAVLKLSEQGILDKLKNKWWYDKGECGAKDSGSKDKTSALSLSNVAGVFYILVGGLGLAMMVALIEFCYKSRAESKRMKLTKNTQNFKPAPATNTQNYATYREGYNVYGTESVKI

SEQ ID NO: 890592 - protein, 201 aa, Homo sapiens
MARQKKMGQSVLRAVFFLVLGLLGHSHGGFPNTISIGGLFMRNTVQEHSAFRFAVQLYNTNQNTTEKPFHLNYHVDHLDSSNSFSVTNAFCSQFSRGVYAIFGFYDQMSMNTLTSFCGALHTSFVTPSFPTDADVQFVIQMRPALKGAILSLLGHYKWEKFVYLYDTERGKKRHLLCSLDIHVIVFKLPQLMCPLLPINKI

SEQ ID NO: 890593 - protein, 894 aa, Homo sapiens; identical to SEQ ID NO: 890589

SEQ ID NO: 890594 - protein, 144 aa, Homo sapiens
MARQKKMGQSVLRAVFFLVLGLLGHSHGGFPNTISIGGLFMRNTVQEHSAFRFAVQLYNTNQNTTEKPFHLNYHVDHLDSSNSFSVTNACPAERDYLPWPGSIRENNWTALPCCKDHGLLHLKCSPGGARQNWAYCIWGVTGEL

SEQ ID NO: 890595 - protein, 272 aa, Homo sapiens [sequence omitted]

SEQ ID NO: 890596 - protein, 361 aa, Homo sapiens
MSEARKGPDEAEESQYDSGIESLRSLRSLPESTSAPASGPSDGSPQPCTHPPGPVKEPQEKEDADGERADSTYGSSSLTYTLSLLGGPEAEDPAPRLPLPHVGALSPQQLEALTYISEDGDTLVHLAVIHEAPAVLLCCLALLPQEVLDIQNNLYQTALHLAVHLDQPGAVRALVLKGASRALQDRHGDTALHVACQRQHLACARCLLEGRPEPGRGTSHSLDLQLQNWQGLACLHIATLQKNQPLMELLLRNGADIDVQEGTSGKTALHLAVETQERGLVQFLLQAGAQVDARMLNGCTPLHLAAGRGLMGISSTLCKAGADSLLRNVEDETPQDLTEESLVLLPFDDLKISGKLLLCTD

SEQ ID NO: 890597 - protein, 141 aa, Homo sapiens
MSEARKGPDEAEESQYDSGIESLRSLRSLPESTSAPASGPSDGSPQPCTHPPGPVKEPQEKEDADGERADSTYGSSSLTYTLSLLGGPEAEDPAPRLPLPHVGALSPQQLEALTYISEDGDTQHSIWLYIWTNRAQFGHWC

SEQ ID NO: 890598 - protein, 361 aa, Homo sapiens; identical to SEQ ID NO: 890596

SEQ ID NO: 890599 - protein, 361 aa, Homo sapiens; identical to SEQ ID NO: 890596

SEQ ID NO: 890600 - protein, 361 aa, Homo sapiens; identical to SEQ ID NO: 890596

SEQ ID NO: 890601 - protein, 264 aa, Homo sapiens
  misc_feature (262)..(262): Xaa can be any naturally occurring amino acid
MSEARKGPDEAEESQYDSGIESLRSLRSLPESTSAPASGPSDGSPQPCTHPPGPVKEPQEKEDADGERADSTYGSSSLTYTLSLLGGPEAEDPAPRLPLPHVGALSPQQLEALTYISEDGDTLVHLAVIHEAPAVLLCCLALLPQEVLDIQNNLYQTALHLAVHLDQPGAVRALVLKGASRALQDRHGDTALHVACQRQHLACARCLLEGRPEPGRGTSHSLDLQLQNWQGLACLHIATLQKNQPLMELLLRNGADIDVQEXQW

SEQ ID NO: 890602 - protein, 467 aa, Homo sapiens
MSSAPTTPPSVDKVDGFSRKSVRKARQKRSQSSSQFRSQGKPIELTPLPLLKDVPSSEQPELFLKKLQQCCVIFDFMDTLSDLKMKEYKRSTLNELVDYITISRGCLTEQTYPEVVRMVSCNIFRTLPPSDSNEFDPEEDEPTLEASWPHLQLVYEFFIRFLESQEFQPSIAKKYIDQKFVLQLLELFDSEDPRERDYLKTVLHRIYGKFLGLRAFIRKQINNIFLRFVYETEHFNGVAELLEILGSIINGFALPLKAEHKQFLVKVLIPLHTVRSLSLFHAQLAYCIVQFLEKDPSLTEPVIRGLMKFWPKTCSQKEVMFLGELEEILDVIEPSQFVKIQEPLFKQIAKCVSSPHFQVAERALYYWNNEYIMSLIEENSNVILPIMFSSLYRISKEHWNPAIVALVYNVLKAFMEMNSTMFDELTATYKSDRQREKKKEKEREELWKKLEDLELKRGLRRDGIIPT

SEQ ID NO: 890603 - protein, 467 aa, Homo sapiens; identical to SEQ ID NO: 890602

SEQ ID NO: 890604 - protein, 467 aa, Homo sapiens; identical to SEQ ID NO: 890602

SEQ ID NO: 890605 - protein, 161 aa, Homo sapiens
MKFWPKTCSQKEVMFLGELEEILDVIEPSQFVKIQEPLFKQIAKCVSSPHFQVAERALYYWNNEYIMSLIEENSNVILPIMFSSLYRISKEHWNPAIVALVYNVLKAFMEMNSTMFDELTATYKSDRQREKKKEKEREELWKKLEDLELKRGLRRDGIIPT

SEQ ID NO: 890606 - protein, 161 aa, Homo sapiens; identical to SEQ ID NO: 890605

SEQ ID NO: 890607 - protein, 467 aa, Homo sapiens; identical to SEQ ID NO: 890602

SEQ ID NO: 890608 - protein, 427 aa, Homo sapiens
MSSAPTTPPSVDKVDGFSRKSVRKARQKRSQSSSQFRSQGKPIELTPLPLLKDVPSSEQPELFLKKLQQCCVIFDFMDTLSDLKMKEYKRSTLNELVDYITISRGCLTEQTYPEVVRMVSCNIFRTLPPSDSNEFDPEEDEPTLEASWPHLQLVYEFFIRFLESQEFQPSIAKKYIDQKFVLQLLELFDSEDPRERDYLKTVLHRIYGKFLGLRAFIRKQINNIFLRFVYETEHFNGVAELLEILGSIINGFALPLKAEHKQFLVKVLIPLHTVRSLSLFHAQLAYCIVQFLEKDPSLTEPVIRGLMKFWPKTCSQKEVAERALYYWNNEYIMSLIEENSNVILPIMFSSLYRISKEHWNPAIVALVYNVLKAFMEMNSTMFDELTATYKSDRQREKKKEKEREELWKKLEDLELKRGLRRDGIIPT

SEQ ID NO: 890609 - protein, 244 aa, Homo sapiens
MSSAPTTPPSVDKVDGFSRKSVRKARQKRSQSSSQFRSQGKPIELTPLPLLKDVPSSEQPELFLKKLQQCCVIFDFMDTLSDLKMKEYKRSTLNELVDYITISRGCLTEQTYPEVVRMVSCNIFRTLPPSDSNEFDPEEDEPTLEASWPHLQLVYEFFIRFLESQEFQPSIAKKYIDQKFVLQLLELFDSEDPRERDYLKTVLHRIYGKFLGLRAFIRKQINNIFLRFVTETKDLNLVTKKHVT

SEQ ID NO: 890610 - protein, 135 aa, Homo sapiens
RDMSSAPTTPPSVDKVDGFSRKSVRKARQKRSQSSSQFRSQGKPIELTPLPLLKGKAHDQVMHSFSIDLSTSIYNFLFVEFYMCCKLKGWDTSHTLKLLMCDQIYPLSFLKAQFSLSLGKLKETLSGEYLTLMSR

SEQ ID NO: 890611 - protein, 283 aa, Homo sapiens
MSAGWFRRRFLPGEPLPAPRPPGPHASPVPYRRPRFLRGSSSSPGAADASRRPDSRPVRSPARGRTLPWNAGYAEIINAEKSEFNEDQAACGKLCIRRCEFGAEEEWLTLCPEEDEVIGRELEASGQMGGCTALVAVSLQGKLYMANAGDSRAILVRRDEIRPLSFEFTPETERQRIQQLAFVYPELLAGEFTRLEFPRRLKGDDLGQKVLFRDHHMSGWSYKRVEKSDLKYPLIHGQGRQARLLGTLAVSRGLGDHQLRVLDTNIQLKPFLLSVPQVRGQRC

SEQ ID NO: 890612 - protein, 459 aa, Homo sapiens
MSAGWFRRRFLPGEPLPAPRPPGPHASPVPYRRPRFLRGSSSSPGAADASRRPDSRPVRSPARGRTLPWNAGYAEIINAEKSEFNEDQAACGKLCIRRCEFGAEEEWLTLCPEEFLTGHYWALFDGHGGPAAAILAANTLHSCLRRQLEAVVEGLVATQPPMHLNGRCICPSDPQFVEEKGIRAEDLVIGALESAFQECDEVIGRELEASGQMGGCTALVAVSLQGKLYMANAGDSRAILVRRDEIRPLSFEFTPETERQRIQQLAFVYPELLAGEFTRLEFPRRLKGDDLGQKVLFRDHHMSGWSYKRVEKSDLKYPLIHGQGRQARLLGTLAVSRGLGDHQLRVLDTNIQLKPFLLSVPQVTVLDVDQLELQEDDVVVMATDGLWDVLSNEQVAWLVRSFLPGNQEDPHRFSKLAQMLIHSTQGKEDSLTEEGQVSYDDVSVFVIPLHSQGQESSDH

SEQ ID NO: 890613 - protein, 448 aa, Homo sapiens
MSAGWFRRRFLPGEPLPAPRPPGPHASPVPYRRPRFLRGSSSSPGAADASRRPDSRPVRSPARGRTLPWNAGYAEIINAEKSEFNEDQAACGKLCIRRCEFGAEEEWLTLCPEEFLTGHYWALFDGHGGPAAAILAANTLHSCLRRQLEAVVEGLVATQPPMHLNGRCICPSDPQFVEEKGIRAEDLVIGALESAFQECDEVIGRELEASGQMGGCTALVAVSLQGKLYMANAGDSRAILVRRDEIRPLSFEFTPETERQRIQQLAFVYPELLAGEFTRLEFPRRLKGDDLGQKVLFRDHHMSGWSYKRVEKSDLKYPLIHGQGRQARLLGTLAVSRGLGDHQLRVLDTNIQLKPFLLSVPQVTVLDVDQLELQEDDVVVMATDGLWDVLSNEQVAWLVRSFLPGNQEDPHSLSAGWSSQVLKAGPDADTQHTGKGRQSHRGRAGVLR

SEQ ID NO: 890614 - protein, 650 aa, Homo sapiens
MPAPCPTDGPASFAAPAPAPGRPTPRAAQTPGPCAAPHEDARYPGMQATPSECPSPTPSSGPGLNPLRVLRPPRKREELSDSPHPPVDSPFLPSPPNPDNFPVIPTQRFPWDSDLPLREDRRSGRTCSPGASKMRPRDSVEFQHSGLWRFPLALYPQHLTLGMTCAVWNRALGCDRTGAGMATYPYRLALGHQVAPEELGPDFYLSHEASEVRKLTSWLSKCVFRDSTGELLPQREGSSPCAGLGPCAHGDIGVSLEGRLPFPGLRIINAEKSEFNEDQAACGKLCIRRCEFGAEEEWLTLCPEEFLTGHYWALFDGHGGPAAAILAANTLHSCLRRQLEAVVEGLVATQPPMHLNGRCICPSDPQFVEEKGIRAEDLVIGALESAFQECDEVIGRELEASGQMGGCTALVAVSLQGKLYMANAGDSRAILVRRDEIRPLSFEFTPETERQRIQQLAFVYPELLAGEFTRLEFPRRLKGDDLGQKVLFRDHHMSGWSYKRVEKSDLKYPLIHGQGRQARLLGTLAVSRGLGDHQLRVLDTNIQLKPFLLSVPQVTVLDVDQLELQEDDVVVMATDGLWDVLSNEQVAWLVRSFLPGNQEDPHRFSKLAQMLIHSTQGKEDSLTEEGQVSYDDVSVFVIPLHSQGQESSDH

SEQ ID NO: 890615 - protein, 431 aa, Homo sapiens
MSAGWFRRRFLPGEPLPAPRPPGPHASPVPYRRPRFLRGSSSSPGAADASRRPDSRPVRSPARGRTLPWNAGYAEIINAEKSEFNEDQAACGKLCIRRCEFGAEEEWLTLCPEEFLTGHYWALFDGHGGPAAAILAANTLHSCLRRQLEAVVEGLVATQPPMHLNGRCICPSDPQFVEEKGIRAEDLVIGALESAFQECDEVIGRELEASGQMGGCTALVAVSLQGKLYMANAGDSRAILVRRDEIRPLSFEFTPETERQRIQQLAFVYPELLAGEFTRLEFPRRLKGDDLGQKVLFRDHHMSGWSYKRVEKSDLKYPLIHGQGRQARLLGTLAVSRGLGDHQLRVLDTNIQLKPFLLSVPQVTVLDVDQLELQEDDVVVMATDGLWDVLSNEQVAWLVRSFLPGNQEDPHRYCSCWGPAWAWVGASSKPK

SEQ ID NO: 890616 - protein, 459 aa, Homo sapiens; identical to SEQ ID NO: 890612

SEQ ID NO: 890617 - protein, 374 aa, Homo sapiens
MSAGWFRRRFLPGEPLPAPRPPGPHASPVPYRRPRFLRGSSSSPGAADASRRPDSRPVRSPARGRTLPWNAGYAEIINAEKSEFNEDQAACGKLCIRRCEFGAEEEWLTLCPEEDEVIGRELEASGQMGGCTALVAVSLQGKLYMANAGDSRAILVRRDEIRPLSFEFTPETERQRIQQLAFVYPELLAGEFTRLEFPRRLKGDDLGQKVLFRDHHMSGWSYKRVEKSDLKYPLIHGQGRQARLLGTLAVSRGLGDHQLRVLDTNIQLKPFLLSVPQVTVLDVDQLELQEDDVVVMATDGLWDVLSNEQVAWLVRSFLPGNQEDPHRFSKLAQMLIHSTQGKEDSLTEEGQVSYDDVSVFVIPLHSQGQESSDH

SEQ ID NO: 890618 - protein, 438 aa, Homo sapiens
MPAPCPTDGPASFAAPAPAPGRPTPRAAQTPGPCAAPHEDARYPGMQATPSECPSPTPSSGPGLNPLRVLRPPRKREELSDSPHPPVDSPFLPSPPNPDNFPVIPTQRFPWDSDLPLREDRRSGRTCSPGASKMRPETRIINAEKSEFNEDQAACGKLCIRRCEFGAEEEWLTLCPEEDEVIGRELEASGQMGGCTALVAVSLQGKLYMANAGDSRAILVRRDEIRPLSFEFTPETERQRIQQLAFVYPELLAGEFTRLEFPRRLKGDDLGQKVLFRDHHMSGWSYKRVEKSDLKYPLIHGQGRQARLLGTLAVSRGLGDHQLRVLDTNIQLKPFLLSVPQVTVLDVDQLELQEDDVVVMATDGLWDVLSNEQVAWLVRSFLPGNQEDPHRFSKLAQMLIHSTQGKEDSLTEEGQVSYDDVSVFVIPLHSQGQESSDH

SEQ ID NO: 890619 - protein, 459 aa, Homo sapiens; identical to SEQ ID NO: 890612

SEQ ID NO: 890620 - protein, 201 aa, Homo sapiens
MPAPCPTDGPASFAAPAPAPGRPTPRAAQTPGPCAAPHEDARYPGMQATPSECPSPTPSSGPGLNPLRVLRPPRKREELSDSPHPPVDSPFLPSPPNPDNFPVIPTQRFPWDSDLPLREDRRSGRTCSPGASKMRPRDSVEFQHSGLWRFPLALYPQHLTLGMTCAVWNRALGCDRTGAGMATYPYRLALGHQVGSRGAGP

SEQ ID NO: 890621 - protein, 102 aa, Homo sapiens
MDTKEEKKERKQSYFARLKKKKQAKQNAETASAVATRTHTGKEDNNTVVLEPDKCNIAVEEEYMTDEKKKRKSNQLKEIRRTELKRYYSIGEYSWRYCSIFI

SEQ ID NO: 890622 - protein, 931 aa, Homo sapiens
MDTKEEKKERKQSYFARLKKKKQAKQNAETASAVATRTHTGKEDNNTVVLEPDKCNIAVEEEYMTDEKKKRKSNQLKEIRRTELKRYYSIDDNQNKTHDKKEKKMVVQKPHGTMEYTAGNQDTLNSIALKFNITPNKLVELNKLFTHTIVPGQVLFVPDANSPSSTLRLSSSSPGATVSPSSSDAEYDKLPDADLARKALKPIERVLSSTSEEDEPGVVKFLKMNCRYFTDGKGVVGGVMIVTPNNIMFDPHKSDPLVIENGCEEYGLICPMEEVVSIALYNDISHMKIKDALPSPGEWEDLASEKDINPFSKFKSINKEKRQQNGEKIMTSDSRPIVPLEKSTGHTPTKPSGSSVSEKLKKLDSSRETSHGSPTVTKLSKEPSDTSSAFESTAKENFLGEDDDFVDLEELSSQTGGGMHKKDTLKECLSLDPEERKKAESQINNSAVEMQVQSALAFLGTENDVELKGALDLETCEKQDIMPEVDKQSGSPESRVENTLNIHEDLDKVKLIEYYLTKNKEGPQVSENLQKTELSDGKSIEPGGIDITLSSSLSQAGDPITEGNKEPDKTWVKKGEPLPVKLNSSTEANVIKEALDSSLESTLDNSCQGAQMDNKSEVQLWLLKRIQVPIEDILPSKEEKSKTPPMFLCIKVGKPMRKSFATHTAAMVQQYGKRRKQPEYWFAVPRERVDHLYTFFVQWSPDVYGKDAKEQGFVVVEKEELNMIDNFFSEPTTKSWEIITVEEAKRRKSTCSYYEDEDEEVLPVLRPHSALLENMHIEQLARRLPARVQGYPWRLAYSTLEHGTSLKTLYRKSASLDSPVLLVIKDMDNQIFGAYATHPFKFSDHYYGTGETFLYTFSPHFKVFKWSGENSYFINGDISSLELGGGGGRFGLWLDADLYHGRSNSCSTFNNDILSKKEDFIVQDLEVWAFD

SEQ ID NO: 890623 - protein, 931 aa, Homo sapiens; identical to SEQ ID NO: 890622

SEQ ID NO: 890624 - protein, 931 aa, Homo sapiens; identical to SEQ ID NO: 890622

SEQ ID NO: 890625 - protein, 942 aa, Homo sapiens
MDTKEEKKERKQSYFARLKKKKQAKQNAETASAVATRTHTGKEDNNTVVLEPDKCNIAVEEEYMTDEKKKRKSNQLKEIRRTELKRYYSIDDNQNKTHDKKEKKMVVQKPHGTMEYTAGNQDTLNSIALKFNITPNKLVELNKLFTHTIVPGQVLFVPDANSPSSTLRLSSSSPGATVSPSSSDAEYDKLPDADLARKALKPIERVLSSTSEEDEPGVVKFLKMNCRYFTDGKGVVGGVMIVTPNNIMFDPHKSDPLVIENGCEEYGLICPMEEVVSIALYNDISHMKIKDALPSDLPQDLCPLYRPGEWEDLASEKDINPFSKFKSINKEKRQQNGEKIMTSDSRPIVPLEKSTGHTPTKPSGSSVSEKLKKLDSSRETSHGSPTVTKLSKEPSDTSSAFESTAKENFLGEDDDFVDLEELSSQTGGGMHKKDTLKECLSLDPEERKKAESQINNSAVEMQVQSALAFLGTENDVELKGALDLETCEKQDIMPEVDKQSGSPESRVENTLNIHEDLDKVKLIEYYLTKNKEGPQVSENLQKTELSDGKSIEPGGIDITLSSSLSQAGDPITEGNKEPDKTWVKKGEPLPVKLNSSTEANVIKEALDSSLESTLDNSCQGAQMDNKSEVQLWLLKRIQVPIEDILPSKEEKSKTPPMFLCIKVGKPMRKSFATHTAAMVQQYGKRRKQPEYWFAVPRERVDHLYTFFVQWSPDVYGKDAKEQGFVVVEKEELNMIDNFFSEPTTKSWEIITVEEAKRRKSTCSYYEDEDEEVLPVLRPHSALLENMHIEQLARRLPARVQGYPWRLAYSTLEHGTSLKTLYRKSASLDSPVLLVIKDMDNQIFGAYATHPFKFSDHYYGTGETFLYTFSPHFKVFKWSGENSYFINGDISSLELGGGGGRFGLWLDADLYHGRSNSCSTFNNDILSKKEDFIVQDLEVWAFD

SEQ ID NO: 890626 - protein, 931 aa, Homo sapiens; identical to SEQ ID NO: 890622

SEQ ID NO: 890627 - protein, 252 aa, Homo sapiens [sequence omitted]

SEQ ID NO: 890628 - protein, 219 aa, Homo sapiens
MRGQRLPLDIQIFYCARPDEEPFVKIITVEEAKRRKSTCSYYEDEDEEVLPVLRPHSALLENMHIEQLARRLPARVQGYPWRLAYSTLEHGTSLKTLYRKSASLDSPVLLVIKDMDNQIFGAYATHPFKFSDHYYGTGETFLYTFSPHFKVFKWSGENSYFINGDISSLELGGGGGRFGLWLDADLYHGRSNSCSTFNNDILSKKEDFIVQDLEVWAFD

SEQ ID NO: 890629 - protein, 159 aa, Homo sapiens
MRGQRLPLDIQIFYCARPDEEPFVKIITVEEAKRRKSTCSYYEDEDEEVLPVLRPHSALLENMHIEQLARRLPARVQGYPWRLAYSTLEHGTSLKTLYRKSASLDSPVLLVIKDMDNQIFGAYATHPFKFSDHYYGTGETFLYTFSPHFKGTIWFMARC

SEQ ID NO: 890630 - protein, 931 aa, Homo sapiens; identical to SEQ ID NO: 890622

SEQ ID NO: 890631 - protein, 72 aa, Homo sapiens
RSLFCLRCSPINLTTSCSAYIPPSSANPDEGYKVSASTHVKTLVLPGRTTHYTLGLPGQVDLTTPTSSKSIQ

SEQ ID NO: 890632 - protein, 568 aa, Homo sapiens
  misc_feature (559)..(559): Xaa can be any naturally occurring amino acid
  misc_feature (568)..(568): Xaa can be any naturally occurring amino acid
MDTKEEKKERKQSYFARLKKKKQAKQNAETASAVATRTHTGKEDNNTVVLEPDKCNIAVEEEYMTDEKKKRKSNQLKEIRRTELKRYYSIDDNQNKTHDKKEKKMVVQKPHGTMEYTAGNQDTLNSIALKFNITPNKLVELNKLFTHTIVPGQVLFVPDANSPSSTLRLSSSSPGATVSPSSSDAEYDKLPDADLARKALKPIERVLSSTSEEDEPGVVKFLKMNCRYFTDGKGVVGGVMIVTPNNIMFDPHKSDPLVIENGCEEYGLICPMEEVVSIALYNDISHMKIKDALPSPGEWEDLASEKDINPFSKFKSINKEKRQQNGEKIMTSDSRPIVPLEKSTGHTPTKPSGSSVSEKLKKLDSSRETSHGSPTVTKLSKEPSDTSSAFESTAKENFLGEDDDFVDLEELSSQTGGGMHKKDTLKECLSLDPEERKKAESQINNSAVEMQVQSALAFLGTENDVELKGALDLETCEKQDIMPEVDKQSGSPESRVENTLNIHEDLDKVKLIEYYLTKNKEGPQVSENLQKTELSDGKSIEPGEDPEFSSSSSRRPASXGSKLYRTPX

SEQ ID NO: 890633 - protein, 79 aa, Homo sapiens
VRVQGSEAGWGVRGFLALGIAGFAAIVAYGLYKLKSRGNTKMSIHLIHMRVAAQGFVVGAMTVGMGYSMYREFWAKPKP

SEQ ID NO: 890634 - protein, 79 aa, Homo sapiens; identical to SEQ ID NO: 890633

SEQ ID NO: 890635 - protein, 117 aa, Homo sapiens
ARAGIRSRLGCERFSRSRNLQAITMSTDTGVSLPSHEEDQGSKLTRKTKEAPFVPVGAAGFAAIVAYGLYKLKSRGNTKMSIHLIHMRVAAQGFVVGAMTVGMGYSMYREFWAKPKP

SEQ ID NO: 890636 - protein, 117 aa, Homo sapiens; identical to SEQ ID NO: 890635

SEQ ID NO: 890637 - protein, 336 aa, Homo sapiens
MLGTRPAVLNRPRRNRLASAAMAAGVPCALVTSCSSVFSGDQLVQHILGTEDLIVEVTSNDAVRFYPWTIDNKYYSADINLCVVPNKFLVTAEIAESVQAFVVYFDSTQKSGLDSVSSWLPLAKAWLPEVMILVCDRVSEDGINRQKAQEWCIKHGFELVELSPEELPEEDDDFPESTGVKRIVQALNANVWSNVVMKNDRNQGFSLLNSLTGTNHSIGSADPCHPEQPHLPAADSTESLSDHRGGASNTTDAQVDSIVDPMLDLDIQELASLTTGGGDVENFERLFSKLKEMKDKAATLPHEQRKVHAEKVAKAFWMAIGGDRDEIEGLSSDEEH

SEQ ID NO: 890638 - protein, 336 aa, Homo sapiens; identical to SEQ ID NO: 890637

SEQ ID NO: 890639 - protein, 336 aa, Homo sapiens; identical to SEQ ID NO: 890637

SEQ ID NO: 890640 - protein, 206 aa, Homo sapiens
MILVCDRVSEDGINRQKAQEWCIKHGFELVELSPEELPEEDDDFPESTGVKRIVQALNANVWSNVVMKNDRNQGFSLLNSLTGTNHSIGSADPCHPEQPHLPAADSTESLSDHRGGASNTTDAQVDSIVDPMLDLDIQELASLTTGGGDVENFERLFSKLKEMKDKAATLPHEQRKVHAEKVAKAFWMAIGGDRDEIEGLSSDEEH

SEQ ID NO: 890641 - protein, 336 aa, Homo sapiens; identical to SEQ ID NO: 890637

SEQ ID NO: 890642 - protein, 215 aa, Homo sapiens
MLGTRPAVLNRPRRNRLASAAMAAGVPCALVTSCSSVFSGDQLVQHILGTEDLIVEVTSNDAVRFYPWTIDNKYYSADINLCVVPNKFLVTAEIAESVQAFVVYFDSTQKSGLDSVSSWLPLAKAWLPEVMILVCDRVSEDGINRQKAQEWCIKHGFELVELSPEELPEEDDDFPESTGVKRIVQALNANVWSNVVMKNVSWTLIFKGQIFNLKI

SEQ ID NO: 890643 - protein, 353 aa, Homo sapiens
MLGTRPAVLNRPRRNRLASAAMAAGVPCALVTSCSSVFSGDQLVQHILGTEDLIVEVTSNDAVRFYPWTIDNKYYSADINLCVVPNKFLVTAEIAESVQAFVVYFDSTQKSGLDSVSSWLPLAKAWLPEVMILVCDRVSEDGINRQKAQEWCIKHGFELVELSPEELPEEDDDFPESTGVKRIVQALNANVWSNVVMKNDRNQGFSLLNSLTGTNHSIGSADPCHPEQPHLPAADSTESLSDHRGGASNTTDAQVDSIVDPMLDLDIQELASLTTGGGDVENFERLFSKLKEMKDKAATLPHEQRKVHAEKVRQSARYLLNTYKRSSAIIIIIYHTCVFLKGLSVSFSLNINF

SEQ ID NO: 890644 - protein, 301 aa, Homo sapiens
MLGTRPAVLNRPRRNRLASAAMAAGVPCALVTSCSSVFSGDQLVQHILGTEDLIVEVTSNDAVRFYPWTIDNKYYSADINLCVVPNKFLVTAEIAESVQAFVVYFDSTQKSGLDSVSSWLPLAKAWLPEVMILVCDRVSEDGINRQKAQEWCIKHGFELVELSPEELPEEDDDFPESTGVKRIVQALNANVWSNVVMKNDRNQGFSLLNSLTGTNHSIGSADPCHPEQPHLPAADSTESLSDHRGGASNTTDAQVDSIVDPMLDLDIQELASLTTGGGDVENFERLFSKLKEMKDKDASCL

SEQ ID NO: 890645 - protein, 301 aa, Homo sapiens; identical to SEQ ID NO: 890644

SEQ ID NO: 890646 - protein, 259 aa, Homo sapiens
GTRGVQSFGSLFCDRITYAKRAQSLARPERGRCWAAADGRSTLGPVSGSSPASGAGPASSSGPATIESGSAGKAAPGSAARSCAGSARAAPRRAGGMAAVLALRVVAGLAAAALVAMLLEHYGLAGQPSPLPRPAPPRRPHPAPGPGDSNIFWGLQISDIHLSRFRDPGRAVDLEKFCSETIDIIQPALVLATGDLTDAKTKEQLGSRQHEVEWQTYQGILKKTRVMEKTKWLDIKGNHGKSQEPDYNKDKSFFPPSGT

SEQ ID NO: 890647 - protein, 513 aa, Homo sapiens
MEKTKWLDIKGNHDAFNIPSLDSIKNYYRKYSAVRRDGSFHYVHSTPFGNYSFICVDATVNPGPKRPYNFFGILDKKKMEELLLLAKESSRSNHTIWFGHFTTSTILSPSPGIRSIMSSAIAYLCGHLHTLGGLMPVLHTRHFQGTLELEVGDWKDNRRYRIFAFDHDLFSFADLIFGKWPVVLITNPKSLLYSCGEHEPLERLLHSTHIRVLAFSLSSITSVTVKIDGVHLGQAVHVSGPIFVLKWNPRNYSSGTHNIEVIVQDSAGRSKSVHHIFSVQENNHLSFDPLASFILRTDHYIMARVLFVLIVLSQLTILIIFRYRGYPELKEPSGFINLTSFSLHVLSKINIFYYSVLLLTLYTVLGPWFFGEIIDGKFGCCFSFGIFVNGHFLQGSITFIIGILQLAFFNIPLMAYMCWSLLQRCFGHNFRSHLHQRKYLKIMPVHLLMLLLYIWQVYSCYFLYATYGTLAFLFSPLRTWLTLLTPVLIRYVWTLNSTKFGIFMVQLKSHLSS

SEQ ID NO: 890648 - protein, 511 aa, Homo sapiens
MANLPGYSEEDKSHGKNQVAGYQRKSWKYSAVRRDGSFHYVHSTPFGNYSFICVDATVNPGPKRPYNFFGILDKKKMEELLLLAKESSRSNHTIWFGHFTTSTILSPSPGIRSIMSSAIAYLCGHLHTLGGLMPVLHTRHFQGTLELEVGDWKDNRRYRIFAFDHDLFSFADLIFGKWPVVLITNPKSLLYSCGEHEPLERLLHSTHIRVLAFSLSSITSVTVKIDGVHLGQAVHVSGPIFVLKWNPRNYSSGTHNIEVIVQDSAGRSKSVHHIFSVQENNHLSFDPLASFILRTDHYIMARVLFVLIVLSQLTILIIFRYRGYPELKEPSGFINLTSFSLHVLSKINIFYYSVLLLTLYTVLGPWFFGEIIDGKFGCCFSFGIFVNGHFLQGSITFIIGILQLAFFNIPLMAYMCWSLLQRCFGHNFRSHLHQRKYLKIMPVHLLMLLLYIWQVYSCYFLYATYGTLAFLFSPLRTWLTLLTPVLIRYVWTLNSTKFGIFMVQLKSHLSS

SEQ ID NO: 890649 - protein, 424 aa, Homo sapiens
MEKTKWLDIKGNHEKDGGALITGQGKQSEQPYNLVWTLYNIHYSFSITRNPVNNEGTLELEVGDWKDNRRYRIFAFDHDLFSFADLIFGKWPVVLITNPKSLLYSCGEHEPLERLLHSTHIRVLAFSLSSITSVTVKIDGVHLGQAVHVSGPIFVLKWNPRNYSSGTHNIEVIVQDSAGRSKSVHHIFSVQENNHLSFDPLASFILRTDHYIMARVLFVLIVLSQLTILIIFRYRGYPELKEPSGFINLTSFSLHVLSKINIFYYSVLLLTLYTVLGPWFFGEIIDGKFGCCFSFGIFVNGHFLQGSITFIIGILQLAFFNIPLMAYMCWSLLQRCFGHNFRSHLHQRKYLKIMPVHLLMLLLYIWQVYSCYFLYATYGTLAFLFSPLRTWLTLLTPVLIRYVWTLNSTKFGIFMVQLKSHLSS

SEQ ID NO: 890650 - protein, 511 aa, Homo sapiens; identical to SEQ ID NO: 890648

SEQ ID NO: 890651 - protein, 126 aa, Homo sapiens
ITGQGKQSEQPYNLVWTLYNIHYSFSITRNPVNNEVRQASKIRINLFLVFLFCCYLFCFSGKTFLLVWPHALSLFIYFIYFSLVSSAIAYLCGHLHTLGGLMPVLHTRHFQGTLELEVGDWKDNRR

SEQ ID NO: 890652 - protein, 739 aa, Homo sapiens
GTRGVQSFGSLFCDRITYAKRAQSLARPERGRCWAAADGRSTLGPVSGSSPASGAGPASSSGPATIESGSAGKAAPGSAARSCAGSARAAPRRAGGMAAVLALRVVAGLAAAALVAMLLEHYGLAGQPSPLPRPAPPRRPHPAPGPGDSNIFWGLQISDIHLSRFRDPGRAVDLEKFCSETIDIIQPALVLATGDLTDAKTKEQLGSRQHEVEWQTYQGILKKTRVMEKTKWLDIKGNHDAFNIPSLDSIKNYYRKYSAVRRDGSFHYVHSTPFGNYSFICVDATVNPGPKRPYNFFGILDKKKMEELLLLAKESSRSNHTIWFGHFTTSTILSPSPGIRSIMSSAIAYLCGHLHTLGGLMPVLHTRHFQGTLELEVGDWKDNRRYRIFAFDHDLFSFADLIFGKWPVVLITNPKSLLYSCGEHEPLERLLHSTHIRVLAFSLSSITSVTVKIDGVHLGQAVHVSGPIFVLKWNPRNYSSGTHNIEVIVQDSAGRSKSVHHIFSVQENNHLSFDPLASFILRTDHYIMARVLFVLIVLSQLTILIIFRYRGYPELKEPSGFINLTSFSLHVLSKINIFYYSVLLLTLYTVLGPWFFGEIIDGKFGCCFSFGIFVNGHFLQGSITFIIGILQLAFFNIPLMAYMCWSLLQRCFGHNFRSHLHQRKYLKIMPVHLLMLLLYIWQVYSCYFLYATYGTLAFLFSPLRTWLTLLTPVLIRYVWTLNSTKFGIFMVQLKSHLSS

SEQ ID NO: 890653 - protein, 79 aa, Homo sapiens
AAAYYYYYCSNSSFYRCTGPCKALTAVLGIQQLSKVQFQGQGTFEDLGPTLTTPEILVPRPVFPQDCGLSASLVGSVFN

SEQ ID NO: 890654 - protein, 435 aa, Homo sapiens
MEELLLLAKESSRSNHTIWFGHFTTSTILSPSPGIRSIMSSAIAYLCGHLHTLGGLMPVLHTRHFQGTLELEVGDWKDNRRYRIFAFDHDLFSFADLIFGKWPVVLITNPKSLLYSCGEHEPLERLLHSTHIRVLAFSLSSITSVTVKIDGVHLGQAVHVSGPIFVLKWNPRNYSSGTHNIEVIVQDSAGRSKSVHHIFSVQENNHLSFDPLASFILRTDHYIMARVLFVLIVLSQLTILIIFRYRGYPELKEPSGFINLTSFSLHVLSKINIFYYSVLLLTLYTVLGPWFFGEIIDGKFGCCFSFGIFVNGHFLQGSITFIIGILQLAFFNIPLMAYMCWSLLQRCFGHNFRSHLHQRKYLKIMPVHLLMLLLYIWQVYSCYFLYATYGTLAFLFSPLRTWLTLLTPVLIRYVWTLNSTKFGIFMVQLKSHLSS

SEQ ID NO: 890655 - protein, 435 aa, Homo sapiens; identical to SEQ ID NO: 890654

SEQ ID NO: 890656 - protein, 593 aa, Homo sapiens
GTRGVQSFGSLFCDRITYAKRAQSLARPERGRCWAAADGRSTLGPVSGSSPASGAGPASSSGPATIESGSAGKAAPGSAARSCAGSARAAPRRAGGMAAVLALRVVAGLAAAALVAMLLEHYGLAGQPSPLPRPAPPRRPHPAPGPGDSNIFWGLQISDIHLSRFRDPGRAVDLEKFCSETIDIIQPALVLATGDLTDAKTKEQLGSRQHEVEWQTYQGILKKTRVMEKTKWLDIKGNHDAFNIPSLDSIKNYYRKYSAVRRDGSFHYVHSTPFGNYSFICVDATVNPGPKRPYNFFGILDKKKMEELLLLAKESSRSNHTIWFGHFTTSTILSPSPGIRSIMSSAIAYLCGHLHTLGGLMPVLHTRHFQGTLELEVGDWKDNRRYRIFAFDHDLFSFADLIFGKWPVVLITNPKSLLYSCGEHEPLERLLHSTHIRVLAFSLSSITSVTVKIDGVHLGQAVHVSGPIFVLKWNPRNYSSGTHNIEVIVQDSAGRSKSVHHIFSVQENNHLSFDPLASFILRTDHYIMARVLFVLIVLSQLTILIIFRYRGYPELKEPSGFINLTSFSLHVLSKINIFYYSVLLLTLYTVLGK

SEQ ID NO: 890657 - protein, 719 aa, Homo sapiens
MPRRKKKVKEVSESRNLEKKDVETTSSVSVKRKRRLEDAFIVISDSDGEEPKEENGLQKTKTKQSNRAKCLAKRKIAQMTEEEQFALALKMSEQEAREVNSQEEEEEELLRKAIAESLNSCRPSDASATRSRPLATGPSSQSHQEKTTDSGLTEGIWQLVPPSLFKGSHISQGNEAEEREEPWDHTEKTEEEPVSGSSGSWDQSSQPVFENVNVKSFDRCTGHSAEHTQCGKPQESTGRGSAFLKAVQGSGDTSRHCLPTLADAKGLQDTGGTVNYFWGIPFCPDGVDPNQYTKVILCQLEVYQKSLKMAQRQLLNKKGFGEPVLPRPPSLIQNECGQGEQASEKNECISEDMGDEDKEERQESRASDWHSKTKDFQESSIKSLKEKLLLEEEPTTSHGQSSQGIVEETSEEGNSVPASQSVAALTSKRSLVLMPESSAEEITVCPETQLSSSETFDLEREVSPGSRDILDGVRIIMADKEVGNKEDAEKEVAISTFSSSNQVSCPLCDQCFPPTKIERHAMYCNGLMEEDTVLTRRQKEAKTKSDSGTAAQTSLDIDKNEKCYLCKSLVPFREYQCHVDSCLQLAKADQGDGPEGSGRACSTVEGKWQQRLKNPKEKGHSEGRLLSFLEQSEHKTSDADIKSSETGAFRVPSPGMEEAGCSREMQSSFTRRDLNESPVKSFVSISEATDCLVDFKKQVTVQPGSRTRTKAGRGRRRKF

SEQ ID NO: 890658 - protein, 349 aa, Homo sapiens
MLPLPDLDLWPLDRLPSPIKRKPQTLGSLKSSQGIVEETSEEGNSVPASQSVAALTSKRSLVLMPESSAEEITVCPETQLSSSETFDLEREVSPGSRDILDGVRIIMADKEVGNKEDAEKEVAISTFSSSNQVSCPLCDQCFPPTKIERHAMYCNGLMEEDTVLTRRQKEAKTKSDSGTAAQTSLDIDKNEKCYLCKSLVPFREYQCHVDSCLQLAKADQGDGPEGSGRACSTVEGKWQQRLKNPKEKGHSEGRLLSFLEQSEHKTSDADIKSSETGAFRVPSPGMEEAGCSREMQSSFTRRDLNESPVKSFVSISEATDCLVDFKKQVTVQPGSRTRTKAGRGRRRKF

SEQ ID NO: 890659 - protein, 719 aa, Homo sapiens; identical to SEQ ID NO: 890657

SEQ ID NO: 890660 - protein, 641 aa, Homo sapiens
MTEEEQFALALKMSEQEAREVNSQEEEEEELLRKAIAESLNSCRPSDASATRSRPLATGPSSQSHQEKTTDSGLTEGIWQLVPPSLFKGSHISQGNEAEEREEPWDHTEKTEEEPVSGSSGSWDQSSQPVFENVNVKSFDRCTGHSAEHTQCGKPQESTGRGSAFLKAVQGSGDTSRHCLPTLADAKGLQDTGGTVNYFWGIPFCPDGVDPNQYTKVILCQLEVYQKSLKMAQRQLLNKKGFGEPVLPRPPSLIQNECGQGEQASEKNECISEDMGDEDKEERQESRASDWHSKTKDFQESSIKSLKEKLLLEEEPTTSHGQSSQGIVEETSEEGNSVPASQSVAALTSKRSLVLMPESSAEEITVCPETQLSSSETFDLEREVSPGSRDILDGVRIIMADKEVGNKEDAEKEVAISTFSSSNQVSCPLCDQCFPPTKIERHAMYCNGLMEEDTVLTRRQKEAKTKSDSGTAAQTSLDIDKNEKCYLCKSLVPFREYQCHVDSCLQLAKADQGDGPEGSGRACSTVEGKWQQRLKNPKEKGHSEGRLLSFLEQSEHKTSDADIKSSETGAFRVPSPGMEEAGCSREMQSSFTRRDLNESPVKSFVSISEATDCLVDFKKQVTVQPGSRTRTKAGRGRRRKF

SEQ ID NO: 890661 - protein, 349 aa, Homo sapiens; identical to SEQ ID NO: 890658

SEQ ID NO: 890662 - protein, 349 aa, Homo sapiens; identical to SEQ ID NO: 890658

SEQ ID NO: 890663 - protein, 349 aa, Homo sapiens; identical to SEQ ID NO: 890658

SEQ ID NO: 890664 - protein, 785 aa, Homo sapiens
VTRGSTHAYSRPPATRRRSTERPAPASEYPPPAHSSAHPSLPPFLPQRVRGPLLSGRGASRRQDKRMPRRKKKVKEVSESRNLEKKDVETTSSVSVKRKRRLEDAFIVISDSDGEEPKEENGLQKTKTKQSNRAKCLAKRKIAQMTEEEQFALALKMSEQEAREVNSQEEEEEELLRKAIAESLNSCRPSDASATRSRPLATGPSSQSHQEKTTDSGLTEGIWQLVPPSLFKGSHISQGNEAEEREEPWDHTEKTEEEPVSGSSGSWDQSSQPVFENVNVKSFDRCTGHSAEHTQCGKPQESTGRGSAFLKAVQGSGDTSRHCLPTLADAKGLQDTGGTVNYFWGIPFCPDGVDPNQYTKVILCQLEVYQKSLKMAQRQLLNKKGFGEPVLPRPPSLIQNECGQGEQASEKNECISEDMGDEDKEERQESRASDWHSKTKDFQESSIKSLKEKLLLEEEPTTSHGQSSQGIVEETSEEGNSVPASQSVAALTSKRSLVLMPESSAEEITVCPETQLSSSETFDLEREVSPGSRDILDGVRIIMADKEVGNKEDAEKEVAISTFSSSNQVSCPLCDQCFPPTKIERHAMYCNGLMEEDTVLTRRQKEAKTKSDSGTAAQTSLDIDKNEKCYLCKSLVPFREYQCHVDSCLQLAKADQGDGPEGSGRACSTVEGKWQQRLKNPKEKGHSEGRLLSFLEQSEHKTSDADIKSSETGAFRVPSPGMEEAGCSREMQSSFTRRDLNESPVKSFVSISEATDCLVDFKKQVTVQPGSRTRTKAGRGRRRKF

SEQ ID NO: 890665 - protein, 719 aa, Homo sapiens; identical to SEQ ID NO: 890657

SEQ ID NO: 890666 - protein, 411 aa, Homo sapiens [sequence omitted]

SEQ ID NO: 890667 - protein, 286 aa, Homo sapiens
MPESSAEEITVCPETQLSSSETFDLEREVSPGSRDILDGVRIIMADKEVGNKEDAEKEVAISTFSSSNQVSCPLCDQCFPPTKIERHAMYCNGLMEEDTVLTRRQKEAKTKSDSGTAAQTSLDIDKNEKCYLCKSLVPFREYQCHVDSCLQLAKADQGDGPEGSGRACSTVEGKWQQRLKNPKEKGHSEGRLLSFLEQSEHKTSDADIKSSETGAFRVPSPGMEEAGCSREMQSSFTRRDLNESPVKSFVSISEATDCLVDFKKQVTVQPGSRTRTKAGRGRRRKF

SEQ ID NO: 890668 - protein, 438 aa, Homo sapiens
MPRRKKKVKEVSESRNLEKKDVETTSSVSVKRKRRLEDAFIVISDSDGEEPKEENGLQKTKTKQSNRAKCLAKRKIAQMTEEEQFALALKMSEQEAREVNSQEEEEEELLRKAIAESLNSSQGIVEETSEEGNSVPASQSVAALTSKRSLVLMPESSAEEITVCPETQLSSSETFDLEREVSPGSRDILDGVRIIMADKEVGNKEDAEKEVAISTFSSSNQVSCPLCDQCFPPTKIERHAMYCNGLMEEDTVLTRRQKEAKTKSDSGTAAQTSLDIDKNEKCYLCKSLVPFREYQCHVDSCLQLAKADQGDGPEGSGRACSTVEGKWQQRLKNPKEKGHSEGRLLSFLEQSEHKTSDADIKSSETGAFRVPSPGMEEAGCSREMQSSFTRRDLNESPVKSFVSISEATDCLVDFKKQVTVQPGSRTRTKAGRGRRRKF

SEQ ID NO: 890669 - protein, 438 aa, Homo sapiens; identical to SEQ ID NO: 890668

SEQ ID NO: 890670 - protein, 561 aa, Homo sapiens
MPRRKKKVKEVSESRNLEKKDVETTSSVSVKRKRRLEDAFIVISDSDGEEPKEENGLQKTKTKQSNRAKCLAKRKIAQMTEEEQFALALKMSEQEAREVNSQEEEEEELLRKAIAESLNSCRPSDASATRSRPLATGPSSQSHQEKTTDSGLTEGIWQLVPPSLFKGSHISQGNEAEEREEPWDHTEKTEEEPVSGSSGSWDQSSQPVFENVNVKSFDRCTGHSAEHTQCGKPQESTGRGSAFLKAVQGSGDTSRHCLPTLADAKGLQDTGGTVNYFWGIPFCPDGVDPNQYTKVILCQLEVYQKSLKMAQRQLLNKKGFGEPVLPRPPSLIQNECGQGEQASEKNECISEDMGDEDKEERQESRASDWHSKTKDFQESSIKSLKEKLLLEEEPTTSHGQSSQGIVEETSEEGNSVPASQSVAALTSKRSLVLMPESSAEEITVCPETQLSSSETFDLEREVSPGSRDILDGVRIIMADKEVGNKEDAEKEVAISTFSSSNQVSCPLCDQCFPPTKIERHAMYCNGLMEEDTGKDPAGQPNSYFFVWWFYNPIHYNAGKKT

SEQ ID NO: 890671 - protein, 478 aa, Homo sapiens
MPRRKKKVKEVSESRNLEKKDVETTSSVSVKRKRRLEDAFIVISDSDGEEPKEENGLQKTKTKQSNRAKCLAKRKIAQMTEEEQFALALKMSEQEAREVNSQEEEEEELLRKAIAESLNSCRPSDASATRSRPLATGPSSQSHQEKTTDSGLTEGIWQLVPPSLFKGSHISQGNEAEEREEPWDHTEKTEEEPVSGSSGSWDQSSQPVFENVNVKSFDRCTGHSAEHTQCGKPQESTGRGSAFLKAVQGSGDTSRHCLPTLADAKGLQDTGGTVNYFWGIPFCPDGVDPNQYTKVILCQLEVYQKSLKMAQRQLLNKKGFGEPVLPRPPSLIQNECGQGEQASEKNECISEDMGDEDKEERQESRASDWHSKTKDFQESSIKSLKEKLLLEEEPTTSHGQSSQGIVEETSEEGNSVPASQSVAALTSKRSLVLMPESSAEEITVCPETSKSSEVDWKRVLRYEIWVGRDTGSGGRNAR

SEQ ID NO: 890672 - protein, 214 aa, Homo sapiens
QRLTKEMDLKGVEEHAMYCNGLMEEDTVLTRRQKEAKTKSDSGTAAQTSLDIDKNEKCYLCKSLVPFREYQCHVDSCLQLAKADQGDGPEGSGRACSTVEGKWQQRLKNPKEKGHSEGRLLSFLEQSEHKTSDADIKSSETGAFRVPSPGMEEAGCSREMQSSFTRRDLNESPVKSFVSISEATDCLVDFKKQVTVQPGSRTRTKAGRGRRRKF

SEQ ID NO: 890673 - protein, 483 aa, Homo sapiens
MPRRKKKVKEVSESRNLEKKDVETTSSVSVKRKRRLEDAFIVISDSDGEEPKEENGLQKTKTKQSNRAKCLAKRKIAQMTEEEQFALALKMSEQEAREVNSQEEEEEELLRKAIAESLNSCRPSDASATRSRPLATGPSSQSHQEKTTDSGLTEGIWQLVPPSLFKGSHISQGNEAEEREEPWDHTEKTEEEPVSGSSGSWDQSSQPVFENVNVKSFDRCTGHSAEHTQCGKPQESTGRGSAFLKAVQGSGDTSRHCLPTLADAKGLQDTGGTVNYFWGIPFCPDGVDPNQYTKVILCQLEVYQKSLKMAQRQLLNKKGFGEPVLPRPPSLIQNECGQGEQASEKNECISEDMGDEDKEERQESRASDWHSKTKDFQESSIKSLKEKLLLEEEPTTSHGQSSQGIVEETSEEGNSVPASQSVAALTSKRSLVLMPESSAEEITVCPETQLSSSETFDLEREVSPGSRDILDGVRIIMADKEVW

SEQ ID NO: 890674 - protein, 415 aa, Homo sapiens
MPRRKKKVKEVSESRNLEKKDVETTSSVSVKRKRRLEDAFIVISDSDGEEPKEENGLQKTKTKQSNRAKCLAKRKIAQMTEEEQFALALKMSEQEAREVNSQEEEEEELLRKAIAESLNSCRPSDASATRSRPLATGPSSQSHQEKTTDSGLTEGIWQLVPPSLFKGSHISQGNEAEEREEPWDHTEKTEEEPVSGSSGSWDQSSQPVFENVNVKSFDRCTGHSAEHTQCGKPQESTGRGSAFLKAVQGSGDTSRHCLPTLADAKGLQDTGGTVNYFWGIPFCPDGVDPNQYTKVILCQLEVYQKSLKMAQRQLLNKKGFGEPVLPRPPSLIQNECGQGEQASEKNECISEDMGDEDKEERQESRASDWHSKTKDFQESSIKSLKEKLLLEEEPTTSHGQVRVSDAVIKDDLFTD

SEQ ID NO: 890675 - protein, 109 aa, Homo sapiens
MKISVAAIPFFLLITIALGTKTESSSQTGGKPKVVKIQLKLVGGPYHPSECCFTYTTYKIPRQRIMDYYETNSQCSKPGIVFITKRGHSVCTNPSDKWVQDYIKDMKEN

SEQ ID NO: 890676 - protein, 113 aa, Homo sapiens
MKVSVAALSCLMLVAVLGSQAQFTNDAETELMMSKLPLENPVVLNSFHFAADCCTSYISQSIPCSLMKSYFETSSECSKPGVIFLTKKGRQVCAKPSGPGVQDCMKKLKPYSI

SEQ ID NO: 890677 - protein, 85 aa, Homo sapiens
MKISVAAIPFFLLITIALGTKTESSSRECNALSSFQPRALSDVICQLRGTRWESIGALTGSQETGAPYAVLWIVRMLPGMELENP

SEQ ID NO: 890678 - protein, 110 aa, Homo sapiens
YRPPLKREILAPQGAKKFRPKGPKPKVIECQKLPLENPVVLNSFHFAADCCTSYISQSIPCSLMKSYFETSSECSKPGVIFLTKKGRQVCAKPSGPGVQDCMKKLKPYSI

SEQ ID NO: 890679 - protein, 113 aa, Homo sapiens; identical to SEQ ID NO: 890676

SEQ ID NO: 890680 - protein, 85 aa, Homo sapiens
SHQASSPPTTASHSMKISVAAIPFFLLITIALGTKTESSSRECNALSSFQPRACREISRSEVGAQGKTRSRDSERRAGIFLKLCV

SEQ ID NO: 890681 - protein, 113 aa, Homo sapiens; identical to SEQ ID NO: 890676

SEQ ID NO: 890682 - protein, 113 aa, Homo sapiens; identical to SEQ ID NO: 890676

SEQ ID NO: 890683 - protein, 89 aa, Homo sapiens
QEQPMVWPLTRGPSSASDALSSGGPYHPSECCFTYTTYKIPRQRIMDYYETNSQCSKPGIVFITKRGHSVCTNPSDKWVQDYIKDMKEN

SEQ ID NO: 890684 - protein, 113 aa, Homo sapiens; identical to SEQ ID NO: 890676

SEQ ID NO: 890685 - protein, 190 aa, Homo sapiens
MARHVFLTGPPGVGKTTLIHKASEVLKSSGVPVDGFYTEEVRQGGRRIGFDVVTLSGTRGPLSRVGLEPPPGKRECRVGQYVVDLTSFEQLALPVLRNADCSSGPGQRVCVIDEIGKMELFSQLFIQAVRQTLSTPGTIILGTIPVPKGKPLALVEEIRNRKDVKVFNVTKENRNHLLPDIVTCVQSSRK

SEQ ID NO: 890686 - protein, 107 aa, Homo sapiens
RVVLLTMAKAESPKEHDPFTYDYQSLQIGGLVIARILFILGILIVLSRRCRCKFNQQQRTGEPGDTRWAGPESRPWSGPDLNCDPNLDCSPDRNPYPRPPVWPGTCS

SEQ ID NO: 890687 - protein, 107 aa, Homo sapiens; identical to SEQ ID NO: 890686

SEQ ID NO: 890688 - protein, 107 aa, Homo sapiens; identical to SEQ ID NO: 890686

SEQ ID NO: 890689 - protein, 228 aa, Homo sapiens
MARHVFLTGPPGVGKTTLIHKASEVLKSSGVPVDGFYTEEVRQGGRRIGFDVVTLSGTRGPLSRVGLEPPPGKRECRVGQYVVDLTSFEQLALPVLRNADCSSGPGQRVCVIDEIGKMELFSQLFIQAVRQTLSTPGTIILGTIPVPKGKPLALVEEIRNRKDVKVFNSPYCVIEDQSKFSSCVSQSTLTEPGWRQKLLQSLLNSEWKKRAPVVPTSVSPPFYLRWIP

SEQ ID NO: 890690 - protein, 107 aa, Homo sapiens; identical to SEQ ID NO: 890686

SEQ ID NO: 890691 - protein, 107 aa, Homo sapiens; identical to SEQ ID NO: 890686

SEQ ID NO: 890692 - protein, 117 aa, Homo sapiens
  misc_feature (1)..(1): Xaa can be any naturally occurring amino acid
XLTARYRGRVVLTSFEQLALPVLRNADCSSGPGQRVCVIDEIGKMELFSQLFIQAVRQTLSTPGTIILGTIPVPKGKPLALVEEIRNRKDVKVFNVTKENRNHLLPDIVTCVQSSRK

SEQ ID NO: 890693 - protein, 190 aa, Homo sapiens; identical to SEQ ID NO: 890685

SEQ ID NO: 890694 - protein, 117 aa, Homo sapiens; identical to SEQ ID NO: 890692
  misc_feature (1)..(1): Xaa can be any naturally occurring amino acid

SEQ ID NO: 890695 - protein, 190 aa, Homo sapiens; identical to SEQ ID NO: 890685

SEQ ID NO: 890696 - protein, 228 aa, Homo sapiens; identical to SEQ ID NO: 890689

SEQ ID NO: 890697 - protein, 107 aa, Homo sapiens; identical to SEQ ID NO: 890686

SEQ ID NO: 890698 - protein, 181 aa, Homo sapiens
GAQVDYVFAKVKWKGKGGKYTKSDFKEYEKEQDKPPNLVLKDKVKPKQDTKYDLILDEQAEDSKSSHSHTSKKHKKKTHHCSEEKEDEDYMPIKNTNQDIYREMGFGHYEEEESCWEKQKSEKRDRTQNRSRSRSRERDGHYSNSHKSKYQTDLYERERSKKRDRSRSPKKSKDKEKSKYR

SEQ ID NO: 890699 - protein, 492 aa, Homo sapiens
MAVLLETTLGDVVIDLYTEERPRACLNFLKLCKIKYYNYCLIHNVQRDFIIQTGDPTGTGRGGESIFGQLYGDQASFFEAEKVPRIKHKKKGTVSMVNNGSDQHGSQFLITTGENLDYLDGVHTVFGEVTEGMDIIKKINETFVDKDFVPYQDIRINHTVILDDPFDDPPDLLIPDRSPEPTREQLDSGRIGADEEIDDFKGRSAEEVEEIKAEKEAKTQAILLEMVGDLPDADIKPPENVLFVCKLNPVTTDEDLEIIFSRFGPIRSCEVIRDWKTGESLCYAFIEFEKEEDCEKAFFKMDNVLIDDRRIHVDFSQSVAKVKWKGKGGKYTKSDFKEYEKEQDKPPNLVLKDKVKPKQDTKYDLILDEQAEDSKSSHSHTSKKHKKKTHHCSEEKEDEDYMPIKNTNQDIYREMGFGHYEEEESCWEKQKSEKRDRTQNRSRSRSRERDGHYSNSHKSKYQTDLYERERSKKRDRSRSPKKSKDKEKSKYR

SEQ ID NO: 890700 - protein, 492 aa, Homo sapiens; identical to SEQ ID NO: 890699

SEQ ID NO: 890701 - protein, 477 aa, Homo sapiens
MAVLLETTLGDVVIDLYTEERPRACLNFLKLCKIKYYNYCLIHNVQRDFIIQTGDPTGTGRGGESIFGQLYGDQASFFEAEKVPRIKHKKKGTVSMVNNGSDQHGSQFLITTGENLDYLDGVHTVFGEVTEGMDIIKKINETFVDKDFVPYQDIRINHTVILDDPFDDPPDLLIPDRSPEPTREQLDSGRIGADEEIDDFKGRSAEEVEEIKAEKEAKTQAILLEMVGDLPDADIKPPENVLFVCKLNPVTTDEDLEIIFSRFGPIRSCEVIRDWKTGESLCYAFIEFEKEEDCEKAFFKMDNVLIDDRRIHVDFSQSVAKVKWKGKGGKYTKSDFKEYEKEQDKPPNLVLKDKVKPKQDTKYDLILDEQAEDSKSSHSHTSKKHKKKTHHCSEEKEDEDYMPIKNTNQDIYREMGFGHYEEEESCWEKQKRMAIIVIVINQNTKQIFMKEKGVKRETEAEVQRSPKIKKNLSIDER

SEQ ID NO: 890702 - protein, 221 aa, Homo sapiens
KAFFKIHMYSSVIYKHIVHFEECFLTFFKMDNVLIDDRRIHVDFSQSVAKVKWKGKGGKYTKSDFKEYEKEQDKPPNLVLKDKVKPKQDTKYDLILDEQAEDSKSSHSHTSKKHKKKTHHCSEEKEDEDYMPIKNTNQDIYREMGFGHYEEEESCWEKQKSEKRDRTQNRSRSRSRERDGHYSNSHKSKYQTDLYERERSKKRDRSRSPKKSKDKEKSKYR

SEQ ID NO: 890703 - protein, 421 aa, Homo sapiens
MSATLILEPPGRCCWNEPVRIAVRGLAPEQRVTLRASLRDEKGALFRAHARYCADARGELDLERAPALGGSFAGLEPMGLLWALEPEKPFWRFLKRDVQIPFVVELEVLDGHDPEPGRLLCQAQHERHFLPPGVRRQSVRAGRVRATLFLPPGPGPFPGIIDIFGIGGGLLEYRASLLAGHGFATLALAYYNFEDLPNNMDNISLEYFEEAVCYMLQHPQVKGPGIGLLGISLGADICLSMASFLKNVSATVSINGSGISGNTAINYKHSSIPPLGYDLRRIKVAFSGLVDIVDIRNALVGGYKNPSMIPIEKAQGPILLIVGQDDHNWRSELYAQTVSERLQAHGKEKPQIICYPGTGHYIEPPYFPLCPASLHRLLNKHVIWGGEPRAHSKAQEDAWKQILAFFCKHLGGTQKTAVPKL

SEQ ID NO: 890704 - protein, 2220 aa, Homo sapiens
MIRIAALNASSTIEDDHEGSFKSHKTQTKEAQEAEAFALYHKALDLQKHDRFEESAKAYHELLEASLLREAVSSGDEKEGLKHPGLILKYSTYKNLAQLAAQREDLETAMEFYLEAVMLDSTDVNLWYKIGHVALRLIRIPLARHAFEEGLRCNPDHWPCLDNLITVLYTLSDYTTCLYFICKALEKDCRYSKGLVLKEKIFEEQPCLRKDSLRMFLKCDMSIHDVSVSAAETQAIVDEALGLRKKRQALIVREKEPDLKLVQPIPFFTWKCLGESLLAMYNHLTTCEPPRPSLGKRIDLSDYQDPSQPLESSMVVTPVNVIQPSTVSTNPAVAVAEPVVSYTSVATTSFPLHSPGLLETGAPVGDISGGDKSKKGVKRKKISEESGETAKRRSARVRNTKCKKEEKVDFQELLMKFLPSRLRKLDPEEEDDSFNNYEVQSEAKLESFPSIGPQRLSFDSATFMESEKQDVHEFLLENLTNGGILELMMRYLKAMGHKFLVRWPPGLAEVVLSVYHSWRRHSTSLPNPLLRDCSNKHIKDMMLMSLSCMELQLDQWLLTKGRSSAVSPRNCPAGMVNGRFGPDFPGTHCLGDLLQLSFASSQRDLFEDGWLEFVVRVYWLKARFLALQGDMEQALENYDICTEMLQSSTAIQVEAGAERRDIVIRLPNLHNDSVVSLEEIDKNLKSLERCQSLEEIQRLYEAGDYKAVVHLLRPTLCTSGFDRAKHLEFMTSIPERPAQLLLLQDSLLRLKDYRQCFECSDVALNEAVQQMVNSGEAAAKEEWVATVTQLLMGIEQALSADSSGSILKVSSSTTGLVRLTNNLIQVIDCSMAVQEEAKEPHVSSVLPWIILHRIIWQEEDTFHSLCHQQQLQNPAEEGMSETPMLPSSLMLLNTAHEYLGRRSWCCNSDGALLRFYVRVLQKELAASTSEDTHPYKEELETALEQCFYCLYSFPSKKSKARYLEEHSAQQVDLIWEDALFMFEYFKPKTLPEFDSYKTSTVSADLANLLKRIATIVPRTERPALSLDKVSAYIEGTSTEVPCLPEGADPSPPVVNELYYLLADYHFKNKEQSKAIKFYMHDICICPNRFDSWAGMALARASRIQDKLNSNELKSDGPIWKHATPVLNCFRRALEIDSSNLSLWIEYGTMSYALHSFASRQLKQWRGELPPELVQQMEGRRDSMLETAKHCFTSAARCEGDGDEEEWLIHYMLGKVAEKQQQPPTVYLLHYRQAGHYLHEEAARYPKKIHYHNPPELAMEALEVYFRLHASILKLLGKPDSGVGAEVLVNFMKEAAEGPFARGEEKNTPKASEKEKACLVDEDSHSSAGTLPGPGASLPSSSGPGLTSPPYTATPIDHDYVKCKKPHQQATPDDRSQDSTAVALSDSSSTQDFFNEPTSLLEGSRKSYTEKRLPILSSQAGATGKDLQGATEERGKNEESLESTEGFRAAEQGVQKPAAETPASACIPGKPSASTPTLWDGKKRGDLPGEPVAFPQGLPAGAEEQRQFLTEQCIASFRLCLSRFPQHYKSLYRLAFLYTYSKTHRNLQWARDVLLGSSIPWQQLQHMPAQGLFCERNKTNFFNGIWRIPVDEIDRPGSFAWHMNRSIVLLLKVLAQLRDHSTLLKVSSMLQRTPDQGKKYLRDADRQVLAQRAFILTVKVLEDTLSELAEGSERPGPKVCGLPGARMTTDVSHKASPEDGQEGLPQPKKPPLADGSGPGPEPGGKVGLLNHRPVAMDAGDSADQSGERKDKESPRAGPTEPMDTSEATVCHSDLERTPPLLPGRPARDRGPESRPTELSLEELSISARQQPTPLTPAQPAPAPAPATTTGTRAGGHPEEPLSRLSRKRKLLEDTESGKTLLLDAYRVWQQGQKGVAYDLGRVERIMSETYMLIKQVDEEAALEQAVKFCQVHLGAAAQRQASGDTPTTPKHPKDSRENFFPVTVVPTAPDPVPADSVQRPSDAHTKPRPALAAATTIITCPPSASASTLDQSKDPGPPRPHRPEATPSMASLGPEGEELARVAEGTSFPPQEPRHSPQVKMAPTSSPAEPHCWPAEAALGTGAEPTCSQEGKLRPEPRRDGEAQEAASETQPLSSPPTAASSKAPSSGSAQPPEGHPGKPEPSRAKSRPLPNMPKLVIPSAATKFPPEITVTPPTPTLLSPKGSISEETKQKLKSAILSAQSAANVRKESLCQPALEVLETSSQESSLESETDEDDDYMDI

SEQ ID NO: 890705 - protein, 2175 aa, Homo sapiens
MIRIAALNASSTIEDDHEGSFKSHKTQTKEAQEAEAFALYHKALDLQKHDRFEESAKAYHELLEASLLREAVMLDSTDVNLWYKIGHVALRLIRIPLARHAFEEGLRCNPDHWPCLDNLITVLYTLSDYTTCLYFICKALEKDCRYSKGLVLKEKIFEEQPCLRKDSLRMFLKCDMSIHDVSVSAAETQAIVDEALGLRKKRQALIVREKEPDLKLVQPIPFFTWKCLGESLLAMYNHLTTCEPPRPSLGKRIDLSDYQDPSQPLESSMVVTPVNVIQPSTVSTNPAVAVAEPVVSYTSVATTSFPLHSPGLLETGAPVGDISGGDKSKKGVKRKKISEESGETAKRRSARVRNTKCKKEEKVDFQELLMKFLPSRLRKLDPEEEDDSFNNYEVQSEAKLESFPSIGPQRLSFDSATFMESEKQDVHEFLLENLTNGGILELMMRYLKAMGHKFLVRWPPGLAEVVLSVYHSWRRHSTSLPNPLLRDCSNKHIKDMMLMSLSCMELQLDQWLLTKGRSSAVSPRNCPAGMVNGRFGPDFPGTHCLGDLLQLSFASSQRDLFEDGWLEFVVRVYWLKARFLALQGDMEQALENYDICTEMLQSSTAIQVEAGAERRDIVIRLPNLHNDSVVSLEEIDKNLKSLERCQSLEEIQRLYEAGDYKAVVHLLRPTLCTSGFDRAKHLEFMTSIPERPAQLLLLQDSLLRLKDYRQCFECSDVALNEAVQQMVNSGEAAAKEEWVATVTQLLMGIEQALSADSSGSILKVSSSTTGLVRLTNNLIQVIDCSMAVQEEAKEPHVSSVLPWIILHRIIWQEEDTFHSLCHQQQLQNPAEEGMSETPMLPSSLMLLNTAHEYLGRRSWCCNSDGALLRFYVRVLQKELAASTSEDTHPYKEELETALEQCFYCLYSFPSKKSKARYLEEHSAQQVDLIWEDALFMFEYFKPKTLPEFDSYKTSTVSADLANLLKRIATIVPRTERPALSLDKVSAYIEGTSTEVPCLPEGADPSPPVVNELYYLLADYHFKNKEQSKAIKFYMHDICICPNRFDSWAGMALARASRIQDKLNSNELKSDGPIWKHATPVLNCFRRALEIDSSNLSLWIEYGTMSYALHSFASRQLKQWRGELPPELVQQMEGRRDSMLETAKHCFTSAARCEGDGDEEEWLIHYMLGKVAEKQQQPPTVYLLHYRQAGHYLHEEAARYPKKIHYHNPPELAMEALEVYFRLHASILKLLGKPDSGVGAEVLVNFMKEAAEGPFARGEEKNTPKASEKEKACLVDEDSHSSAGTLPGPGASLPSSSGPGLTSPPYTATPIDHDYVKCKKPHQQATPDDRSQDSTAVALSDSSSTQDFFNEPTSLLEGSRKSYTEKRLPILSSQAGATGKDLQGATEERGKNEESLESTEGFRAAEQGVQKPAAETPASACIPGKPSASTPTLWDGKKRGDLPGEPVAFPQGLPAGAEEQRQFLTEQCIASFRLCLSRFPQHYKSLYRLAFLYTYSKTHRNLQWARDVLLGSSIPWQQLQHMPAQGLFCERNKTNFFNGIWRIPVDEIDRPGSFAWHMNRSIVLLLKVLAQLRDHSTLLKVSSMLQRTPDQGKKYLRDADRQVLAQRAFILTVKVLEDTLSELAEGSERPGPKVCGLPGARMTTDVSHKASPEDGQEGLPQPKKPPLADGSGPGPEPGGKVGLLNHRPVAMDAGDSADQSGERKDKESPRAGPTEPMDTSEATVCHSDLERTPPLLPGRPARDRGPESRPTELSLEELSISARQQPTPLTPAQPAPAPAPATTTGTRAGGHPEEPLSRLSRKRKLLEDTESGKTLLLDAYRVWQQGQKGVAYDLGRVERIMSETYMLIKQVDEEAALEQAVKFCQVHLGAAAQRQASGDTPTTPKHPKDSRENFFPVTVVPTAPDPVPADSVQRPSDAHTKPRPALAAATTIITCPPSASASTLDQSKDPGPPRPHRPEATPSMASLGPEGEELARVAEGTSFPPQEPRHSPQVKMAPTSSPAEPHCWPAEAALGTGAEPTCSQEGKLRPEPRRDGEAQEAASETQPLSSPPTAASSKAPSSGSAQPPEGHPGKPEPSRAKSRPLPNMPKLVIPSAATKFPPEITVTPPTPTLLSPKGSISEETKQKLKSAILSAQSAANVRKESLCQPALEVLETSSQESSLESETDEDDDYMDI

SEQ ID NO: 890706 - protein, 2220 aa, Homo sapiens; identical to SEQ ID NO: 890704

SEQ ID NO: 890707 - protein, 2220 aa, Homo sapiens; identical to SEQ ID NO: 890704

SEQ ID NO: 890708 - protein, 2144 aa, Homo sapiens
MIRIAALNASSTIEDDHEGSFKSHKTQTKEAQEAEAFALYHKALDLQKHDRFEESAKAYHELLEASLLREAVMLDSTDVNLWYKIGHVALRLIRIPLARHAFEEGLRCNPDHWPCLDNLITVLYTLSDYTTCLYFICKALEKDCRYSKGLVLKEKIFEEQPCLRKDSLRMFLKCDMSIHDVSVSAAETQAIVDEALGLRKKRQALIVREKEPDLKLVQPIPFFTWKCLGESLLAMYNHLTTCEPPRPSLGKRIDLSDYQDPSQPLESSMVVTPVNVIQPSTVSTNPAVAVAEPVVSYTSVATTSFPLHSPGLLETGAPVGDISGGDKSKKGVKRKKISEESGETAKRRSARVRNTKCKKEEKVDFQELLMKFLPSRLRKLDPEEEDDSFNNYEVQSEAKLESFPSIGPQRLSFDSATFMESEKQDVHEFLLENLTNGGILELMMRYLKAMGHKFLVRWPPGLAEVVLSVYHSWRRHSTSLPNPLLRDCSNKHIKDMMLMSLSCMELQLDQWLLTKGRSSAVSPRNCPAGMVNGRFGPDFPGTHCLGDLLQLSFASSQRDLFEDGWLEFVVRVYWLKARFLALQGDMEQALENYDICTEMLQSSTAIQVEAGAERRDIVIRLPNLHNDSVVSLEEIDKNLKSLERCQSLEEIQRLYEAGDYKAVVHLLRPTLCTSGFDRAKHLEFMTSIPERPAQLLLLQDSLLRLKDYRQCFECSDVALNEAVQQMVNSGEAAAKEEWVATVTQLLMGIEQALSADSSGSILKVSSSTTGLVRLTNNLIQVIDCSMAVQEEAKEPHVSSVLPWIILHRIIWQEEDTFHSLCHQQQLQNPAEEGMSETPMLPSSLMLLNTAHEYLGRRSWCCNSDGALLRFYVRVLQKELAASTSEDTHPYKEELETALEQCFYCLYSFPSKKSKARYLEEHSAQQVDLIWEDALFMFEYFKPKTLPEFDSYKTSTVSADLANLLKRIATIVPRTERPALSLDKVSAYIEGTSTEVPCLPEGADPSPPVVNELYYLLADYHFKNKEQSKAIKFYMHDICICPNRFDSWAGMALARASRIQDKLNSNELKSDGPIWKHATPVLNCFRRALEIDSSNLSLWIEYGTMSYALHSFASRQLKQWRGELPPELVQQMEGRRDSMLETAKHCFTSAARCEGDGDEEEWLIHYMLGKVAEKQQQPPTVYLLHYRQAGHYLHEEAARYPKKIHYHNPPELAMEALEVYFRLHASILKLLGKPDSGVGAEVLVNFMKEAAEGPFARGEEKNTPKASEKEKACLVDEDSHSSAGTLPGPGASLPSSSDRSQDSTAVALSDSSSTQDFFNEPTSLLEGSRKSYTEKRLPILSSQAGATGKDLQGATEERGKNEESLESTEGFRAAEQGVQKPAAETPASACIPGKPSASTPTLWDGKKRGDLPGEPVAFPQGLPAGAEEQRQFLTEQCIASFRLCLSRFPQHYKSLYRLAFLYTYSKTHRNLQWARDVLLGSSIPWQQLQHMPAQGLFCERNKTNFFNGIWRIPVDEIDRPGSFAWHMNRSIVLLLKVLAQLRDHSTLLKVSSMLQRTPDQGKKYLRDADRQVLAQRAFILTVKVLEDTLSELAEGSERPGPKVCGLPGARMTTDVSHKASPEDGQEGLPQPKKPPLADGSGPGPEPGGKVGLLNHRPVAMDAGDSADQSGERKDKESPRAGPTEPMDTSEATVCHSDLERTPPLLPGRPARDRGPESRPTELSLEELSISARQQPTPLTPAQPAPAPAPATTTGTRAGGHPEEPLSRLSRKRKLLEDTESGKTLLLDAYRVWQQGQKGVAYDLGRVERIMSETYMLIKQVDEEAALEQAVKFCQVHLGAAAQRQASGDTPTTPKHPKDSRENFFPVTVVPTAPDPVPADSVQRPSDAHTKPRPALAAATTIITCPPSASASTLDQSKDPGPPRPHRPEATPSMASLGPEGEELARVAEGTSFPPQEPRHSPQVKMAPTSSPAEPHCWPAEAALGTGAEPTCSQEGKLRPEPRRDGEAQEAASETQPLSSPPTAASSKAPSSGSAQPPEGHPGKPEPSRAKSRPLPNMPKLVIPSAATKFPPEITVTPPTPTLLSPKGSISEETKQKLKSAILSAQSAANVRKESLCQPALEVLETSSQESSLESETDEDDDYMDI

SEQ ID NO: 890709 - protein, 1007 aa, Homo sapiens
MVGLKANKNKQCVAACCPGHGPISSVADWPVEQILATGKAAHTRGVVLQVYFRLHASILKLLGKPDSGVGAEVLVNFMKEAAEGPFARGEEKNTPKASEKEKACLVDEDSHSSAGTLPGPGASLPSSSGPGLTSPPYTATPIDHDYVKCKKPHQQATPDDRSQDSTAVALSDSSSTQDFFNEPTSLLEGSRKSYTEKRLPILSSQAGATGKDLQGATEERGKNEESLESTEGFRAAEQGVQKPAAETPASACIPGKPSASTPTLWDGKKRGDLPGEPVAFPQGLPAGAEEQRQFLTEQCIASFRLCLSRFPQHYKSLYRLAFLYTYSKTHRNLQWARDVLLGSSIPWQQLQHMPAQGLFCERNKTNFFNGIWRIPVDEIDRPGSFAWHMNRSIVLLLKVLAQLRDHSTLLKVSSMLQRTPDQGKKYLRDADRQVLAQRAFILTVKVLEDTLSELAEGSERPGPKVCGLPGARMTTDVSHKASPEDGQEGLPQPKKPPLADGSGPGPEPGGKVGLLNHRPVAMDAGDSADQSGERKDKESPRAGPTEPMDTSEATVCHSDLERTPPLLPGRPARDRGPESRPTELSLEELSISARQQPTPLTPAQPAPAPAPATTTGTRAGGHPEEPLSRLSRKRKLLEDTESGKTLLLDAYRVWQQGQKGVAYDLGRVERIMSETYMLIKQVDEEAALEQAVKFCQVHLGAAAQRQASGDTPTTPKHPKDSRENFFPVTVVPTAPDPVPADSVQRPSDAHTKPRPALAAATTIITCPPSASASTLDQSKDPGPPRPHRPEATPSMASLGPEGEELARVAEGTSFPPQEPRHSPQVKMAPTSSPAEPHCWPAEAALGTGAEPTCSQEGKLRPEPRRDGEAQEAASETQPLSSPPTAASSKAPSSGSAQPPEGHPGKPEPSRAKSRPLPNMPKLVIPSAATKFPPEITVTPPTPTLLSPKGSISEETKQKLKSAILSAQSAANVRKESLCQPALEVLETSSQESSLESETDEDDDYMDI

SEQ ID NO: 890710 - protein, 649 aa, Homo sapiens
MAIGSPLTVREGIWRIPVDEIDRPGSFAWHMNRSIVLLLKVLAQLRDHSTLLKVSSMLQRTPDQGKKYLRDADRQVLAQRAFILTVKVLEDTLSELAEGSERPGPKVCGLPGARMTTDVSHKASPEDGQEGLPQPKKPPLADGSGPGPEPGGKVGLLNHRPVAMDAGDSADQSGERKDKESPRAGPTEPMDTSEATVCHSDLERTPPLLPGRPARDRGPESRPTELSLEELSISARQQPTPLTPAQPAPAPAPATTTGTRAGGHPEEPLSRLSRKRKLLEDTESGKTLLLDAYRVWQQGQKGVAYDLGRVERIMSETYMLIKQVDEEAALEQAVKFCQVHLGAAAQRQASGDTPTTPKHPKDSRENFFPVTVVPTAPDPVPADSVQRPSDAHTKPRPALAAATTIITCPPSASASTLDQSKDPGPPRPHRPEATPSMASLGPEGEELARVAEGTSFPPQEPRHSPQVKMAPTSSPAEPHCWPAEAALGTGAEPTCSQEGKLRPEPRRDGEAQEAASETQPLSSPPTAASSKAPSSGSAQPPEGHPGKPEPSRAKSRPLPNMPKLVIPSAATKFPPEITVTPPTPTLLSPKGSISEETKQKLKSAILSAQSAANVRKESLCQPALEVLETSSQESSLESETDEDDDYMDI

SEQ ID NO: 890711 - protein, 2194 aa, Homo sapiens
MIRIAALNASSTIEDDHEGSFKSHKTQTKEAQEAEAFALYHKALDLQKHDRFEESAKAYHELLEASLLREAVMLDSTDVNLWYKIGHVALRLIRIPLARHAFEEGLRCNPDHWPCLDNLITVLYTLSDYTTCLYFICKALEKDCRYSKGLVLKEKIFEEQPCLRKDSLRMFLKCDMSIHDVSVSAAETQAIVDEALGLRKKRQALIVREKEPDLKLVQPIPFFTWKCLGESLLAMYNHLTTCEPPRPSLGKRIDLSDYQDPSQPLESSMVVTPVNVIQPSTVSTNPAVAVAEPVVSYTSVATTSFPLHSPGLLETGAPVGDISGGDKSKKGVKRKKISEESGETAKRRSARVRNTKCKKEEKVDFQELLMKFLPSRLRKLDPEEEDDSFNNYEVQSEAKLESFPSIGPQRLSFDSATFMESEKQDVHEFLLENLTNGGILELMMRYLKAMGHKFLVRWPPGLAEVVLSVYHSWRRHSTSLPNPLLRDCSNKHIKDMMLMSLSCMELQLDQWLLTKGRSSAVSPRNCPAGMVNGRFGPDFPGTHCLGDLLQLSFASSQRDLFEDGWLEFVVRVYWLKARFLALQGDMEQALENYDICTEMLQSSTAIQVEAGAERRDIVIRLPNLHNDSVVSLEEIDKNLKSLERCQSLEEIQRLYEAGDYKAVVHLLRPTLCTSGFDRAKHLEFMTSIPERPAQLLLLQDSLLRLKDYRQCFECSDVALNEAVQQMVNSGEAAAKEEWVATVTQLLMGIEQALSADSSGSILKVSSSTTGLVRLTNNLIQVIDCSMAVQEEAKEPHVSSVLPWIILHRIIWQEEDTFHSLCHQQQLQNPAEEGMSETPMLPSSLMLLNTAHEYLGRRSWCCNSDGALLRFYVRVLQKELAASTSEDTHPYKEELETALEQCFYCLYSFPSKKSKARYLEEHSAQQVDLIWEDALFMFEYFKPKTLPEFDSYKTSTVSADLANLLKRIATIVPRTERPALSLDKVSAYIEGTSTEVPCLPEGADPSPPVVNELYYLLADYHFKNKEQSKAIKFYMHDICICPNRFDSWAGMALARASRIQDKLNSNELKSDGPIWKHATPVLNCFRRALEIDSSNLSLWIEYGTMSYALHSFASRQLKQWRGELPPELVQQMEGRRDSMLETAKHCFTSAARCEGDGDEEEWLIHYMLGKVAEKQQQPPTVYLLHYRQAGHYLHEEAARYPKKIHYHNPPELAMEALEVYFRLHASILKLLGKPDSGVGAEVLVNFMKEAAEGPFARGEEKNTPKASEKEKACLVDEDSHSSAGTLPGPGASLPSSSGPGLTSPPYTATPIDHDYVKCKKPHQQATPDDRSQDSTAVALSDSSSTQDFFNEPTSLLEGSRKSYTEKRLPILSSQAGATGKDLQGATEERGKNEESLESTEGFRAAEQGVQKPAAETPASACIPGKPSASTPTLWDGKKRGDLPGEPVAFPQGLPAGAEEQRQFLTEQCIASFRLCLSRFPQHYKSLYRLAFLYTYSKTHRNLQWARDVLLGSSIPWQQLQHMPAQGLFCERNKTNFFNGIWRIPVDEIDRPGSFAWHMNRSIVLLLKVLAQLRDHSTLLKVSSMLQRTPDQGKKYLRDADRQVLAQRAFILTVKVLEDTLSELAEGSERPGPKVCGLPGARMTTDVSHKASPEDGQEGLPQPKKPPLADGSGPGPEPGGKVGLLNHRPVAMDAGDSADQSGERKDKESPRAGPTEPMDTSEATVCHSDLERTPPLLPGRPARDRGPESRPTELSLEELSISARQQPTPLTPAQPAPAPAPATTTGTRAGGHPEEPLSRLSRKRKLLEDTESGKTLLLDAYRVWQQGQKGVAYDLGRVERIMSETYMLIKQVDEEAALEQAVKFCQVHLGAAAQRQASGDTPTTPKHPKDSRENFFPVTVVPTAPDPVPADSVQRPSDAHTKPRPALAAATTIITCPPSASASTLDQSKDPGPPRPHRPEATPSMASLGPEGEELARVAEGTSFPPQEPRHSPQVKMAPTSSPAEPHCWPAEAALGTGAEPTCSQEGKLRPEPRRDGEAQEAASETQPLSSPPTAASSKAPSSGSAQPPEGHPGKPEPSRAKSRPLGYVPRTLGRPPRATLGLAHVDYRFKTAGIPASVPTWWCLVATCQGSPRCNGWLAPTVTGGLLSPSFTTGELELVKTLQLLKKQLKWECWIQCMAYAHDGQRLMDLKRFKT

SEQ ID NO: 890712 - protein, 2085 aa, Homo sapiens
MIRIAALNASSTIEDDHEGSFKSHKTQTKEAQEAEAFALYHKALDLQKHDRFEESAKAYHELLEASLLREAVMLDSTDVNLWYKIGHVALRLIRIPLARHAFEEGLRCNPDHWPCLDNLITVLYTLSDYTTCLYFICKALEKDCRYSKGLVLKEKIFEEQPCLRKDSLRMFLKCDMSIHDVSVSAAETQAIVDEALGLRKKRQALIVREKEPDLKLVQPIPFFTWKCLGESLLAMYNHLTTCEPPRPSLGKRIDLSDYQDPSQPLESSMVVTPVNVIQPSTVSTNPAVAVAEPVVSYTSVATTSFPLHSPGLLETGAPVGDISGGDKSKKGVKRKKISEESGETAKRRSARVRNTKCKKEEKVDFQELLMKFLPSRLRKLDPEEEDDSFNNYEVQSEAKLESFPSIGPQRLSFDSATFMESEKQDVHEFLLENLTNGGILELMMRYLKAMGHKFLVRWPPGLAEVVLSVYHSWRRHSTSLPNPLLRDCSNKHIKDMMLMSLSCMELQLDQWLLTKGRSSAVSPRNCPAGMVNGRFGPDFPGTHCLGDLLQLSFASSQRDLFEDGWLEFVVRVYWLKARFLALQGDMEQALENYDICTEMLQSSTAIQVEAGAERRDIVIRLPNLHNDSVVSLEEIDKNLKSLERCQSLEEIQRLYEAGDYKAVVHLLRPTLCTSGFDRAKHLEFMTSIPERPAQLLLLQDSLLRLKDYRQCFECSDVALNEAVQQMVNSGEAAAKEEWVATVTQLLMGIEQALSADSSGSILKVSSSTTGLVRLTNNLIQVIDCSMAVQEEAKEPHVSSVLPWIILHRIIWQEEDTFHSLCHQQQLQNPAEEGMSETPMLPSSLMLLNTAHEYLGRRSWCCNSDGALLRFYVRVLQKELAASTSEDTHPYKEELETALEQCFYCLYSFPSKKSKARYLEEHSAQQVDLIWEDALFMFEYFKPKTLPEFDSYKTSTVSADLANLLKRIATIVPRTERPALSLDKVSAYIEGTSTEVPCLPEGADPSPPVVNELYYLLADYHFKNKEQSKAIKFYMHDICICPNRFDSWAGMALARASRIQDKLNSNELKSDGPIWKHATPVLNCFRRALEIDSSNLSLWIEYGTMSYALHSFASRQLKQWRGELPPELVQQMEGRRDSMLETAKHCFTSAARCEGDGDEEEWLIHYMLGKVAEKQQQPPTVYLLHYRQAGHYLHEEAARYPKKIHYHNPPELAMEALEVYFRLHASILKLLGKPDSGVGAEVLVNFMKEAAEGPFARGEEKNTPKASEKEKACLVDEDSHSSAGTLPGPGASLPSSSGPGLTSPPYTATPIDHDYVKCKKPHQQATPDDRSQDSTAVALSDSSSTQDFFNEPTSLLEGSRKSYTEKRLPILSSQAGATGKDLQGATEERGKNEESLESTEGFRAAEQGVQKPAAETPASACIPGKPSASTPTLWDGKKRGDLPGEPVAFPQGLPAGAEEQRQFLTEQCIASFRLCLSRFPQHYKSLYRLAFLYTYSKTHRNLQWARDVLLGSSIPWQQLQHMPAQGLFCERNKTNFFNGIWRIPVDEIDRPGSFAWHMNRSIVLLLKVLAQLRDHSTLLKVSSMLQRTPDQGKKYLRDADRQVLAQRAFILTVKVLEDTLSELAEGSERPGPKVCGLPGARMTTDVSHKASPEDGQEGLPQPKKPPLADGSGPGPEPGGKVGLLNHRPVAMDAGDSADQSGERKDKESPRAGPTEPMDTSEATVCHSDLERTPPLLPGRPARDRGPESRPTELSLEELSISARQQPTPLTPAQPAPAPAPATTTGTRAGGHPEEPLSRLSRKRKLLEDTESGKTLLLDAYRVWQQGQKGVAYDLGRVERIMSETYMLIKQVDEEAALEQAVKFCQVHLGAAAQRQASGDTPTTPKHPKDSRENFFPVTVVPTAPDPVPADSVQRPSDAHTKPRPALAAATTIITCPPSASASTLDQSKDPGPPRPHRPEATPSMASLGPEGEELARVAEGTSFPPQEPRHSPQVKMAPTSSPAEPHCWPAEAALGTGAEPTCSQEGKLRPEPRRDGDEIPITIFNVLSYLFCFLCLSFLYTILLLCTYILIIPFQACPMSLVCIYK

SEQ ID NO: 890713 - protein, 595 aa, Homo sapiens
MIRIAALNASSTIEDDHEGSFKSHKTQTKEAQEAEAFALYHKALDLQKHDRFEESAKAYHELLEASLLREAVMLDSTDVNLWYKIGHVALRLIRIPLARHAFEEGLRCNPDHWPCLDNLITVLYTLSDYTTCLYFICKALEKDCRYSKGLVLKEKIFEEQPCLRKDSLRMFLKCDMSIHDVSVSAAETQAIVDEALGLRKKRQALIVREKEPDLKLVQPIPFFTWKCLGESLLAMYNHLTTCEPPRPSLGKRIDLSDYQDPSQPLESSMVVTPVNVIQPSTVSTNPAVAVAEPVVSYTSVATTSFPLHSPGLLETGAPVGDISGGDKSKKGVKRKKISEESGETAKRRSARVRNTKCKKEEKVDFQELLMKFLPSRLRKLDPEEEDDSFNNYEVQSEAKLESFPSIGPQRLSFDSATFMESEKQDVHEFLLENLTNGGILELMMRYLKAMGHKFLVRWPPGLAEVVLSVYHSWRRHSTSLPNPLLRDCSNKHIKDMMLMSLSCMELQLDQWLLTKGRSSAVSPRNCPAGMVNGRFGPARPGMPPGQDPGQDQRPTWMPLPTQPPGLPSPPPHGILPVPRSGCPHHMGAQRRRGPP

SEQ ID NO: 890714 - protein, 1246 aa, Homo sapiens
MIRIAALNASSTIEDDHEGSFKSHKTQTKEAQEAEAFALYHKALDLQKHDRFEESAKAYHELLEASLLREAVMLDSTDVNLWYKIGHVALRLIRIPLARHAFEEGLRCNPDHWPCLDNLITVLYTLSDYTTCLYFICKALEKDCRYSKGLVLKEKIFEEQPCLRKDSLRMFLKCDMSIHDVSVSAAETQAIVDEALGLRKKRQALIVREKEPDLKLVQPIPFFTWKCLGESLLAMYNHLTTCEPPRPSLGKRIDLSDYQDPSQPLESSMVVTPVNVIQPSTVSTNPAVAVAEPVVSYTSVATTSFPLHSPGLLETGAPVGDISGGDKSKKGVKRKKISEESGETAKRRSARVRNTKCKKEEKVDFQELLMKFLPSRLRKLDPEEEDDSFNNYEVQSEAKLESFPSIGPQRLSFDSATFMESEKQDVHEFLLENLTNGGILELMMRYLKAMGHKFLVRWPPGLAEVVLSVYHSWRRHSTSLPNPLLRDCSNKHIKDMMLMSLSCMELQLDQWLLTKGRSSAVSPRNCPAGMVNGRFGPDFPGTHCLGDLLQLSFASSQRDLFEDGWLEFVVRVYWLKARFLALQGDMEQALENYDICTEMLQSSTAIQVEAGAERRDIVIRLPNLHNDSVVSLEEIDKNLKSLERCQSLEEIQRLYEAGDYKAVVHLLRPTLCTSGFDRAKHLEFMTSIPERPAQLLLLQDSLLRLKDYRQCFECSDVALNEAVQQMVNSGEAAAKEEWVATVTQLLMGIEQALSADSSGSILKVSSSTTGLVRLTNNLIQVIDCSMAVQEEAKEPHVSSVLPWIILHRIIWQEEDTFHSLCHQQQLQNPAEEGMSETPMLPSSLMLLNTAHEYLGRRSWCCNSDGALLRFYVRVLQKELAASTSEDTHPYKEELETALEQCFYCLYSFPSKKSKARYLEEHSAQQVDLIWEDALFMFEYFKPKTLPEFDSYKTSTVSADLANLLKRIATIVPRTERPALSLDKVSAYIEGTSTEVPCLPEGADPSPPVVNELYYLLADYHFKNKEQSKAIKFYMHDICICPNRFDSWAGMALARASRIQDKLNSNELKSDGPIWKHATPVLNCFRRALEIDSSNLSLWIEYGTMSYALHSFASRQLKQWRGELPPELVQQMEGRRDSMLETAKHCFTSAARCEGDGDEEEWLIHYMLGKVAEKQQQPPTVYLLHYRQAGHYLHEEAARYPKKIHYHNPPELAMEALEVTPCWPRAGKQGRGRLVSLSPWACGSRFQ

SEQ ID NO: 890715 - protein, 1051 aa, Homo sapiens
MIRIAALNASSTIEDDHEGSFKSHKTQTKEAQEAEAFALYHKALDLQKHDRFEESAKAYHELLEASLLREAVMLDSTDVNLWYKIGHVALRLIRIPLARHAFEEGLRCNPDHWPCLDNLITVLYTLSDYTTCLYFICKALEKDCRYSKGLVLKEKIFEEQPCLRKDSLRMFLKCDMSIHDVSVSAAETQAIVDEALGLRKKRQALIVREKEPDLKLVQPIPFFTWKCLGESLLAMYNHLTTCEPPRPSLGKRIDLSDYQDPSQPLESSMVVTPVNVIQPSTVSTNPAVAVAEPVVSYTSVATTSFPLHSPGLLETGAPVGDISGGDKSKKGVKRKKISEESGETAKRRSARVRNTKCKKEEKVDFQELLMKFLPSRLRKLDPEEEDDSFNNYEVQSEAKLESFPSIGPQRLSFDSATFMESEKQDVHEFLLENLTNGGILELMMRYLKAMGHKFLVRWPPGLAEVVLSVYHSWRRHSTSLPNPLLRDCSNKHIKDMMLMSLSCMELQLDQWLLTKGRSSAVSPRNCPAGMVNGRFGPDFPGTHCLGDLLQLSFASSQRDLFEDGWLEFVVRVYWLKARFLALQGDMEQALENYDICTEMLQSSTAIQVEAGAERRDIVIRLPNLHNDSVVSLEEIDKNLKSLERCQSLEEIQRLYEAGDYKAVVHLLRPTLCTSGFDRAKHLEFMTSIPERPAQLLLLQDSLLRLKDYRQCFECSDVALNEAVQQMVNSGEAAAKEEWVATVTQLLMGIEQALSADSSGSILKVSSSTTGLVRLTNNLIQVIDCSMAVQEEAKEPHVSSVLPWIILHRIIWQEEDTFHSLCHQQQLQNPAEEGMSETPMLPSSLMLLNTAHEYLGRRSWCCNSDGALLRFYVRVLQKELAASTSEDTHPYKEELETALEQCFYCLYSFPSKKSKARYLEEHSAQQVDLIWEDALFMFEYFKPKTLPEFDSYKTSTVSADLANLLKRIATIVPRTERPALSLDKVSAYIEGTSTEVPCLPEGADPSPPVVNELYYLLADYHFKNKEQSKAIKFYMHDICICPNRSDMHRWML

SEQ ID NO: 890716 - protein, 467 aa, Homo sapiens
MIRIAALNASSTIEDDHEGSFKSHKTQTKEAQEAEAFALYHKALDLQKHDRFEESAKAYHELLEASLLREAVMLDSTDVNLWYKIGHVALRLIRIPLARHAFEEGLRCNPDHWPCLDNLITVLYTLSDYTTCLYFICKALEKDCRYSKGLVLKEKIFEEQPCLRKDSLRMFLKCDMSIHDVSVSAAETQAIVDEALGLRKKRQALIVREKEPDLKLVQPIPFFTWKCLGESLLAMYNHLTTCEPPRPSLGKRIDLSDYQDPSQPLESSMVVTPVNVIQPSTVSTNPAVAVAEPVVSYTSVATTSFPLHSPGLLETGAPVGDISGGDKSKKGVKRKKISEESGETAKRRSARVRNTKCKKEEKVDFQELLMKFLPSRLRKLDPEEEDDSFNNYEVQSEAKLESFPSIGPQRLSFDSATFMESEKQDVHEFLLENLTNGGILELMMRSAGAQWAELIMVLGIFSLISHQ

SEQ ID NO: 890717 - protein, 79 aa, Homo sapiens
LQGRRRRESPPDVARQGTSQAWNAPWAGPWAGPEAHMDATPHTAPRPAQPTSSWHPPCTQVRLSTPHGSPEEEGPALAM

SEQ ID NO: 890718 - protein, 607 aa, Homo sapiens
NEPPRPWPGARPSSTAQMPRRSRRGIWRIPVDEIDRPGSFAWHMNRSIVLLLKVLAQLRDHSTLLKVSSMLQRTPDQGKKYLRDADRQVLAQRAFILTVKVLEDTLSELAEGSERPGPKVCGLPGARMTTDVSHKASPEDGQEGLPQPKKPPLADGSGPGPEPGGKVGLLNHRPVAMDAGDSADQSGERKDKESPRAGPTEPMDTSEATVCHSDLERTPPLLPGRPARDRGPESRPTELSLEELSISARQQPTPLTPAQPAPAPAPATTTGTRAGGHPEEPLSRLSRKRKLLEDTESGKTLLLDAYRVWQQGQKGVAYDLGRVERIMSETYMLIKQVDEEAALEQAVKFCQVHLGAAAQRQASGDTPTTPKHPKDSRENFFPVTVVPTAPDPVPADSVQRPSDAHTKPRPALAAATTIITCPPSASASTLDQSKDPGPPRPHRPEATPSMASLGPEGKLRPEPRRDGEAQEAASETQPLSSPPTAASSKAPSSGSAQPPEGHPGKPEPSRAKSRPLPNMPKLVIPSAATKFPPEITVTPPTPTLLSPKGSISEETKQKLKSAILSAQSAANVRKESLCQPALEVLETSSQESSLESETDEDDDYMDI

SEQ ID NO: 890719 - protein, 2217 aa, Homo sapiens
AAGGSRGSHRVMSSVRNFKSHKDQTKEAQEAEAFALYHKALDLQKHDRFEESAKAYHELLEASLLREAVSSGDEKEGLKHPGLILKYSTYKNLAQLAAQREDLETAMEFYLEAVMLDSTDVNLWYKIGHVALRLIRIPLARHAFEEGLRCNPDHWPCLDNLITVLYTLSDYTTCLYFICKALEKDCRYSKGLVLKEKIFEEQPCLRKDSLRMFLKCDMSIHDVSVSAAETQAIVDEALGLRKKRQALIVREKEPDLKLVQPIPFFTWKCLGESLLAMYNHLTTCEPPRPSLGKRIDLSDYQDPSQPLESSMVVTPVNVIQPSTVSTNPAVAVAEPVVSYTSVATTSFPLHSPGLLETGAPVGDISGGDKSKKGVKRKKISEESGETAKRRSARVRNTKCKKEEKVDFQELLMKFLPSRLRKLDPEEEDDSFNNYEVQSEAKLESFPSIGPQRLSFDSATFMESEKQDVHEFLLENLTNGGILELMMRYLKAMGHKFLVRWPPGLAEVVLSVYHSWRRHSTSLPNPLLRDCSNKHIKDMMLMSLSCMELQLDQWLLTKGRSSAVSPRNCPAGMVNGRFGPDFPGTHCLGDLLQLSFASSQRDLFEDGWLEFVVRVYWLKARFLALQGDMEQALENYDICTEMLQSSTAIQVEAGAERRDIVIRLPNLHNDSVVSLEEIDKNLKSLERCQSLEEIQRLYEAGDYKAVVHLLRPTLCTSGFDRAKHLEFMTSIPERPAQLLLLQDSLLRLKDYRQCFECSDVALNEAVQQMVNSGEAAAKEEWVATVTQLLMGIEQALSADSSGSILKVSSSTTGLVRLTNNLIQVIDCSMAVQEEAKEPHVSSVLPWIILHRIIWQEEDTFHSLCHQQQLQNPAEEGMSETPMLPSSLMLLNTAHEYLGRRSWCCNSDGALLRFYVRVLQKELAASTSEDTHPYKEELETALEQCFYCLYSFPSKKSKARYLEEHSAQQVDLIWEDALFMFEYFKPKTLPEFDSYKTSTVSADLANLLKRIATIVPRTERPALSLDKVSAYIEGTSTEVPCLPEGADPSPPVVNELYYLLADYHFKNKEQSKAIKFYMHDICICPNRFDSWAGMALARASRIQDKLNSNELKSDGPIWKHATPVLNCFRRALEIDSSNLSLWIEYGTMSYALHSFASRQLKQWRGELPPELVQQMEGRRDSMLETAKHCFTSAARCEGDGDEEEWLIHYMLGKVAEKQQQPPTVYLLHYRQAGHYLHEEAARYPKKIHYHNPPELAMEALEVYFRLHASILKLLGKPDSGVGAEVLVNFMKEAAEGPFARGEEKNTPKASEKEKACLVDEDSHSSAGTLPGPGASLPSSSGPGLTSPPYTATPIDHDYVKCKKPHQQATPDDRSQDSTAVALSDSSSTQDFFNEPTSLLEGSRKSYTEKRLPILSSQAGATGKDLQGATEERGKNEESLESTEGFRAAEQGVQKPAAETPASACIPGKPSASTPTLWDGKKRGDLPGEPVAFPQGLPAGAEEQRQFLTEQCIASFRLCLSRFPQHYKSLYRLAFLYTYSKTHRNLQWARDVLLGSSIPWQQLQHMPAQGLFCERNKTNFFNGIWRIPVDEIDRPGSFAWHMNRSIVLLLKVLAQLRDHSTLLKVSSMLQRTPDQGKKYLRDADRQVLAQRAFILTVKVLEDTLSELAEGSERPGPKVCGLPGARMTTDVSHKASPEDGQEGLPQPKKPPLADGSGPGPEPGGKVGLLNHRPVAMDAGDSADQSGERKDKESPRAGPTEPMDTSEATVCHSDLERTPPLLPGRPARDRGPESRPTELSLEELSISARQQPTPLTPAQPAPAPAPATTTGTRAGGHPEEPLSRLSRKRKLLEDTESGKTLLLDAYRVWQQGQKGVAYDLGRVERIMSETYMLIKQVDEEAALEQAVKFCQVHLGAAAQRQASGDTPTTPKHPKDSRENFFPVTVVPTAPDPVPADSVQRPSDAHTKPRPALAAATTIITCPPSASASTLDQSKDPGPPRPHRPEATPSMASLGPEGEELARVAEGTSFPPQEPRHSPQVKMAPTSSPAEPHCWPAEAALGTGAEPTCSQEGKLRPEPRRDGEAQEAASETQPLSSPPTAASSKAPSSGSAQPPEGHPGKPEPSRAKSRPLPNMPKLVIPSAATKFPPEITVTPPTPTLLSPKGSISEETKQKLKSAILSAQSAANVRKESLCQPALEVLETSSQESSLESETDEDDDYMDI

SEQ ID NO: 890720 - protein, 2006 aa, Homo sapiens
MIRIAALNASSTIEDDHEGSFKSHKTQTKEAQEAEAFALYHKALDLQKHDRFEESAKAYHELLEASLLREAVMLDSTDVNLWYKIGHVALRLIRIPLARHAFEEGLRCNPDHWPCLDNLITVLYTLSDYTTCLYFICKALEKDCRYSKGLVLKEKIFEEQPCLRKDSLRMFLKCDMSIHDVSVSAAETQAIVDEALGLRKKRQALIVREKEPDLKLVQPIPFFTWKCLGESLLAMYNHLTTCEPPRPSLGKRIDLSDYQDPSQPLESSMVVTPVNVIQPSTVSTNPAVAVAEPVVSYTSVATTSFPLHSPGLLETGAPVGDISGGDKSKKGVKRKKISEESGETAKRRSARVRNTKCKKEEKVDFQELLMKFLPSRLRKLDPEEEDDSFNNYEVQSEAKLESFPSIGPQRLSFDSATFMESEKQDVHEFLLENLTNGGILELMMRYLKAMGHKFLVRWPPGLAEVVLSVYHSWRRHSTSLPNPLLRDCSNKHIKDMMLMSLSCMELQLDQWLLTKGRSSAVSPRNCPAGMVNGRFGPDFPGTHCLGDLLQLSFASSQRDLFEDGWLEFVVRVYWLKARFLALQGDMEQALENYDICTEMLQSSTAIQVEAGAERRDIVIRLPNLHNDSVVSLEEIDKNLKSLERCQSLEEIQRLYEAGDYKAVVHLLRPTLCTSGFDRAKHLEFMTSIPERPAQLLLLQDSLLRLKDYRQCFECSDVALNEAVQQMVNSGEAAAKEEWVATVTQLLMGIEQALSADSSGSILKVSSSTTGLVRLTNNLIQVIDCSMAVQEEAKEPHVSSVLPWIILHRIIWQEEDTFHSLCHQQQLQNPAEEGMSETPMLPSSLMLLNTAHEYLGRRSWCCNSDGALLRFYVRVLQKELAASTSEDTHPYKEELETALEQCFYCLYSFPSKKSKARYLEEHSAQQVDLIWEDALFMFEYFKPKTLPEFDSYKTSTVSADLANLLKRIATIVPRTERPALSLDKVSAYIEGTSTEVPCLPEGADPSPPVVNELYYLLADYHFKNKEQSKAIKFYMHDICICPNRFDSWAGMALARASRIQDKLNSNELKSDGPIWKHATPVLNCFRRALEIDSSNLSLWIEYGTMSYALHSFASRQLKQWRGELPPELVQQMEGRRDSMLETAKHCFTSAARCEGDGDEEEWLIHYMLGKVAEKQQQPPTVYLLHYRQAGHYLHEEAARYPKKIHYHNPPELAMEALEVYFRLHASILKLLGKPDSGVGAEVLVNFMKEAAEGPFARGEEKNTPKASEKEKACLVDEDSHSSAGTLPGPGASLPSSSGPGLTSPPYTATPIDHDYVKCKKPHQQATPDDRSQDSTAVALSDSSSTQDFFNEPTSLLEGSRKSYTEKRLPILSSQAGATGKDLQGATEERGKNEESLESTEGFRAAEQGVQKPAAETPASACIPGKPSASTPTLWDGKKRGDLPGEPVAFPQGLPAGAEEQRQFLTEQCIASFRLCLSRFPQHYKSLYRLAFLYTYSKTHRNLQWARDVLLGSSIPWQQLQHMPAQGLFCERNKTNFFNGIWRIPVDEIDRPGSFAWHMNRSIVLLLKVLAQLRDHSTLLKVSSMLQRTPDQGKKYLRDADRQVLAQRAFILTVKVLEDTLSELAEGSERPGPKVCGLPGARMTTDVSHKASPEDGQEGLPQPKKPPLADGSGPGPEPGGKVGLLNHRPVAMDAGDSADQSGERKDKESPRAGPTEPMDTSEATVCHSDLERTPPLLPGRPARDRGPESRPTELSLEELSISARQQPTPLTPAQPAPAPAPATTTGTRAGGHPEEPLSRLSRKRKLLEDTESGKTLLLDAYRVWQQGQKGVAYDLGRVERIMSETYMLIKQVDEEAALEQAVKFCQVHLGAAAQRQASGDTPTTPKHPKDSRENFFPVTVVPTAPDPVPADSVQRPSDAHTKPRPALAAATTIITCPPSASASTLDQSKDPGPPRPHRPEATPSMASLGPGPPLLLPPCLKDPACFLAADPALAHSLCHPWRLTCLPS

SEQ ID NO: 890721 - protein, 678 aa, Homo sapiens
PRAGSWLVGACAARKRKPPARATLRRKAPTRSCAVPLLGMGIWRIPVDEIDRPGSFAWHMNRSIVLLLKVLAQLRDHSTLLKVSSMLQRTPDQGKKYLRDADRQVLAQRAFILTVKVLEDTLSELAEGSERPGPKVCGLPGARMTTDVSHKASPEDGQEGLPQPKKPPLADGSGPGPEPGGKVGLLNHRPVAMDAGDSADQSGERKDKESPRAGPTEPMDTSEATVCHSDLERTPPLLPGRPARDRGPESRPTELSLEELSISARQQPTPLTPAQPAPAPAPATTTGTRAGGHPEEPLSRLSRKRKLLEDTESGKTLLLDAYRVWQQGQKGVAYDLGRVERIMSETYMLIKQVDEEAALEQAVKFCQVHLGAAAQRQASGDTPTTPKHPKDSRENFFPVTVVPTAPDPVPADSVQRPSDAHTKPRPALAAATTIITCPPSASASTLDQSKDPGPPRPHRPEATPSMASLGPEGEELARVAEGTSFPPQEPRHSPQVKMAPTSSPAEPHCWPAEAALGTGAEPTCSQEGKLRPEPRRDGEAQEAASETQPLSSPPTAASSKAPSSGSAQPPEGHPGKPEPSRAKSRPLPNMPKLVIPSAATKFPPEITVTPPTPTLLSPKGSISEETKQKLKSAILSAQSAANVRKESLCQPALEVLETSSQESSLESETDEDDDYMDI

SEQ ID NO: 890722 - protein, 2175 aa, Homo sapiens; identical to SEQ ID NO: 890705

SEQ ID NO: 890723 - protein, 1828 aa, Homo sapiens
MIRIAALNASSTIEDDHEGSFKSHKTQTKEAQEAEAFALYHKALDLQKHDRFEESAKAYHELLEASLLREAVMLDSTDVNLWYKIGHVALRLIRIPLARHAFEEGLRCNPDHWPCLDNLITVLYTLSDYTTCLYFICKALEKDCRYSKGLVLKEKIFEEQPCLRKDSLRMFLKCDMSIHDVSVSAAETQAIVDEALGLRKKRQALIVREKEPDLKLVQPIPFFTWKCLGESLLAMYNHLTTCEPPRPSLGKRIDLSDYQDPSQPLESSMVVTPVNVIQPSTVSTNPAVAVAEPVVSYTSVATTSFPLHSPGLLETGAPVGDISGGDKSKKGVKRKKISEESGETAKRRSARVRNTKCKKEEKVDFQELLMKFLPSRLRKLDPEEEDDSFNNYEVQSEAKLESFPSIGPQRLSFDSATFMESEKQDVHEFLLENLTNGGILELMMRYLKAMGHKFLVRWPPGLAEVVLSVYHSWRRHSTSLPNPLLRDCSNKHIKDMMLMSLSCMELQLDQWLLTKGRSSAVSPRNCPAGMVNGRFGPDFPGTHCLGDLLQLSFASSQRDLFEDGWLEFVVRVYWLKARFLALQGDMEQALENYDICTEMLQSSTAIQVEAGAERRDIVIRLPNLHNDSVVSLEEIDKNLKSLERCQSLEEIQRLYEAGDYKAVVHLLRPTLCTSGFDRAKHLEFMTSIPERPAQLLLLQDSLLRLKDYRQCFECSDVALNEAVQQMVNSGEAAAKEEWVATVTQLLMGIEQALSADSSGSILKVSSSTTGLVRLTNNLIQVIDCSMAVQEEAKEPHVSSVLPWIILHRIIWQEEDTFHSLCHQQQLQNPAEEGMSETPMLPSSLMLLNTAHEYLGRRSWCCNSDGALLRFYVRVLQKELAASTSEDTHPYKEELETALEQCFYCLYSFPSKKSKARYLEEHSAQQVDLIWEDALFMFEYFKPKTLPEFDSYKTSTVSADLANLLKRIATIVPRTERPALSLDKVSAYIEGTSTEVPCLPEGADPSPPVVNELYYLLADYHFKNKEQSKAIKFYMHDICICPNRFDSWAGMALARASRIQDKLNSNELKSDGPIWKHATPVLNCFRRALEIDSSNLSLWIEYGTMSYALHSFASRQLKQWRGELPPELVQQMEGRRDSMLETAKHCFTSAARCEGDGDEEEWLIHYMLGKVAEKQQQPPTVYLLHYRQAGHYLHEEAARYPKKIHYHNPPELAMEALEVYFRLHASILKLLGKPDSGVGAEVLVNFMKEAAEGPFARGEEKNTPKASEKEKACLVDEDSHSSAGTLPGPGASLPSSSGPGLTSPPYTATPIDHDYVKCKKPHQQATPDDRSQDSTAVALSDSSSTQDFFNEPTSLLEGSRKSYTEKRLPILSSQAGATGKDLQGATEERGKNEESLESTEGFRAAEQGVQKPAAETPASACIPGKPSASTPTLWDGKKRGDLPGEPVAFPQGLPAGAEEQRQFLTEQCIASFRLCLSRFPQHYKSLYRLAFLYTYSKTHRNLQWARDVLLGSSIPWQQLQHMPAQGLFCERNKTNFFNGIWRIPVDEIDRPGSFAWHMNRSIVLLLKVLAQLRDHSTLLKVSSMLQRTPDQGKKYLRDADRQVLAQRAFILTVKVLEDTLSELAEGSERPGPKVCGLPGARMTTDVSHKASPEDGQEGLPQPKKPPLADGSGPGPEPGGKVGLLNHRPVAMDAGDSADQSGERKDKESPRAGPTEPMDTSEATVCHSDLERTPPLLPGRPARDRGPESRPTELSLEELSISARQQPTPLTPAQPAPAPAPATTTGTRAGGHPEEPLSRLSRKRKLLEDTESGKTLLLDAYRVIHPSTPG

SEQ ID NO: 890724 - protein, 1656 aa, Homo sapiens
MIRIAALNASSTIEDDHEGSFKSHKTQTKEAQEAEAFALYHKALDLQKHDRFEESAKAYHELLEASLLREAVMLDSTDVNLWYKIGHVALRLIRIPLARHAFEEGLRCNPDHWPCLDNLITVLYTLSDYTTCLYFICKALEKDCRYSKGLVLKEKIFEEQPCLRKDSLRMFLKCDMSIHDVSVSAAETQAIVDEALGLRKKRQALIVREKEPDLKLVQPIPFFTWKCLGESLLAMYNHLTTCEPPRPSLGKRIDLSDYQDPSQPLESSMVVTPVNVIQPSTVSTNPAVAVAEPVVSYTSVATTSFPLHSPGLLETGAPVGDISGGDKSKKGVKRKKISEESGETAKRRSARVRNTKCKKEEKVDFQELLMKFLPSRLRKLDPEEEDDSFNNYEVQSEAKLESFPSIGPQRLSFDSATFMESEKQDVHEFLLENLTNGGILELMMRYLKAMGHKFLVRWPPGLAEVVLSVYHSWRRHSTSLPNPLLRDCSNKHIKDMMLMSLSCMELQLDQWLLTKGRSSAVSPRNCPAGMVNGRFGPDFPGTHCLGDLLQLSFASSQRDLFEDGWLEFVVRVYWLKARFLALQGDMEQALENYDICTEMLQSSTAIQVEAGAERRDIVIRLPNLHNDSVVSLEEIDKNLKSLERCQSLEEIQRLYEAGDYKAVVHLLRPTLCTSGFDRAKHLEFMTSIPERPAQLLLLQDSLLRLKDYRQCFECSDVALNEAVQQMVNSGEAAAKEEWVATVTQLLMGIEQALSADSSGSILKVSSSTTGLVRLTNNLIQVIDCSMAVQEEAKEPHVSSVLPWIILHRIIWQEEDTFHSLCHQQQLQNPAEEGMSETPMLPSSLMLLNTAHEYLGRRSWCCNSDGALLRFYVRVLQKELAASTSEDTHPYKEELETALEQCFYCLYSFPSKKSKARYLEEHSAQQVDLIWEDALFMFEYFKPKTLPEFDSYKTSTVSADLANLLKRIATIVPRTERPALSLDKVSAYIEGTSTEVPCLPEGADPSPPVVNELYYLLADYHFKNKEQSKAIKFYMHDICICPNRFDSWAGMALARASRIQDKLNSNELKSDGPIWKHATPVLNCFRRALEIDSSNLSLWIEYGTMSYALHSFASRQLKQWRGELPPELVQQMEGRRDSMLETAKHCFTSAARCEGDGDEEEWLIHYMLGKVAEKQQQPPTVYLLHYRQAGHYLHEEAARYPKKIHYHNPPELAMEALEVYFRLHASILKLLGKPDSGVGAEVLVNFMKEAAEGPFARGEEKNTPKASEKEKACLVDEDSHSSAGTLPGPGASLPSSSGPGLTSPPYTATPIDHDYVKCKKPHQQATPDDRSQDSTAVALSDSSSTQDFFNEPTSLLEGSRKSYTEKRLPILSSQAGATGKDLQGATEERGKNEESLESTEGFRAAEQGVQKPAAETPASACIPGKPSASTPTLWDGKKRGDLPGEPVAFPQGLPAGAEEQRQFLTEQCIASFRLCLSRFPQHYKSLYRLAFLYTYSKTHRNLQWARDVLLGSSIPWQQLQHMPAQGLFCERNKTNFFNGIWRIPVDEIDRPGSFAWHMNRSIVLLLKVLAQLRDHSTLLKVSSMLQRTPDQGKKYLRDADRQVLAQRAFILTVKVLEDTLSELAEGSERPGPKVCGLPGARMTTDVSHKASPEDGPP

SEQ ID NO: 890725 - protein, 1144 aa, Homo sapiens
MIRIAALNASSTIEDDHEGSFKSHKTQTKEAQEAEAFALYHKALDLQKHDRFEESAKAYHELLEASLLREAVMLDSTDVNLWYKIGHVALRLIRIPLARHAFEEGLRCNPDHWPCLDNLITVLYTLSDYTTCLYFICKALEKDCRYSKGLVLKEKIFEEQPCLRKDSLRMFLKCDMSIHDVSVSAAETQAIVDEALGLRKKRQALIVREKEPDLKLVQPIPFFTWKCLGESLLAMYNHLTTCEPPRPSLGKRIDLSDYQDPSQPLESSMVVTPVNVIQPSTVSTNPAVAVAEPVVSYTSVATTSFPLHSPGLLETGAPVGDISGGDKSKKGVKRKKISEESGETAKRRSARVRNTKCKKEEKVDFQELLMKFLPSRLRKLDPEEEDDSFNNYEVQSEAKLESFPSIGPQRLSFDSATFMESEKQDVHEFLLENLTNGGILELMMRYLKAMGHKFLVRWPPGLAEVVLSVYHSWRRHSTSLPNPLLRDCSNKHIKDMMLMSLSCMELQLDQWLLTKGRSSAVSPRNCPAGMVNGRFGPDFPGTHCLGDLLQLSFASSQRDLFEDGWLEFVVRVYWLKARFLALQGDMEQALENYDICTEMLQSSTAIQVEAGAERRDIVIRLPNLHNDSVVSLEEIDKNLKSLERCQSLEEIQRLYEAGDYKAVVHLLRPTLCTSGFDRAKHLEFMTSIPERPAQLLLLQDSLLRLKDYRQCFECSDVALNEAVQQMVNSGEAAAKEEWVATVTQLLMGIEQALSADSSGSILKVSSSTTGLVRLTNNLIQVIDCSMAVQEEAKEPHVSSVLPWIILHRIIWQEEDTFHSLCHQQQLQNPAEEGMSETPMLPSSLMLLNTAHEYLGRRSWCCNSDGALLRFYVRVLQKELAASTSEDTHPYKEELETALEQCFYCLYSFPSKKSKARYLEEHSAQQVDLIWEDALFMFEYFKPKTLPEFDSYKTSTVSADLANLLKRIATIVPRTERPALSLDKVSAYIEGTSTEVPCLPEGADPSPPVVNELYYLLADYHFKNKEQSKAIKFYMHDICICPNRFDSWAGMALARASRIQDKLNSNELKSDGPIWKHATPVLNCFRRALEIDSSNLSLWIEYGTMSYALHSFASRQLKQWRGELPPELVQQWPQSWAGWGLKLLP

SEQ ID NO: 890726 - protein, 415 aa, Homo sapiens
MIRIAALNASSTIEDDHEGSFKSHKTQTKEAQEAEAFALYHKALDLQKHDRFEESAKAYHELLEASLLREAVMLDSTDVNLWYKIGHVALRLIRIPLARHAFEEGLRCNPDHWPCLDNLITVLYTLSDYTTCLYFICKALEKDCRYSKGLVLKEKIFEEQPCLRKDSLRMFLKCDMSIHDVSVSAAETQAIVDEALGLRKKRQALIVREKEPDLKLVQPIPFFTWKCLGESLLAMYNHLTTCEPPRPSLGKRIDLSDYQDPSQPLESSMVVTPVNVIQPSTVSTNPAVAVAEPVVSYTSVATTSFPLHSPGLLETGAPVGDISGGDKSKKGVKRKKISEESGETAKRRSARVRNTKCKKEEKVDFQELLMKFLPSRYCVFFLIVRNKPTKLQHTPSITFLIPLPPSSLVSSSVFP

SEQ ID NO: 890727 - protein, 115 aa, Homo sapiens
TLETDLINVGTVGRCSFFLVRYEHMKELTLERNPMNVNNVEKPLVVLVTFGYIKELTLGRKPYECKECGKAFIYPTSFQGHMRMHTGEKPYKCKECGKAFSLHSSFRETYKNSQL

SEQ ID NO: 890728 - protein, 115 aa, Homo sapiens; identical to SEQ ID NO: 890727

SEQ ID NO: 890729 - protein, 115 aa, Homo sapiens; identical to SEQ ID NO: 890727

SEQ ID NO: 890730 - protein, 115 aa, Homo sapiens; identical to SEQ ID NO: 890727

SEQ ID NO: 890731 - protein, 145 aa, Homo sapiens [sequence omitted]

SEQ ID NO: 890732 - protein, 145 aa, Homo sapiens [sequence omitted]

SEQ ID NO: 890733 - protein, 145 aa, Homo sapiens [sequence omitted]

SEQ ID NO: 890734 - protein, 145 aa, Homo sapiens [sequence omitted]

SEQ ID NO: 890735 - protein, 145 aa, Homo sapiens [sequence omitted]

SEQ ID NO: 890736 - protein, 145 aa, Homo sapiens [sequence omitted]

SEQ ID NO: 890737 - protein, 145 aa, Homo sapiens [sequence omitted]

SEQ ID NO: 890738 - protein, 130 aa, Homo sapiens
MWQKYAGSRRSMPLGARILFHGVFYAGGFAIVYYLIQKFHSRALYYKLAVEQLQSHPEAQEALGPPLNIHYLKLIDRENFVDIVDAKLKIPVSGSKSEGLLYVHSSRGGPFQRAQGWSADSCVQAQWGKR

SEQ ID NO: 890739 - protein, 145 aa, Homo sapiens [sequence omitted]

SEQ ID NO: 890740 - protein, 182 aa, Homo sapiens
MWQKYAGSRRSMPLGARILFHGVFYAGGFAIVYYLIQKFHSRALYYKLAVEQLQSHPEAQEALGPPLNIHYLKLIDRENFVDIVDAKLKIPVSGSKSEGLLYVHSSRGGPFQRWHLDEVFLELKDGQQIPVFKLSGENGDEVIISTIWPLGWWPISVTDTPATQFSSHQWDDGMCQHMVILV

SEQ ID NO: 890741 - protein, 145 aa, Homo sapiens [sequence omitted]

SEQ ID NO: 890742 - protein, 215 aa, Homo sapiens
  misc_feature (32)..(32): Xaa can be any naturally occurring amino acid
LVIDVGAWIRLPIIETAQGGNLNVTDTESMMXVLACQLSGFLIKHGCPNADSRISELLRPSQDFQESCAMMWQKYAGSRRSMPLGARILFHGVFYAGGFAIVYYLIQKFHSRALYYKLAVEQLQSHPEAQEALGPPLNIHYLKLIDRENFVDIVDAKLKIPVSGSKSEGLLYVHSSRGGPFQRWHLDEVFLELKDGQQIPVFKLSGENGDEVKKE

SEQ ID NO: 890743 - protein, 145 aa, Homo sapiens [sequence omitted]

SEQ ID NO: 890744 - protein, 145 aa, Homo sapiens [sequence omitted]

SEQ ID NO: 890745 - protein, 145 aa, Homo sapiens [sequence omitted]

SEQ ID NO: 890746 - protein, 114 aa, Homo sapiens
MWQKYAGSRRSMPLGARILFHGVFYAGGFAIVYYLIQKFHSRALYYKLAVEQLQSHPEAQEALGPPLNIHYLKLIDRENFVDIVDAKECAFPANRRLVPAEGEESLLSPGKSWS

SEQ ID NO: 890747 - protein, 145 aa, Homo sapiens [sequence omitted]

SEQ ID NO: 890748 - protein, 145 aa, Homo sapiens [sequence omitted]

SEQ ID NO: 890749 - protein, 68 aa, Homo sapiens
TGDRRFYWMLMGVGKVPRSMGAESVSKVRKASAIFWKPLRHESQVEEEANAQAEAQKKKDEAEVQVNR

SEQ ID NO: 890750 - protein, 68 aa, Homo sapiens; identical to SEQ ID NO: 890749

SEQ ID NO: 890751 - protein, 68 aa, Homo sapiens; identical to SEQ ID NO: 890749

SEQ ID NO: 890752 - protein, 68 aa, Homo sapiens; identical to SEQ ID NO: 890749

SEQ ID NO: 890753 - protein, 68 aa, Homo sapiens; identical to SEQ ID NO: 890749

SEQ ID NO: 890754 - protein, 258 aa, Homo sapiens
MPPQQGDPAFPDRCEAPPVPPRRERGGRGGRGPGEPGGRGRAGGAEGRGVKCVLVGDGAVGKTSLVVSYTTNGYPTEYIPTAFDNFSAVVSVDGRPVRLQLCDTAGQDEFDKLRPLCYTNTDIFLLCFSVVSPSSFQNVSEKWVPEIRCHCPKAPIILVGTQSDLREDVKVLIELDKCKEKPVPEEAAKLCAEEIKAASYIECSALTQKNLKEVFDAAIVAGIQYSDTQQQPKKSKSRTPDKMKNLSKSWWKKYCCFV

SEQ ID NO: 890755 - protein, 258 aa, Homo sapiens; identical to SEQ ID NO: 890754

SEQ ID NO: 890756 - protein, 168 aa, Homo sapiens
GPLSSNSAGQSGWRRRSAEPRPSLAAFVYWPCGPEPPLSRAGDAPAAVGDSSSLPQPSGAEGRSGRALLARDRKPALRGSMPPQQGDPAFPDRCEAPPVPPRRERGGRGGRGPGEPGGRGRAGGAEGRGVKCVLVGDGAVGKTSLVVSYTTNGYPTEYIPTAFDNFSG

SEQ ID NO: 890757 - protein, 258 aa, Homo sapiens; identical to SEQ ID NO: 890754

SEQ ID NO: 890758 - protein, 258 aa, Homo sapiens; identical to SEQ ID NO: 890754

SEQ ID NO: 890759 - protein, 258 aa, Homo sapiens; identical to SEQ ID NO: 890754

SEQ ID NO: 890760 - protein, 258 aa, Homo sapiens; identical to SEQ ID NO: 890754

SEQ ID NO: 890761 - protein, 258 aa, Homo sapiens; identical to SEQ ID NO: 890754

SEQ ID NO: 890762 - protein, 567 aa, Homo sapiens
QKASRQEEPDSLSYYCAAETNGVGAASGTPPSKATLEGKVASPKHCVLARPKGTPPLPPVRKSSLDQKNRASPQHSASGSGTSSPLNQPAAFPAGLPDEPSGKTKDASSSSKLFSAKLEQLASRSNSLGRATVSHYECLSPERAESLSSVSSRLHAGKDGTMPRAGRSLGRSAGTSPPSSGASPKAGQSKISAVSRLLLASPRARGPSASTTKTLSFSTKSLPQAVGQGSSSPPGGKHTPWSTQSLSRNRSSGLASKLPLRAVSGRISELLQGGAGARGLQLRAGPEAEARGGALAEDEPAAAHLLPSPYSKITPPRRPHRCSSGHGSDNSSVLSGELPPAMGKTALFYHSGGSSGYESVMRDSEATGSASSAQDSTSENSSSVGGRCRSLKTPKKRSNPGSQRRRLIPALSLDTSSPVRKPPNSTGVRWVDGPLRSSPRGLGEPFEIKVYEIDDVERLQRRRGGASKEAMCFNAKLKILEHRQQRIAEVRAKYEWLMKELEATKQYLMLDPNKWLSEFDLEQVWELDSLEYLEALECVTERLESRVNFCKAHLMMITCFDITSRRR

SEQ ID NO: 890763 - protein, 437 aa, Homo sapiens
MQLPRWWELGDPCAWTGQGRGTRRMSPATTGTFLLTVYSIFSKVHSDRNVYPSAGVLFVHVLEREYFKGEFPPYPKPGEISNDPITFNTNLMGYPDRPGWLRYIQRTPYSDGVLYGSPTAENVGKPTIIEITAYNRRTFETARHNLIINIMSAEDFPLPYQAEFFIKNMNVEEMLASEVLGDFLGAVKNVWQPERLNAINITSALDRGGRVPLPINDLKEGVYVMVGADVPFSSCLREVENPQNQLRCSQEMEPVITCDKKFRTQFYIDWCKISLVDKTKQVSTYQEVIRGEGILPDGGEYKPPSDSLKSRDYYTDFLITLAVPSAVALVLFLILAYIMCCRREGVEKRNMQTPDIQLVHHSAIQKSTKELRDMSKNREIAWPLSTLPVFHPVTGEIIPPLHTDNYDSTNMPLMQTQQNLPHQTQIPQQQTTGKWYP

SEQ ID NO: 890764 - protein, 239 aa, Homo sapiens
SRLEIPSVYLSRVHVPHYDLKEGVYVMVGADVPFSSCLREVENPQNQLRCSQEMEPVITCDKKFRTQFYIDWCKISLVDKTKQVSTYQEVIRGEGILPDGGEYKPPSDSLKSRDYYTDFLITLAVPSAVALVLFLILAYIMCCRREGVEKRNMQTPDIQLVHHSAIQKSTKELRDMSKNREIAWPLSTLPVFHPVTGEIIPPLHTDNYDSTNMPLMQTQQNLPHQTQIPQQQTTGKWYP

SEQ ID NO: 890765 - protein, 437 aa, Homo sapiens; identical to SEQ ID NO: 890763

SEQ ID NO: 890766 - protein, 462 aa, Homo sapiens
MQLPRWWELGDPCAWTGQGRGTRRMSPATTGTFLLTVYSIFSKVHSDRNVYPSAGVLFVHVLEREYFKGEFPPYPKPGEISNDPITFNTNLMGYPDRPGWLRYIQRTPYSDGVLYGSPTAENVGKPTIIEITAYNRRTFETARHNLIINIMSAEDFPLPYQAEFFIKNMNVEEMLASEVLGDFLGAVKNVWQPERLNAINITSALDRGGRVPLPINDLKEGVYVMVGADVPFSSCLREVENPQNQLRCSQEMEPVITCDKKFRTQFYIDWCKISLVDKTKQVSTYQEVIRGEGILPDGGEYKPPSDSLKSRDYYTDFLITLAVPSAVALVLFLILAYIMCCRREGVEKRNMQTPDIQLVHHSAIQKSTKELRDMSKNREIAWPLSTLPVFHPVTGEIIPPLHTDNYDSTNMPLMQTQQWSFAPVAQAGVQWSDLGSLQPPPPRNLPHQTQIPQQQTTGKWYP

SEQ ID NO: 890767 - protein, 460 aa, Homo sapiens
MQLPRWWELGDPCAWTGQGRGTRRMSPATTGTFLLTVYSIFSKVHSDRNVYPSAGVLFVHVLEREYFKGEFPPYPKPGEISNDPITFNTNLMGYPDRPGWLRYIQRTPYSDGVLYGSPTAENVGKPTIIEITAYNRRTFETARHNLIINIMSAEDFPLPYQAEFFIKNMNVEEMLASEVLGDFLGAVKNVWQPERLNAINITSALDRGGRVPLPINDLKEGVYVMVGADVPFSSCLREVENPQNQLRCSQEMEPVITCDKKFRTQFYIDWCKISLVDKTKQVSTYQEVIRGEGILPDGGEYKPPSDSLKSRDYYTDFLITLAVPSAVALVLFLILAYIMCCRREGVEKRNMQTPDIQLVHHSAIQKSTKELRDMSKNREIAWPLSTLPVFHPVTGEIIPPLHTDNYDSTNMPLMQTQQNLPHQTQIPQQQTTGDFRLTTFQRFEVNGIPEERKLTEAMNL

SEQ ID NO: 890768 - protein, 346 aa, Homo sapiens
MQLPRWWELGDPCAWTGQGRGTRRMSPATTGTFLLTVYSIFSKVHSDRNVYPSAGVLFVHVLEREYFKGEFPPYPKPGEISNDPITFNTNLMGYPDRPGWLRYIQRTPYSDGVLYGSPTAENVGKPTIIEITAYNRRTFETARHNLIINIMSAEDFPLPYQAEFFIKNMNVEEMLASEVLGDFLGAVKNVWQPERLNAINITSALDRGGRVPLPINDLKEGVYVMVGADVPFSSCLREVENPQNQLRCSQEMEPVITCDKKFRTQFYIDWCKISLVDKTKQVSTYQEVIRGEGILPDGGEYKPPSDSLKSRDYYTDFLITLAVPSAVALVLFLILAYIMCCRREGV

SEQ ID NO: 890769 - protein, 408 aa, Homo sapiens
MAAGMKDVYSIFSKVHSDRNVYPSAGVLFVHVLEREYFKGEFPPYPKPGEISNDPITFNTNLMGYPDRPGWLRYIQRTPYSDGVLYGSPTAENVGKPTIIEITAYNRRTFETARHNLIINIMSAEDFPLPYQAEFFIKNMNVEEMLASEVLGDFLGAVKNVWQPERLNAINITSALDRGGRVPLPINDLKEGVYVMVGADVPFSSCLREVENPQNQLRCSQEMEPVITCDKKFRTQFYIDWCKISLVDKTKQVSTYQEVIRGEGILPDGGEYKPPSDSLKSRDYYTDFLITLAVPSAVALVLFLILAYIMCCRREGVEKRNMQTPDIQLVHHSAIQKSTKELRDMSKNREIAWPLSTLPVFHPVTGEIIPPLHTDNYDSTNMPLMQTQQNLPHQTQIPQQQTTGKWYP

SEQ ID NO: 890770 - protein, 437 aa, Homo sapiens; identical to SEQ ID NO: 890763

SEQ ID NO: 890771 - protein, 428 aa, Homo sapiens
MQLPRWWELGDPCAWTGQGRGTRRMSPATTGTFLLTVYSIFSKVHSDRNVYPSAGVLFVHVLEREYFKGEFPPYPKPGEISNDPITFNTNLMGYPDRPGWLRYIQRTPYSDGVLYGSPTAENVGKPTIIEITAYNRRTFETARHNLIINIMSAEDFPLPYQAEFFIKNMNVEEMLASEVLGDFLGAVKNVWQPERLNAINITSALDRGGRVPLPINDLKEGVYVMVGADVPFSSCLREVENPQNQLRCSQEMEPVITCDKKFRTQFYIDWCKISLVDKTKQVSTYQEVIRGEGILPDGGEYKPPSDSLKSRDYYTDFLITLAVPSAVALVLFLILAYIMCCRREGVIQLVHHSAIQKSTKELRDMSKNREIAWPLSTLPVFHPVTGEIIPPLHTDNYDSTNMPLMQTQQNLPHQTQIPQQQTTGKWYP

SEQ ID NO: 890772 - protein, 355 aa, Homo sapiens
MQLPRWWELGDPCAWTGQGRGTRRMSPATTGTFLLTVYSIFSKVHSDRNVYPSAGVLFVHVLEREYFKGEFPPYPKPGEISNDPITFNTNLMGYPDRPGWLRYIQRTPYSDGVLYGSPTAENVGKPTIIEITAYNRRTFETARHNLIINIMSAEDFPLPYQAEFFIKNMNVEEMLASEVLGDFLGAVKNVWQPERLNAINITSALDRGGRVPLPINDLKEGVYVMVGADVPFSSCLREVENPQNQLRCSQEMEPVITCDKKFRTQFYIDWCKISLVDKTKQVSTYQEVIRGEGILPDGGEYKPPSDSLKSRDYYTDFLITLAVPSAVALVLFLILAYIMCCRREGVEKRNMQTPE

SEQ ID NO: 890773 - protein, 349 aa, Homo sapiens
  misc_feature (331)..(331): Xaa can be any naturally occurring amino acid
  misc_feature (341)..(341): Xaa can be any naturally occurring amino acid
MQLPRWWELGDPCAWTGQGRGTRRMSPATTGTFLLTVYSIFSKVHSDRNVYPSAGVLFVHVLEREYFKGEFPPYPKPGEISNDPITFNTNLMGYPDRPGWLRYIQRTPYSDGVLYGSPTAENVGKPTIIEITAYNRRTFETARHNLIINIMSAEDFPLPYQAEFFIKNMNVEEMLASEVLGDFLGAVKNVWQPERLNAINITSALDRGGRVPLPINDLKEGVYVMVGADVPFSSCLREVENPQNQLRCSQEMEPVITCDKKFRTQFYIDWCKISLVDKTKQVSTYQEVIRGEGILPDGGEYKPPSDSLKSRDYYTDFLITLAVPSGGGGGXGGKRAGAGAXGRGGGGGG

SEQ ID NO: 890774 - protein, 1290 aa, Homo sapiens
EWSPCSKTCHDMVSPAGTRVRTRTIRQFPIGSEKECPEFEEKEPCLSQGDGVVPCATYGWRTTEWTECRVDPLLSQQDKRRGNQTALCGGGIQTREVYCVQANENLLSQLSTHKNKEASKPMDLKLCTGPIPNTTQLCHIPCPTECEVSPWSAWGPCTYENCNDQQGKKGFKLRKRRITNEPTGGSGVTGNCPHLLEAIPCEEPACYDWKAVRLGDCEPDNGKECGPGTQVQEVVCINSDGEEVDRQLCRDAIFPIPVACDAPCPKDCVLSTWSTWSSCSHTCSGKTTEGKQIRARSILAYAGEEGGIRCPNSSALQEVRSCNEHPCTVYHWQTGPWGQCIEDTSVSSFNTTTTWNGEASCSVGMQTRKVICVRVNVGQVGPKKCPESLRPETVRPCLLPCKKDCIVTPYSDWTSCPSSCKEGDSSIRKQSRHRVIIQLPANGGRDCTDPLYEEKACEAPQACQSYRWKTHKWRRCQLVPWSVQQDSPGAQEGCGPGRQARAITCRKQDGGQAGIHECLQYAGPVPALTQACQIPCQDDCQLTSWSKFSSCNGDCGAVRTRKRTLVGKSKKKEKCKNSHLYPLIETQYCPCDKYNAQPVGNWSDCILPEGKVEVLLGMKVQGDIKECGQGYRYQAMACYDQNGRLVETSRCNSHGYIEEACIIPCPSDCKLSEWSNWSRCSKSCGSGVKVRSKWLREKPYNGGRPCPKLDHVNQAQVYEVVPCHSDCNQYLWVTEPWSICKVTFVNMRENCGEGVQTRKVRCMQNTADGPSEHVEDYLCDPEEMPLGSRVCKLPCPEDCVISEWGPWTQCVLPCNQSSFRQRSADPIRQPADEGRSCPNAVEKEPCNLNKNCYHYDYNVTDWSTCQLSEKAVCGNGIKTRMLDCVRSDGKSVDLKYCEALGLEKNWQMNTSCMVECPVNCQLSDWSPWSECSQTCGLTGKMIRRRTVTQPFQGDGRPCPSLMDQSKPCPVKPCYRWQYGQWSPCQVQEAQCGEGTRTRNISCVVSDGSADDFSKVVDEEFCADIELIIDGNKNMVLEESCSQPCPGDCYLKDWSSWSLCQLTCVNGEDLGFGGIQVRSRPVIIQELENQHLCPEQMLETKSCYDGQCYEYKWMASAWKGSSRTVWCQRSDGINVTGGCLVMSQPDADRSCNPPCSQPHSYCSETKTCHCEEGYTEVMSSNSTLEQCTLIPVVVLPTMEDKRGDVKTSRAVHPTQPSSNPAGRGRTWFLQPFGPDGRLKTWVYGVAAGAFVLLIFIVSMIYLACKKPKKPQRRQNNRLKPLTLAYDGDADM

SEQ ID NO: 890775 - protein, 81 aa, Homo sapiens
GQLDSTEEVDSTEDGGQHRGGGQHRGGGQQEQEEWKKARRLSKQGRQCLPPQWPYQRGYRFLPATWIPEVALVSAPSKPSS

SEQ ID NO: 890776 - protein, 677 aa, Homo sapiens
MSKSRKSGRKPEDSANKVDSVYHHSGHTKEATDSFLLPGSLKLPWSLHLLNLVLKSFPLHELSQSPPINSQCKLLLLVDKKILTDLPYKCYCQDNMRTHNSKWSLSVSYGYFAQGSMASWCRLMGLKPSSLIFQASVLPIPLNYLSGLFFEILTLQVHRTTFTWENKNKGCSAFFRNFFEKGDGNACTPKSRPTQWLIEMNNKGKTVLGFPEYLVLKLWHKQPPVRASLLPGRGVETRGRVCSLALKAEGDNLEAVQTPWPLELACLFEDAGSDANRRPSGKLLNLTCLSFLIWKMRTLGLGLLEKLNELRQVPGTQSLLCVFIIMSSAGRRSSFSGVRLALIIWSGLGFLGWTPCCIFLIHPPGLNWGIKESMCNCIITVATLNDHLLVVPGTAYTYVHQINPMKYILSSFYRSETIGVQRADVIFPGSQRVPDSGINSCIPRHNHYMSKGCPEPPGTANCDISLKRLSTWSGSDGCQCVQMQSWSGGGEGGLLGTEKAFCAFSEGSSLRTKGTRQTAPQVLQALLAGEGCGNGKLVPTAMSQPRLNRERRMLDRNLHPHVTFLQCDPSGPSPPDSGTMTAPIGEAGGRISPVLGKLFTMTVKALCLLPRPVTFYPGLTLGKLKVEVQDYASPPGYQADSYIFQLTLINEEGLVSLSWFQMKPGSRGVRKLQQDGT

SEQ ID NO: 890777 - protein, 356 aa, Homo sapiens
RVRAEKAVAAAAAAAETLKSESGLRVRGLLIRILVLSVSVCEWTVPDAMTLNGGGSGAGGSRGGGQERERRRGSTPWGPAPPLHRRSMPVDERDLQAALTPGALTAAAAGTGTQGPRLDWPEDSEDSLSSGGSDSDESVYKVLLLGAPGVGKSALARIFGGVEDGPEAEAAGHTYDRSIVVDGEEASLMVYDIWEQDGGRWLPGHCMAMGDAYVIVYSVTDKGSFEKASELRVQLRRARQTDDVPIILVGNKSDLVRSREVSVDEGRACAVVFDCKFIETSAALHHNVQALFEGVVRQIRLRRDSKEANARRQAGTRRRESLGKKAKRFLGRIVARNSRKMAFRAKSKSCHDLSVL

SEQ ID NO: 890778 - protein, 328 aa, Homo sapiens
SYASKQPQRLAQPTAPGASEQAQTLGPSELPAGHPQPHGHGQIDSAALRSGSQGPVRASPPALPFVSHHSGSGWDLRMTRVGRAHGLGFGSDRPSCALFRATMLAHAALRLFARLSRLRGACLPPAALASLLSLRRRFWRTTPSISAWHRCGATAADVSVTLRQRTTARGPALAPPRTVTRAPQVAACCHEADGPSSVCAPAAPGPAVLRLSSLPCRPDLHECAMASPWPAVAVHLRPPVLLRACPDSRDAPPPAFHARSSGLVACVGPVSALRAAGRLLSGAHPALLRRVAPHDAVARPVARPSSLSSARRHRAPRPPRAAPLSRRA

SEQ ID NO: 890779 - protein, 356 aa, Homo sapiens; identical to SEQ ID NO: 890777

SEQ ID NO: 890780 - protein, 356 aa, Homo sapiens; identical to SEQ ID NO: 890777

SEQ ID NO: 890781 - protein, 324 aa, Homo sapiens
RVRAEKAVAAAAAAAETLKSESGLRVRGLLIRILVLSVSVCEWIGPGHRCTLNGGEQSDVGRGMPLVVGLGRAEALSGGERLQTMIVYIGLLLSGGLPGVVEEVCPGRAIFRAVCGGLGPVSLDGCLVAAPMHRLHLYVGPEDRGNHYIVSTNILWKHGLVLLAWYAPCQVELAIGGDSPYVIVYSVTDKGSFEKASELRVQLRRARQTDDVPIILVGNKSDLVRSREVSVDEGRACAVVFDCKFIETSAALHHNVQALFEGVVRQIRLRRDSKEANARRQAGTRRRESLGKKAKRFLGRIVARNSRKMAFRAKSKSCHDLSVL

SEQ ID NO: 890782 - protein, 170 aa, Homo sapiens
RVRAEKAVAAAAAAAETLKSESGLRVRGLLIRILVLSVSVCEWTVPDAMTLNGGGSGAGGSRGGGQERERRRGSTPWGPAPPLHRRSMPVDERDLQAALTPGALTAAAAGTGTQGPRLDWPEDSEDSLSSGGSDSDESVYKVLLLGAPGVGKSAMAFRAKSKSCHDLSVL

SEQ ID NO: 890783 - protein, 272 aa, Homo sapiens
RVRAEKAVAAAAAAAETLKSESGLRVRGLLIRILVLSVSVCEWTVPDAMTLNGGGSGAGGSRGGGQERERRRGSTPWGPAPPLHRRSMPVDERDLQAALTPGALTAAAAGTGTQGPRLDWPEDSEDSLSSGGSDSDESVYKVLLLGAPGVGKSALARIFGGVEDGPEAEAAGHTYDRSIVVDGEEASLMVYDIWEQDGGRWLPGHCMAMGDAYVIVYSVTDKGRGPQRCMRRLICVPSSRSAAAGQACVPGEDSAFFHSPGVPALEGGSSVR

SEQ ID NO: 890784 - protein, 208 aa, Homo sapiens
RVRAEKAVAAAAAAAETLKSESGLRVRGLLIRILVLSVSVCEWTVPDAMTLNGGGSGAGGSRGGGQERERRRGSTPWGPAPPLHRRSMPVDERDLQAALTPGALTAAAAGTGTQGPRLDWPEDSEDSLSSGGSDSDESVYKVLLLGAPGVGKSALARIFGGVEDGPEAEAAGHTYDRSIVVDGEEASLPCSAGQPAAPVLLPNVVDHE

SEQ ID NO: 890785 - protein, 112 aa, Homo sapiens
MQALCLLGDAAVPSTLSTGAGVSVFSGRTLQILEWQLPWVATVGGDSSFTHPLFTGACLSPPTQGPQRCMRRLICVPSSRSAAAGQACVPGEDSAFFHSPGVPALEGGSSVR

SEQ ID NO: 890786 - protein, 398 aa, Homo sapiens
RVRAEKAVAAAAAAAETLKSESGLRVRGLLIRILVLSVSVCEWTVPDAMTLNGGGSGAGGSRGGGQERERRRGSTPWGPAPPLHRRSMPVDERDLQAALTPGALTAAAAGTGTQGPRLDWPEDSEDSLSSGGSDSDESVYKVLLLGAPGVGKSALARIFGGVEDGPEAEAAGHTYDRSIVVDGEEASLMVYDIWEQVGCKQRPRAGEGGVSWVRGLGVPGSCRGHEDCWADVCCVFFQDGGRWLPGHCMAMGDAYVIVYSVTDKGSFEKASELRVQLRRARQTDDVPIILVGNKSDLVRSREVSVDEGRACAVVFDCKFIETSAALHHNVQALFEGVVRQIRLRRDSKEANARRQAGTRRRESLGKKAKRFLGRIVARNSRKMAFRAKSKSCHDLSVL

SEQ ID NO: 890787 - protein, 1014 aa, Homo sapiens
RSMPASAPPRRPRPPPPSLSLLLVLLGLGGRRLRAEPGDGAQTWARVSRPPAPEAAGLFQGTFPDGFLWAVGSAAYQTEGGWQQHGKGASIWDTFTHHPLAPPGDSRNASLPLGAPSPLQPATGDVASDSYNNVFRDTEALRELGVTHYRFSISWARVLPNGSAGVPNREGLRYYRRLLERLRELGVQPVVTLYHWDLPQRLQDAYGGWANRALADHFRDYAELCFRHFGGQVKYWITIDNPYVVAWHGYATGRLAPGIRGSPRLGYLVAHNLLLAHAKVWHLYNTSFRPTQGGQVSIALSSHWINPRRMTDHSIKECQKSLDFVLGWFAKPVFIDGDYPESMKNNLSSILPDFTESEKKFIKGTADFFALCFGPTLSFQLLDPHMKFRQLESPNLRQLLSWIDLEFNHPQIFIVENGWFVSGTTKRDDAKYMYYLKKFIMETLKAIKLDGVDVIGYTAWSLMDGFEWHRGYSIRRGLFYVDFLSQDKMLLPKSSALFYQKLIEKNGFPPLPENQPLEGTFPCDFAWGVVDNYIQVDTTLSQFTDLNVYLWDVHHSKRLIKVDGVVTKKRKSYCVDFAAIQPQIALLQEMHVTHFRFSLDWALILPLGNQSQVNHTILQYYRCMASELVRVNITPVVALWQPMAPNQGLPRLLARQGAWENPYTALAFAEYARLCFQELGHHVKLWITMNEPYTRNMTYSAGHNLLKAHALAWHVYNEKFRHAQNGKISIALQADWIEPACPFSQKDKEVAERVLEFDIGWLAEPIFGSGDYPWVMRDWLNQRNNFLLPYFTEDEKKLIQGTFDFLALSHYTTILVDSEKEDPIKYNDYLEVQEMTDITWLNSPSQVAVVPWGLRKVLNWLKFKYGDLPMYIISNGIDDGLHAEDDQLRVYYMQNYINEALKAHILDGINLCGYFAYSFNDRTAPRFGLYRYAADQFEPKASMKHYRKIIDSNGFPGPETLERFCPEEFTVCTECSFFHTRKSLLAFIAFLFFASIISLSLIFYYSKKGRRSYK

SEQ ID NO: 890788 - protein, 1014 aa, Homo sapiens; identical to SEQ ID NO: 890787

SEQ ID NO: 890789 - protein, 366 aa, Homo sapiens
FLFLLELSYKTTGLNREPTVSLNSKSGTPMDQNEHSHWGPHAKGQCASRSELRIILVGKTGTGKSAAGNSILRKQAFESKLGSQTLTKTCSKSQGSWGNREIVIIDTPDMFSWKDHCEALYKEVQRCYLLSAPGPHVLLLVTQLGRYTSQDQQAAQRVKEIFGEDAMGHTIVLFTHKEDLNGGSLMDYMHDSDNKALSKLVAACGGRICAFNNRAEGSNQDDQVKELMDCIEDLLMEKNGDHYTNGLYSLIQRSKCGPVGSDERVKEFKQSLIKYMETQRSYTALAEANCLKGALIKTQLCVLFCIQLFLRLIILWLCILHSMCNLFCCLLFSMCNLFCSLLFIIPKKLMIFLRTVIRLERKTPRL

SEQ ID NO: 890790 - protein, 366 aa, Homo sapiens; identical to SEQ ID NO: 890789

SEQ ID NO: 890791 - protein, 72 aa, Homo sapiens
FLFLLELSYKTTGLNREPTVSLNSKSGTPMDQNEHSHWGERKVKRAIWLPLSKLQRGVSGAAWLLFSEYRNV

SEQ ID NO: 890792 - protein, 405 aa, Homo sapiens
NITIRHDARAQEDKRTVVHRLYSTEISVSMSIRVLSIIDLDKRNGPVFIWTFIDQRYHACEIIEVYTYHVRIVVNQSSSQRRNLGYQIMTLEIILVGKTGTGKSAAGNSILRKQAFESKLGSQTLTKTCSKSQGSWGNREIVIIDTPDMFSWKDHCEALYKEVQRCYLLSAPGPHVLLLVTQLGRYTSQDQQAAQRVKEIFGEDAMGHTIVLFTHKEDLNGGSLMDYMHDSDNKALSKLVAACGGRICAFNNRAEGSNQDDQVKELMDCIEDLLMEKNGDHYTNGLYSLIQRSKCGPVGSDERVKEFKQSLIKYMETQRSYTALAEANCLKGALIKTQLCVLFCIQLFLRLIILWLCILHSMCNLFCCLLFSMCNLFCSLLFIIPKKLMIFLRTVIRLERKTPRL

SEQ ID NO: 890793 - protein, 318 aa, Homo sapiens
METRYNLKSPAVKRLMKEAAELKDPTDHYHAQPLEDNLFEWHFTVRGPPDSDFDGGVYHGRIVLPPEYPMKPPSIILLTANGRFEVGKKICLSISGHHPETWQPSWSIRTALLAIIGFMPTKGEGAIGSLDYTPEERRALAKKSQDFCCEGCGSAMKDVLLPLKSGSDSSQADQEAKELARQISFKAEVNSSGKTISESDLNHSFSLTDLQDDIPTTFQGATASTSYGLQNSSAASFHQPTQPVAKNTSMSPRQRRAQQQSQRRLSTSPDVIQGHQPRDNHTDHGGSAVLIVILTLALAALIFRRIYLANEYIFDFEL

SEQ ID NO: 890794 - protein, 318 aa, Homo sapiens; identical to SEQ ID NO: 890793

SEQ ID NO: 890795 - protein, 318 aa, Homo sapiens; identical to SEQ ID NO: 890793

SEQ ID NO: 890796 - protein, 318 aa, Homo sapiens; identical to SEQ ID NO: 890793

SEQ ID NO: 890797 - protein, 401 aa, Homo sapiens
RPRQGWACDYPRRLTSSPGARFSAAPAGAGACQALREAGAQWRRRRHREASASPALSLATPGSGRVERRWQRPGRPEPSQRPTMETRYNLKSPAVKRLMKEAAELKDPTDHYHAQPLEDNLFEWHFTVRGPPDSDFDGGVYHGRIVLPPEYPMKPPSIILLTANGRFEVGKKICLSISGHHPETWQPSWSIRTALLAIIGFMPTKGEGAIGSLDYTPEERRALAKKSQDFCCEGCGSAMKDVLLPLKSGSDSSQADQEAKELARQISFKAEVNSSGKTISESDLNHSFSLTDLQDDIPTTFQGATASTSYGLQNSSAASFHQPTQPVAKNTSMSPRQRRAQQQSQRRLSTSPDVIQGHQPRDNHTDHGGSAVLIVILTLALAALIFRRIYLANEYIFDFEL

SEQ ID NO: 890798 - protein, 235 aa, Homo sapiens
METRYNLKSPAVKRLMKEAAELKDPTDHYHAQPLEDNLFEWHFTVRGPPDSDFDGGVYHGRIVLPPEYPMKPPSIILLTANGRFEVGKKICLSISGHHPETWQPSWSIRTALLAIIGFMPTKGEGAIGSLDYTPEERRALAKKSQDFCCEGCGSAMKDVLLPLKSGSDSSQADQEAKELARQISFKAEVNSSGKTISESDLNHSFSLTDLQDDIPTTFQGATASTSFQTKFLKIS

SEQ ID NO: 890799 - protein, 249 aa, Homo sapiens [sequence omitted]

SEQ ID NO: 890800 - protein, 343 aa, Homo sapiens
EPRMLHLENFKETTNHLLSRAIHHPEVLMYLWFPKAVKRLMKEAAELKDPTDHYHAQPLEDNLFEWHFTVRGPPDSDFDGGVYHGRIVLPPEYPMKPPSIILLTANGRFEVGKKICLSISGHHPETWQPSWSIRTALLAIIGFMPTKGEGAIGSLDYTPEERRALAKKSQDFCCEGCGSAMKDVLLPLKSGSDSSQADQEAKELARQISFKAEVNSSGKTISESDLNHSFSLTDLQDDIPTTFQGATASTSYGLQNSSAASFHQPTQPVAKNTSMSPRQRRAQQQSQRRLSTSPDVIQGHQPRDNHTDHGGSAVLIVILTLALAALIFRRIYLANEYIFDFEL

SEQ ID NO: 890801 - protein, 110 aa, Homo sapiens
METRYNLKSPAVKRLMKEAAELKDPTDHYHAQPLEDNLFEWHFTVRGPPDSDFDGGVYHGRIVLPPEYPMKPPSIILLTANGRFEVGKKICLSISGHHPETWQPSWSSKC

SEQ ID NO: 890802 - protein, 96 aa, Homo sapiens
TSREENNAWWFHGILWWQYYPPVINSSMSPRQRRAQQQSQRRLSTSPDVIQGHQPRDNHTDHGGSAVLIVILTLALAALIFRRIYLANEYIFDFEL

SEQ ID NO: 890803 - protein, 278 aa, Homo sapiens
METRYNLKSPAVKRLMKEAAELKDPTDHYHAQPLEDNLFEWHFTVRGPPDSDFDGGVYHGRIVLPPEYPMKPPSIILLTANGRFEVGKKICLSISGHHPETWQPSWSIRTALLAIIGFMPTKGEGAIGSLDYTPEERRALAKKSQDFCCEGCGSAMKDVLLPLKSGSDSSQADQEAKELARQISFKYGLQNSSAASFHQPTQPVAKNTSMSPRQRRAQQQSQRRLSTSPDVIQGHQPRDNHTDHGGSAVLIVILTLALAALIFRRIYLANEYIFDFEL

SEQ ID NO: 890804 - protein, 143 aa, Homo sapiens
METRYNLKSPAVKRLMKEAAELKDPTDHYHAQPLEDNLFEWHFTVRGPPDSDFDGGVYHGRIVLPPEYPMKPPSIILLTANGRFEVGKKICLSISGHHPETWQPSWSIRTALLAIIGFMPTKGEGAIGSLDYTPEERRALAKK

SEQ ID NO: 890805 - protein, 110 aa, Homo sapiens; identical to SEQ ID NO: 890801

SEQ ID NO: 890806 - protein, 559 aa, Homo sapiens
LSGPRGARAAAATRRREEEEAAGVQEAGQRMEEEAMNGDRTESDWQGLVSEYLVCKRKLESKKEALLILSKELDTCQQERDQYKLMANQLRERHQSLKKKYRELIDGDPSLPPEKRKQANLAQLLRDSQDRNKHLGEEIKELQQRLGEVQGDNKLLRMTIAKQRLGDEAIGVRHFAAHEREDLVQQLERAKEQIESLEHDLQASVDELQDVKEERSSYQDKVERLNQELNHILSGHENRIIDVDALCMENRYLQERLKQLHEEVNLLKSNIAKYKNALERRKNSKGQGKSSSSALTGVLSAKQVQDLLSEDHGCSLPATPQSISDLKSLATALLETIHEKNMVIQHQRQTNKILGNRVAELEKKLRTLEVSGLWSLPGGKDTILFSDPTLPSGQRSRSPLLKFVEQPTENKADPKDGEAQKQEEDESCAAAEALTAPEDAGRPAVNSPANQSRGNQCKLFHPSLPQLPSEEEVNSLGREIIKLTKEQAAAELEEVRRESPIEGQRSETGPAPPGLAIQGELPKSHLDSFEASRPAAKASTPEDGKGIPEGGGMRSTVKT

SEQ ID NO: 890807 - protein, 171 aa, Homo sapiens
LSGPRGARAAAATRRREEEEAAGVQEAGQRMEEEAMNGDRTESDWQGLVSEYLVCKRKLESKKEALLILSKELDTCQQERDQYKLMANQLRERHQSLKKKYRELIDGDPSLPPEKRKQANLAQLLRDSQDRNKHLGEEIKELQQRLGEVQGDNKGRLRSKKKMKVVPLLRR

SEQ ID NO: 890808 - protein, 559 aa, Homo sapiens; identical to SEQ ID NO: 890806

SEQ ID NO: 890809 - protein, 319 aa, Homo sapiens
MDVDALCMEKRYLQERLKQLHEEVNLLKSNIAKYKNALERRKNSKGQGKSSSSALTGVLSAKQVQDLLSEDHGCSLPATPQSISDLKSLATALLETIHEKNMVIQHQRQTNKILGNRVAELEKKLRTLEVSGLWSLPGGKDTILFSDPTLPSGQRSRSPLLKFVEQPTENKADPKDGEAQKQEEDESCAAAEALTAPEDAGRPAVNSPANQSRGNQCKLFHPSLPQLPSEEEVNSLGREIIKLTKEQAAAELEEVRRESPIEGQRSETGPAPPGLAIQGELPKSHLDSFEASRPAAKASTPEDGKGIPEGGGMRSTVKT

SEQ ID NO: 890810 - protein, 559 aa, Homo sapiens; identical to SEQ ID NO: 890806

SEQ ID NO: 890811 - protein, 174 aa, Homo sapiens
EVKKITDGLHALQEASNKDAEALAAAQQHFNAVSAGLSSNEDGAEATLAGQMMACKNDISKAQTEAKHGSDEVEACSAEELKEMQDKVIKLQEELSENDKKIKALNHEIEELEKRKDKETGGILRSLEDALAEAQRVNTKSQSAFDLKKKNLACEESKRKELEKNMVEVSELNV

SEQ ID NO: 890812 - protein, 1197 aa, Homo sapiens
MHIKSIILEGFKSYAQRTEVNGFDPLFNAITGLNGSGKSNILDSICFLLGISNLSQVRASNLQDLVYKNGQAGITKASVSITFDNSDKKQSPLGFEVHDEITVTRQVVIGGRNKYLINGVNANNTRVQDLFCSVGLNVNNPHFLIMQGRITKVLNMKPPEILSMIEEAAGTRMYEYKKIAAQKTIEKKEAKLKEIKTILEEEITPTIQKLKEERSSYLEYQKVMREIEHLSRLYIAYQFLLAEDTKVRSAEELKEMQDKVIKLQEELSENDKKIKALNHEIEELEKRKDKETGGILRSLEDALAEAQRVNTKSQSAFDLKKKNLACEESKRKELEKNMVEDSKTLAAKEKEVKKITDGLHALQEASNKDAEALAAAQQHFNAVSAGLSSNEDGAEATLAGQMMACKNDISKAQTEAKQAQMKLKHAQQELKNKQAEVKKMDSGYRKDQEALEAVKRLKEKLEAEMKKLNYEENKEESLLEKRRQLSRDIGRLKETYEALLARFPNLRFAYKDPEKNWNRNCVKGLVASLISVKDTSATTALELVAGERLYNVVVDTEVTGKKLLERGELKRRYTIIPLNKISARCIAPETLRVAQNLVGPDNVHVALSLVEYKPELQKAMEFVFGTTFVCDNMDNAKKVAFDKRIMTRTVTLGGDVFDPHGTLSGGARSQAASILTKFQELKDVQDELRIKENELRALEEELAGLKNTAEKYRQLKQQWEMKTEEADLLQTKLQQSSYHKQQEELDALKKTIEESEETLKNTKEIQRKAEEKYEVLENKMKNAEAERERELKDAQKKLDCAKTKADASSKKMKEKQQEVEAITLELEELKREHTSYKQQLEAVNEAIKSYESQIEVMAAEVAKNKESVNKAQEEVTKQKEVITAQDTVIKAKYAEVAKHKEQNNDSQLKIKELDHNISKHKREAEDGAAKVSKMLKDYDWINAERHLFGQPNSAYDFKTNNPKEAGQRLQKLQEMKEKLGRNVNMRAMNVLTEAEERYNDLMKKKRIVENDKSKILTTIEDLDQKKNQALNIAWQKVNKDFGSIFSTLLPGANAMLAPPEGQTVLDGLEFKVALGNTWKENLTELSGGQRSLVALSLILSMLLFKPAPIYILDEVDAALDLSHTQNIGQMLRTHFTHSQFIVVSLKEGMFNNANVLFKTKFVDGVSTVARFTQCQNGKISKEAKSKAKPPKGAHVEV

SEQ ID NO: 890813 - protein, 1197 aa, Homo sapiens; identical to SEQ ID NO: 890812

SEQ ID NO: 890814 - protein, 1197 aa, Homo sapiens; identical to SEQ ID NO: 890812

SEQ ID NO: 890815 - protein, 1197 aa, Homo sapiens; identical to SEQ ID NO: 890812

SEQ ID NO: 890816 - protein, 1197 aa, Homo sapiens; identical to SEQ ID NO: 890812

SEQ ID NO: 890817 - protein, 1099 aa, Homo sapiens
MHIKSIILEGFKSYAQRTEVNGFDPLFNAITGLNGSGKSNILDSICFLLGISNLSQVRASNLQDLVYKNGQAGITKASVSITFDNSDKKQSPLGFEVHDEITVTRQVVIGGRNKYLINGVNANNTRVQDLFCSVGLNVNNPHFLIMQGRITKVLNMKPPEILSMIEEAAGTRMYEYKKIAAQKTIEKKEAKLKEIKTILEEEITPTIQKLKEERSSYLEYQKVMREIEHLSRLYIAYQFLLAEDTKVRSAEELKEMQDKVIKLQEELSENDKKIKALNHEIEELEKRKDKETGGILRSLEDALAEAQRVNTKSQSAFDLKKKNLACEESKRKELEKNMVEDSKTLAAKEKEVKKITDGLHALQEASNKDAEALAAAQQHFNAVSAGLSSNEDGAEATLAGQMMACKNDISKAQTEAKQAQMKLKHAQQELKNKQAEVKKMDSGYRKDQEALEAVKRLKEKLEAEMKKLNYEENKEESLLEKRRQLSRDIGRLKETYEALLARFPNLRFAYKDPEKNWNRNCVKGLVASLISVKDTSATTALELVAGERLYNVVVDTEVTGKKLLERGELKRRYTIIPLNKISARCIAPETLRVAQNLVGPDNVHVALSLVEYKPELQKAMEFVFGTTFVCDNMDNAKKVAFDKRIMTRTVTLGGDVFDPHGTLSGGARSQAASILTKFQELKDVQDELRIKENELRALEEELAGLKNTAEKYRQLKQQWEMKTEEADLLQTKLQQSSYHKQQEELDALKKTIEESEETLKNTKEIQRKAEEKYEVLENKMKNAEAERERELKDAQKKLDCAKTKADASSKKMKEKQQEVEAITLELEELKREHTSYKQQLEAVNEAIKSYESQIEVMAAEVAKNKESVNKAQEEVTKQKEVITAQDTVIKAKYAEVAKHKEQNNDSQLKIKELDHNISKHKREAEDGAAKVSKMLKDYDWINAERHLFGQPNSAYDFKTNNPKEAGQRLQKLQEMKEKLGRNVNMRAMNVLTEAEERYNDLMKKKRIVENDKSKILTTIEDLDQKKNQALNIAWQKVNKDFGSIFSTLLPGANAMLAPPEGQTVLDGLEFKVALGNTWKENLTELSGGQRQKQQNHTTG

SEQ ID NO: 890818 - protein, 1197 aa, Homo sapiens; identical to SEQ ID NO: 890812

SEQ ID NO: 890819 - protein, 1197 aa, Homo sapiens; identical to SEQ ID NO: 890812

SEQ ID NO: 890820 - protein, 1197 aa, Homo sapiens; identical to SEQ ID NO: 890812

SEQ ID NO: 890821 - protein, 1147 aa, Homo sapiens
MHIKSIILEGFKSYAQRTEVNGFDPLFNAITGLNGSGKSNILDSICFLLGISNLSQVVIGGRNKYLINGVNANNTRVQDLFCSVGLNVNNPHFLIMQGRITKVLNMKPPEILSMIEEAAGTRMYEYKKIAAQKTIEKKEAKLKEIKTILEEEITPTIQKLKEERSSYLEYQKVMREIEHLSRLYIAYQFLLAEDTKVRSAEELKEMQDKVIKLQEELSENDKKIKALNHEIEELEKRKDKETGGILRSLEDALAEAQRVNTKSQSAFDLKKKNLACEESKRKELEKNMVEDSKTLAAKEKEVKKITDGLHALQEASNKDAEALAAAQQHFNAVSAGLSSNEDGAEATLAGQMMACKNDISKAQTEAKQAQMKLKHAQQELKNKQAEVKKMDSGYRKDQEALEAVKRLKEKLEAEMKKLNYEENKEESLLEKRRQLSRDIGRLKETYEALLARFPNLRFAYKDPEKNWNRNCVKGLVASLISVKDTSATTALELVAGERLYNVVVDTEVTGKKLLERGELKRRYTIIPLNKISARCIAPETLRVAQNLVGPDNVHVALSLVEYKPELQKAMEFVFGTTFVCDNMDNAKKVAFDKRIMTRTVTLGGDVFDPHGTLSGGARSQAASILTKFQELKDVQDELRIKENELRALEEELAGLKNTAEKYRQLKQQWEMKTEEADLLQTKLQQSSYHKQQEELDALKKTIEESEETLKNTKEIQRKAEEKYEVLENKMKNAEAERERELKDAQKKLDCAKTKADASSKKMKEKQQEVEAITLELEELKREHTSYKQQLEAVNEAIKSYESQIEVMAAEVAKNKESVNKAQEEVTKQKEVITAQDTVIKAKYAEVAKHKEQNNDSQLKIKELDHNISKHKREAEDGAAKVSKMLKDYDWINAERHLFGQPNSAYDFKTNNPKEAGQRLQKLQEMKEKLGRNVNMRAMNVLTEAEERYNDLMKKKRIVENDKSKILTTIEDLDQKKNQALNIAWQKVNKDFGSIFSTLLPGANAMLAPPEGQTVLDGLEFKVALGNTWKENLTELSGGQRSLVALSLILSMLLFKPAPIYILDEVDAALDLSHTQNIGQMLRTHFTHSQFIVVSLKEGMFNNANVLFKTKFVDGVSTVARFTQCQNGKISKEAKSKAKPPKGAHVEV

SEQ ID NO: 890822 - protein, 1147 aa, Homo sapiens; identical to SEQ ID NO: 890821

SEQ ID NO: 890823 - protein, 1106 aa, Homo sapiens
MHIKSIILEGFKSYAQRTEVNGFDPLFNAITGLNGSGKSNILDSICFLLGISNLSQGRITKVLNMKPPEILSMIEEAAGTRMYEYKKIAAQKTIEKKEAKLKEIKTILEEEITPTIQKLKEERSSYLEYQKVMREIEHLSRLYIAYQFLLAEDTKVRSAEELKEMQDKVIKLQEELSENDKKIKALNHEIEELEKRKDKETGGILRSLEDALAEAQRVNTKSQSAFDLKKKNLACEESKRKELEKNMVEDSKTLAAKEKEVKKITDGLHALQEASNKDAEALAAAQQHFNAVSAGLSSNEDGAEATLAGQMMACKNDISKAQTEAKQAQMKLKHAQQELKNKQAEVKKMDSGYRKDQEALEAVKRLKEKLEAEMKKLNYEENKEESLLEKRRQLSRDIGRLKETYEALLARFPNLRFAYKDPEKNWNRNCVKGLVASLISVKDTSATTALELVAGERLYNVVVDTEVTGKKLLERGELKRRYTIIPLNKISARCIAPETLRVAQNLVGPDNVHVALSLVEYKPELQKAMEFVFGTTFVCDNMDNAKKVAFDKRIMTRTVTLGGDVFDPHGTLSGGARSQAASILTKFQELKDVQDELRIKENELRALEEELAGLKNTAEKYRQLKQQWEMKTEEADLLQTKLQQSSYHKQQEELDALKKTIEESEETLKNTKEIQRKAEEKYEVLENKMKNAEAERERELKDAQKKLDCAKTKADASSKKMKEKQQEVEAITLELEELKREHTSYKQQLEAVNEAIKSYESQIEVMAAEVAKNKESVNKAQEEVTKQKEVITAQDTVIKAKYAEVAKHKEQNNDSQLKIKELDHNISKHKREAEDGAAKVSKMLKDYDWINAERHLFGQPNSAYDFKTNNPKEAGQRLQKLQEMKEKLGRNVNMRAMNVLTEAEERYNDLMKKKRIVENDKSKILTTIEDLDQKKNQALNIAWQKVNKDFGSIFSTLLPGANAMLAPPEGQTVLDGLEFKVALGNTWKENLTELSGGQRSLVALSLILSMLLFKPAPIYILDEVDAALDLSHTQNIGQMLRTHFTHSQFIVVSLKEGMFNNANVLFKTKFVDGVSTVARFTQCQNGKISKEAKSKAKPPKGAHVEV

SEQ ID NO: 890824 - protein, 1025 aa, Homo sapiens
EVKKITDGLHALQEASNKDAEALAAAQQHFNAVSAGLSSNEDGAEATLAGQMMACKNDISKAQTEAKHGSDEVEACSAEELKEMQDKVIKLQEELSENDKKIKALNHEIEELEKRKDKETGGILRSLEDALAEAQRVNTKSQSAFDLKKKNLACEESKRKELEKNMVEDSKTLAAKEKEVKKITDGLHALQEASNKDAEALAAAQQHFNAVSAGLSSNEDGAEATLAGQMMACKNDISKAQTEAKQAQMKLKHAQQELKNKQAEVKKMDSGYRKDQEALEAVKRLKEKLEAEMKKLNYEENKEESLLEKRRQLSRDIGRLKETYEALLARFPNLRFAYKDPEKNWNRNCVKGLVASLISVKDTSATTALELVAGERLYNVVVDTEVTGKKLLERGELKRRYTIIPLNKISARCIAPETLRVAQNLVGPDNVHVALSLVEYKPELQKAMEFVFGTTFVCDNMDNAKKVAFDKRIMTRTVTLGGDVFDPHGTLSGGARSQAASILTKFQELKDVQDELRIKENELRALEEELAGLKNTAEKYRQLKQQWEMKTEEADLLQTKLQQSSYHKQQEELDALKKTIEESEETLKNTKEIQRKAEEKYEVLENKMKNAEAERERELKDAQKKLDCAKTKADASSKKMKEKQQEVEAITLELEELKREHTSYKQQLEAVNEAIKSYESQIEVMAAEVAKNKESVNKAQEEVTKQKEVITAQDTVIKAKYAEVAKHKEQNNDSQLKIKELDHNISKHKREAEDGAAKVSKMLKDYDWINAERHLFGQPNSAYDFKTNNPKEAGQRLQKLQEMKEKLGRNVNMRAMNVLTEAEERYNDLMKKKRIVENDKSKILTTIEDLDQKKNQALNIAWQKVNKDFGSIFSTLLPGANAMLAPPEGQTVLDGLEFKVALGNTWKENLTELSGGQRSLVALSLILSMLLFKPAPIYILDEVDAALDLSHTQNIGQMLRTHFTHSQFIVVSLKEGMFNNANVLFKTKFVDGVSTVARFTQCQNGKISKEAKSKAKPPKGAHVEV

SEQ ID NO: 890825 - protein, 250 aa, Homo sapiens
MHIKSIILEGFKSYAQRTEVNGFDPLFNAITGLNGSGKSNILDSICFLLGISNLSQVRASNLQDLVYKNGQAGITKASVSITFDNSDKKQSPLGFEVHDEITVTRQVVIGGRNKYLINGVNANNTRVQDLFCSVGLNVNNPHFLIMQGRITKVLNMKPPEILSMIEEAAGTRMYEYKKIAAQKTIEKKEAKLKEIKTILEEEITPTIQKLKEERSSYLEYQKVMREIEHLSRLYIAYQFLLAEDTKVTLS

SEQ ID NO: 890826 - protein, 518 aa, Homo sapiens
LRAPWPHLPAQPGPGGGDAMTLILTSLLFFGLSLGPRTRVQAENLPKPILWAEPGPVITWHNPVTIWCQGTLEAQGYRLDKEGNSMSRHILKTLESENKVKLSIPSMMWEHAGRYHCYYQSPAGWSEPSDPLELVVTAYSRPTLSALPSPVVTSGVNVTLRCASRLGLGRFTLIEEGDHRLSWTLNSHQHNHGKFQALFPMGPLTFSNRGTFRCYGYENNTPYVWSEPSDPLQLLVSGVSRKPSLLTLQGPVVTPGENLTLQCGSDVGYIRYTLYKEGADGLPQRPGRQPQAGLSQANFTLSPVSRSYGGQYRCYGAHNVSSEWSAPSDPLDILIAGQISDRPSLSVQPGPTVTSGEKVTLLCQSWDPMFTFLLTKEGAAHPPLRLRSMYGAHKYQAEFPMSPVTSAHAGTYRCYGSRSSNPYLLSHPSEPLELVVSGATETLNPAQKKSDSKTAPHLQDYTVENLIRMGVAGLVLLFLGILLFEAQHSQRSPPRCSQEANSRKDNAPFRVVEPWEQI

SEQ ID NO: 890827 - protein, 515 aa, Homo sapiens
MASQGLKEKKKTCSGFGGKSLTGNSLPGLSLGPRTRVQAENLPKPILWAEPGPVITWHNPVTIWCQGTLEAQGYRLDKEGNSMSRHILKTLESENKVKLSIPSMMWEHAGRYHCYYQSPAGWSEPSDPLELVVTAYSRPTLSALPSPVVTSGVNVTLRCASRLGLGRFTLIEEGDHRLSWTLNSHQHNHGKFQALFPMGPLTFSNRGTFRCYGYENNTPYVWSEPSDPLQLLVSGVSRKPSLLTLQGPVVTPGENLTLQCGSDVGYIRYTLYKEGADGLPQRPGRQPQAGLSQANFTLSPVSRSYGGQYRCYGAHNVSSEWSAPSDPLDILIAGQISDRPSLSVQPGPTVTSGEKVTLLCQSWDPMFTFLLTKEGAAHPPLRLRSMYGAHKYQAEFPMSPVTSAHAGTYRCYGSRSSNPYLLSHPSEPLELVVSGATETLNPAQKKSDSKTAPHLQDYTVENLIRMGVAGLVLLFLGILLFEAQHSQRSPPRCSQEANSRKDNAPFRVVEPWEQI

SEQ ID NO: 890828 - protein, 518 aa, Homo sapiens; identical to SEQ ID NO: 890826

SEQ ID NO: 890829 - protein, 460 aa, Homo sapiens
LRAPWPHLPAQPGPGGGDAMTLILTSLLFFGLSLGPRTRVQAENLPKPILWAEPGPVITWHNPVTIWCQGTLEAQGYRLDKEGNSMSRHILKTLESENKVKLSIPSMMWEHAGRYHCYYQSPAGWSEPSDPLELVVTAYSRPTLSALPSPVVTSGVNVTLRCASRLGLGRFTLIEEGDHRLSWTLNSHQHNHGKFQALFPMGPLTFSNRGTFRCYGYENNTPYVWSEPSDPLQLLVSGVSRKPSLLTLQGPVVTPGENLTLQCGSDVGYIRYTLYKEGADGLPQRPGRQPQAGLSQANFTLSPVSRSYGGQYRCYGAHNVSSEWSAPSDPLDILIAGQISDRPSLSVQPGPTVTSGEKVTLLCQSWDPMFTFLLTKEGAAHPPLRLRSMYGAHKYQAEFPMSPVTSAHAGTYRCYGSRSSNPYLLSHPSEPLELVVSGEGADPVHSELKGVLGNEKGELP

SEQ ID NO: 890830 - protein, 161 aa, Homo sapiens
SGSSWERQFRLCVRVDKMAKIAKTHEDIEAQIREIQGKKAALDEAQGVGLDSTGYYDQEIYGGSDSRFAGYVTSIAATELEDDDDDYSSSTSLLGQKKPGYHAPVALLNDIPQSTEQYDPFAEHRPPKIADREDEYKKHRRTMIISPERLDPFADGFYSAA

SEQ ID NO: 890831 - protein, 71 aa, Homo sapiens
AEVLGSASSVCVFEWTKWRRSPRLTKILKHRFEKFKARRQLLMKLKEWASILQVIMTRKFMVEVTADLLDT

SEQ ID NO: 890832 - protein, 93 aa, Homo sapiens
MPLASPIQHHEVTRGVAPSMALRDGVCRIPLSAEFTAQCTDSQAPQMKRAPRCCCLAVVAQCPHHCPVLGCWSGCRCCCYCVFELHWLYCIQE

SEQ ID NO: 890833 - protein, 171 aa, Homo sapiens
MAEPPHSYCFVLGDNIIAQHRGKGLAAFLKAIGYLIPLMDAEYANYYTREVMLILIREFQSPDEEMKKIVLKVVKQCCGTDGVEANYIKTEILPPFFKHFWQHRMALDRRNYRQLVDTTVELANKVGAAEIISRIVDDLKDEAEQYRKMVMGDKSRDVIAQHQEQAMFAFN

SEQ ID NO: 890834 - protein, 152 aa, Homo sapiens
SVGTDVSLKRGEASLSLPLVGGSLAGMMITGLWTPWTGPWLSWLPEEGQGPPMSPVSAFWNCPSLKEALERAEQLCYECGECLEDPRDVIAQHRGKGLAAFLKAIGYLIPLMDAEYANYYTREVMLILIREFQSPDEEMKKIVLKVVKQCWG

SEQ ID NO: 890835 - protein, 1158 aa, Homo sapiens
MNARTYMDVMREQHLTKEEREIRQQLAEKAKAGELKVVNGAAASQPPSKRKRRWDQTADQTPGATPKKLSSWDQAETPGHTPSLRWDETPGRAKGSETPGATPGSKIWDPTPSHTPAGAATPGRGDTPGHATPGHGGATSSARKNRWDETPKTERDTPGHGSGWAETPRTDRGGDSIGETPTPGASKRKSRWDETPASQMGGSTPVLTPGKTPIGTPAMNMATPTPGHIMSMTPEQLQAWRWEREIDERNRPLSDEELDAMFPEGYKVLPPPAGYVPIRTPARKLTATPTPLGGMTGFHMQTEDRTMKSVNDQPSGNLPFLKPDDIQYFDKLLVDVDESTLSPEEQKERKIMKLLLKIKNGTPPMRKAALRQITDKAREFGAGPLFNQILPLLMSPTLEDQERHLLVKVIDRILYKLDDLVRPYVHKILVVIEPLLIDEDYYARVEGREIISNLAKAAGLATMISTMRPDIDNMDEYVRNTTARAFAVVASALGIPSLLPFLKAVCKSKKSWQARHTGIKIVQQIAILMGCAILPHLRSLVEIIEHGLVDEQQKVRTISALAIAALAEAATPYGIESFDSVLKPLWKGIRQHRGKGLAAFLKAIGYLIPLMDAEYANYYTREVMLILIREFQSPDEEMKKIVLKVVKQCCGTDGVEANYIKTEILPPFFKHFWQHRMALDRRNYRQLVDTTVELANKVGAAEIISRIVDDLKDEAEQYRKMVMETIEKIMGNLGAADIDHKLEEQLIDGILYAFQEQTTEDSVMLNGFGTVVNALGKRVKPYLPQICGTVLWRLNNKSAKVRQQAADLISRTAVVMKTCQEEKLMGHLGVVLYEYLGEEYPEVLGSILGALKAIVNVIGMHKMTPPIKDLLPRLTPILKNRHEKVQENCIDLVGRIADRGAEYVSAREWMRICFELLELLKAHKKAIRRATVNTFGYIAKAIGPHDVLATLLNNLKVQERQNRVCTTVAIAIVAETCSPFTVLPALMNEYRVPELNVQNGVLKSLSFLFEYIGEMGKDYIYAVTPLLEDALMDRDLVHRQTASAVVQHMSLGVYGFGCEDSLNHLLNYVWPNVFETSPHVIQAVMGALEGLRVAIGPCRMLQYCLQGLFHPARKVRDVYWKIYNSIYIGSQDALIAHYPRIYNDDKNTYIRYELDYIL

SEQ ID NO: 890836 - protein, 1158 aa, Homo sapiens; identical to SEQ ID NO: 890835

SEQ ID NO: 890837 - protein, 980 aa, Homo sapiens
EVDLEDPVHCSIRWDETPASQMGGSTPVLTPGKTPIGTPAMNMATPTPGHIMSMTPEQLQAWRWEREIDERNRPLSDEELDAMFPEGYKVLPPPAGYVPIRTPARKLTATPTPLGGMTGFHMQTEDRTMKSVNDQPSGNLPFLKPDDIQYFDKLLVDVDESTLSPEEQKERKIMKLLLKIKNGTPPMRKAALRQITDKAREFGAGPLFNQILPLLMSPTLEDQERHLLVKVIDRILYKLDDLVRPYVHKILVVIEPLLIDEDYYARVEGREIISNLAKAAGLATMISTMRPDIDNMDEYVRNTTARAFAVVASALGIPSLLPFLKAVCKSKKSWQARHTGIKIVQQIAILMGCAILPHLRSLVEIIEHGLVDEQQKVRTISALAIAALAEAATPYGIESFDSVLKPLWKGIRQHRGKGLAAFLKAIGYLIPLMDAEYANYYTREVMLILIREFQSPDEEMKKIVLKVVKQCCGTDGVEANYIKTEILPPFFKHFWQHRMALDRRNYRQLVDTTVELANKVGAAEIISRIVDDLKDEAEQYRKMVMETIEKIMGNLGAADIDHKLEEQLIDGILYAFQEQTTEDSVMLNGFGTVVNALGKRVKPYLPQICGTVLWRLNNKSAKVRQQAADLISRTAVVMKTCQEEKLMGHLGVVLYEYLGEEYPEVLGSILGALKAIVNVIGMHKMTPPIKDLLPRLTPILKNRHEKVQENCIDLVGRIADRGAEYVSAREWMRICFELLELLKAHKKAIRRATVNTFGYIAKAIGPHDVLATLLNNLKVQERQNRVCTTVAIAIVAETCSPFTVLPALMNEYRVPELNVQNGVLKSLSFLFEYIGEMGKDYIYAVTPLLEDALMDRDLVHRQTASAVVQHMSLGVYGFGCEDSLNHLLNYVWPNVFETSPHVIQAVMGALEGLRVAIGPCRMLQYCLQGLFHPARKVRDVYWKIYNSIYIGSQDALIAHYPRIYNDDKNTYIRYELDYIL

SEQ ID NO: 890838 - protein, 659 aa, Homo sapiens
SVGTDVSLKRGEASLSLPLVGGSLAGMMITGLWTPWTGPWLSWLPEEGQGPPMSPVSAFWNCPSLKEALERAEQLCYECGECLEDPRDVIAQHRGKGLAAFLKAIGYLIPLMDAEYANYYTREVMLILIREFQSPDEEMKKIVLKVVKQCCGTDGVEANYIKTEILPPFFKHFWQHRMALDRRNYRQLVDTTVELANKVGAAEIISRIVDDLKDEAEQYRKMVMETIEKIMGNLGAADIDHKLEEQLIDGILYAFQEQTTEDSVMLNGFGTVVNALGKRVKPYLPQICGTVLWRLNNKSAKVRQQAADLISRTAVVMKTCQEEKLMGHLGVVLYEYLGEEYPEVLGSILGALKAIVNVIGMHKMTPPIKDLLPRLTPILKNRHEKVQENCIDLVGRIADRGAEYVSAREWMRICFELLELLKAHKKAIRRATVNTFGYIAKAIGPHDVLATLLNNLKVQERQNRVCTTVAIAIVAETCSPFTVLPALMNEYRVPELNVQNGVLKSLSFLFEYIGEMGKDYIYAVTPLLEDALMDRDLVHRQTASAVVQHMSLGVYGFGCEDSLNHLLNYVWPNVFETSPHVIQAVMGALEGLRVAIGPCRMLQYCLQGLFHPARKVRDVYWKIYNSIYIGSQDALIAHYPRIYNDDKNTYIRYELDYIL

SEQ ID NO: 890839 - protein, 586 aa, Homo sapiens
MAEPPHSYCFVLGDNIIAQHRGKGLAAFLKAIGYLIPLMDAEYANYYTREVMLILIREFQSPDEEMKKIVLKVVKQCCGTDGVEANYIKTEILPPFFKHFWQHRMALDRRNYRQLVDTTVELANKVGAAEIISRIVDDLKDEAEQYRKMVMETIEKIMGNLGAADIDHKLEEQLIDGILYAFQEQTTEDSVMLNGFGTVVNALGKRVKPYLPQICGTVLWRLNNKSAKVRQQAADLISRTAVVMKTCQEEKLMGHLGVVLYEYLGEEYPEVLGSILGALKAIVNVIGMHKMTPPIKDLLPRLTPILKNRHEKVQENCIDLVGRIADRGAEYVSAREWMRICFELLELLKAHKKAIRRATVNTFGYIAKAIGPHDVLATLLNNLKVQERQNRVCTTVAIAIVAETCSPFTVLPALMNEYRVPELNVQNGVLKSLSFLFEYIGEMGKDYIYAVTPLLEDALMDRDLVHRQTASAVVQHMSLGVYGFGCEDSLNHLLNYVWPNVFETSPHVIQAVMGALEGLRVAIGPCRMLQYCLQGLFHPARKVRDVYWKIYNSIYIGSQDALIAHYPRIYNDDKNTYIRYELDYIL

SEQ ID NO: 890840 - protein, 311 aa, Homo sapiens
ETGDLFVLQLKGMHKMTPPIKDLLPRLTPILKNRHEKVQENCIDLVGRIADRGAEYVSAREWMRICFELLELLKAHKKAIRRATVNTFGYIAKAIGPHDVLATLLNNLKVQERQNRVCTTVAIAIVAETCSPFTVLPALMNEYRVPELNVQNGVLKSLSFLFEYIGEMGKDYIYAVTPLLEDALMDRDLVHRQTASAVVQHMSLGVYGFGCEDSLNHLLNYVWPNVFETSPHVIQAVMGALEGLRVAIGPCRMLQYCLQGLFHPARKVRDVYWKIYNSIYIGSQDALIAHYPRIYNDDKNTYIRYELDYIL

SEQ ID NO: 890841 - protein, 1140 aa, Homo sapiens
MNARTYMDVMREQHLTKEEREIRQQLAEKAKAGELKVVNGAAASQPPSKRKRRWDQTADQTPGATPKKLSSWDQAETPGHTPSLRWDETPGRAKGSETPGATPGSKIWDPTPSHTPAGAATPGRGDTPGHATPGHGGATSSARKNRWDETPKTERDTPGHGSGWAETPRTDRGGDSIGETPTPGASKRKSRWDETPASQMGGSTPVLTPGKTPIGTPAMNMATPTPGHIMSMTPEQLQAWRWEREIDERNRPLSDEELDAMFPEGYKVLPPPAGYVPIRTPARKLTATPTPLGGMTGFHMQTEDRTMKSVNDQPSGNLPFLKPDDIQYFDKLLVDVDESTLSPEEQKERKIMKLLLKIKNGTPPMRKAALRQITDKAREFGAGPLFNQILPLLMSPTLEDQERHLLVKVIDRILYKLDDLVRPYVHKILVVIEPLLIDEDYYARVEGREIISNLAKAAGLATMISTMRPDIDNMDEYVRNTTARAFAVVASALGIPSLLPFLKAVCKSKKSWQARHTGIKIVQQIAILMGCAILPHLRSLVEIIEHGLVDEQQKVRTISALAIAALAEAATPYGIESFDSVLKPLWKGIRQHRGKGLAAFLKAIGYLIPLMDAEYANYYTREVMLILIREFQSPDEEMKKIVLKVVKQCCGTDGVEANYIKTEILPPFFKHFWQHRMALDRRNYRQLVDTTVELANKVGAAEIISRIVDDLKDEAEQYRKMVMETIEKIMGNLGAADIDHKLEEQLIDGILYAFQEQTTEDSVMLNGFGTVVNALGKRVKPYLPQICGTVLWRLNNKSAKVRQQAADLISRTAVVMKTCQEEKLMGHLGVVLYEYLGEEYPEVLGSILGALKAIVNVIGMHKMTPPIKDLLPRLTPILKNRHEKVQENCIDLVGRIADRGAEYVSAREWMRICFELLELLKAHKKAIRRATVNTFGYIAKAIGPHDVLATLLNNLKVQERQNRVCTTVAIAIVAETCSPFTVLPALMNEYRVPELNVQNGVLKSLSFLFEYIGEMGKDYIYAVTPLLEDALMDRDLVHRQTASAVVQHMSLGVYGFGCEDSLNHLLNYVWPNVFETSPHVIQAVMGALEGLRVAIGPCRMLQYCLQGLFHPARKVRDVYWPRIYNDDKNTYIRYELDYIL

SEQ ID NO: 890842 - protein, 277 aa, Homo sapiens
IDHKLEEQLIDLVVYADRGAEYVSAREWMRICFELLELLKAHKKAIRRATVNTFGYIAKAIGPHDVLATLLNNLKVQERQNRVCTTVAIAIVAETCSPFTVLPALMNEYRVPELNVQNGVLKSLSFLFEYIGEMGKDYIYAVTPLLEDALMDRDLVHRQTASAVVQHMSLGVYGFGCEDSLNHLLNYVWPNVFETSPHVIQAVMGALEGLRVAIGPCRMLQYCLQGLFHPARKVRDVYWKIYNSIYIGSQDALIAHYPRIYNDDKNTYIRYELDYIL

SEQ ID NO: 890843 - protein, 1040 aa, Homo sapiens
MNARTYMDVMREQHLTKEEREIRQQLAEKAKAGELKVVNGAAASQPPSKRKRRWDQTADQTPGATPKKLSSWDQAETPGHTPSLRWDETPGRAKGSETPGATPGSKIWDPTPSHTPAGAATPGRGDTPGHATPGHGGATSSARKNRWDETPKTERDTPGHGSGWAETPRTDRGGDSIGETPTPGASKRKSRWDETPASQMGGSTPVLTPGKTPIGTPAMNMATPTPGHIMSMTPEQLQAWRWEREIDERNRPLSDEELDAMFPEGYKVLPPPAGYVPIRTPARKLTATPTPLGGMTGFHMQTEDRTMKSVNDQPSGNLPFLKPDDIQYFDKLLVDVDESTLSPEEQKERKIMKLLLKIKNGTPPMRKAALRQITDKAREFGAGPLFNQILPLLMSPTLEDQERHLLVKVIDRILYKLDDLVRPYVHKILVVIEPLLIDEDYYARVEGREIISNLAKAAGLATMISTMRPDIDNMDEYVRNTTARAFAVVASALGIPSLLPFLKAVCKSKKSWQARHTGIKIVQQIAILMGCAILPHLRSLVEIIEHGLVDEQQKVRTISALAIAALAEAATPYGIESFDSVLKPLWKGIRQHRGKGLAAFLKAIGYLIPLMDAEYANYYTREVMLILIREFQSPDEEMKKIVLKVVKQCCGTDGVEANYIKTEILPPFFKHFWQHRMALDRRNYRQLVDTTVELANKVGAAEIISRIVDDLKDEAEQYRKMVMETIEKIMGNLGAADIDHKLEEQLIDGILYAFQEQTTEDSVMLNGFGTVVNALGKRVKPYLPQICGTVLWRLNNKSAKVRQQAADLISRTAVVMKTCQEEKLMGHLGVVLYEYLGEEYPEVLGSILGALKAIVNVIGMHKMTPPIKDLLPRLTPILKNRHEKVQENCIDLVGRIADRGAEYVSAREWMRICFELLELLKAHKKAIRRATVNTFGYIAKAIGPHDVLATLLNNLKVQERQNRVCTTVAIAIVAETCSPFTVLPALMNEYRVPELNVQNGVLKSLSFLFEYIGEMGKDYIYAVTPLLENANLCVFFEHDL

SEQ ID NO: 890844 - protein, 743 aa, Homo sapiens
MNARTYMDVMREQHLTKEEREIRQQLAEKAKAGELKVVNGAAASQPPSKRKRRWDQTADQTPGATPKKLSSWDQAETPGHTPSLRWDETPGRAKGSETPGATPGSKIWDPTPSHTPAGAATPGRGDTPGHATPGHGGATSSARKNRWDETPKTERDTPGHGSGWAETPRTDRGGDSIGETPTPGASKRKSRWDETPASQMGGSTPVLTPGKTPIGTPAMNMATPTPGHIMSMTPEQLQAWRWEREIDERNRPLSDEELDAMFPEGYKVLPPPAGYVPIRTPARKLTATPTPLGGMTGFHMQTEDRTMKSVNDQPSGNLPFLKPDDIQYFDKLLVDVDESTLSPEEQKERKIMKLLLKIKNGTPPMRKAALRQITDKAREFGAGPLFNQILPLLMSPTLEDQERHLLVKVIDRILYKLDDLVRPYVHKILVVIEPLLIDEDYYARVEGREIISNLAKAAGLATMISTMRPDIDNMDEYVRNTTARAFAVVASALGIPSLLPFLKAVCKSKKSWQARHTGIKIVQQIAILMGCAILPHLRSLVEIIEHGLVDEQQKVRTISALAIAALAEAATPYGIESFDSVLKPLWKGIRQHRGKGLAAFLKAIGYLIPLMDAEYANYYTREVMLILIREFQSPDEEMKKIVLKVVKQCCGTDGVEANYIKTEILPPFFKHFWQHRMALDRRNYRQLVDTTVELANKVGAAEIISRIVDDLKDEAEQYRKMVMGDKSRDVIAQHQEQAMFAFN

SEQ ID NO: 890845 - protein, 720 aa, Homo sapiens
MNARTYMDVMREQHLTKEEREIRQQLAEKAKAGELKVVNGAAASQPPSKRKRRWDQTADQTPGATPKKLSSWDQAETPGHTPSLRWDETPGRAKGSETPGATPGSKIWDPTPSHTPAGAATPGRGDTPGHATPGHGGATSSARKNRWDETPKTERDTPGHGSGWAETPRTDRGGDSIGETPTPGASKRKSRWDETPASQMGGSTPVLTPGKTPIGTPAMNMATPTPGHIMSMTPEQLQAWRWEREIDERNRPLSDEELDAMFPEGYKVLPPPAGYVPIRTPARKLTATPTPLGGMTGFHMQTEDRTMKSVNDQPSGNLPFLKPDDIQYFDKLLVDVDESTLSPEEQKERKIMKLLLKIKNGTPPMRKAALRQITDKAREFGAGPLFNQILPLLMSPTLEDQERHLLVKVIDRILYKLDDLVRPYVHKILVVIEPLLIDEDYYARVEGREIISNLAKAAGLATMISTMRPDIDNMDEYVRNTTARAFAVVASALGIPSLLPFLKAVCKSKKSWQARHTGIKIVQQIAILMGCAILPHLRSLVEIIEHGLVDEQQKVRTISALAIAALAEAATPYGIESFDSVLKPLWKGIRQHRGKGLAAFLKAIGYLIPLMDAEYANYYTREVMLILIREFQSPDEEMKKIVLKVQKMREDEDKGPPCGPVNCNEKIVVLLQRLKPEIKDVIEQLNLVTTCLQLQIPRIEDVTILEWLMGADSGNSRSPH

SEQ ID NO: 890846 - protein, 161 aa, Homo sapiens; identical to SEQ ID NO: 890830

SEQ ID NO: 890847 - protein, 1321 aa, Homo sapiens
SGSSWERQFRLCVRVDKMAKIAKTHEDIEAQIREIQGKKAALDEAQGVGLDSTGYYDQEIYGGSDSRFAGYVTSIAATELEDDDDDYSSSTSLLGQKKPGYHAPVALLNDIPQSTEQYDPFAEHRPPKIADREDEYKKHRRTMIISPERLDPFADGGKTPDPKMNARTYMDVMREQHLTKEEREIRQQLAEKAKAGELKVVNGAAASQPPSKRKRRWDQTADQTPGATPKKLSSWDQAETPGHTPSLRWDETPGRAKGSETPGATPGSKIWDPTPSHTPAGAATPGRGDTPGHATPGHGGATSSARKNRWDETPKTERDTPGHGSGWAETPRTDRGGDSIGETPTPGASKRKSRWDETPASQMGGSTPVLTPGKTPIGTPAMNMATPTPGHIMSMTPEQLQAWRWEREIDERNRPLSDEELDAMFPEGYKVLPPPAGYVPIRTPARKLTATPTPLGGMTGFHMQTEDRTMKSVNDQPSGNLPFLKPDDIQYFDKLLVDVDESTLSPEEQKERKIMKLLLKIKNGTPPMRKAALRQITDKAREFGAGPLFNQILPLLMSPTLEDQERHLLVKVIDRILYKLDDLVRPYVHKILVVIEPLLIDEDYYARVEGREIISNLAKAAGLATMISTMRPDIDNMDEYVRNTTARAFAVVASALGIPSLLPFLKAVCKSKKSWQARHTGIKIVQQIAILMGCAILPHLRSLVEIIEHGLVDEQQKVRTISALAIAALAEAATPYGIESFDSVLKPLWKGIRQHRGKGLAAFLKAIGYLIPLMDAEYANYYTREVMLILIREFQSPDEEMKKIVLKVVKQCCGTDGVEANYIKTEILPPFFKHFWQHRMALDRRNYRQLVDTTVELANKVGAAEIISRIVDDLKDEAEQYRKMVMETIEKIMGNLGAADIDHKLEEQLIDGILYAFQEQTTEDSVMLNGFGTVVNALGKRVKPYLPQICGTVLWRLNNKSAKVRQQAADLISRTAVVMKTCQEEKLMGHLGVVLYEYLGEEYPEVLGSILGALKAIVNVIGMHKMTPPIKDLLPRLTPILKNRHEKVQENCIDLVGRIADRGAEYVSAREWMRICFELLELLKAHKKAIRRATVNTFGYIAKAIGPHDVLATLLNNLKVQERQNRVCTTVAIAIVAETCSPFTVLPALMNEYRVPELNVQNGVLKSLSFLFEYIGEMGKDYIYAVTPLLEDALMDRDLVHRQTASAVVQHMSLGVYGFGCEDSLNHLLNYVWPNVFETSPHVIQAVMGALEGLRVAIGPCRMLQYCLQGLFHPARKVRDVYWKIYNSIYIGSQDALIAHYPRIYNDDKNTYIRYELDYIL

SEQ ID NO: 890848 - protein, 171 aa, Homo sapiens
SGSSWERQFRLCVRVDKMAKIAKTHEDIEAQIREIQGKKAALDEAQGVGLDSTGYYDQEIYGGSDSRFAGYVTSIAATELEDDDDDYSSSTSLLGQKKPGYHAPVALLNDIPQSTEQYDPFAEHRPPKIADREDEYKKHRRTMIISPERLDPFADGNSFPLFYKYSEIYLY

SEQ ID NO: 890849 - protein, 1158 aa, Homo sapiens; identical to SEQ ID NO: 890835

SEQ ID NO: 890850 - protein, 1178 aa, Homo sapiens
GRLLLLNSRPRLRGKTPDPKMNARTYMDVMREQHLTKEEREIRQQLAEKAKAGELKVVNGAAASQPPSKRKRRWDQTADQTPGATPKKLSSWDQAETPGHTPSLRWDETPGRAKGSETPGATPGSKIWDPTPSHTPAGAATPGRGDTPGHATPGHGGATSSARKNRWDETPKTERDTPGHGSGWAETPRTDRGGDSIGETPTPGASKRKSRWDETPASQMGGSTPVLTPGKTPIGTPAMNMATPTPGHIMSMTPEQLQAWRWEREIDERNRPLSDEELDAMFPEGYKVLPPPAGYVPIRTPARKLTATPTPLGGMTGFHMQTEDRTMKSVNDQPSGNLPFLKPDDIQYFDKLLVDVDESTLSPEEQKERKIMKLLLKIKNGTPPMRKAALRQITDKAREFGAGPLFNQILPLLMSPTLEDQERHLLVKVIDRILYKLDDLVRPYVHKILVVIEPLLIDEDYYARVEGREIISNLAKAAGLATMISTMRPDIDNMDEYVRNTTARAFAVVASALGIPSLLPFLKAVCKSKKSWQARHTGIKIVQQIAILMGCAILPHLRSLVEIIEHGLVDEQQKVRTISALAIAALAEAATPYGIESFDSVLKPLWKGIRQHRGKGLAAFLKAIGYLIPLMDAEYANYYTREVMLILIREFQSPDEEMKKIVLKVVKQCCGTDGVEANYIKTEILPPFFKHFWQHRMALDRRNYRQLVDTTVELANKVGAAEIISRIVDDLKDEAEQYRKMVMETIEKIMGNLGAADIDHKLEEQLIDGILYAFQEQTTEDSVMLNGFGTVVNALGKRVKPYLPQICGTVLWRLNNKSAKVRQQAADLISRTAVVMKTCQEEKLMGHLGVVLYEYLGEEYPEVLGSILGALKAIVNVIGMHKMTPPIKDLLPRLTPILKNRHEKVQENCIDLVGRIADRGAEYVSAREWMRICFELLELLKAHKKAIRRATVNTFGYIAKAIGPHDVLATLLNNLKVQERQNRVCTTVAIAIVAETCSPFTVLPALMNEYRVPELNVQNGVLKSLSFLFEYIGEMGKDYIYAVTPLLEDALMDRDLVHRQTASAVVQHMSLGVYGFGCEDSLNHLLNYVWPNVFETSPHVIQAVMGALEGLRVAIGPCRMLQYCLQGLFHPARKVRDVYWKIYNSIYIGSQDALIAHYPRIYNDDKNTYIRYELDYIL

SEQ ID NO: 890851 - protein, 1158 aa, Homo sapiens; identical to SEQ ID NO: 890835

SEQ ID NO: 890852 - protein, 1158 aa, Homo sapiens; identical to SEQ ID NO: 890835

SEQ ID NO: 890853 - protein, 512 aa, Homo sapiens
KKGRKNLCFNVVCFYTICPTTLFYHFWQHRMALDRRNYRQLVDTTVELANKVGAAEIISRIVDDLKDEAEQYRKMVMETIEKIMGNLGAADIDHKLEEQLIDGILYAFQEQTTEDSVMLNGFGTVVNALGKRVKPYLPQICGTVLWRLNNKSAKVRQQAADLISRTAVVMKTCQEEKLMGHLGVVLYEYLGEEYPEVLGSILGALKAIVNVIGMHKMTPPIKDLLPRLTPILKNRHEKVQENCIDLVGRIADRGAEYVSAREWMRICFELLELLKAHKKAIRRATVNTFGYIAKAIGPHDVLATLLNNLKVQERQNRVCTTVAIAIVAETCSPFTVLPALMNEYRVPELNVQNGVLKSLSFLFEYIGEMGKDYIYAVTPLLEDALMDRDLVHRQTASAVVQHMSLGVYGFGCEDSLNHLLNYVWPNVFETSPHVIQAVMGALEGLRVAIGPCRMLQYCLQGLFHPARKVRDVYWKIYNSIYIGSQDALIAHYPRIYNDDKNTYIRYELDYIL

SEQ ID NO: 890854 - protein, 1140 aa, Homo sapiens; identical to SEQ ID NO: 890841

SEQ ID NO: 890855 - protein, 232 aa, Homo sapiens
DPYETECAHSVILQRHGPHDVLATLLNNLKVQERQNRVCTTVAIAIVAETCSPFTVLPALMNEYRVPELNVQNGVLKSLSFLFEYIGEMGKDYIYAVTPLLEDALMDRDLVHRQTASAVVQHMSLGVYGFGCEDSLNHLLNYVWPNVFETSPHVIQAVMGALEGLRVAIGPCRMLQYCLQGLFHPARKVRDVYWKIYNSIYIGSQDALIAHYPRIYNDDKNTYIRYELDYIL

SEQ ID NO: 890856 - protein, 880 aa, Homo sapiens
MNARTYMDVMREQHLTKEEREIRQQLAEKAKAGELKVVNGAAASQPPSKRKRRWDQTADQTPGATPKKLSSWDQAETPGHTPSLRWDETPGRAKGSETPGATPGSKIWDPTPSHTPAGAATPGRGDTPGHATPGHGGATSSARKNRWDETPKTERDTPGHGSGWAETPRTDRGGDSIGETPTPGASKRKSRWDETPASQMGGSTPVLTPGKTPIGTPAMNMATPTPGHIMSMTPEQLQAWRWEREIDERNRPLSDEELDAMFPEGYKVLPPPAGYVPIRTPARKLTATPTPLGGMTGFHMQTEDRTMKSVNDQPSGNLPFLKPDDIQYFDKLLVDVDESTLSPEEQKERKIMKLLLKIKNGTPPMRKAALRQITDKAREFGAGPLFNQILPLLMSPTLEDQERHLLVKVIDRILYKLDDLVRPYVHKILVVIEPLLIDEDYYARVEGREIISNLAKAAGLATMISTMRPDIDNMDEYVRNTTARAFAVVASALGIPSLLPFLKAVCKSKKSWQARHTGIKIVQQIAILMGCAILPHLRSLVEIIEHGLVDEQQKVRTISALAIAALAEAATPYGIESFDSVLKPLWKGIRQHRGKGLAAFLKAIGYLIPLMDAEYANYYTREVMLILIREFQSPDEEMKKIVLKVVKQCCGTDGVEANYIKTEILPPFFKHFWQHRMALDRRNYRQLVDTTVELANKVGAAEIISRIVDDLKDEAEQYRKMVMETIEKIMGNLGAADIDHKLEEQLIDGILYAFQEQTTEDSVMLNGFGTVVNALGKRVKPYLPQICGTVLWRLNNKSAKVRQQAADLISRTAVVMKTCQEEKLMGHLGVVLYEYLGEEYPEVLGSILGALKAIVNVIGMEFAGYIRLFLVLTFFFFFFS

SEQ ID NO: 890857 - protein, 161 aa, Homo sapiens; identical to SEQ ID NO: 890830

SEQ ID NO: 890858 - protein, 112 aa, Homo sapiens
WAETPRTDRGGDSIGETPTPGASKRKSRWDETPASQMGGSTPVLTPGKTPIGTPAMNMATPTPGRTVSLDIIVFFSINYLIFSFVVFCVLLMSTSSKNKEIYKFKSWFAFII

SEQ ID NO: 890859 - protein, 1189 aa, Homo sapiens
MKTRQNKDSMSMRSGRKKEAPGPREELRSRGRASPGGVSTSSSDGKAEKSRQTAKKARVEEASTPKVNKQGRSEEISESESEETNAPKKTKTEQELPRPQSPSDLDSLDGRSLNDDGSSDPRDIDQDNRSTSPSIYSPGSVENDSDSSSGLSQGPARPYHPPPLFPPSPQPPDSTPRQPEASFEPHPSVTPTGYHAPMEPPTSRMFQAPPGAPPPHPQLYPGGTGGVLSGPPMGPKGGGAASSVGGPNGGKQHPPPTTPISVSSSGASGAPPTKPPTTPVGGGNLPSAPPPANFPHVTPNLPPPPALRPLNNASASPPGLGAQPLPGHLPSPHAMGQGMGGLPPGPEKGPTLAPSPHSLPPASSSAPAPPMRFPYSSSSSSSAAASSSSSSSSSSASPFPASQALPSYPHSFPPPTSLSVSNQPPKYTQPSLPSQAVWSQGPPPPPPYGRLLANSNAHPGPFPPSTGAQSTAHPPVSTHHHHHQQQQQQQQQQQQQQQQQQHHGNSGPPPPGAFPHPLEGGSSHHAHPYAMSPSLGSLRPYPPGPAHLPPPHSQVSYSQAGPNGPPVSSSSNSSSSTSQGSYPCSHPSPSQGPQGAPYPFPPVPTVTTSSATLSTVIATVASSPAGYKTASPPGPPPYGKRAPSPGAYKTATPPGYKPGSPPSFRTGTPPGYRGTSPPAGPGTFKPGSPTVGPGPLPPAGPSGLPSLPPPPAAPASGPPLSATQIKQEPAEEYETPESPVPPARSPSPPPKVVDVPSHASQSARFNKHLDRGFNSCARSDLYFVPLEGSKLAKKRADLVEKVRREAEQRAREEKEREREREREKEREREKERELERSVKLAQEGRAPVECPSLGPVPHRPPFEPGSAVATVPPYLGPDTPALRTLSEYARPHVMSPGNRNHPFYVPLGAVDPGLLGYNVPALYSSDPAAREREREARERDLRDRLKPGFEVKPSELEPLHGVPGPGLDPFPRHGGLALQPGPPGLHPFPFHPSLGPLERERLALAAGPALRPDMSYAERLAAERQHAERVAALGNDPLARLQMLNVTPHHHQHSHIHSHLHLHQQDAIHAASASVHPLIDPLASGSHLTRIPYPAGTLPNPLLPHPLHENEVLRHQLFAAPYRDLPASLSAPMSAAHQLQAMHAQSAELQRLALEQQQWLHAHHPLHSVPLPAQEDYYSHLKKESDKPL

SEQ ID NO: 890860 - protein, 1189 aa, Homo sapiens; identical to SEQ ID NO: 890859

SEQ ID NO: 890861 - protein, 1283 aa, Homo sapiens
MKTRQNKDSMSMRSGRKKEAPGPREELRSRGRASPGGVSTSSSDGKAEKSRQTAKKARVEEASTPKVNKQGRSEEISESESEETNAPKKTKTEQELPRPQSPSDLDSLDGRSLNDDGSSDPRDIDQDNRSTSPSIYSPGSVENDSDSSSGLSQGPARPYHPPPLFPPSPQPPDSTPRQPEASFEPHPSVTPTGYHAPMEPPTSRMFQAPPGAPPPHPQLYPGGTGGVLSGPPMGPKGGGAASSVGGPNGGKQHPPPTTPISVSSSGASGAPPTKPPTTPVGGGNLPSAPPPANFPHVTPNLPPPPALRPLNNASASPPGLGAQPLPGHLPSPHAMGQGMGGLPPGPEKGPTLAPSPHSLPPASSSAPAPPMRFPYSSSSSSSAAASSSSSSSSSSASPFPASQALPSYPHSFPPPTSLSVSNQPPKYTQPSLPSQAVWSQGPPPPPPYGRLLANSNAHPGPFPPSTGAQSTAHPPVSTHHHHHQQQQQQQQQQQQQQQQQQHHGNSGPPPPGAFPHPLEGGSSHHAHPYAMSPSLGSLRPYPPGPAHLPPPHSQVSYSQAGPNGPPVSSSSNSSSSTSQGSYPCSHPSPSQGPQGAPYPFPPVPTVTTSSATLSTVIATVASSPAGYKTASPPGPPPYGKRAPSPGAYKTATPPGYKPGSPPSFRTGTPPGYRGTSPPAGPGTFKPGSPTVGPGPLPPAGPSGLPSLPPPPAAPASGPPLSATQIKQEPAEEYETPESPVPPARSPSPPPKVVDVPSHASQSASERPGGAEVGLERGRRQGGDERGSSREEALRWCSVLEKHAPLLRPGLVASEARSSSQPAGVVLRRGLQALAGAAALRAPSGSSHRLSARCFQPGRFNKHLDRGFNSCARSDLYFVPLEGSKLAKKRADLVEKVRREAEQRAREEKEREREREREKEREREKERELERSVKLAQEGRAPVECPSLGPVPHRPPFEPGSAVATVPPYLGPDTPALRTLSEYARPHVMSPGNRNHPFYVPLGAVDPGLLGYNVPALYSSDPAAREREREARERDLRDRLKPGFEVKPSELEPLHGVPGPGLDPFPRHGGLALQPGPPGLHPFPFHPSLGPLERERLALAAGPALRPDMSYAERLAAERQHAERVAALGNDPLARLQMLNVTPHHHQHSHIHSHLHLHQQDAIHAASASVHPLIDPLASGSHLTRIPYPAGTLPNPLLPHPLHENEVLRHQLFAAPYRDLPASLSAPMSAAHQLQAMHAQSAELQRLALEQQQWLHAHHPLHSVPLPAQEDYYSHLKKESDKPL

SEQ ID NO: 890862 - protein, 1277 aa, Homo sapiens
MKTRQNKDSMSMRSGRKKEAPGPREELRSRGRASPGGVSTSSSDGKAEKSRQTAKKARVEEASTPKVNKQGRSEEISESESEETNAPKKTKTEQELPRPQSPSDLDSLDGRSLNDDGSSDPRDIDQDNRSTSPSIYSPGSVENDSDSSSGLSQGPARPYHPPPLFPPSPQPPDSTPRQPEASFEPHPSVTPTGYHAPMEPPTSRMFQAPPGAPPPHPQLYPGGTGGVLSGPPMGPKGGGAASSVGGPNGGKQHPPPTTPISVSSSGASGAPPTKPPTTPVGGGNLPSAPPPANFPHVTPNLPPPPALRPLNNASASPPGLGAQPLPGHLPSPHAMGQGMGGLPPGPEKGPTLAPSPHSLPPASSSAPAPPMRFPYSSSSSSSAAASSSSSSSSSSASPFPASQALPSYPHSFPPPTSLSVSNQPPKYTQPSLPSQAVWSQGPPPPPPYGRLLANSNAHPGPFPPSTGAQSTAHPPVSTHHHHHQQQQQQQQQQQQHHGNSGPPPPGAFPHPLEGGSSHHAHPYAMSPSLGSLRPYPPGPAHLPPPHSQVSYSQAGPNGPPVSSSSNSSSSTSQGSYPCSHPSPSQGPQGAPYPFPPVPTVTTSSATLSTVIATVASSPAGYKTASPPGPPPYGKRAPSPGAYKTATPPGYKPGSPPSFRTGTPPGYRGTSPPAGPGTFKPGSPTVGPGPLPPAGPSGLPSLPPPPAAPASGPPLSATQIKQEPAEEYETPESPVPPARSPSPPPKVVDVPSHASQSASERPGGAEVGLERGRRQGGDERGSSREEALRWCSVLEKHAPLLRPGLVASEARSSSQPAGVVLRRGLQALAGAAALRAPSGSSHRLSARCFQPGRFNKHLDRGFNSCARSDLYFVPLEGSKLAKKRADLVEKVRREAEQRAREEKEREREREREKEREREKERELERSVKLAQEGRAPVECPSLGPVPHRPPFEPGSAVATVPPYLGPDTPALRTLSEYARPHVMSPGNRNHPFYVPLGAVDPGLLGYNVPALYSSDPAAREREREARERDLRDRLKPGFEVKPSELEPLHGVPGPGLDPFPRHGGLALQPGPPGLHPFPFHPSLGPLERERLALAAGPALRPDMSYAERLAAERQHAERVAALGNDPLARLQMLNVTPHHHQHSHIHSHLHLHQQDAIHAASASVHPLIDPLASGSHLTRIPYPAGTLPNPLLPHPLHENEVLRHQLFAAPYRDLPASLSAPMSAAHQLQAMHAQSAELQRLALEQQQWLHAHHPLHSVPLPAQEDYYSHLKKESDKPL

SEQ ID NO: 890863 - protein, 1086 aa, Homo sapiens
MEPPTSRMFQAPPGAPPPHPQLYPGGTGGVLSGPPMGPKGGGAASSVGGPNGGKQHPPPTTPISVSSSGASGAPPTKPPTTPVGGGNLPSAPPPANFPHVTPNLPPPPALRPLNNASASPPGLGAQPLPGHLPSPHAMGQGMGGLPPGPEKGPTLAPSPHSLPPASSSAPAPPMRFPYSSSSSSSAAASSSSSSSSSSASPFPASQALPSYPHSFPPPTSLSVSNQPPKYTQPSLPSQAVWSQGPPPPPPYGRLLANSNAHPGPFPPSTGAQSTAHPPVSTHHHHHQQQQQQQQQQQQQQQQQQHHGNSGPPPPGAFPHPLEGGSSHHAHPYAMSPSLGSLRPYPPGPAHLPPPHSQVSYSQAGPNGPPVSSSSNSSSSTSQGSYPCSHPSPSQGPQGAPYPFPPVPTVTTSSATLSTVIATVASSPAGYKTASPPGPPPYGKRAPSPGAYKTATPPGYKPGSPPSFRTGTPPGYRGTSPPAGPGTFKPGSPTVGPGPLPPAGPSGLPSLPPPPAAPASGPPLSATQIKQEPAEEYETPESPVPPARSPSPPPKVVDVPSHASQSASERPGGAEVGLERGRRQGGDERGSSREEALRWCSVLEKHAPLLRPGLVASEARSSSQPAGVVLRRGLQALAGAAALRAPSGSSHRLSARCFQPGRFNKHLDRGFNSCARSDLYFVPLEGSKLAKKRADLVEKVRREAEQRAREEKEREREREREKEREREKERELERSVKLAQEGRAPVECPSLGPVPHRPPFEPGSAVATVPPYLGPDTPALRTLSEYARPHVMSPGNRNHPFYVPLGAVDPGLLGYNVPALYSSDPAAREREREARERDLRDRLKPGFEVKPSELEPLHGVPGPGLDPFPRHGGLALQPGPPGLHPFPFHPSLGPLERERLALAAGPALRPDMSYAERLAAERQHAERVAALGNDPLARLQMLNVTPHHHQHSHIHSHLHLHQQDAIHAASASVHPLIDPLASGSHLTRIPYPAGTLPNPLLPHPLHENEVLRHQLFAAPYRDLPASLSAPMSAAHQLQAMHAQSAELQRLALEQQQWLHAHHPLHSVPLPAQEDYYSHLKKESDKPL

SEQ ID NO: 890864 - protein, 1231 aa, Homo sapiens
MKTRQNKDSMSMRSGRKKEAPGPREELRSRGRASPGGVSTSSSDGKAEKSRQTAKKARVEEASTPKVNKQGRSEEISESESEETNAPKKTKTEQELPRPQSPSDLDSLDGRSLNDDGSSDPRDIDQDNRSTSPSIYSPGSVENDSDSSSGLSQGPARPYHPPPLFPPSPQPPDSTPRQPEASFEPHPSVTPTGYHAPGKQHPPPTTPISVSSSGASGAPPTKPPTTPVGGGNLPSAPPPANFPHVTPNLPPPPALRPLNNASASPPGLGAQPLPGHLPSPHAMGQGMGGLPPGPEKGPTLAPSPHSLPPASSSAPAPPMRFPYSSSSSSSAAASSSSSSSSSSASPFPASQALPSYPHSFPPPTSLSVSNQPPKYTQPSLPSQAVWSQGPPPPPPYGRLLANSNAHPGPFPPSTGAQSTAHPPVSTHHHHHQQQQQQQQQQQQQQQQQQHHGNSGPPPPGAFPHPLEGGSSHHAHPYAMSPSLGSLRPYPPGPAHLPPPHSQVSYSQAGPNGPPVSSSSNSSSSTSQGSYPCSHPSPSQGPQGAPYPFPPVPTVTTSSATLSTVIATVASSPAGYKTASPPGPPPYGKRAPSPGAYKTATPPGYKPGSPPSFRTGTPPGYRGTSPPAGPGTFKPGSPTVGPGPLPPAGPSGLPSLPPPPAAPASGPPLSATQIKQEPAEEYETPESPVPPARSPSPPPKVVDVPSHASQSASERPGGAEVGLERGRRQGGDERGSSREEALRWCSVLEKHAPLLRPGLVASEARSSSQPAGVVLRRGLQALAGAAALRAPSGSSHRLSARCFQPGRFNKHLDRGFNSCARSDLYFVPLEGSKLAKKRADLVEKVRREAEQRAREEKEREREREREKEREREKERELERSVKLAQEGRAPVECPSLGPVPHRPPFEPGSAVATVPPYLGPDTPALRTLSEYARPHVMSPGNRNHPFYVPLGAVDPGLLGYNVPALYSSDPAAREREREARERDLRDRLKPGFEVKPSELEPLHGVPGPGLDPFPRHGGLALQPGPPGLHPFPFHPSLGPLERERLALAAGPALRPDMSYAERLAAERQHAERVAALGNDPLARLQMLNVTPHHHQHSHIHSHLHLHQQDAIHAASASVHPLIDPLASGSHLTRIPYPAGTLPNPLLPHPLHENEVLRHQLFAAPYRDLPASLSAPMSAAHQLQAMHAQSAELQRLALEQQQWLHAHHPLHSVPLPAQEDYYSHLKKESDKPL

SEQ ID NO: 890865 - protein, 753 aa, Homo sapiens
MSPSLGSLRPYPPGPAHLPPPHSQVSYSQAGPNGPPVSSSSNSSSSTSQGSYPCSHPSPSQGPQGAPYPFPPVPTVTTSSATLSTVIATVASSPAGYKTASPPGPPPYGKRAPSPGAYKTATPPGYKPGSPPSFRTGTPPGYRGTSPPAGPGTFKPGSPTVGPGPLPPAGPSGLPSLPPPPAAPASGPPLSATQIKQEPAEEYETPESPVPPARSPSPPPKVVDVPSHASQSASERPGGAEVGLERGRRQGGDERGSSREEALRWCSVLEKHAPLLRPGLVASEARSSSQPAGVVLRRGLQALAGAAALRAPSGSSHRLSARCFQPGRFNKHLDRGFNSCARSDLYFVPLEGSKLAKKRADLVEKVRREAEQRAREEKEREREREREKEREREKERELERSVKLAQEGRAPVECPSLGPVPHRPPFEPGSAVATVPPYLGPDTPALRTLSEYARPHVMSPGNRNHPFYVPLGAVDPGLLGYNVPALYSSDPAAREREREARERDLRDRLKPGFEVKPSELEPLHGVPGPGLDPFPRHGGLALQPGPPGLHPFPFHPSLGPLERERLALAAGPALRPDMSYAERLAAERQHAERVAALGNDPLARLQMLNVTPHHHQHSHIHSHLHLHQQDAIHAASASVHPLIDPLASGSHLTRIPYPAGTLPNPLLPHPLHENEVLRHQLFAAPYRDLPASLSAPMSAAHQLQAMHAQSAELQRLALEQQQWLHAHHPLHSVPLPAQEDYYSHLKKESDKPL

SEQ ID NO: 890866 - protein, 1149 aa, Homo sapiens
MKTRQNKDSMSMRSGRKKEAPGPREELRSRGRASPGGVSTSSSDGKAEKSRQTAKKARVEEASTPKVNKQGRSEEISESESEETNAPKKTKTEQELPRPQSPSDLDSLDGRSLNDDGSSDPRDIDQDNRSTSPSIYSPGSVENDSDSSSGLSQGPARPYHPPPLFPPSPQPPDSTPRQPEASFEPHPSVTPTGYHAPMEPPTSRMFQAPPGAPPPHPQLYPGGTGGVLSGPPMGPKGGGAASSVGGPNGGKQHPPPTTPISVSSSGASGAPPTKPPTTPVGGGNLPSAPPPANFPHVTPNLPPPPALRPLNNASASPPGLGAQPLPGHLPSPHAMGQGMGGLPPGPEKGPTLAPSPHSLPPASSSAPAPPMRFPYSSSSSSSAAASSSSSSSSSSASPFPASQALPSYPHSFPPPTSLSVSNQPPKYTQPSLPSQAVWSQGPPPPPPYGRLLANSNAHPGPFPPSTGAQSTAHPPVSTHHHHHQQQQQQQQQQQQQQQQQQHHGNSGPPPPGAFPHPLEGGSSHHAHPYAMSPSLGSLRPYPPGPAHLPPPHSQVSYSQAGPNGPPVSSSSNSSSSTSQGSYPCSHPSPSQGPQGAPYPFPPVPTVTTSSATLSTVIATVASSPAGYKTASPPGPPPYGKRAPSPGAYKTATPPGYKPGSPPSFRTGTPPGYRGTSPPAGPGTFKPGSPTVGPGPLPPAGPSGLPSLPPPPAAPASGPPLSATQIKQEPAEEYETPESPVPPARSPSPPPKVVDVPSHASQSASERPGGAEVGLERGRRQGGDERGSSREEALRWCSVLEKHAPLLRPGLVASEARSSSQPAGVVLRRGLQALAGAAALRAPSGSSHRLSARCFQPGRFNKHLDRGFNSCARSDLYFVPLEGSKLAKKRADLVEKVRREAEQRAREEKEREREREREKEREREKERELERSVKLAQEGRAPVECPSLGPVPHRPPFEPGSAVATVPPYLGPDTPALRTLSEYARPHVMSPGNRNHPFYVPLGAVDPGLLGYNVPALYSSDPAAREREREARERDLRDRLKPGFEVKPSELEPLHGVPGPGLDPFPRHGGLALQPGPPGLHPFPFHPSLGPLERERLALAAGPALRPDMSYAERLAGDSPSPPALPHPLAPAPAPARCYPCSLCLGAPSH

SEQ ID NO: 890867 - protein, 457 aa, Homo sapiens
KFQRIPIQHFLPPGYKIEVQTNDMVNVTTPWQVHQIPTHGIQPQPQPPPQHPSQPSAQSAPAPAQPAPQPPPAKVSKPSQPHHREREREREKEREREKERELERSVKLAQEGRAPVECPSLGPVPHRPPFEPGSAVATVPPYLGPDTPALRTLSEYARPHVMSPGNRNHPFYVPLGAVDPGLLGYNVPALYSSDPAAREREREARERDLRDRLKPGFEVKPSELEPLHGVPGPGLDPFPRHGGLALQPGPPGLHPFPFHPSLGPLERERLALAAGPALRPDMSYAERLAAERQHAERVAALGNDPLARLQMLNVTPHHHQHSHIHSHLHLHQQDAIHAASASVHPLIDPLASGSHLTRIPYPAGTLPNPLLPHPLHENEVLRHQLFAAPYRDLPASLSAPMSAAHQLQAMHAQSAELQRLALEQQQWLHAHHPLHSVPLPAQEDYYSHLKKESDKPL

SEQ ID NO: 890868 - protein, 1283 aa, Homo sapiens; identical to SEQ ID NO: 890861

SEQ ID NO: 890869 - protein, 1142 aa, Homo sapiens
MKTRQNKDSMSMRSGRKKEAPGPREELRSRGRASPGGVSTSSSDGKAEKSRQTAKKARVEEASTPKVNKQGRSEEISESESEETNAPKKTKTEQELPRPQSPSDLDSLDGRSLNDDGSSDPRDIDQDNRSTSPSIYSPGSVENDSDSSSGLSQGPARPYHPPPLFPPSPQPPDSTPRQPEASFEPHPSVTPTGYHAPMEPPTSRMFQAPPGAPPPHPQLYPGGTGGVLSGPPMGPKGGGAASSVGGPNGGKQHPPPTTPISVSSSGASGAPPTKPPTTPVGGGNLPSAPPPANFPHVTPNLPPPPALRPLNNASASPPGLGAQPLPGHLPSPHAMGQGMGGLPPGPEKGPTLAPSPHSLPPASSSAPAPPMRFPYSSSSSSSAAASSSSSSSSSSASPFPASQALPSYPHSFPPPTSLSVSNQPPKYTQPSLPSQAVWSQGPPPPPPYGRLLANSNAHPGPFPPSTGAQSTAHPPVSTHHHHHQQQQQQQQQQQQQQQQQQHHGNSGPPPPGAFPHPLEGGSSHHAHPYAMSPSLGSLRPYPPGPAHLPPPHSQVSYSQAGPNGPPVSSSSNSSSSTSQGSYPCSHPSPSQGPQGAPYPFPPVPTVTTSSATLSTVIATVASSPAGYKTASPPGPPPYGKRAPSPGAYKTATPPGYKPGSPPSFRTGTPPGYRGTSPPAGPGTFKPGSPTVGPGPLPPAGPSGLPSLPPPPAAPASGPPLSATQIKQEPAEEYETPESPVPPARSPSPPPKVVDVPSHASQSASERPGGAEVGLERGRRQGGDERGSSREEALRWCSVLEKHAPLLRPGLVASEARSSSQPAGVVLRRGLQALAGAAALRAPSGSSHRLSARCFQPGRFNKHLDRGFNSCARSDLYFVPLEGSKLAKKRADLVEKVRREAEQRAREEKEREREREREKEREREKERELERSVKLAQEGRAPVECPSLGPVPHRPPFEPGSAVATVPPYLGPDTPALRTLSEYARPHVMSPGNRNHPFYVPLGAVDPGLLGYNVPALYSSDPAAREREREARERDLRDRLKPGFEVKPSELEPLHGVPGPGLDPFPRHGGLALQPGPPGLHPFPFHPSLGPLERERLALAAGPALRPDMSYAERLAAERQHAERVAALGNDPLARLQMLNNSP

SEQ ID NO: 890870 - protein, 293 aa, Homo sapiens
TRARAVTYWFSEALVLGGESIELRGDWIPGTPRKQERVVSRTSLDMRGASAAWHTKPSELEPLHGVPGPGLDPFPRHGGLALQPGPPGLHPFPFHPSLGPLERERLALAAGPALRPDMSYAERLAAERQHAERVAALGNDPLARLQMLNVTPHHHQHSHIHSHLHLHQQDAIHAASASVHPLIDPLASGSHLTRIPYPAGTLPNPLLPHPLHENEVLRHQLFAAPYRDLPASLSAPMSAAHQLQAMHAQSAELQRLALEQQQWLHAHHPLHSVPLPAQEDYYSHLKKESDKPL

SEQ ID NO: 890871 - protein, 213 aa, Homo sapiens
GALELQEARVMLVPLVNLGPLERERLALAAGPALRPDMSYAERLAAERQHAERVAALGNDPLARLQMLNVTPHHHQHSHIHSHLHLHQQDAIHAASASVHPLIDPLASGSHLTRIPYPAGTLPNPLLPHPLHENEVLRHQLFAAPYRDLPASLSAPMSAAHQLQAMHAQSAELQRLALEQQQWLHAHHPLHSVPLPAQEDYYSHLKKESDKPL

SEQ ID NO: 890872 - protein, 115 aa, Homo sapiens
MLSMQPLPRCTLSLTPWPQGLTLPGSPTQLELSLTPCFLTLCTRTKFFVTSSLLPLTGTCRPPFLPRCQQLISCRPCTHSQLSCSAWRWNSSSGCMPITRCTVCRCLPRRTTTVT

SEQ ID NO: 890873 - protein, 133 aa, Homo sapiens
MHRSPSKLLAPASAASASVHPLIDPLASGSHLTRIPYPAGTLPNPLLPHPLHENEVLRHQLFAAPYRDLPASLSAPMSAAHQLQAMHAQSAELQRLALEQQQWLHAHHPLHSVPLPAQEDYYSHLKKESDKPL

SEQ ID NO: 890874 - protein, 1151 aa, Homo sapiens
MKTRQNKDSMSMRSGRKKEAPGPREELRSRGRASPGGVSTSSSDGKAEKSRQTAKKARVEEASTPKVNKQGRSEEISESESEETNAPKKTKTEQELPRPQSPSDLDSLDGRSLNDDGSSDPRDIDQDNRSTSPSIYSPGSVENDSDSSSGLSQGPARPYHPPPLFPPSPQPPDSTPRQPEASFEPHPSVTPTGYHAPMEPPTSRMFQAPPGAPPPHPQLYPGGTGGVLSGPPMGPKGGGAASSVGGPNGGKQHPPPTTPISVSSSGASGAPPTKPPTTPVGGGNLPSAPPPANFPHVTPNLPPPPALRPLNNASASPPGLGAQPLPGHLPSPHAMGQGMGGLPPGPEKGPTLAPSPHSLPPASSSAPAPPMRFPYSSSSSSSAAASSSSSSSSSSASPFPASQALPSYPHSFPPPTSLSVSNQPPKYTQPSLPSQAVWSQGPPPPPPYGRLLANSNAHPGPFPPSTGAQSTAHPPVSTHHHHHQQQQQQQQQQQQQQQQQQHHGNSGPPPPGAFPHPLEGGSSHHAHPYAMSPSLGSLRPYPPGPAHLPPPHSQVSYSQAGPNGPPVSSSSNSSSSTSQGSYPCSHPSPSQGPQGAPYPFPPVPTVTTSSATLSTVIATVASSPAGYKTASPPGPPPYGKRAPSPGAYKTATPPGYKPGSPPSFRTGTPPGYRGTSPPAGPGTFKPGSPTVGPGPLPPAGPSGLPSLPPPPAAPASGPPLSATQIKQEPAEEYETPESPVPPARSPSPPPKVVDVPSHASQSASERPGGAEVGLERGRRQGGDERGSSREEALRWCSVLEKHAPLLRPGLVASEARSSSQPAGVVLRRGLQALAGAAALRAPSGSSHRLSARCFQPGRFNKHLDRGFNSCARSDLYFVPLEGSKLAKKRADLVEKVRREAEQRAREEKEREREREREKEREREKERELERSVKLAQEGRAPVECPSLGPVPHRPPFEPGSAVATVPPYLGPDTPALRTLSEYARPHVMSPGNRNHPFYVPLGAVDPGLLGYNVPALYSSDPAAREREREARERDLRDRLKPGFEVKPSELEPLHGVPGPGLDPFPRHGGLALQPGPPGLHPFPFHPSLGPLERERLALAAGPALRPDMSYAERLAAERQHAERVAALGNDPLARLQMLNPPLPRWCDYFIC

SEQ ID NO: 890875 - protein, 926 aa, Homo sapiens
MKTRQNKDSMSMRSGRKKEAPGPREELRSRGRASPGGVSTSSSDGKAEKSRQTAKKARVEEASTPKVNKQGRSEEISESESEETNAPKKTKTEQELPRPQSPSDLDSLDGRSLNDDGSSDPRDIDQDNRSTSPSIYSPGSVENDSDSSSGLSQGPARPYHPPPLFPPSPQPPDSTPRQPEASFEPHPSVTPTGYHAPMEPPTSRMFQAPPGAPPPHPQLYPGGTGGVLSGPPMGPKGGGAASSVGGPNGGKQHPPPTTPISVSSSGASGAPPTKPPTTPVGGGNLPSAPPPANFPHVTPNLPPPPALRPLNNASASPPGLGAQPLPGHLPSPHAMGQGMGGLPPGPEKGPTLAPSPHSLPPASSSAPAPPMRFPYSSSSSSSAAASSSSSSSSSSASPFPASQALPSYPHSFPPPTSLSVSNQPPKYTQPSLPSQAVWSQGPPPPPPYGRLLANSNAHPGPFPPSTGAQSTAHPPVSTHHHHHQQQQQQQQQQQQQQQQQQHHGNSGPPPPGAFPHPLEGGSSHHAHPYAMSPSLGSLRPYPPGPAHLPPPHSQVSYSQAGPNGPPVSSSSNSSSSTSQGSYPCSHPSPSQGPQGAPYPFPPVPTVTTSSATLSTVIATVASSPAGYKTASPPGPPPYGKRAPSPGAYKTATPPGYKPGSPPSFRTGTPPGYRGTSPPAGPGTFKPGSPTVGPGPLPPAGPSGLPSLPPPPAAPASGPPLSATQIKQEPAEEYETPESPVPPARSPSPPPKVVDVPSHASQSARFNKHLDRGFNSCARSDLYFVPLEGSKLAKKRADLVEKVRREAEQRAREEKEREREREREKEREREKERELERSVKLAQEGRAPVECPSLGPVPHRPPFEPGSAVATVPPYLGPDTPALRTLSEYARPHVMSPGNRKSDHVCPGQWVPIVLILSPSPQLGPRA

SEQ ID NO: 890876 - protein, 682 aa, Homo sapiens
MKTRQNKDSMSMRSGRKKEAPGPREELRSRGRASPGGVSTSSSDGKAEKSRQTAKKARVEEASTPKVNKQGRSEEISESESEETNAPKKTKTEQELPRPQSPSDLDSLDGRSLNDDGSSDPRDIDQDNRSTSPSIYSPGSVENDSDSSSGLSQGPARPYHPPPLFPPSPQPPDSTPRQPEASFEPHPSVTPTGYHAPMEPPTSRMFQAPPGAPPPHPQLYPGGTGGVLSGPPMGPKGGGAASSVGGPNGGKQHPPPTTPISVSSSGASGAPPTKPPTTPVGGGNLPSAPPPANFPHVTPNLPPPPALRPLNNASASPPGLGAQPLPGHLPSPHAMGQGMGGLPPGPEKGPTLAPSPHSLPPASSSAPAPPMRFPYSSSSSSSAAASSSSSSSSSSASPFPASQALPSYPHSFPPPTSLSVSNQPPKYTQPSLPSQAVWSQGPPPPPPYGRLLANSNAHPGPFPPSTGAQSTAHPPVSTHHHHHQQQQQQQQQQQQQQQQQQHHGNSGPPPPGAFPHPLEGGSSHHAHPYAMSPSLGSLRPYPPGPAHLPPPHSQVSYSQAGPNGPPVSSSSNSSSSTSQGSYPCSHPSPSQGPQGAPYPFPPVPTVTTSSATLSTVIATVASSPAGYKTASPPGPPPYGKRAPSPGAYKTATPQRERRRSLCGGVWSEQEQLKQRWARRITA

SEQ ID NO: 890877 - protein, 637 aa, Homo sapiens
MKTRQNKDSMSMRSGRKKEAPGPREELRSRGRASPGGVSTSSSDGKAEKSRQTAKKARVEEASTPKVNKQGRSEEISESESEETNAPKKTKTEQELPRPQSPSDLDSLDGRSLNDDGSSDPRDIDQDNRSTSPSIYSPGSVENDSDSSSGLSQGPARPYHPPPLFPPSPQPPDSTPRQPEASFEPHPSVTPTGYHAPMEPPTSRMFQAPPGAPPPHPQLYPGGTGGVLSGPPMGPKGGGAASSVGGPNGGKQHPPPTTPISVSSSGASGAPPTKPPTTPVGGGNLPSAPPPANFPHVTPNLPPPPALRPLNNASASPPGLGAQPLPGHLPSPHAMGQGMGGLPPGPEKGPTLAPSPHSLPPASSSAPAPPMRFPYSSSSSSSAAASSSSSSSSSSASPFPASQALPSYPHSFPPPTSLSVSNQPPKYTQPSLPSQAVWSQGPPPPPPYGRLLANSNAHPGPFPPSTGAQSTAHPPVSTHHHHHQQQQQQQQQQQQQQQQQQHHGNSGPPPPGAFPHPLEGGSSHHAHPYAMSPSLGSLRPYPPGPAHLPPPHSQVSYSQAGPNGPPVSSSSNSSSSTSQGSYPCSHPSPSQGPQGAPYPFPPVPTVTTSSATLSTVIATVARVAEEVVDRRTPGCEV

SEQ ID NO: 890878 - protein, 650 aa, Homo sapiens
MKTRQNKDSMSMRSGRKKEAPGPREELRSRGRASPGGVSTSSSDGKAEKSRQTAKKARVEEASTPKVNKQGRSEEISESESEETNAPKKTKTEQELPRPQSPSDLDSLDGRSLNDDGSSDPRDIDQDNRSTSPSIYSPGSVENDSDSSSGLSQGPARPYHPPPLFPPSPQPPDSTPRQPEASFEPHPSVTPTGYHAPMEPPTSRMFQAPPGAPPPHPQLYPGGTGGVLSGPPMGPKGGGAASSVGGPNGGKQHPPPTTPISVSSSGASGAPPTKPPTTPVGGGNLPSAPPPANFPHVTPNLPPPPALRPLNNASASPPGLGAQPLPGHLPSPHAMGQGMGGLPPGPEKGPTLAPSPHSLPPASSSAPAPPMRFPYSSSSSSSAAASSSSSSSSSSASPFPASQALPSYPHSFPPPTSLSVSNQPPKYTQPSLPSQAVWSQGPPPPPPYGRLLANSNAHPGPFPPSTGAQSTAHPPVSTHHHHHQQQQQQQQQQQQQQQQQQHHGNSGPPPPGAFPHPLEGGSSHHAHPYAMSPSLGSLRPYPPGPAHLPPPHSQVSYSQAAAAAAAAAAAAASSITETSWGPPHMPMRLGKSKLVYAANAASVGSGPETQGLTPPQTGPTPPPCKRTRRVCGPPPTPHGGWFGQWKAGPP

SEQ ID NO: 890879 - protein, 546 aa, Homo sapiens
MKTRQNKDSMSMRSGRKKEAPGPREELRSRGRASPGGVSTSSSDGKAEKSRQTAKKARVEEASTPKVNKQGRSEEISESESEETNAPKKTKTEQELPRPQSPSDLDSLDGRSLNDDGSSDPRDIDQDNRSTSPSIYSPGSVENDSDSSSGLSQGPARPYHPPPLFPPSPQPPDSTPRQPEASFEPHPSVTPTGYHAPMEPPTSRMFQAPPGAPPPHPQLYPGGTGGVLSGPPMGPKGGGAASSVGGPNGGKQHPPPTTPISVSSSGASGAPPTKPPTTPVGGGNLPSAPPPANFPHVTPNLPPPPALRPLNNASASPPGLGAQPLPGHLPSPHAMGQGMGGLPPGPEKGPTLAPSPHSLPPASSSAPAPPMRFPYSSSSSSSAAASSSSSSSSSSASPFPASQALPSYPHSFPPPTSLSVSNQPPKYTQPSLPSQAVWSQGPPPPPPYGRLLANSNAHPGPFPPSTGAQSTAHPPVSTHHHHHQQQQQQQQQQQQHHGNSGPPPPGAFPHPLEGGSSHHAHPYAMSPSLGSLRPYPPGPAHLPPQS

SEQ ID NO: 890880 - protein, 585 aa, Homo sapiens
MKTRQNKDSMSMRSGRKKEAPGPREELRSRGRASPGGVSTSSSDGKAEKSRQTAKKARVEEASTPKVNKQGRSEEISESESEETNAPKKTKTEQELPRPQSPSDLDSLDGRSLNDDGSSDPRDIDQDNRSTSPSIYSPGSVENDSDSSSGLSQGPARPYHPPPLFPPSPQPPDSTPRQPEASFEPHPSVTPTGYHAPMEPPTSRMFQAPPGAPPPHPQLYPGGTGGVLSGPPMGPKGGGAASSVGGPNGGKQHPPPTTPISVSSSGASGAPPTKPPTTPVGGGNLPSAPPPANFPHVTPNLPPPPALRPLNNASASPPGLGAQPLPGHLPSPHAMGQGMGGLPPGPEKGPTLAPSPHSLPPASSSAPAPPMRFPYSSSSSSSAAASSSSSSSSSSASPFPASQALPSYPHSFPPPTSLSVSNQPPKYTQPSLPSQAVWSQGPPPPPPYGRLLANSNAHPGPFPPSTGAQSTAHPPVSTHHHHHQQQQQQQQQQQQQQQQQQQQQQQPAALTETSWGPPHMPMRLGKSKLVYAANPRAWEAGPRLRASPHRKPDPRPRRVSGHDGCAVRPLRPMGAGSVSGKRAPL

SEQ ID NO: 890881 - protein, 443 aa, Homo sapiens
  misc_feature (428)..(428): Xaa can be any naturally occurring amino acid
MKTRQNKDSMSMRSGRKKEAPGPREELRSRGRASPGGVSTSSSDGKAEKSRQTAKKARVEEASTPKVNKQGRSEEISESESEETNAPKKTKTEQELPRPQSPSDLDSLDGRSLNDDGSSDPRDIDQDNRSTSPSIYSPGSVENDSDSSSGLSQGPARPYHPPPLFPPSPQPPDSTPRQPEASFEPHPSVTPTGYHAPMEPPTSRMFQAPPGAPPPHPQLYPGGTGGVLSGPPMGPKGGGAASSVGGPNGGKQHPPPTTPISVSSSGASGAPPTKPPTTPVGGGNLPSAPPPANFPHVTPNLPPPPALRPLNNASASPPGLGAQPLPGHLPSPHAMGQGMGGLPPGPEKGPTLAPSPHSLPPASSSAPAPPMRFPYSSSSSSSAAASSSSSSSSSSASPFPASQALPSYPHSFPPPTSLSVSNQPPASXVTHPSSCHKCFLSTH

SEQ ID NO: 890882 - protein, 399 aa, Homo sapiens
MKTRQNKDSMSMRSGRKKEAPGPREELRSRGRASPGGVSTSSSDGKAEKSRQTAKKARVEEASTPKVNKQGRSEEISESESEETNAPKKTKTEQELPRPQSPSDLDSLDGRSLNDDGSSDPRDIDQDNRSTSPSIYSPGSVENDSDSSSGLSQGPARPYHPPPLFPPSPQPPDSTPRQPEASFEPHPSVTPTGYHAPMEPPTSRMFQAPPGAPPPHPQLYPGGTGGVLSGPPMGPKGGGAASSVGGPNGGKQHPPPTTPISVSSSGASGAPPTKPPTTPVGGGNLPSAPPPANFPHVTPNLPPPPALRPLNNASASPPGLGAQPLPGHLPSPHAMGQGMGGLPPGPEKGPTLAPSPHSLPPASSSAPAPPMRFPYSSSSSSSAAASSRVQVILVSEPPK

SEQ ID NO: 890883 - protein, 1445 aa, Homo sapiens
MAYSWQTDPNPNESHEKQYEHQEFLFVNQPHSSSQVSLGFDQIVDEISGKIPHYESEIDENTFFVPTAPKWDSTGHSLNEAHQISLNEFTSKSRELSWHQVSKAPAIGFSPSVLPKPQNTNKECSWGSPIGKHHGADDSRFSILAPSFTSLDKINLEKELENENHNYHIGFESSIPPTNSSFSSDFMPKEENKRSGHVNIVEPSLMLLKGSLQPGMWESTWQKNIESIGCSIQLVEVPQSSNTSLASFCNKVKKIRERYHAADVNFNSGKIWSTTTAFPYQLFSKTKFNIHIFIDNSTQPLHFMPCANYLVKDLIAEILHFCTNDQLLPKDHILSVCGSEEFLQNDHCLGSHKMFQKDKSVIQLHLQKSREAPGKLSRKHEEDHSQFYLNQLLEFMHIWKVSRQCLLTLIRKYDFHLKYLLKTQENVYNIIEEVKKICSVLGCVETKQITDAVNELSLILQRKGENFYQSSETSAKGLIEKVTTELSTSIYQLINVYCNSFYADFQPVNVPRCTSYLNPGLPSHLSFTVYAAHNIPETWVHRINFPLEIKSLPRESMLTVKLFGIACATNNANLLAWTCLPLFPKEKSILGSMLFSMTLQSEPPVEMITPGVWDVSQPSPVTLQIDFPATGWEYMKPDSEENRSNLEEPLKECIKHIARLSQKQTPLLLSEEKKRYLWFYRFYCNNENCSLPLVLGSAPGWDERTVSEMHTILRRWTFSQPLEALGLLTSSFPDQEIRKVAVQQLDNLLNDELLEYLPQLVQAVKFEWNLESPLVQLLLHRSLQSIQVAHRLYWLLKNAENEAYFKSWYQKLLAALQFCAGKALNDEFSKEQKLIKILGDIGERVKSASDHQRQEVLKKEIGRLEEFFQDVNTCHLPLNPALCIKGIDHDACSYFTSNALPLKITFINANLMGKNISIIFKAGDDLRQDMLVLQLIQVMDNIWLQEGLDMQMIIYRCLSTGKDQRLVQMVPDAVTLAKIHRHSGLIGPLKENTIKKWFSQHNHLKADYEKALRNFFYSCAGWCVVTFILGVCDRHNDNIMLTKSGHMFHIDFGKFLGHAQTFGGIKRDRAPFIFTSEMEYFITEGGKNPQHFQDFVELCCRAYNIIRKHSQLLLNLLEMMLYAGLPELSGIQDLKYVYNNLRPQDTDLEATSHFTKKIKESLECFPVKLNNLIHTLAQMSAISPAKSTSQTFPQESCLLSTTRSIERATILGFSKKSSNLYLIQVTHSNNETSLTEKSFEQFSKLHSQLQKQFASLTLPEFPHWWHLPFTNSDHRRFRDLNHYMEQILNVSHEVTNSDCVLSFFLSEAVQQTVESSPVYLGEKKFPDKKPKVQLVISYEDVKLTILVKHMKNIHLPDGSAPSAHVEFYLLPYPSEVRRRKTKSVPKCTDPTYNEIVVYDEVTELQGHVLMLIVKSKTVFVGAINIRLCSVPLDKEKWYPLGNSII

SEQ ID NO: 890884 - protein, 1341 aa, Homo sapiens
MAYSWQTDPNPNESHEKQYEHQEFLFVNQPHSSSQVSLGFDQIVDEISGKIPHYESEIDENTFFVPTAPKWDSTGHSLNEAHQISLNEFTSKSRELSWHQVSKAPAIGFSPSVLPKPQNTNKECSWGSPIGKHHGADDSRFSILAPSFTSLDKINLEKELENENHNYHIGFESSIPPTNSSFSSDFMPKEENKRSGHVNIVEPSLMLLKGSLQPGMWESTWQKNIESIGCSIQLVEVPQSSNTSLASFCNKVKKIRERYHAADVNFNSGKIWSTTTAFPYQLFSKTKFNIHIFIDNSTQPLHFMPCANYLVKDLIAEILHFCTNDQLLPKDHILSVCGSEEFLQNDHCLGSHKMFQKDKSVIQLHLQKSREAPGKLSRKHEEDHSQFYLNQLLEFMHIWKVSRQCLLTLIRKYDFHLKYLLKTQENVYNIIEEVKKICSVLGCVETKQITDAVNELSLILQRKGENFYQSSETSAKGLIEKVTTELSTSIYQLINVYCNSFYADFQPVNVPRCTSYLNPGLPSHLSFTVYAAHNIPETWVHSYKAFSFTCWLTYAGKKLCQVRNYRNIPDKKLFFFLVNWNETINFPLEIKSLPRESMLTVKLFGIACATNNANLLAWTCLPLFPKEKSILGSMLFSMTLQSEPPVEMITPGVWDVSQPSPVTLQIDFPATGWEYMKPDSEENRSNLEEPLKECIKHIARLSQKQTPLLLSEEKKRYLWFYRFYCNNENCSLPLVLGSAPGWDERTVSEMHTILRRWTFSQPLEALGLLTSSFPDQEIRKVAVQQLDNLLNDELLEYLPQLVQAVKFEWNLESPLVQLLLHRSLQSIQVAHRLYWLLKNAENEAYFKSWYQKLLAALQFCAGKALNDEFSKEQKLIKILGDIGERVKSASDHQRQEVLKKEIGRLEEFFQDVNTCHLPLNPALCIKGIDHDACSYFTSNALPLKITFINANLMGKNISIIFKAGDDLRQDMLVLQLIQVMDNIWLQEGLDMQMIIYRCLSTGKDQRLVQMVPDAVTLAKIHRHSGLIGPLKENTIKKWFSQHNHLKADYEKALRNFFYSCAGWCVVTFILGVCDRHNDNIMLTKSGHMFHIDFGKFLGHAQTFGGIKRDRAPFIFTSEMEYFITEGGKNPQHFQDFVELCCRAYNIIRKHSQLLLNLLEMMLYAGLPELSGIQDLKYVYNNLRPQDTDLEATSHFTKKIKESLECFPVKLNNLIHTLAQMSAISPAKSTSQTFPQESCLLSTTRSIERATILGFSKKSSNLYLIQVTHSNNETSLTEKSFEQFSKLHSQLQKQFASLTLPEFPHWWHLPFTNSDHRRFRDLNHYMEQILNVSHEVTNVCYN

SEQ ID NO: 890885 - protein, 638 aa, Homo sapiens
MAYSWQTDPNPNESHEKQYEHQEFLFVNQPHSSSQVSLGFDQIVDEISGKIPHYESEIDENTFFVPTAPKWDSTGHSLNEAHQISLNEFTSKSRELSWHQVSKAPAIGFSPSVLPKPQNTNKECSWGSPIGKHHGADDSRFSILAPSFTSLDKINLEKELENENHNYHIGFESSIPPTNSSFSSDFMPKEENKRSGHVNIVEPSLMLLKGSLQPGMWESTWQKNIESIGCSIQLVEVPQSSNTSLASFCNKVKKIRERYHAADVNFNSGKIWSTTTAFPYQLFSKTKFNIHIFIDNSTQPLHFMPCANYLVKDLIAEILHFCTNDQLLPKDHILSVCGSEEFLQNDHCLGSHKMFQKDKSVIQLHLQKSREAPGKLSRKHEEDHSQFYLNQLLEFMHIWKVSRQCLLTLIRKYDFHLKYLLKTQENVYNIIEEVKKICSVLGCVETKQITDAVNELSLILQRKGENFYQSSETSAKGLIEKVTTELSTSIYQLINVYCNSFYADFQPVNVPRCTSYLNPGLPSHLSFTVYAAHNIPETWVHSYKAFSFTCWLTYAGKKLCQVRNYRNIPDKKLFFFLVNWNETINFPLEIKSLPRESMLTVKLFGIACATNNANLLAWTCLPLFPKESSYTSVFPSHE

SEQ ID NO: 890886 - protein, 1486 aa, Homo sapiens
MAYSWQTDPNPNESHEKQYEHQEFLFVNQPHSSSQVSLGFDQIVDEISGKIPHYESEIDENTFFVPTAPKWDSTGHSLNEAHQISLNEFTSKSRELSWHQVSKAPAIGFSPSVLPKPQNTNKECSWGSPIGKHHGADDSRFSILAPSFTSLDKINLEKELENENHNYHIGFESSIPPTNSSFSSDFMPKEENKRSGHVNIVEPSLMLLKGSLQPGMWESTWQKNIESIGCSIQLVEVPQSSNTSLASFCNKVKKIRERYHAADVNFNSGKIWSTTTAFPYQLFSKTKFNIHIFIDNSTQPLHFMPCANYLVKDLIAEILHFCTNDQLLPKDHILSVCGSEEFLQNDHCLGSHKMFQKDKSVIQLHLQKSREAPGKLSRKHEEDHSQFYLNQLLEFMHIWKVSRQCLLTLIRKYDFHLKYLLKTQENVYNIIEEVKKICSVLGCVETKQITDAVNELSLILQRKGENFYQSSETSAKGLIEKVTTELSTSIYQLINVYCNSFYADFQPVNVPRCTSYLNPGLPSHLSFTVYAAHNIPETWVHSYKAFSFTCWLTYAGKKLCQVRNYRNIPDKKLFFFLVNWNETINFPLEIKSLPRESMLTVKLFGIACATNNANLLAWTCLPLFPKEKSILGSMLFSMTLQSEPPVEMITPGVWDVSQPSPVTLQIDFPATGWEYMKPDSEENRSNLEEPLKECIKHIARLSQKQTPLLLSEEKKRYLWFYRFYCNNENCSLPLVLGSAPGWDERTVSEMHTILRRWTFSQPLEALGLLTSSFPDQEIRKVAVQQLDNLLNDELLEYLPQLVQAVKFEWNLESPLVQLLLHRSLQSIQVAHRLYWLLKNAENEAYFKSWYQKLLAALQFCAGKALNDEFSKEQKLIKILGDIGERVKSASDHQRQEVLKKEIGRLEEFFQDVNTCHLPLNPALCIKGIDHDACSYFTSNALPLKITFINANLMGKNISIIFKAGDDLRQDMLVLQLIQVMDNIWLQEGLDMQMIIYRCLSTGKDQRLVQMVPDAVTLAKIHRHSGLIGPLKENTIKKWFSQHNHLKADYEKALRNFFYSCAGWCVVTFILGVCDRHNDNIMLTKSGHMFHIDFGKFLGHAQTFGGIKRDRAPFIFTSEMEYFITEGGKNPQHFQDFVELCCRAYNIIRKHSQLLLNLLEMMLYAGLPELSGIQDLKYVYNNLRPQDTDLEATSHFTKKIKESLECFPVKLNNLIHTLAQMSAISPAKSTSQTFPQESCLLSTTRSIERATILGFSKKSSNLYLIQVTHSNNETSLTEKSFEQFSKLHSQLQKQFASLTLPEFPHWWHLPFTNSDHRRFRDLNHYMEQILNVSHEVTNSDCVLSFFLSEAVQQTVESSPVYLGEKKFPDKKPKVQLVISYEDVKLTILVKHMKNIHLPDGSAPSAHVEFYLLPYPSEVRRRKTKSVPKCTDPTYNEIVVYDEVTELQGHVLMLIVKSKTVFVGAINIRLCSVPLDKEKWYPLGNSII

SEQ ID NO: 890887 - protein, 712 aa, Homo sapiens
MACTGPSLPSAFDILGAAGQDKLLYLKHKLKTPRPGCQGQDLLHAMVLLKLGQETEARISLEALKADAVARLVARQWAGVDSTEDPEEPPDVSWAVARLYHLLAEEKLCPASLRDVAYQEAVRTLSSRDDHRLGELQDEARNRCGWDIAGDPGSIRTLQSNLGCLPPSSALPSGTRSLPRPIDGVSDWSQGCSLRSTGSPASLASNLEISQSPTMPFLSLHRSPHGPSKLCDDPQASLVPEPVPGGCQEPEEMSWPPSGEIASPPELPSSPPPGLPEVAPDATSTGLPDTPAAPETSTNYPVECTEGSAGPQSLPLPILEPVKNPCSVKDQTPLQLSVEDTTSPNTKPCPPTPTTPETSPPPPPPPPSSTPCSAHLTPSSLFPSSLESSSEQKFYNFVILHARADEHIALRVREKLEALGVPDGATFCEDFQVPGRGELSCLQDAIDHSAFIILLLTSNFDCRLSLHQVNQAMMSNLTRQGSPDCVIPFLPLESSPAQLSSDTASLLSGLVRLDEHSQIFARKVANTFKPHRLQARKAMWRKEQDTRALREQSQHLDGERMQAAALNAAYSAYLQSYLSYQAQMEQLQVAFGSHMSFGTGAPYGARMPFGGQVPLGAPPPFPTWPGCPQPPPLHAWQAGTPPPPSPQPAAFPQSLPFPQSPAFPTASPAPPQSPGLQPLIIHHAQMVQLGLNNHMWNQRGSQAPEDKTQEAE

SEQ ID NO: 890888 - protein, 685 aa, Homo sapiens
MACTGPSLPSAFDILGAAGQDKLLYLKHKLKTPRPGCQGQDLLHAMVLLKLGQETEARISLEALKADAVARLVARQWAGVDSTEDPEEPPDVSWAVARLYHLLAEEKLCPASLRDVAYQEAVRTLSSRDDHRLGELQDEARNRCGWDIAGDPGSIRTLQSNLGCLPPSSALPSGTRSLPRPIDGVSDWSQGCSLRSTGSPASLASNLEISQSPTMPFLSLHRSPHGPSKLCDDPQASLVPEPVPGGCQEPEEMSWPPSGEIASPPELPSSPPPGLPEVAPDATSTGLPDTPAAPETSTNYPVECTEGSAGPQSLPLPILEPVKNPCSVKDQTPLQLSVEDTTSPNTKPCPPTPTTPETSPPPPPPPPSSTPCSAHLTPSSLFPSSLESSSEQKFYNFVILHARADEHIALRVREKLEALGVPDGATFCEDFQVPGRGELSCLQDAIDHSAFIILLLTSNFDCRLSLHQVNQAMMSNLTRQGSPDCVIPFLPLESSPAQLSSDTASLLSGLVRLDEHSQIFARKVANTFKPHRLQARKAMWRKEQDTRALREQSQHLDGERMQAAALNAAYSAYLQSYLSYQAQMEQLQVAFGSHMSFGTGAPYGARMPFGGQVPLGAPPPFPTWPGCPQPPPSPAFPTASPAPPQSPGLQPLIIHHAQMVQLGLNNHMWNQRGSQAPEDKTQEAE

SEQ ID NO: 890889 - protein, 277 aa, Homo sapiens
MACTGPSLPSAFDILGAAGQDKLLYLKHKLKTPRPGCQGQDLLHAMVLLKLGQETEARISLEALKADAVARLVARQWAGVDSTEDPEEPPDVSWAVARLYHLLAEEKLCPASLRDVAYQEAVRTLSSRDDHRLGELQDEARNRCGWDIAGDPGSIRTLQSNLGCLPPSSALPSGTRSLPRPIDGVSDWSQGCSLRSTGSPASLASNLEISQSPTMPFLSLHRSPHGPSKLCDDPQASLVPEPVPGGCQEPEEMSWPPSGEIASPPEHFQDIVREPFI

SEQ ID NO: 890890 - protein, 32 aa, Homo sapiens
MKQTPSPGVTVYESVVVVLYVNACKLDSPSGG

SEQ ID NO: 890891 - protein, 32 aa, Homo sapiens; identical to SEQ ID NO: 890890

SEQ ID NO: 890892 - protein, 729 aa, Homo sapiens
SLFISYSRMPPPCSDSCDFDDPRLLKNIEDRHPTAPCIQEFLTLLAVCHTVVPEKDGDNIIYQASSPDEAALVKGAKKLGFVFTARTPFSVIIEAMGQEQTFGILNVLEFSSDRKRMSVIVRTPSGRLRLYCKGADNVIFERLSKDSKYMEETLCHLEYFATEGLRTLCVAYADLSENEYEEWLKVYQEASTILKDRAQRLEECYEIIEKNLLLLGATAIEDRLQAGVPETIATLLKAEIKIWVLTGDKQETAINIGYSCRLVSQNMALILLKEDSLDATRAAITQHCTDLGNLLGKENDVALIIDGHTLKYALSFEVRRSFLDLALSCKAVICCRVSPLQKSEIVDVVKKRVKAITLAIGDGANDVGMIQTAHVGVGISGNEGMQATNNSDYAIAQFSYLEKLLLVHGAWSYNRVTKCILYCFYKNVVLYIIELWFAFVNGFSGQILFERWCIGLYNVIFTALPPFTLGIFERSCTQESMLRFPQLYKITQNGEGFNTKVFWGHCINALVHSLILFWFPMKALEHDTVLTSGHATDYLFVGNIVYTYVVVTVCLKAGLETTAWTKFSHLAVWGSMLTWLVFFGIYSTIWPTIPIAPDMRGQATMVLSSAHFWLGLFLVPTACLIEDVAWRAAKHTCKKTLLEEVQELETKSRVLGKAVLRDSNGKRLNERDRLIKRLGRKTPPTLFRGSSLQQGVPHGYAFSQEEHGAVSQEEVIRAYDTTKKKSRKK

SEQ ID NO: 890893 - protein, 729 aa, Homo sapiens; identical to SEQ ID NO: 890892

SEQ ID NO: 890894 - protein, 729 aa, Homo sapiens; identical to SEQ ID NO: 890892

SEQ ID NO: 890895 - protein, 325 aa, Homo sapiens
AAWLPGNREAAVPASESLSTMAKFVIAGRADCPYYAKTELVADYLQKNLPDFRIHKITQRPEVWEDWLKDVCEKNKWSHKNSPIIWRELLDRGGKGLLLGGYNEFLEHAQLYYDVTSSMTTELMMVIAQENLGAHIEKEQEEEALKTCINPLQVWITSASAPACYNLIPILTSGEVFGMHTEISITLFDNKQAEEHLKSLVVETQDLASPVLRSVSICTKVEEAFRQAHVIVVLDDSTNKEVFTLEDCLRSRVPLCRLYGYLIEKNAHESVRVIVGGRTFVNLKTVLLMRYAPRIAHNIIAVALGVEGEAKAILARKLKTAPSCE

SEQ ID NO: 890896 - protein, 325 aa, Homo sapiens
AAWLPGNREAAVPASESLSTMAKFVIAGRADCPYYAKTELVADYLQKNLPDFRIHKITQRPEVWEDWLKDVCEKNKWSHKNSPIIWRELLDRGGKGLLLGGYNEFLEHAQLYYDVTSSMTTELMMVIAQENLGAHIEKEQEEEALKTCINPLQVWITSEWVKREFVAILKNLTTTGRQFGGILAAHSIATTLKYWYHGSPPGEIVSLGILSEGQFGIPKGIVFSMPVKFENGTWVVLTDLKDVEISEQIMTRMTSDLIQEKLVALGDKIHFQPYQSGHKDLVPDEEKNLAMSDAAEFPNQIPQTTFEKPQSLEFLNEFEGKTVES

SEQ ID NO: 890897 - protein, 200 aa, Homo sapiens
YVDLRKTRVYRYESAIWGPLHYSRPVLNLIFDSEWVKREFVAILKNLTTTGRQFGGILAAHSIATTLKYWYHGSPPGEIVSLGILSEGQFGIPKGIVFSMPVKFENGTWVVLTDLKDVEISEQIMTRMTSDLIQEKLVALGDKIHFQPYQSGHKDLVPDEEKNLAMSDAAEFPNQIPQTTFEKPQSLEFLNEFEGKTVES

SEQ ID NO: 890898 - protein, 319 aa, Homo sapiens
AAWLPGNREAAVPASESLSTMAKFVIAGRADCPYYAKTELVADYLQKNLPDFRIHKITQRPEVWEDWLKDVCEKNKWSHKNSPIIWRELLDRGGKGLLLGGYNEFLEHAQLYYDVTSSMTTELMMVIAQENLGAHIEKEQEEEALKTCINPLQVWITSEWVKREFVAILKNLTTTGRQFGGILAAHSIATTLKYWYHGSPPGEIVSLGILSEGQFGIPKGIVFSMPVKFENGTWVVLTDLKDVEISEQIMTRMTSDLIQEKLVALGDKIHFQPYQSGHKDLVPDEEKNLAMSDAAEFPNQIPQTTFEKPQSLEFLNGRW

SEQ ID NO: 890899 - protein, 266 aa, Homo sapiens
WDIIQQDWLKDVCEKNKWSHKNSPIIWRELLDRGGKGLLLGGYNEFLEHAQLYYDVTSSMTTELMMVIAQENLGAHIEKEQEEEALKTCINPLQVWITSASAPACYNLIPILTSGEVFGMHTEISITLFDNKQAEEHLKSLVVETQDLASPVLRSVSICTKVEEAFRQAHVIVVLDDSTNKEVFTLEDCLRSRVPLCRLYGYLIEKNAHESVRVIVGGRTFVNLKTVLLMRYAPRIAHNIIAVALGVEGEAKAILARKLKTAPSCE

SEQ ID NO: 890900 - protein, 325 aa, Homo sapiens; identical to SEQ ID NO: 890896

SEQ ID NO: 890901 - protein, 637 aa, Homo sapiens
MALPLKTLLQPFHATGAESDKTEKSVLNCIYKVLHGCVYGAQCFSNPRYFPMSLSDLASVDYDPFMHLESLKEPEPLHSPDSERSSKLQPVTEVKTQMQHGLISIAARTVITHLVNHLGHYPMSGGPAMLTSQVCENHDNHYSESTELSPELFESPNIQFFVLNNTTLVSCIQIRSEENMPGGGLSAGLASANSNVRIIVRDLSGKYSWDSAILYGPPPVSGLSEPTSFMLSLSHQEKPEEPPTSNECLEDITVKDGLSLQFKRFRETVPTWDTIRDEEDVLDELLQYLGVTSPECLQRTGISLNIPAPQPVCISEKQENDVINAILKQHTEEKEFVEKHFNDLNMKAVEQDEPIPQKPQSAFYYCRLLLSILGMNSWDKRRSFHLLKKNEKLLRELRNLDSRQCRETHKIAVFYVAEGQEDKHSILTNTGGSQAYEDFVAGLGWEVNLTNHCGFMGGLQKNKSTGLTTPYFATSTVEVIFHVSTRMPSDSDDSLTKKLRHLGNDEVHIVWSEHTRDYRRGIIPTEFGDVLIVIYPMKNHMFSIQIMKKPEVPFFGPLFDGAIVNGKVLPIMVRATAINASRALKSLIPLYQNFYEERARYLQTIVQHHLEPTTFEDFAAQVFSPAPYHHLPSDADH

SEQ ID NO: 890902 - protein, 264 aa, Homo sapiens
MALPLKTLLQPFHATGAESDKTEKSVLNCIYKVLHGCVYGAQCFSNPRYFPMSLSDLASVDYDPFMHLESLKEPEPLHSPDSERSSKLQPVTEVKTQMQHGLISIAARTVITHLVNHLGHYPMSGGPAMLTSQVCENHDNHYSESTELSPELFESPNIQFFVLNNTTLVSCIQIRSEENMPGGGLSAGLASANSNVRIIVRDLSGKYSWDSAILYGPPPVSGLSEPTSFMLSLSHQEKPEEPPTSNECLEDITVKDGLSLQLCS

SEQ ID NO: 890903 - protein, 684 aa, Homo sapiens
MALPLKTLLQPFHATGAESDKTEKSVLNCIYKVLHGCVYGAQCFSNPRYFPMSLSDLASVDYDPFMHLESLKEPEPLHSPDSERSSKLQPVTEVKTQMQHGLISIAARTVITHLVNHLGHYPMSGGPAMLTSQVCENHDNHYSESTELSPELFESPNIQFFVLNNTTLVSCIQIRSEENMPGGGLSAGLASANSNVRIIVRDLSGKYSWDSAILYGPPPVSGLSEPTSFMLSLSHQEKPEEPPTSNECLEDITVKDGLSLQFKRFRETVPTWDTIRDEEDVLDELLQYLGVTSPECLQRTGISLNIPAPQPVCISEKQENDVINAILKQHTEEKEFVEKHFNDLNMKAVEQDEPIPQKPQSAFYYCRLLLSILGMNSWDKRRSFHLLKKNEKLLRELRNLDSRQCRETHKIAVFYVAEGQEDKHSILTNTGGSQAYEDFVAGLGWEVNLTNHCGFMGGLQKNKSTGLTTPYFATSTVEVIFHVSTRMPSDSDDSLTKKLRHLGNDEVHIVWSEHTRDYRRGIIPTEFGDVLIVIYPMKNHMFSIQIMKKPEVPFFGPLFDGAIVNGKVLPIMVRATAINASRALKSLIPLYQNFYEERARYLQTIVQHHLEPTTFEDFAAQVFSPAPYHHLPSDAGSYPEILPSETPTATQVDGADLASPMSPRTSKSRMSMKLRRSSGSANKS

SEQ ID NO: 890904 - protein, 639 aa, Homo sapiens
MALPLKTLLQPFHATGAESDKTEKSVLNCIYKVLHGCVYGAQCFSNPRYFPMSLSDLASVDYDPFMHLESLKEPEPLHSPDSERSSKLQPVTEVKTQMQHGLISIAARTVITHLVNHLGHYPMSGGPAMLTSQVCENHDNHYSESTELSPELFESPNIQFFVLNNTTLVSCIQIRSEENMPGGGLSAGLASANSNVRIIVRDLSGKYSWDSAILYGPPPVSGLSEPTSFMLSLSHQEKPEEPPTSNECLEDITVKDGLSLQFKRFRETVPTWDTIRDEEDVLDELLQYLGVTSPECLQRTGISLNIPAPQPVCISEKQENDVINAILKQHTEEKEFVEKHFNDLNMKAVEQDEPIPQKPQSAFYYCRLLLSILGMNSWDKRRSFHLLKKNEKLLRELRNLDSRQCRETHKIAVFYVAEGQEDKHSILTNTGGSQAYEDFVAGLGWEVNLTNHCGFMGGLQKNKSTGLTTPYFATSTVEVIFHVSTRMPSDSDDSLTKKLRHLGNDEVHIVWSEHTRDYRRGIIPTEFGDVLIVIYPMKNHMFSIQIMKKPEVPFFGPLFDGAIVNGKVLPIMVRATAINASRALKSLIPLYQNFLFSLKLCYSNVQYLLQSRKAKTKWNGIDELIGSANAVAFRYNKTL

SEQ ID NO: 890905 - protein, 231 aa, Homo sapiens
PIHLYFLFPVKTQMQHGLISIAARTVITHLVNHLGHYPMSGGPAMLTSQVCENHDNHYSESTELSPELFESPNIQFFVLNNTTLVSCIQIRSEENMPGGGLSAGLASANSNVRIIVRDLSGKYSWDSAILYGPPPVSGLSEPTSFMLSLSHQEKPEEPPTSNECLEDITVKDGLSLQFKRFRETVPTWDTIRDEEDVLDELLQYLGVTSPECLQRTGISLNIPAPQPVCIS

SEQ ID NO: 890906 - protein, 594 aa, Homo sapiens
MALPLKTLLQPFHATGAESDKTEKSVLNCIYKVLHGCVYGAQCFSNPRYFPMSLSDLASVDYDPFMHLESLKEPEPLHSPDSERSSKLQPVTEVKTQMQHGLISIAARTVITHLVNHLGHYPMSGGPAMLTSQVCENHDNHYSESTELSPELFESPNIQFFVLNNTTLVSCIQIRSEENMPGGGLSAGLASANSNVRIIVRDLSGKYSWDSAILYGPPPVSGLSEPTSFMLSLSHQEKPEEPPTSNECLEDITVKDGLSLQFKRFRETVPTWDTIRDEEDVLDELLQYLGVTSPECLQRTGISLNIPAPQPVCISEKQENDVINAILKQHTEEKEFVEKHFNDLNMKAVEQDEPIPQKPQSAFYYCRLLLSILGMNSWDKRRSFHLLKKNEKLLRELRNLDSRQCRETHKIAVFYVAEGQEDKHSILTNTGGSQAYEDFVAGLGWEVNLTNHCGFMGGLQKNKSTGLTTPYFATSTVEVIFHVSTRMPSDSDDSLTKKLRHLGNDEVHIVWSEHTRDYRRGIIPTEFGDVLIVIYPMKNHMFSIQIMKKPEVPFFGPLFDGAIVNGKVLPIMVRATAINASRALKSLIPLYQNF

SEQ ID NO: 890907 - protein, 454 aa, Homo sapiens
MALPLKTLLQPFHATGAESDKTEKSVLNCIYKVLHGCVYGAQCFSNPRYFPMSLSDLASVDYDPFMHLESLKEPEPLHSPDSERSSKLQPVTEVKTQMQHGLISIAARTVITHLVNHLGHYPMSGGPAMLTSQVCENHDNHYSESTELSPELFESPNIQFFVLNNTTLVSCIQIRSEENMPGGGLSAGLASANSNVRIIVRDLSGKYSWDSAILYGPPPVSGLSEPTSFMLSLSHQEKPEEPPTSNECLEDITVKDGLSLQFKRFRETVPTWDTIRDEEDVLDELLQYLGVTSPECLQRTGISLNIPAPQPVCISEKQENDVINAILKQHTEEKEFVEKHFNDLNMKAVEQDEPIPQKPQSAFYYCRLLLSILGMNSWDKRRSFHLLKKNEKLLRELRNLDSRQCRETHKIAVFYVAEGQEDKHSILTNTGGSQAYEDFVAGLGWELIIFKLYE

SEQ ID NO: 890908 - protein, 665 aa, Homo sapiens
MTSANKAIELQLQVKQNAEELQDFMRDLENWEKDIKQKDMELRRQNGVPEENLPPIRNGNFRKKKKGKAKESSKKTREENTKNRIKSYDYEAWAKLDVDRILDELDKDDSTHESLSQESESEEDGIHVDSQKALVLKEKGNKYFKQGKYDEAIDCYTKGMDADPYNPVLPTNRASAYFRLKKFAVAESDCNLAVALNRSYTKAYSRRGAARFALQKLEEAKKDYERVLELEPNNFEATNELRKISQALASKENSYPKEADIVIKSTEGERKQIEAQQNKQQAISEKDRGNGFFKEGKYERAIECYTRGIAADGANALLPANRAMAYLKIQKYEEAEKDCTQAILLDGSYSKAFARRGTARTFLGKLNEAKQDFETVLLLEPGNKQAVTELSKIKKELIEKGHWDDVFLDSTQRQNVVKPIDNPPHPGSTKPLKKVIIEETGNLIQTIDVPDSTTAAAPENNPINLANVIAATGTTSKKNSSQDDLFPTSDTPRAKVLKIEEVSDTSSLQPQASLKQDVCQSYSEKMPIEIEQKPAQFATTVLPPIPANSFQLESDFRQLKSSPDMLYQYLKQIEPSLYPKLFQKNLDPDVFNQIVKILHDFYIEKEKPLLIFEILQRLSELKRFDMAVMFMSETEKKIARALFNHIDKSGLKDSSVEELKKRYGG

SEQ ID NO: 890909 - protein, 665 aa, Homo sapiens; identical to SEQ ID NO: 890908

SEQ ID NO: 890910 - protein, 301 aa, Homo sapiens
MTSANKAIELQLQVKQNAEELQDFMRDLENWEKDIKQKDMELRRQNGVPEENLPPIRNGNFRKKKKGKAKESSKKTREENTKNRIKSYDYEAWAKLDVDRILDELDKDDSTHESLSQESESEEDGIHVDSQKALVLKEKGNKYFKQGKYDEAIDCYTKGMDADPYNPVLPTNRASAYFRLKKFAVAESDCNLAVALNRSYTKAYSRRGAARFALQKLEEAKKDYERVLELEPNNFEATNELRKISQALASKENSYPKEADIVIKSTEGERKQIEAQQNKQQAISEKDRGNGFSKRGNIKDN

SEQ ID NO: 890911 - protein, 665 aa, Homo sapiens; identical to SEQ ID NO: 890908

SEQ ID NO: 890912 - protein, 665 aa, Homo sapiens; identical to SEQ ID NO: 890908

SEQ ID NO: 890913 - protein, 130 aa, Homo sapiens
MTSANKAIELQLQVKQNAEELQDFMRDLENWEKDIKQKDMELRRQNGVPEENLPPIRNGNFRKKKKGKAKESSKKTREENTKNRIKSYDYEAWAKLDVCTPVKPLFGSRYRTFWEAEAREWLEPGRRRLQ

SEQ ID NO: 890914 - protein, 434 aa, Homo sapiens
MLPARCARLLTPHLLLVLVQLSPARGHRTTGPRFLISDRDPQCNLHCSRTQPKPICASDGRSYESMCEYQRAKCRDPTLGVVHRGRCKDAGQSKCRLERAQALEQAKKPQEAVFVPECGEDGSFTQVQCHTYTGYCWCVTPDGKPISGSSVQNKTPVCSGSVTDKPLSQGNSGRKDDGSKPTPTMETQPVFDGDEITAPTLWIKHLVIKDSKLNNTNIRNSEKVYSCDQERQSALEEAQQNPREGIVIPECAPGGLYKPVQCHQSTGYCWCVLVDTGRPLPGTSTRYVMPSCESDARAKTTEADDPFKDRELPGCPEGKKMEFITSLLDALTTDMVQAINSAAPTGGGRFSEPDPSHTLEERVVHWYFSQLDSNSSNDINKREMKPFKRYVKKKAKPKKCARRFTDYCDLNKDKVISLPELKGCLGVSKEGRLV

SEQ ID NO: 890915 - protein, 434 aa, Homo sapiens; identical to SEQ ID NO: 890914

SEQ ID NO: 890916 - protein, 434 aa, Homo sapiens; identical to SEQ ID NO: 890914

SEQ ID NO: 890917 - protein, 442 aa, Homo sapiens
MLPARCARLLTPHLLLVLVQLSPARGHRTTGPRFLISDRDPQCNLHCSRTQPKPICASDGRSYESMCEYQRAKCRDPTLGVVHRGRCKDAGQSKCRLERAQALEQAKKPQEAVFVPECGEDGSFTQVQCHTYTGYCWCVTPDGKPISGSSVQNKTPVCSGSVTDKPLSQGNSGRKDDGSKPTPTMETQPVFDGDEITAPTLWIKHLVIKDSKLNNTNIRNSEKVYSCDQERQSALEEAQQNPREGIVIPECAPGGLYKPVQCHQSTGYCWCVLVDTGRPLPGTSTRYVMPSCESDARAKTTEADDPFKDRELPGCPEGKKMEFITSLLDALTTDMVQAINSAAPTGGGRFSEPDPSHTLEERVVHWYFSQLDSNSSNDINKREMKPFKRYVKKKAKPKKCARRFTDYCDLNKDKVISLPELKGCLGVSKEAGGSLGSFPQAK

SEQ ID NO: 890918 - protein, 442 aa, Homo sapiens; identical to SEQ ID NO: 890917

SEQ ID NO: 890919 - protein, 434 aa, Homo sapiens; identical to SEQ ID NO: 890914

SEQ ID NO: 890920 - protein, 268 aa, Homo sapiens
MTIKKSEVHFHSHSLFAQTFSLSFSSPLEITAPTLWIKHLVIKDSKLNNTNIRNSEKVYSCDQERQSALEEAQQNPREGIVIPECAPGGLYKPVQCHQSTGYCWCVLVDTGRPLPGTSTRYVMPSCESDARAKTTEADDPFKDRELPGCPEGKKMEFITSLLDALTTDMVQAINSAAPTGGGRFSEPDPSHTLEERVVHWYFSQLDSNSSNDINKREMKPFKRYVKKKAKPKKCARRFTDYCDLNKDKVISLPELKGCLGVSKEGRLV

SEQ ID NO: 890921 - protein, 116 aa, Homo sapiens
GGSFSEPDPSHTLEERVVHWYFSQLDSNSRTFSEPDPSHTLEERVVHWYFSQLDSNSSNDINKREMKPFKRYVKKKAKPKKCARRFTDYCDLNKDKVISLPELKGCLGVSKEGRLV

SEQ ID NO: 890922 - protein, 108 aa, Homo sapiens
GSRAAAATNKGTHCGPQGQEGGGGRECLSQQGSGSALLLARWEVAWGPATEIRARPGQSPLETLWARTPGDAEARALQTSVLVGGFFTKLRVWPFIGKDLLGSKSKGF

SEQ ID NO: 890923 - protein, 108 aa, Homo sapiens; identical to SEQ ID NO: 890922

SEQ ID NO: 890924 - protein, 108 aa, Homo sapiens; identical to SEQ ID NO: 890922

SEQ ID NO: 890925 - protein, 108 aa, Homo sapiens; identical to SEQ ID NO: 890922

SEQ ID NO: 890926 - protein, 77 aa, Homo sapiens
SASTRLGLIGRGSTWLLPLSVEVEFGGGAELLFDGIKKHRVTLPGQEEPWDIRNLLIWIKKNLLKERPELFIQGDSV

SEQ ID NO: 890927 - protein, 122 aa, Homo sapiens
PGNLRARRKLRGVSCELGFLNMAAPLSVEVEFGGGAELLFDGIKKHRVTLPGQEEPWDIRNLLIWIKKNLLKERPELFIQGDSVRPGILVLINDADWELLGELDYQLQDQDSVLFISTLHGG

SEQ ID NO: 890928 - protein, 115 aa, Homo sapiens
SASTRLGLIGRGSTWLLPLSVEVEFGGGAELLFDGIKKHRVTLPGQEEPWDIRNLLIWIKKNLLKERPELFIQGDSVRPGILVLINDADWELLGELDYQLQDQDSVLFISTLHGG

SEQ ID NO: 890929 - protein, 128 aa, Homo sapiens
HLLSAYHVPGSKPDTEDTKINRSLSVPYSVQHFCPLEGGGGAELLFDGIKKHRVTLPGQEEPWDIRNLLIWIKKNLLKERPELFIQGDSVRPGILVLINDADWELLGELDYQLQDQDSVLFISTLHGG

SEQ ID NO: 890930 - protein, 97 aa, Homo sapiens
RKFAGAPEVEGSFLRARLPQHGCALVSGGGVRELTWLSFSLVLLCRGGAELLFDGIKKHRVTLPGQEEPWDIRNLLIWIKKNLLKERPELFIQGDSV

SEQ ID NO: 890931 - protein, 160 aa, Homo sapiens
SASTRLGLIGRGSTWLLPLSVEVEFGGGAELLFDGIKKHRVTLPGQEEPWDIRNLLIWIKKNLLKERPELFIQGDSVRPGILVLINDADWELLVSTLGDIPPPAPALAASVGKRWASPQAHIEWLGNPPPHSSPTLRLLESPTPGEEGMGSWGHGSTPPS

SEQ ID NO: 890932 - protein, 122 aa, Homo sapiens; identical to SEQ ID NO: 890927

SEQ ID NO: 890933 - protein, 135 aa, Homo sapiens
RKFAGAPEVEGSFLRARLPQHGCALVSGGGVRELTWLSFSLVLLCRGGAELLFDGIKKHRVTLPGQEEPWDIRNLLIWIKKNLLKERPELFIQGDSVRPGILVLINDADWELLGELDYQLQDQDSVLFISTLHGG

SEQ ID NO: 890934 - protein, 122 aa, Homo sapiens; identical to SEQ ID NO: 890927

SEQ ID NO: 890935 - protein, 122 aa, Homo sapiens; identical to SEQ ID NO: 890927

SEQ ID NO: 890936 - protein, 135 aa, Homo sapiens; identical to SEQ ID NO: 890933

SEQ ID NO: 890937 - protein, 74 aa, Homo sapiens
VRSVHPFPRDIRNLLIWIKKNLLKERPELFIQGDSVRPGILVLINDADWELLGELDYQLQDQDSVLFISTLHGG

SEQ ID NO: 890938 - protein, 167 aa, Homo sapiens
PGNLRARRKLRGVSCELGFLNMAAPLSVEVEFGGGAELLFDGIKKHRVTLPGQEEPWDIRNLLIWIKKNLLKERPELFIQGDSVRPGILVLINDADWELLVSTLGDIPPPAPALAASVGKRWASPQAHIEWLGNPPPHSSPTLRLLESPTPGEEGMGSWGHGSTPPS

SEQ ID NO: 890939 - protein, 80 aa, Homo sapiens
PGNLRARRKLRGVSCELGFLNMAAPLSVEVEFGGGAELLFDGIKKHRVTLPGQEEPWDIRNLLIWIKKNLLTKNEPFSST

SEQ ID NO: 890940 - protein, 121 aa, Homo sapiens
SASTRLGLIGRGSTWLLPLSVEVEFGGGAELLFDGIKKHRVTLPGQEEPWDIRNLLIWIKKNLLSWPAPLHRPPDGLLRPSPGCLQLILLGVEMRGGSKLNLGLASRSLGGCVCLSFLLHN

SEQ ID NO: 890941 - protein, 81 aa, Homo sapiens
SARRGFLNDPRPRYKISGGACAGLKEDLGACLLQSDCVVQEGKSPRQCLKEGYCNSLKYAFFECKRSVLDNRARFRGRKGY

SEQ ID NO: 890942 - protein, 114 aa, Homo sapiens
MLGPRLCCPGSLPSSSDCFCFLVTFSVWPALHNEASVSSKSTSLLSMIQKGERELPFSGSTNQIYKRTLVFPGSPALALDQSLWKRGWGPVILARPGLSICTVIANSCQNHMDE

SEQ ID NO: 890943 - protein, 213 aa, Homo sapiens
MAETYDFLFKFLVIGSAGTGKSCLLHQFIENKFKQDSNHTIGVEFGSRVVNVGGKTVKLQIWDTAGQERFRSVTRSYYRGAAGALLVYDITSRETYNSLAAWLTDARTLASPNIVVILCGNKKDLDPEREVTFLEASRFAQENELMFLETSALTGENVEEAFLKCARTILNKIDSGELDPERMGSGIQYGDASLRQLRQPRSAQAVAPQPCGC

SEQ ID NO: 890944 - protein, 113 aa, Homo sapiens
MGDPLSCLLSPCTAPSVPPTPSQTGLQPHNRRGVWIPGGQRGWEDCEATDLGHGWPGAVSVSDAELLPRGGWSPAGVRHHQSGDIHYWLLLTDARILVWQVDGRMDPDMVKWP

SEQ ID NO: 890945 - protein, 192 aa, Homo sapiens
MAETYDFLFKFLVIGSAGTGKSCLLHQFIENKFKQDSNHTIGVEFGSRVVNVGGKTVKLQIWDTAGQERFRRETYNSLAAWLTDARTLASPNIVVILCGNKKDLDPEREVTFLEASRFAQENELMFLETSALTGENVEEAFLKCARTILNKIDSGELDPERMGSGIQYGDASLRQLRQPRSAQAVAPQPCGC

SEQ ID NO: 890946 - protein, 237 aa, Homo sapiens
MAETYDFLFKFLVIGSAGTGKSCLLHQFIENKFKQDSNHTIGVEFGSRVVNVGGKTVKLQIWDTAGQERFRSVTRSYYRGAAGALLVYDITSRETYNSLAAWLTDARTLASPNIVVILCGNKKDLDPEREVTFLEASRFAQENELMFLETSALTGENVEEAFLKCARTILNKIDSGELDPERMGSGIQYGDAVLRQLRQPRSAQGVALSRVAAELCGASSPVLQDQPCWGHKKLWEP

SEQ ID NO: 890947 - protein, 105 aa, Homo sapiens
MRMVWAGGQPVGRAGLAIGTSPVLAFWSLLCRMSFTRFSLTSSHSSKENGFVETERALEDGGSSELSPLSLYCPFCSSYSQSNRTPTTQSAWSLDPGWSTWVGRL

SEQ ID NO: 890948 - protein, 239 aa, Homo sapiens
MVRERDWIGIHLFSLYLSLPVGIPDFGSIWSDFLFKFLVIGSAGTGKSCLLHQFIENKFKQDSNHTIGVEFGSRVVNVGGKTVKLQIWDTAGQERFRSVTRSYYRGAAGALLVYDITSRETYNSLAAWLTDARTLASPNIVVILCGNKKDLDPEREVTFLEASRFAQENELMFLETSALTGENVEEAFLKCARTILNKIDSGELDPERMGSGIQYGDASLRQLRQPRSAQAVAPQPCGC

SEQ ID NO: 890949 - protein, 260 aa, Homo sapiens
MVWAGGQPVGRAGLAIGTSPVLAFWSLLCRMSFTRFSLTSSHSSKENGFVETERALEDGGSSELSPLSLYCPFCSSYSQVKQDSNHTIGVEFGSRVVNVGGKTVKLQIWDTAGQERFRSVTRSYYRGAAGALLVYDITSRETYNSLAAWLTDARTLASPNIVVILCGNKKDLDPEREVTFLEASRFAQENELMFLETSALTGENVEEAFLKCARTILNKIDSGELDPERMGSGIQYGDASLRQLRQPRSAQAVAPQPCGC

SEQ ID NO: 890950 - protein, 213 aa, Homo sapiens; identical to SEQ ID NO: 890943

SEQ ID NO: 890951 - protein, 104 aa, Homo sapiens
MSHTILLVQPTKRPEGRTYADYESVNECMEGVCKMYEEHLKRMNPNSPSITYDISQLFDFIDDLADLSCLVYRADTQTYQPYNKDWIKEKIYVLLRRQAQQAGK

SEQ ID NO: 890952 - protein, 104 aa, Homo sapiens; identical to SEQ ID NO: 890951

SEQ ID NO: 890953 - protein, 104 aa, Homo sapiens; identical to SEQ ID NO: 890951

SEQ ID NO: 890954 - protein, 104 aa, Homo sapiens; identical to SEQ ID NO: 890951

SEQ ID NO: 890955 - protein, 104 aa, Homo sapiens; identical to SEQ ID NO: 890951

SEQ ID NO: 890956 - protein, 104 aa, Homo sapiens; identical to SEQ ID NO: 890951

SEQ ID NO: 890957 - protein, 102 aa, Homo sapiens
MNAWKVFVKCMKNIWISSMIWQTSAAWFTELIPRHTSLITKTGLKRRSTCSFVGRPNRLGNNCVGSTGGVGVGLEHRCVQRAVVEVLYHSNPVSTLLYSSQD

SEQ ID NO: 890958 - protein, 104 aa, Homo sapiens; identical to SEQ ID NO: 890951

SEQ ID NO: 890959 - protein, 104 aa, Homo sapiens; identical to SEQ ID NO: 890951

SEQ ID NO: 890960 - protein, 104 aa, Homo sapiens; identical to SEQ ID NO: 890951

SEQ ID NO: 890961 - protein, 104 aa, Homo sapiens; identical to SEQ ID NO: 890951

SEQ ID NO: 890962 - protein, 104 aa, Homo sapiens; identical to SEQ ID NO: 890951

SEQ ID NO: 890963 - protein, 124 aa, Homo sapiens
MNAWKVFVKCMKNIWISSMIWQTSAAWFTELIPRHTSLITKTGLKRRSTCSFVGRPNRLGNNCVGSTGGVGVGLEHRCVQRAVVEVLYPFFASLSSLCPTLASTDCLRITRGVPSHLAIPASLS

SEQ ID NO: 890964 - protein, 358 aa, Homo sapiens
MRATPLAAPAGSLSRKKRLELDDNLDTERPVQKRARSGPQPRLPPCLLPLSPPTAPDRATAVATASRLGPYVLLEPEEGGRAYQALHCPTGTEYTCKVYPVQEALAVLEPYARLPPHKHVARPTEVLAGTQLLYAFFTRTHGDMHSLVRSRHRIPEPEAAVLFRQMATALAHCHQHGLVLRDLKLCRFVFADRERKKLVLENLEDSCVLTGPDDSLWDKHACPAYVGPEILSSRASYSGKAADVWSLGVALFTMLAGHYPFQDSEPVLLFGKIRRGAYALPAGLSAPARCLVRCLLRREPAERLTATGILLHPWLRQDPMPLAPTRSHLWEAAQVVPDGLGLDEAREEEGDREVVLYG

SEQ ID NO: 890965 - protein, 358 aa, Homo sapiens; identical to SEQ ID NO: 890964

SEQ ID NO: 890966 - protein, 358 aa, Homo sapiens; identical to SEQ ID NO: 890964

SEQ ID NO: 890967 - protein, 358 aa, Homo sapiens; identical to SEQ ID NO: 890964

SEQ ID NO: 890968 - protein, 358 aa, Homo sapiens; identical to SEQ ID NO: 890964

SEQ ID NO: 890969 - protein, 358 aa, Homo sapiens; identical to SEQ ID NO: 890964

SEQ ID NO: 890970 - protein, 358 aa, Homo sapiens; identical to SEQ ID NO: 890964

SEQ ID NO: 890971 - protein, 358 aa, Homo sapiens; identical to SEQ ID NO: 890964

SEQ ID NO: 890972 - protein, 340 aa, Homo sapiens
MRATPLAAPAGSLSRKKRLELDDNLDTERPVQKRARSGPQPRLPPCLLPLSPPTAPDRATAVATASRLGPYVLLEPEEGGRAYQALHCPTGTEYTCKVYPVQEALAVLEPYARLPPHKHVARPTEVLAGTQLLYAFFTRTHGDMHSLVRSRHRIPEPEAAVLFRQMATALAHCHQHGLVLRDLKLCRFVFADRERKKLVLENLEDSCVLTGPDDSLWDKHACPAYVGPEILSSRASYSGKAADVWSLGVALFTMLAGHYPFQDSEPVLLFGKIRRGAYALPAGLSAPARCLVRCLLRREPAERLTATGILLHPWLRQDPMPLAPTRSHLLGTVFPASLSS

SEQ ID NO: 890973 - protein, 358 aa, Homo sapiens; identical to SEQ ID NO: 890964

SEQ ID NO: 890974 - protein, 358 aa, Homo sapiens; identical to SEQ ID NO: 890964

SEQ ID NO: 890975 - protein, 353 aa, Homo sapiens
MRATPLAAPAGSLSRKKRLELDDNLDTERPVQKRARSGPQPRLPPCLLPLSPPTAPDRATAVATASRLGPYVLLEPEEGGRAYQALHCPTGTEYTCKVYPVQEALAVLEPYARLPPHKHVARPTEVLAGTQLLYAFFTRTHGDMHSLVRSRHRIPEPEAAVLFRQMATALAHCHLRDLKLCRFVFADRERKKLVLENLEDSCVLTGPDDSLWDKHACPAYVGPEILSSRASYSGKAADVWSLGVALFTMLAGHYPFQDSEPVLLFGKIRRGAYALPAGLSAPARCLVRCLLRREPAERLTATGILLHPWLRQDPMPLAPTRSHLWEAAQVVPDGLGLDEAREEEGDREVVLYG

SEQ ID NO: 890976 - protein, 353 aa, Homo sapiens; identical to SEQ ID NO: 890975

SEQ ID NO: 890977 - protein, 190 aa, Homo sapiens
MSSWSPRRAGGPTRPCTALQALSIPARKKLVLENLEDSCVLTGPDDSLWDKHACPAYVGPEILSSRASYSGKAADVWSLGVALFTMLAGHYPFQDSEPVLLFGKIRRGAYALPAGLSAPARCLVRCLLRREPAERLTATGILLHPWLRQDPMPLAPTRSHLWEAAQVVPDGLGLDEAREEEGDREVVLYG

SEQ ID NO: 890978 - protein, 216 aa, Homo sapiens
MRATPLAAPAGSLSRKKRLELDDNLDTERPVQKRARSGPQPRLPPCLLPLSPPTAPDRATAVATASRLGPYVLLEPEEGGRAYQALHCPTGTEYTCKVYPVQEALAVLEPYARLPPHKHVARPTEVLAGTQLLYAFFTRTHGDMHSLVRSRHRIPEPEAAVLFRQMATALAHCHQHGLVLRDLKLCRCFVTWRKTVWRLGDWCDGKFLCRGALGPE

SEQ ID NO: 890979 - protein, 468 aa, Homo sapiens
MEAYRTQNCFLNSEIHQVTKIWRKVAEKEKALLTKCAYLQARNCQVESKYLAGLRRLQEALGDEASECSELLRQLVQEALQWEAGEASSDSIELSPISKYDEYGFLTVPDYEVEDLKLLAKIQALESRSHHLLGLEAVDRPLRERWAALGDLVPSAELKQLLRAGVPREHRPRVWRWLVHLRVQHLHTPGCYQELLSRGQAREHPAARQIELDLNRTFPNNKHFTCPTSSFPDKLRRVLLAFSWQNPTIGYCQGLNRLAAIALLVLEEEESAFWCLVAIVETIMPADYYCNTLTASQVDQRVLQDLLSEKLPRLMAHLGQHHVDLSLVTFNWFLVVFADSLISNILLRVWDAFLYEGTKVVFRYALAIFKYNEKEILRLQNGLEIYQYLRFFTKTISNSRKLMNIAFNDMNPFRMKQLRQLRMVHRERLEAELRELEQLKAEYLERRASRRRAVSEGCASEDEVEGEA

SEQ ID NO: 890980 - protein, 947 aa, Homo sapiens
PFGKLPAESPRFVPGGPADPSSLRSLRLAAMEGAGENAPESSSSAPGSEESARDPQVPPPEEESGDCARSLEAVPKKLCGYLSKFGGKGPIRGWKSRWFFYDERKCQLYYSRTAQDANPLDSIDLSSAVFDCKADAEEGIFEIKTPSRVITLKAATKQAMLYWLQQLQMKRWEFHNSPPAPPATPDAALAGNGPVLHLELGQEEAELEEFLCPVKTPPGLVGVAAALQPFPALQNISLKHLGTEIQNTMHNIRGNKQAQGTGHEPPGEDSPQSGEPQREEQPLASDASTPGREPEDSPKPAPKPSLTISFAQKAKRQNNTFPFFSEGITRNRTAQEKVAALEQQVLMLTKELKSQKELVKILHKALEAAQQEKRASSAYLAAAEDKDRLELVRHKVRQIAELGRRVEALEQERESLAHTASLREQQVQELQQHVQLLMDKNHAKQQVICKLSEKVTQDFTHPPDQSPLRPDAANRDFLSQQGKIEHLKDDMEAYRTQNCFLNSEIHQVTKIWRKVAEKEKALLTKCAYLQARNCQVESKYLAGLRRLQEALGDEASECSELLRQLVQEALQWEAGEASSDSIELSPISKYDEYGFLTVPDYEVEDLKLLAKIQALESRSHHLLGLEAVDRPLRERWAALGDLVPSAELKQLLRAGVPREHRPRVWRWLVHLRVQHLHTPGCYQELLSRGQAREHPAARQIELDLNRTFPNNKHFTCPTSSFPDKLRRVLLAFSWQNPTIGYCQGLNRLAAIALLVLEEEESAFWCLVAIVETIMPADYYCNTLTASQVDQRVLQDLLSEKLPRLMAHLGQHHVDLSLVTFNWFLVVFADSLISNILLRVWDAFLYEGTKYNEKEILRLQNGLEIYQYLRFFTKTISNSRKLMNIAFNDMNPFRMKQLRQLRMVHRERLEAELRELEQLKAEYLERRASRRRAVSEGCASEDEVEGEA

SEQ ID NO: 890981 - protein, 911 aa, Homo sapiens
PFGKLPAESPRFVPGGPADPSSLRSLRLAAMEGAGENAPESSSSAPGSEESARDPQVPPPEEESGDCARSLEAVPKKLCGYLSKFGGKGPIRGWKSRWFFYDERKCQLYYSRTAQDANPLDSIDLSSAVFDCKADAEAGDLRNQDSQPGYYPEGQEEAELEEFLCPVKTPPGLVGVAAALQPFPALQNISLKHLGTEIQNTMHNIRGNKQAQGTGHEPPGEDSPQSGEPQREEQPLASDASTPGREPEDSPKPAPKPSLTISFAQKAKRQNNTFPFFSEGITRNRTAQEKVAALEQQVLMLTKELKSQKELVKILHKALEAAQQEKRASSAYLAAAEDKDRLELVRHKVRQIAELGRRVEALEQERESLAHTASLREQQVQELQQHVQLLMDKNHAKQQVICKLSEKVTQDFTHPPDQSPLRPDAANRDFLSQQGKIEHLKDDMEAYRTQNCFLNSEIHQVTKIWRKVAEKEKALLTKCAYLQARNCQVESKYLAGLRRLQEALGDEASECSELLRQLVQEALQWEAGEASSDSIELSPISKYDEYGFLTVPDYEVEDLKLLAKIQALESRSHHLLGLEAVDRPLRERWAALGDLVPSAELKQLLRAGVPREHRPRVWRWLVHLRVQHLHTPGCYQELLSRGQAREHPAARQIELDLNRTFPNNKHFTCPTSSFPDKLRRVLLAFSWQNPTIGYCQGLNRLAAIALLVLEEEESAFWCLVAIVETIMPADYYCNTLTASQVDQRVLQDLLSEKLPRLMAHLGQHHVDLSLVTFNWFLVVFADSLISNILLRVWDAFLYEGTKVVFRYALAIFKYNEKEILRLQNGLEIYQYLRFFTKTISNSRKLMNIAFNDMNPFRMKQLRQLRMVHRERLEAELRELEQLKAEYLERRASRRRAVSEGCASEDEVEGEA

SEQ ID NO: 890982 - protein, 958 aa, Homo sapiens
PFGKLPAESPRFVPGGPADPSSLRSLRLAAMEGAGENAPESSSSAPGSEESARDPQVPPPEEESGDCARSLEAVPKKLCGYLSKFGGKGPIRGWKSRWFFYDERKCQLYYSRTAQDANPLDSIDLSSAVFDCKADAEEGIFEIKTPSRVITLKAATKQAMLYWLQQLQMKRWEFHNSPPAPPATPDAALAGNGPVLHLELGQEEAELEEFLCPVKTPPGLVGVAAALQPFPALQNISLKHLGTEIQNTMHNIRGNKQAQGTGHEPPGEDSPQSGEPQREEQPLASDASTPGREPEDSPKPAPKPSLTISFAQKAKRQNNTFPFFSEGITRNRTAQEKVAALEQQVLMLTKELKSQKELVKILHKALEAAQQEKRASSAYLAAAEDKDRLELVRHKVRQIAELGRRVEALEQERESLAHTASLREQQVQELQQHVQLLMDKNHAKQQVICKLSEKVTQDFTHPPDQSPLRPDAANRDFLSQQGKIEHLKDDMEAYRTQNCFLNSEIHQVTKIWRKVAEKEKALLTKCAYLQARNCQVESKYLAGLRRLQEALGDEASECSELLRQLVQEALQWEAGEASSDSIELSPISKYDEYGFLTVPDYEVEDLKLLAKIQALESRSHHLLGLEAVDRPLRERWAALGDLVPSAELKQLLRAGVPREHRPRVWRWLVHLRVQHLHTPGCYQELLSRGQAREHPAARQIELDLNRTFPNNKHFTCPTSSFPDKLRRVLLAFSWQNPTIGYCQGLNRLAAIALLVLEEEESAFWCLVAIVETIMPADYYCNTLTASQVDQRVLQDLLSEKLPRLMAHLGQHHVDLSLVTFNWFLVVFADSLISNILLRVWDAFLYEGTKVVFRYALAIFKYNEKEILRLQNGLEIYQYLRFFTKTISNSRKLMNIAFNDMNPFRMKQLRQLRMVHRERLEAELRELEQLKAEYLERRASRRRAVSEGCASEDEVEGEA

SEQ ID NO: 890983 - protein, 922 aa, Homo sapiens
PFGKLPAESPRFVPGGPADPSSLRSLRLAAMEGAGENAPESSSSAPGSEESARDPQVPPPEEESGDCARSLEAVPKKLCGYLSKFGGKGPIRGWKSRWFFYDERKCQLYYSRTAQDANPLDSIDLSSAVFDCKADAEEGIFEIKTPSRVITLKAATKQAMLYWLQQLQMKRWEFHNSPPAPPATPDAALAGNGPVLHLELGQEEAELEEFLCPVKTPPGLVGVAAALQPFPALQNISLKHLGTEIQNTMHNIRGNKQAQGTGHEPPGEDSPQSGEPQREEQPLASDASTPGITRNRTAQEKVAALEQQVLMLTKELKSQKELVKILHKALEAAQQEKRASSAYLAAAEDKDRLELVRHKVRQIAELGRRVEALEQERESLAHTASLREQQVQELQQHVQLLMDKNHAKQQVICKLSEKVTQDFTHPPDQSPLRPDAANRDFLSQQGKIEHLKDDMEAYRTQNCFLNSEIHQVTKIWRKVAEKEKALLTKCAYLQARNCQVESKYLAGLRRLQEALGDEASECSELLRQLVQEALQWEAGEASSDSIELSPISKYDEYGFLTVPDYEVEDLKLLAKIQALESRSHHLLGLEAVDRPLRERWAALGDLVPSAELKQLLRAGVPREHRPRVWRWLVHLRVQHLHTPGCYQELLSRGQAREHPAARQIELDLNRTFPNNKHFTCPTSSFPDKLRRVLLAFSWQNPTIGYCQGLNRLAAIALLVLEEEESAFWCLVAIVETIMPADYYCNTLTASQVDQRVLQDLLSEKLPRLMAHLGQHHVDLSLVTFNWFLVVFADSLISNILLRVWDAFLYEGTKVVFRYALAIFKYNEKEILRLQNGLEIYQYLRFFTKTISNSRKLMNIAFNDMNPFRMKQLRQLRMVHRERLEAELRELEQLKAEYLERRASRRRAVSEGCASEDEVEGEA

SEQ ID NO: 890984 - protein, 799 aa, Homo sapiens
PFGKLPAESPRFVPGGPADPSSLRSLRLAAMEGAGENAPESSSSAPGSEESARDPQVPPPEEESGDCARSLEAVPKKLCGYLSKFGGKGPIRGWKSRWFFYDERKCQLYYSRTAQDANPLDSIDLSSAVFDCKADAEEGIFEIKTPSRVITLKAATKQAMLYWLQQLQMKRWEFHNSPPAPPATPDAALAGNGPVLHLELGQEEAELEEFLCPVKTPPGLVGVAAALQPFPALQNISLKHLGTEIQNTMHNIRGNKQAQGTGHEPPGEDSPQSGEPQREEQPLASDASTPGREPEDSPKPAPKPSLTISFAQKAKRQNNTFPFFSEGITRNRTAQEKVAALEQQVLMLTKELKSQKELVKILHKALEAAQQEKRASSAYLAAAEDKDRLELVRHKVRQIAELLRQLVQEALQWEAGEASSDSIELSPISKYDEYGFLTVPDYEVEDLKLLAKIQALESRSHHLLGLEAVDRPLRERWAALGDLVPSAELKQLLRAGVPREHRPRVWRWLVHLRVQHLHTPGCYQELLSRGQAREHPAARQIELDLNRTFPNNKHFTCPTSSFPDKLRRVLLAFSWQNPTIGYCQGLNRLAAIALLVLEEEESAFWCLVAIVETIMPADYYCNTLTASQVDQRVLQDLLSEKLPRLMAHLGQHHVDLSLVTFNWFLVVFADSLISNILLRVWDAFLYEGTKVVFRYALAIFKYNEKEILRLQNGLEIYQYLRFFTKTISNSRKLMNIAFNDMNPFRMKQLRQLRMVHRERLEAELRELEQLKAEYLERRASRRRAVSEGCASEDEVEGEA

SEQ ID NO: 890985 - protein, 958 aa, Homo sapiens; identical to SEQ ID NO: 890982

SEQ ID NO: 890986 - protein, 747 aa, Homo sapiens
PFGKLPAESPRFVPGGPADPSSLRSLRLAAMEGAGENAPESSSSAPGSEESARDPQVPPPEEESGDCARSLEAVPKKLCGYLSKFGGKGPIRGWKSRWFFYDERKCQLYYSRTAQDANPLDSIDLSSAVFDCKADAEEGIFEIKTPSRVITLKAATKQAMLYWLQQLQMKRWEFHNSPPAPPATPDAALAGNGPVLHLELGQEEAELEEFLCPVKTPPGLVGVAAALQPFPALQNISLKHLGTEIQNTMHNIRGNKQAQGTGHEPPGEDSPQSGEPQREEQPLASDASTPGREPEDSPKPAPKPSLTISFAQKAKRQNNTFPFFSEGITRNRTAQEKVAALEQQVLMLTKELKSQKELVKILHKALEAAQQEKRASSAYLAAAEDKDRLELVRHKVRQIAELGRRVEALEQERESLAHTASLREQQVQELQQHVQLLMDKNHAKQQVICKLSEKVTQDFTHPPDQSPLRPDAANRDFLSQQGKIEHLKDDMEAYRTQNCFLNSEIHQVTKIWRKVAEKEKALLTKCAYLQARNCQVESKYLAGLRRLQEALGDEASECSELLRQLVQEALQWEAGEASSDSIELSPISKYDEYGFLTVPDYEVEDLKLLAKIQALESRSHHLLGLEAVDRPLRERWAALGDLVPSAELKQLLRAGVPREHRPRVWRWLVHLRVQHLHTPGCYQELLSRGQAREHPAARQIELDLNRTFPNNKHFTCPTSSFPDKLRRVLLAFSWQNPTIGYCQGLNR

SEQ ID NO: 890987 - protein, 733 aa, Homo sapiens
PFGKLPAESPRFVPGGPADPSSLRSLRLAAMEGAGENAPESSSSAPGSEESARDPQVPPPEEESGDCARSLEAVPKKLCGYLSKFGGKGPIRGWKSRWFFYDERKCQLYYSRTAQDANPLDSIDLSSAVFDCKADAEEGIFEIKTPSRVITLKAATKQAMLYWLQQLQMKRWEFHNSPPAPPATPDAALAGNGPVLHLELGQEEAELEEFLCPVKTPPGLVGVAAALQPFPALQNISLKHLGTEIQNTMHNIRGNKQAQGTGHEPPGEDSPQSGEPQREEQPLASDASTPGREPEDSPKPAPKPSLTISFAQKAKRQNNTFPFFSEGITRNRTAQEKVAALEQQVLMLTKELKSQKELVKILHKALEAAQQEKRASSAYLAAAEDKDRLELVRHKVRQIAELGRRVEALEQERESLAHTASLREQQVQELQQHVQLLMDKNHAKQQVICKLSEKVTQDFTHPPDQSPLRPDAANRDFLSQQGKIEHLKDDMEAYRTQNCFLNSEIHQVTKIWRKVAEKEKALLTKCAYLQARNCQVESKYLAGLRRLQEALGDEASECSELLRQLVQEALQWEAGEASSDSIELSPISKYDEYGFLTVPDYEVEDLKLLAKIQALESRSHHLLGLEAVDRPLRERWAALGDLVPSAELKQLLRAGVPREHRPRVWRWLVHLRVQHLHTPGCYQELLSRGQAREHPAARQIELDLNRTFPNNKHFSLPTASPIEGFHENKYTSS

SEQ ID NO: 890988 - protein, 71 aa, Homo sapiens
MHNIRGNKQAQGTGHEPPGEDSPQSGEPQREEQPLASDASTPGEPLSRAELPSGTSSSRLAQVPSFLPANQ

SEQ ID NO: 890989 - protein, 1008 aa, Homo sapiens
MSYDYHQNWGRDGGPRSSGGGYGGGPAGGHGGNRGSGGGGGGGGGGRGGRGRHPGHLKGREIGMWYAKKQGQKNKEAERQERAVVHMDERREEQIVQLLNSVQAKNDKESEAQISWFAPEDHGYGTEVSTKNTPCSENKLDIQEKKLINQEKKMFRIRNRSYIDRDSEYLLQENEPDGTLDQKLLEDLQKKKNDLRYIEMQHFREKLPSYGMQKELVNLIDNHQVTVISGETGCGKTTQVTQFILDNYIERGKGSACRIVCTQPRRISAISVAERVAAERAESCGSGNSTGYQIRLQSRLPRKQGSILYCTTGIILQWLQSDPYLSSVSHIVLDEIHERNLQSDVLMTVVKDLLNFRSDLKVILMSATLNAEKFSEYFGNCPMIHIPGFTFPVVEYLLEDVIEKIRYVPEQKEHRSQFKRGFMQGHVNRQEKEEKEAIYKERWPDYVRELRRRYSASTVDVIEMMEDDKVDLNLIVALIRYIVLEEEDGAILVFLPGWDNISTLHDLLMSQVMFKSDKFLIIPLHSLMPTVNQTQVFKRTPPGVRKIVIATNIAETSITIDDVVYVIDGGKIKETHFDTQNNISTMSAEWVSKANAKQRKGRAGRVQPGHCYHLYNGLRASLLDDYQLPEILRTPLEELCLQIKILRLGGIAYFLSRLMDPPSNEAVLLSIRHLMELNALDKQEELTPLGVHLARLPVEPHIGKMILFGALFCCLDPVLTIAASLSFKDPFVIPLGKEKIADARRKELAKDTRSDHLTVVNAFEGWEEARRRGFRYEKDYCWEYFLSSNTLQMLHNMKGQFAEHLLGAGFVSSRNPKDPESNINSDNEKIIKAVICAGLYPKVAKIRLNLGKKRKMVKVYTKTDGLVAVHPKSVNVEQTDFHYNWLIYHLKMRTSSIYLYDCTEVSPYCLLFFGGDISIQKDNDQETIAVDEWIVFQSPARIAHLVKELRKELDILLQEKIESPHPVDWNDTKSRDCAVLSAIIDLIKTQEKATPRNFPPRFQDGYYS

SEQ ID NO: 890990 - protein, 947 aa, Homo sapiens
SRTCYPCVLQQKNKEAERQERAVVHMDERREEQIVQLLNSVQAKNDKESEAQISWFAPEDHGYGTEVSTKNTPCSENKLDIQEKKLINQEKKMFRIRNRSYIDRDSEYLLQENEPDGTLDQKLLEDLQKKKNDLRYIEMQHFREKLPSYGMQKELVNLIDNHQVTVISGETGCGKTTQVTQFILDNYIERGKGSACRIVCTQPRRISAISVAERVAAERAESCGSGNSTGYQIRLQSRLPRKQGSILYCTTGIILQWLQSDPYLSSVSHIVLDEIHERNLQSDVLMTVVKDLLNFRSDLKVILMSATLNAEKFSEYFGNCPMIHIPGFTFPVVEYLLEDVIEKIRYVPEQKEHRSQFKRGFMQGHVNRQEKEEKEAIYKERWPDYVRELRRRYSASTVDVIEMMEDDKVDLNLIVALIRYIVLEEEDGAILVFLPGWDNISTLHDLLMSQVMFKSDKFLIIPLHSLMPTVNQTQVFKRTPPGVRKIVIATNIAETSITIDDVVYVIDGGKIKETHFDTQNNISTMSAEWVSKANAKQRKGRAGRVQPGHCYHLYNGLRASLLDDYQLPEILRTPLEELCLQIKILRLGGIAYFLSRLMDPPSNEAVLLSIRHLMELNALDKQEELTPLGVHLARLPVEPHIGKMILFGALFCCLDPVLTIAASLSFKDPFVIPLGKEKIADARRKELAKDTRSDHLTVVNAFEGWEEARRRGFRYEKDYCWEYFLSSNTLQMLHNMKGQFAEHLLGAGFVSSRNPKDPESNINSDNEKIIKAVICAGLYPKVAKIRLNLGKKRKMVKVYTKTDGLVAVHPKSVNVEQTDFHYNWLIYHLKMRTSSIYLYDCTEVSPYCLLFFGGDISIQKDNDQETIAVDEWIVFQSPARIAHLVKELRKELDILLQEKIESPHPVDWNDTKSRDCAVLSAIIDLIKTQEKATPRNFPPRFQDGYYS

SEQ ID NO: 890991 - protein, 1056 aa, Homo sapiens
MSYDYHQNWGRDGGPRSSGGGYGGGPAGGHGGNRGSGGGGGGGGGGRGGRGRHPGHLKGREIGMWYAKKQGQKNKEAERQERAVVHMDERREEQIVQLLNSVQAKNDKESEAQISWFAPEDHGYGTEVSTKNTPCSENKLDIQEKKLINQEKKMFRIRNRSYIDRDSEYLLQENEPDGTLDQKLLEDLQKKKNDLRYIEMQHFREKLPSYGMQKELVNLIDNHQVTVISGETGCGKTTQVTQFILDNYIERGKGSACRIVCTQPRRISAISVAERVAAERAESCGSGNSTGYQIRLQSRLPRKQGSILYCTTGIILQWLQSDPYLSSVSHIVLDEIHERNLQSDVLMTVVKDLLNFRSDLKVILMSATLNAEKFSEYFGNCPMIHIPGFTFPVVEYLLEDVIEKIRYVPEQKEHRSQFKRGFMQGHVNRQEKEEKEAIYKERWPDYVRELRRRYSASTVDVIEMMEDDKVDLNLIVALIRYIVLEEEDGAILVFLPGWDNISTLHDLLMSQVMFKSDKFLIIPLHSLMPTVNQTQVFKRTPPGVRKIVIATNIAETSITIDDVVYVIDGGKIKETHFDTQNNISTMSAEWVSKANAKQRKGRAGRVQPGHCYHLYNGLRASLLDDYQLPEILRTPLEELCLQIKILRLGGIAYFLSRLMDPPSNEAVLLSIRHLMELNALDKQEELTPLGVHLARLPVEPHIGKMILFGALFCCLDPVLTIAASLSFKDPFVIPLVRKMEIKPSYFRCEQELLRYIFHERFIRMSFSIIASEQFKLAMSAIFKGKEKIADARRKELAKDTRSDHLTVVNAFEGWEEARRRGFRYEKDYCWEYFLSSNTLQMLHNMKGQFAEHLLGAGFVSSRNPKDPESNINSDNEKIIKAVICAGLYPKVAKIRLNLGKKRKMVKVYTKTDGLVAVHPKSVNVEQTDFHYNWLIYHLKMRTSSIYLYDCTEVSPYCLLFFGGDISIQKDNDQETIAVDEWIVFQSPARIAHLVKELRKELDILLQEKIESPHPVDWNDTKSRDCAVLSAIIDLIKTQEKATPRNFPPRFQDGYYS

SEQ ID NO: 890992 - protein, 990 aa, Homo sapiens
MSYDYHQNWGRDGGPRSSGGGYGGGPAGGHGGNRGSGGGGGGGGGGRGGRGRHPGHLKGREIGMWYAKKQGQKNKEAERQERAVVHMDERREEQIVQLLNSVQAKNDKESEAQISWFAPEDHGYGTEVSTKNTPCSENKLDIQEKKLINQEKKMFRIRNRSYIDRDSEYLLQENEPDGTLDQKLLEDLQKKKNDLRYIEMQHFREKLPSYGMQKELVNLIDNHQVTVISGETGCGKTTQVTQFILDNYIERGKGSACRIVCTQPRRISAISVAERVAAERAESCGSGNSTGYQIRLQSRLPRKQGSILYCTTGIILQWLQSDPYLSSVSHIVLDEIHERNLQSDVLMTVVKDLLNFRSDLKVILMSATLNAEKFSEYFGNCPMIHIPGFTFPVVEYLLEDVIEKIRYVPEQKEHRSQFKRGFMQGHVNRQEKEEKEAIYKERWPDYVRELRRRYSASTVDVIEMMEDDKVDLNLIVALIRYIVLEEEDGAILVFLPGWDNISTLHDLLMSQVMFKSDKFLIIPLHSLMPTVNQTQVFKRTPPGVRKIVIATNIAETSITIDDVVYVIDGGKIKETHFDTQNNISTMSAEWVSKANAKQSLRASLLDDYQLPEILRTPLEELCLQIKILRLGGIAYFLSRLMDPPSNEAVLLSIRHLMELNALDKQEELTPLGVHLARLPVEPHIGKMILFGALFCCLDPVLTIAASLSFKDPFVIPLGKEKIADARRKELAKDTRSDHLTVVNAFEGWEEARRRGFRYEKDYCWEYFLSSNTLQMLHNMKGQFAEHLLGAGFVSSRNPKDPESNINSDNEKIIKAVICAGLYPKVAKIRLNLGKKRKMVKVYTKTDGLVAVHPKSVNVEQTDFHYNWLIYHLKMRTSSIYLYDCTEVSPYCLLFFGGDISIQKDNDQETIAVDEWIVFQSPARIAHLVKELRKELDILLQEKIESPHPVDWNDTKSRDCAVLSAIIDLIKTQEKATPRNFPPRFQDGYYS

SEQ ID NO: 890993 - protein, 796 aa, Homo sapiens
MSYDYHQNWGRDGGPRSSGGGYGGGPAGGHGGNRGSGGGGGGGGGGRGGRGRHPGHLKGREIGMWYAKKQGQKNKEAERQERAVVHMDERREEQIVQLLNSVQAKNDKESEAQISWFAPEDHGYGTEVSTKNTPCSENKLDIQEKKLINQEKKMFRIRNRSYIDRDSEYLLQENEPDGTLDQKLLEDLQKKKNDLRYIEMQHFREKLPSYGMQKELVNLIDNHQVTVISGETGCGKTTQVTQFILDNYIERGKGSACRIVCTQPRRISAISVAERVAAERAESCGSGNSTGYQIRLQSRLPRKQGSILYCTTGIILQWLQSDPYLSSVSHIVLDEIHERNLQSDVLMTVVKDLLNFRSDLKVILMSATLNAEKFSEYFGNCPMIHIPGFTFPVVEYLLEDVIEKIRYVPEQKEHRSQFKRGFMQGHVNRQEKEEKEAIYKERWPDYVRELRRRYSASTVDVIEMMEDDKVDLNLIVALIRYIVLEEEDGAILVFLPGWDNISTLHDLLMSQVMFKSDKFLIIPLHSLMPTVNQTQVFKRTPPGVRKIVIATNIAETSITIDDVVYVIDGGKIKETHFDTQNNISTMSAEWVSKANAKQRKGRAGRVQPGHCYHLYNGLRASLLDDYQLPEILRTPLEELCLQIKILRLGGIAYFLSRLMDPPSNEAVLLSIRHLMELNALDKQEELTPLGVHLARLPVEPHIGKMILFGALFCCLDPVLTIAASLSFKDPFVIPLGKEKIADARRKELAKDTRSDHLTVVNAFEGWEEARRRGFRYEKDYCWEYFLSSNTLQIMRR

SEQ ID NO: 890994 - protein, 348 aa, Homo sapiens
LLLRTHKQITQGKWGSSNALDKQEELTPLGVHLARLPVEPHIGKMILFGALFCCLDPVLTIAASLSFKDPFVIPLGKEKIADARRKELAKDTRSDHLTVVNAFEGWEEARRRGFRYEKDYCWEYFLSSNTLQMLHNMKGQFAEHLLGAGFVSSRNPKDPESNINSDNEKIIKAVICAGLYPKVAKIRLNLGKKRKMVKVYTKTDGLVAVHPKSVNVEQTDFHYNWLIYHLKMRTSSIYLYDCTEVSPYCLLFFGGDISIQKDNDQETIAVDEWIVFQSPARIAHLVKELRKELDILLQEKIESPHPVDWNDTKSRDCAVLSAIIDLIKTQEKATPRNFPPRFQDGYYS

SEQ ID NO: 890995 - protein, 810 aa, Homo sapiens
MSYDYHQNWGRDGGPRSSGGGYGGGPAGGHGGNRGSGGGGGGGGGGRGGRGRHPGHLKGREIGMWYAKKQGQKNKEAERQERAVVHMDERREEQIVQLLNSVQAKNDKESEAQISWFAPEDHGYGTEVSTKNTPCSENKLDIQEKKLINQEKKMFRIRNRSYIDRDSEYLLQENEPDGTLDQKLLEDLQKKKNDLRYIEMQHFREKLPSYGMQKELVNLIDNHQVTVISGETGCGKTTQVTQFILDNYIERGKGSACRIVCTQPRRISAISVAERVAAERAESCGSGNSTGYQIRLQSRLPRKQGSILYCTTGIILQWLQSDPYLSSVSHIVLDEIHERNLQSDVLMTVVKDLLNFRSDLKVILMSATLNAEKFSEYFGNCPMIHIPGFTFPVVEYLLEDVIEKIRYVPEQKEHRSQFKRGFMQGHVNRQEKEEKEAIYKERWPDYVRELRRRYSASTVDVIEMMEDDKVDLNLIVALIRYIVLEEEDGAILVFLPGWDNISTLHDLLMSQVMFKSDKFLIIPLHSLMPTVNQTQVFKRTPPGVRKIVIATNIAETSITIDDVVYVIDGGKIKETHFDTQNNISTMSAEWVSKANAKQRKGRAGRVQPGHCYHLYNGLRASLLDDYQLPEILRTPLEELCLQIKILRLGGIAYFLSRLMDPPSNEAVLLSIRHLMELNALDKQEELTPLGVHLARLPVEPHIGKMILFGALFCCLDPVLTIAASLSFKDPFVIPLGKEKIADARRKELAKDTRSDHLTVVNAFEAWEEARRRGLRHGKDDCRAPTRGCRHTPRHCKTEQDSMFELRVDGS

SEQ ID NO: 890996 - protein, 106 aa, Homo sapiens
YGTEVSTKNTPCSENKLDIQEKKLINQEKKMFRIRNRSYIDRDSEYLLQENEPDGTLDQKLLEDLQKKKNDLRYIEMQVVERCQKIFCHFFLTLYKNVCMVRGSCM

SEQ ID NO: 890997 - protein, 671 aa, Homo sapiens
MQPDMSLNVIKMKSSDFLESAELDSGGFGKVSLCFHRTQGLMIMKTVYKGPNCIEHNEALLEEAKMMNRLRHSRVVKLLGVIIEEGKYSLVMEYMEKGNLMHVLKAEMSTPLSVKGRIILEIIEGMCYLHGKGVIHKDLKPENILVDNDFHIKIADLGLASFKMWSKLNNEEHNELREVDGTAKKNGGTLYYMAPEHLNDVNAKPTEKSDVYSFAVVLWAIFANKEPYENAICEQQLIMCIKSGNRPDVDDITEYCPREIISLMKLCWEANPEARPTFPGIEEKFRPFYLSQLEESVEEDVKSLKKEYSNENAVVKRMQSLQLDCVAVPSSRSNSATEQPGSLHSSQGLGMGPVEESWFAPSLEHPQEENEPSLQSKLQDEANYHLYGSRMDRQTKQQPRQNVAYNREEERRRRVSHDPFAQQRPYENFQNTEGKGTAYSSAASHGNAVHQPSGLTSQPQVLYQNNGLYSSHGFGTRPLDPGTAGPRVWYRPIPSHMPSLHNIPVPETNYLGNTPTMPFSSLPPTDESIKYTIYNSTGIQIGAYNYMEIGGTSSSLLDSTNTNFKEEPAAKYQAIFDNTTSLTDKHLDPIRENLGKHWKNCARKLGFTQSQIDEIDHDYERDGLKEKVYQMLQKWVMREGIKGATVGKLAQALHQCSRIDLLSSLIYVSQN

SEQ ID NO: 890998 - protein, 671 aa, Homo sapiens; identical to SEQ ID NO: 890997

SEQ ID NO: 890999 - protein, 671 aa, Homo sapiens; identical to SEQ ID NO: 890997

SEQ ID NO: 891000 - protein, 606 aa, Homo sapiens
MMNRLRHSRVVKLLGVIIEEGKYSLVMEYMEKGNLMHVLKAEMSTPLSVKGRIILEIIEGMCYLHGKGVIHKDLKPENILVDNDFHIKIADLGLASFKMWSKLNNEEHNELREVDGTAKKNGGTLYYMAPEHLNDVNAKPTEKSDVYSFAVVLWAIFANKEPYENAICEQQLIMCIKSGNRPDVDDITEYCPREIISLMKLCWEANPEARPTFPGIEEKFRPFYLSQLEESVEEDVKSLKKEYSNENAVVKRMQSLQLDCVAVPSSRSNSATEQPGSLHSSQGLGMGPVEESWFAPSLEHPQEENEPSLQSKLQDEANYHLYGSRMDRQTKQQPRQNVAYNREEERRRRVSHDPFAQQRPYENFQNTEGKGTAYSSAASHGNAVHQPSGLTSQPQVLYQNNGLYSSHGFGTRPLDPGTAGPRVWYRPIPSHMPSLHNIPVPETNYLGNTPTMPFSSLPPTDESIKYTIYNSTGIQIGAYNYMEIGGTSSSLLDSTNTNFKEEPAAKYQAIFDNTTSLTDKHLDPIRENLGKHWKNCARKLGFTQSQIDEIDHDYERDGLKEKVYQMLQKWVMREGIKGATVGKLAQALHQCSRIDLLSSLIYVSQN

SEQ ID NO: 891001 - protein, 564 aa, Homo sapiens
MSTPLSVKGRIILEIIEGMCYLHGKGVIHKDLKPENILVDNDFHIKIADLGLASFKMWSKLNNEEHNELREVDGTAKKNGGTLYYMAPEHLNDVNAKPTEKSDVYSFAVVLWAIFANKEPYENAICEQQLIMCIKSGNRPDVDDITEYCPREIISLMKLCWEANPEARPTFPGIEEKFRPFYLSQLEESVEEDVKSLKKEYSNENAVVKRMQSLQLDCVAVPSSRSNSATEQPGSLHSSQGLGMGPVEESWFAPSLEHPQEENEPSLQSKLQDEANYHLYGSRMDRQTKQQPRQNVAYNREEERRRRVSHDPFAQQRPYENFQNTEGKGTAYSSAASHGNAVHQPSGLTSQPQVLYQNNGLYSSHGFGTRPLDPGTAGPRVWYRPIPSHMPSLHNIPVPETNYLGNTPTMPFSSLPPTDESIKYTIYNSTGIQIGAYNYMEIGGTSSSLLDSTNTNFKEEPAAKYQAIFDNTTSLTDKHLDPIRENLGKHWKNCARKLGFTQSQIDEIDHDYERDGLKEKVYQMLQKWVMREGIKGATVGKLAQALHQCSRIDLLSSLIYVSQN

SEQ ID NO: 891002 - protein, 354 aa, Homo sapiens [sequence omitted]

SEQ ID NO: 891003 - protein, 406 aa, Homo sapiens
FSYYSLTASEELLLLFVKLVGRGPSPKCFGLVSYLFSVCYFEIQIHDGAQILFYFLMFHDTHSNVDHFFSATEQPGSLHSSQGLGMGPVEESWFAPSLEHPQEENEPSLQSKLQDEANYHLYGSRMDRQTKQQPRQNVAYNREEERRRRVSHDPFAQQRPYENFQNTEGKGTAYSSAASHGNAVHQPSGLTSQPQVLYQNNGLYSSHGFGTRPLDPGTAGPRVWYRPIPSHMPSLHNIPVPETNYLGNTPTMPFSSLPPTDESIKYTIYNSTGIQIGAYNYMEIGGTSSSLLDSTNTNFKEEPAAKYQAIFDNTTSLTDKHLDPIRENLGKHWKNCARKLGFTQSQIDEIDHDYERDGLKEKVYQMLQKWVMREGIKGATVGKLAQALHQCSRIDLLSSLIYVSQN

SEQ ID NO: 891004 - protein, 171 aa, Homo sapiens
AYDLELACTKLWDLLFLDPVVIVPTDESIKYTIYNSTGIQIGAYNYMEIGGTSSSLLDSTNTNFKEEPAAKYQAIFDNTTSLTDKHLDPIRENLGKHWKNCARKLGFTQSQIDEIDHDYERDGLKEKVYQMLQKWVMREGIKGATVGKLAQALHQCSRIDLLSSLIYVSQN

SEQ ID NO: 891005 - protein, 529 aa, Homo sapiens
MMNRLRHSRVVKLLGVIIEEGKYSLVMEYMEKGNLMHVLKAEMSTPLSVKGRIILEIIEGMCYLHGKGVIHKDLKPENILVDNDFHIKIADLGLASFKMWSKLNNEEHNELREVDGTAKKNGGTLYYMAPEHLNDVNAKPTEKSDVYSFAVVLWAIFANKEPYENAICEQQLIMCIKSGNRPDVDDITEYCPREIISLMKLCWEANPEARPTFPGIEEKFRPFYLSQLEESVEEDVKSLKKEYSNENAVVKRMQSLQLDCVAVPSSRSNSATEQPGSLHSSQGLGMGPVEESWFAPSLEHPQEENEPSLQSKLQDEANYHLYGSRMDRQTKQQPRQNVAYNREEERRRRVSHDPFAQQRPYENFQNTEGKGTAYSSAASHGNAVHQPSGLTSQPQVLYQNNGLYSSHGFGTRPLDPGTAGPRVWYRPIPSHMPSLHNIPVPETNYLGNTPTMPFSSLPPTDESIKYTIYNSTGIQIGAYNYMEIGGTSSSLLDSTNTNFKEEPAAKYQAIFGKIPWKDSTPSNLELSYL

SEQ ID NO: 891006 - protein, 207 aa, Homo sapiens
MSTPLSVKGRIILEIIEGMCYLHGKGVIHKDLKPENILVDNDFHIKIADLGLASFKMWSKLNNEEHNELREVDGTAKKNGGTLYYMAPEHLNDVNAKPTEKSDVYSFAVVLWAIFANKEPYENAICEQQLIMCIKSGNRPDVDDITEYCPREIISLMKLCWEANPEARPTFPGIEEKFRPFYLSQLEESVEEDVKSLKVGNIADAQN

SEQ ID NO: 891007 - protein, 115 aa, Homo sapiens
EEIGTDPSMTPARGSDVLEVCTRLLRRWLCQPQHSTFPAHRHNEALLEEAKMMNRLRHSRVVKLLGVIIEEGKYSLVMEYMEKGNLMHVLKAEVERAPPHGDPQRLGPGCLLWLP

SEQ ID NO: 891008 - protein, 176 aa, Homo sapiens
QKGTWAGLRGAGGAGAPRRAARRARARGVVVSPKAEAAAGARRRRACEAVVLPALVFPLLSGWRRPKRCWARSPFLSLRRPLPALSRCTVSPTQDCPGPDMARGQQKIQSQQKNAKKQAGQKKKQGHDQKAAAKAALIYTCTVCRTQMPDPKTFKQHFESKHPKTPLPPELADVQA

SEQ ID NO: 891009 - protein, 165 aa, Homo sapiens
QKGTWAGLRGAGGAGAPRRAARRARARGVVVSPKAEAAAGARRRRACEAVVLPALVFPLLSGWRRPKRCWARSPFLSLRRPLPALSRCTVSPTQDCPGPESHCRPGCSAVVPSRVTATSASRIQAILHLSLPSSWNYRYGSWTAENSVSAEKCQKASWTKEETRT

SEQ ID NO: 891010 - protein, 140 aa, Homo sapiens
EEEEFYLSCAIKCLPSASTLPVAAYCITVIAVRRSESLPIAQSSRKKRSQSPTLSALMEVCSFDMARGQQKIQSQQKNAKKQAGQKKKQGHDQKAAAKAALIYTCTVCRTQMPDPKTFKQHFESKHPKTPLPPELADVQA

SEQ ID NO: 891011 - protein, 121 aa, Homo sapiens
QKGTWAGLRGAGGAGAPRRAARRARARGVVVSPKAEAAAGARGCCAPGSRVSPPERVEEAQAVLGALPLPFPPASSPGPLALHCLSDARLSRPGYGSWTAENSVSAEKCQKASWTKEETRT

SEQ ID NO: 891012 - protein, 221 aa, Homo sapiens
RGGPREGDEFGRLPGPAGGRVAGQPRKRSGNLTPGDSRRSAARVWRSRWTQGPGFGQSRPPGGASWSRVREDWLDGGCVAFGGREEEGVSEAGEAGWEGRCARLKLGSEKCWVETSLWVRSSSPLPKTMVLKARVRMWSAAWASSFPMVMENEPTSWTQNPFLLLLIYVGFKRSFGAELTCCLLRERLILELVSSTTSLFAAPSENHTESCIKNQHVGICK

SEQ ID NO: 891013 - protein, 121 aa, Homo sapiens; identical to SEQ ID NO: 891011

SEQ ID NO: 891014 - protein, 229 aa, Homo sapiens
QKGTWAGLRGAGGAGAPRRAARRARARGVVVSPKAEAAAGARRRRACEAVVLPALVFPLLSGWRRPKRCWARSPFLSLRRPLPALSRCTVSPTQDCPGPAPSENHTESCIKNQHSLTVAQAAVQWCHHASLQPLPPGFKQFSTSASQVAGITDMARGQQKIQSQQKNAKKQAGQKKKQGHDQKAAAKAALIYTCTVCRTQMPDPKTFKQHFESKHPKTPLPPELADVQA

SEQ ID NO: 891015 - protein, 176 aa, Homo sapiens; identical to SEQ ID NO: 891008

SEQ ID NO: 891016 - protein, 121 aa, Homo sapiens; identical to SEQ ID NO: 891011

SEQ ID NO: 891017 - protein, 121 aa, Homo sapiens; identical to SEQ ID NO: 891011

SEQ ID NO: 891018 - protein, 331 aa, Homo sapiens
RGGPREGDEFGRLPGPAGGRVAGQPRKRSGNLTPGDSRRSAARVWRSRWTQGPGFGQSRPPGGASWSRVREDWLDGGCVAFGGREEEGVSEAGEAGWEGRCARLKLGSEKCWVETSLWVRSSSPLPKTMVLKARVRMWSAAWASSFPMVMENEPTSWTQNPFLLLLIYVGFKRSFGAELTCCLLRERLILELVSSTTSLFAAPSENHTESCIKNQHSLTVAQAAVQWCHHASLQPLPPGFKQFSTSASQVAGITDMARGQQKIQSQQKNAKKQAGQKKKQGHDQKAAAKAALIYTCTVCRTQMPDPKTFKQHFESKHPKTPLPPELADVQA

SEQ ID NO: 891019 - protein, 121 aa, Homo sapiens; identical to SEQ ID NO: 891011

SEQ ID NO: 891020 - protein, 116 aa, Homo sapiens
TRDVIPYTSPTPASAWRTFLPKTMVLKARVRMWSAAWASSFPMVMENEPTSWTQNPFLLLLIYVGFKRSFGAELTCCLLRERLILELVSSTTSLFAAPSENHTESCIKNQHVGICK

SEQ ID NO: 891021 - protein, 121 aa, Homo sapiens
MRIMLLFTAILAFSLAQSFGAVCKEPQEEVVPGGGRSKRDPDLYQLLQRLFKSHSSLEGLLKALSQASTDPKESTSPEKRDMHDFFVGLMGKRSVQPDSPTDVNQENVPSFGILKYPPRAE

SEQ ID NO: 891022 - protein, 121 aa, Homo sapiens; identical to SEQ ID NO: 891021

SEQ ID NO: 891023 - protein, 440 aa, Homo sapiens
MKFLLIKDAPGKKKRKNLMLSFKRKHAKGQDLFDQIVYHLDLVETDYFGLQFLDSAQVAHWLDHAKPIKKQMKIGPAYALHFRVKYYSSEPNNLREEFTRYLFVLQLRHDILSGKLKCPYETAVELAALCLQAELGECELPEHTPELVSEFRFIPNQTEAMEFDIFQRWKECRGKSPAQAELSYLNKAKWLEMYGVDMHVVRGRDGCEYSLGLTPTGILIFEGANKIGLFFWPKITKMDFKKSKLTLVVVEDDDQGREQEHTFVFRLDSARTCKHLWKCAVEHHAFFRLRTPGNSKSNRSDFIRLGSRFRFSGRTEYQATHGSRLRRTSTFERKPSKRYPSRRHSTFKASNPVIAAQLCSKTNPEVHNYQPQYHPNIHPSQPRWHPHSPNVRPSFQDDRSHWKASASGDDSHFDYVHDQNQKNLGGMQSMMYRDKLMTAL

SEQ ID NO: 891024 - protein, 445 aa, Homo sapiens
HISAAGAAKATLYCRVFLLDGTEVSVDLPKHAKGQDLFDQIVYHLDLVETDYFGLQFLDSAQVAHWLDHAKPIKKQMKIGPAYALHFRVKYYSSEPNNLREEFTRYLFVLQLRHDILSGKLKCPYETAVELAALCLQAELGECELPEHTPELVSEFRFIPNQTEAMEFDIFQRWKECRGKSPAQAELSYLNKAKWLEMYGVDMHVVRGRDGCEYSLGLTPTGILIFEGANKIGLFFWPKITKMDFKKSKLTLVVVEDDDQGREQEHTFVFRLDSARTCKHLWKCAVEHHAFFRLRTPGNSKSNRSDFIRLGSRFRFSGRTEYQATHGSRLRRTSTFERKPSKRYPSRRHSTFKASNPVIAAQLCSKTNPEVHNYQPQYHPNIHPSQPRWHPHSPNVRPSFQDDRSHWKASASGDDSHFDYVHDQNQKNLGGMQSMMYRDKLMTAL

SEQ ID NO: 891025 - protein, 353 aa, Homo sapiens
MVDHQLTFPGIQIDKCPCNDIQAVGNITLRLYSTQVGGIGCGAERSRKVLTRSLVRLRGFRVRFQNLQTMNATGTVSIFQRWKECRGKSPAQAELSYLNKAKWLEMYGVDMHVVRGRDGCEYSLGLTPTGILIFEGANKIGLFFWPKITKMDFKKSKLTLVVVEDDDQGREQEHTFVFRLDSARTCKHLWKCAVEHHAFFRLRTPGNSKSNRSDFIRLGSRFRFSGRTEYQATHGSRLRRTSTFERKPSKRYPSRRHSTFKASNPVIAAQLCSKTNPEVHNYQPQYHPNIHPSQPRWHPHSPNVRPSFQDDRSHWKASASGDDSHFDYVHDQNQKNLGGMQSMMYRDKLMTAL

SEQ ID NO: 891026 - protein, 445 aa, Homo sapiens; identical to SEQ ID NO: 891024

SEQ ID NO: 891027 - protein, 317 aa, Homo sapiens
HISAAGAAKATLYCRVFLLDGTEVSVDLPKHAKGQDLFDQIVYHLDLVETDYFGLQFLDSAQVAHWLDHAKPIKKQMKIGPAYALHFRVKYYSSEPNNLREEFTRYLFVLQLRHDILSGKLKCPYETAVELAALCLQAELGECELPEHTPELVSEFRFIPNQTEAMEFDIFQRWKECRGKSPAQAELSYLNKAKWLEMYGVDMHVVRGRDGCEYSLGLTPTGILIFEGANKIGLFFWPKITKMDFKKSKLTLVVVEDDDQGREQEHTFVFRLDSARTCKHLWKCAVEHHAFFRLRTPGNSKSNRSDFIRLGSRFRFR

SEQ ID NO: 891028 - protein, 445 aa, Homo sapiens; identical to SEQ ID NO: 891024

SEQ ID NO: 891029 - protein, 134 aa, Homo sapiens
MVQQHDYLKFLVTPSCFSGGKMPTAQEIVLPFERGQGMGACPEKGDGLMKGGHSAREEGARTLSVLFHEEDYAGVCSPLVQSCPEIAQCKEQFSKDQKSCLKIAVRSQPLQVYTAQREGPPGVAVTEGSGRPVV

SEQ ID NO: 891030 - protein, 427 aa, Homo sapiens
HISAAGAAKATLYCRVFLLDGTEVSVDLPKHAKGQDLFDQIVYHLDLVETDYFGLQFLDSAQVAHWLDHAKPIKKQMKIGPAYALHFRVKYYSSEPNNLREEFTRYLFVLQLRHDILSGKLKCPYETAVELAALCLQAELGECELPEHTPELVSEFRFIPNQTEAMEFDIFQRWKECRGKSPAQAELSYLNKAKWLEMYGVDMHVVRGRDGCEYSLGLTPTGILIFEGANKIGLFFWPKITKMDFKKSKLTLVVVEDDDQGREQEHTFVFRLDSARTCKHLWKCAVEHHAFFRLRTPGNSKSNRSDFIRLGSRFRFSGRTEYQATHGSRLRRTSTFERKPSKRYPSRRHSTFKASNPVIAAQLCHPSQPRWHPHSPNVRPSFQDDRSHWKASASGDDSHFDYVHDQNQKNLGGMQSMMYRDKLMTAL

SEQ ID NO: 891031 - protein, 445 aa, Homo sapiens; identical to SEQ ID NO: 891024

SEQ ID NO: 891032 - protein, 213 aa, Homo sapiens
HISAAGAAKATLYCRVFLLDGTEVSVDLPKHAKGQDLFDQIVYHLDLVETDYFGLQFLDSAQVAHWLDHAKPIKKQMKIGPAYALHFRVKYYSSEPNNLREEFTRYLFVLQLRHDILSGKLKCPYETAVELAALCLQAELGECELPEHTPELVSEFRFIPNQTEAMEFDIFQRWKECRGKSPAQAELSYLNKAKWLEMYGVDMHVVRVRTVCV

SEQ ID NO: 891033 - protein, 534 aa, Homo sapiens [sequence omitted]

SEQ ID NO: 891034 - protein, 486 aa, Homo sapiens [sequence omitted]

SEQ ID NO: 891035 - protein, 534 aa, Homo sapiens [sequence omitted]

SEQ ID NO: 891036 - protein, 534 aa, Homo sapiens [sequence omitted]

SEQ ID NO: 891037 - protein, 534 aa, Homo sapiens [sequence omitted]

SEQ ID NO: 891038 - protein, 534 aa, Homo sapiens [sequence omitted]

SEQ ID NO: 891039 - protein, 534 aa, Homo sapiens [sequence omitted]

SEQ ID NO: 891040 - protein, 534 aa, Homo sapiens [sequence omitted]

SEQ ID NO: 891041 - protein, 534 aa, Homo sapiens [sequence omitted]

SEQ ID NO: 891042 - protein, 534 aa, Homo sapiens [sequence omitted]

SEQ ID NO: 891043 - protein, 534 aa, Homo sapiens [sequence omitted]

SEQ ID NO: 891044 - protein, 226 aa, Homo sapiens
MRLRGCGPRAAPASSAGASDARLLAPPGRNPFVHELRLSALQKAQVALMTLTLFPVRLLVAAAMMLLAWPLALVASLGSAEKEPEQPPALWRKVVDFLLKAIMRTMWFAGGFHRVAVKGRQALPTEAAILTLAPHSSYFDAIPVTMTMSSIVMKAESRDIPIWGTLIQYIRPVFVSRSDQDSRRKTVEEIKRRAQSNGKWPQIMIFPEGTCTNRCAFVRFGDPLVQ

SEQ ID NO: 891045 - protein, 84 aa, Homo sapiens [sequence omitted]

SEQ ID NO: 891046 - protein, 415 aa, Homo sapiens
MDFDKKGGKGETEEGRRMSKAGGGRSSHGIRSSGTSSGVLMVGPNFRVGKKIGCGNFGELRLGKNLYTNEYVAIKLEPIKSRAPQLHLEYRFYKQLSATEGVPQVYYFGPCGKYNAMVLELLGPSLEDLFDLCDRTFTLKTVLMIAIQLITRMEYVHTKSLIYRDVKPENFLVGRPGTKRQHAIHIIDFGLAKEYIDPETKKHIPYREHKSLTGTARYMSINTHLGKEQSRRDDLEALGHMFMYFLRGSLPWQGLKADTLKERYQKIGDTKRATPIEVLCENFPEEMATYLRYVRRLDFFEKPDYDYLRKLFTDLFDRSGFVFDYEYDWAGKPLPTPIGTVHTDLPSQPQLRDKTQPHSKNQALNSTNGELNADDPTAGHSNAPITAPAEVEVADETKCCCFFKRRKRKSLQRHK

SEQ ID NO: 891047 - protein, 367 aa, Homo sapiens
MDRWMVAVRMDRVAGKNLYTNEYVAIKLEPIKSRAPQLHLEYRFYKQLSATEGVPQVYYFGPCGKYNAMVLELLGPSLEDLFDLCDRTFTLKTVLMIAIQLITRMEYVHTKSLIYRDVKPENFLVGRPGTKRQHAIHIIDFGLAKEYIDPETKKHIPYREHKSLTGTARYMSINTHLGKEQSRRDDLEALGHMFMYFLRGSLPWQGLKADTLKERYQKIGDTKRATPIEVLCENFPEEMATYLRYVRRLDFFEKPDYDYLRKLFTDLFDRSGFVFDYEYDWAGKPLPTPIGTVHTDLPSQPQLRDKTQPHSKNQALNSTNGELNADDPTAGHSNAPITAPAEVEVADETKCCCFFKRRKRKSLQRHK

SEQ ID NO: 891048 - protein, 447 aa, Homo sapiens
MDFDKKGGKGETEEGRRMSKAGGGRSSHGIRSSGTSSGVLMVGPNFRVGKKIGCGNFGELRLGKNLYTNEYVAIKLVSRPLHPTPADVPPRDFRAATRSPGDSLLCPQEPIKSRAPQLHLEYRFYKQLSATEGVPQVYYFGPCGKYNAMVLELLGPSLEDLFDLCDRTFTLKTVLMIAIQLITRMEYVHTKSLIYRDVKPENFLVGRPGTKRQHAIHIIDFGLAKEYIDPETKKHIPYREHKSLTGTARYMSINTHLGKEQSRRDDLEALGHMFMYFLRGSLPWQGLKADTLKERYQKIGDTKRATPIEVLCENFPEEMATYLRYVRRLDFFEKPDYDYLRKLFTDLFDRSGFVFDYEYDWAGKPLPTPIGTVHTDLPSQPQLRDKTQPHSKNQALNSTNGELNADDPTAGHSNAPITAPAEVEVADETKCCCFFKRRKRKSLQRHK

SEQ ID NO: 891049 - protein, 415 aa, Homo sapiens; identical to SEQ ID NO: 891046

SEQ ID NO: 891050 - protein, 438 aa, Homo sapiens
MDFDKKGGKGETEEGRRMSKAGGGRSSHGIRSSGTSSGVLMVGPNFRVGKKIGCGNFGELRLGKNLYTNEYVAIKLEPIKSRAPQLHLEYRFYKQLSATEGVPQVYYFGPCGKYNAMVLELLGPSLEDLFDLCDRTFTLKTVLMIAIQLITRMEYVHTKSLIYRDVKPENFLVGRPGTKRQHAIHIIDFGLAKEYIDPETKKHIPYREHKSLTGTARYMSINTHLGKGELRARGGGRAPGPQLRLRPCPAEQSRRDDLEALGHMFMYFLRGSLPWQGLKADTLKERYQKIGDTKRATPIEVLCENFPEEMATYLRYVRRLDFFEKPDYDYLRKLFTDLFDRSGFVFDYEYDWAGKPLPTPIGTVHTDLPSQPQLRDKTQPHSKNQALNSTNGELNADDPTAGHSNAPITAPAEVEVADETKCCCFFKRRKRKSLQRHK

SEQ ID NO: 891051 - protein, 276 aa, Homo sapiens
MDFDKKGGKGETEEGRRMSKAGGGRSSHGIRSSGTSSGVLMVGPNFRVGKKIGCGNFGELRLGKNLYTNEYVAIKLEPIKSRAPQLHLEYRFYKQLSATEGVPQVYYFGPCGKYNAMVLELLGPSLEDLFDLCDRTFTLKTVLMIAIQLITRMEYVHTKSLIYRDVKPENFLVGRPGTKRQHAIHIIDFGLAKEYIDPETKKHIPYREHKSLTGTARYMSINTHLGKGRHAQGAVPEDRGHQTRHAHRGALRELPRGDGHVPALCAAPGLLREARL

SEQ ID NO: 891052 - protein, 154 aa, Homo sapiens
MLHQSSGAAGTAAAVSSQPGPGKGRVGAARRVLLDALAPGGCAPAPGTRGGRTGWCHPARPSALPRGARGHGASCLSAPTPGKQPETKRLKAPGPALQVYCRGLGAALDWRAVPQWGALEAAGQSGAAWGRAQGGGCESSFCFTKCTEMAFTFL

SEQ ID NO: 891053 - protein, 154 aa, Homo sapiens; identical to SEQ ID NO: 891052

SEQ ID NO: 891054 - protein, 154 aa, Homo sapiens; identical to SEQ ID NO: 891052

SEQ ID NO: 891055 - protein, 415 aa, Homo sapiens; identical to SEQ ID NO: 891046

SEQ ID NO: 891056 - protein, 415 aa, Homo sapiens; identical to SEQ ID NO: 891046

SEQ ID NO: 891057 - protein, 399 aa, Homo sapiens
MDRWMVAVRMDRVAGKNLYTNEYVAIKLVSRPLHPTPADVPPRDFRAATRSPGDSLLCPQEPIKSRAPQLHLEYRFYKQLSATEGVPQVYYFGPCGKYNAMVLELLGPSLEDLFDLCDRTFTLKTVLMIAIQLITRMEYVHTKSLIYRDVKPENFLVGRPGTKRQHAIHIIDFGLAKEYIDPETKKHIPYREHKSLTGTARYMSINTHLGKEQSRRDDLEALGHMFMYFLRGSLPWQGLKADTLKERYQKIGDTKRATPIEVLCENFPEEMATYLRYVRRLDFFEKPDYDYLRKLFTDLFDRSGFVFDYEYDWAGKPLPTPIGTVHTDLPSQPQLRDKTQPHSKNQALNSTNGELNADDPTAGHSNAPITAPAEVEVADETKCCCFFKRRKRKSLQRHK

SEQ ID NO: 891058 - protein, 359 aa, Homo sapiens
MDFDKKGGKGETEEGRRMSKAGGGRSSHGIRSSGTSSGVLMVGPNFRVGKKIGCGNFGELRLGKNLYTNEYVAIKLEPIKSRAPQLHLEYRFYKQLSATEGVPQVYYFGPCGKYNAMVLELLGPSLEDLFDLCDRTFTLKTVLMIAIQLITRMEYVHTKSLIYRDVKPENFLVGRPGTKRQHAIHIIDFGLAKEYIDPETKKHIPYREHKSLTGTARYMSINTHLGKEQSRRDDLEALGHMFMYFLRGSLPWQGLKADTLKERYQKIGDTKRATPIEVLCENFPEEMATYLRYVRRLDFFEKPDYDYLRKLFTDLFDRSGFVFDYEYDWAGKPLPTPIGTVHTDLPSQPQLRDKTQAAP

SEQ ID NO: 891059 - protein, 355 aa, Homo sapiens
MDFDKKGGKGETEEGRRMSKAGGGRSSHGIRSSGTSSGVLMVGPNFRVGKKIGCGNFGELRLGKNLYTNEYVAIKLEPIKSRAPQLHLEYRFYKQLSATEGVPQVYYFGPCGKYNAMVLELLGPSLEDLFDLCDRTFTLKTVLMIAIQLITRMEYVHTKSLIYRDVKPENFLVGRPGTKRQHAIHIIDFGLAKEYIDPETKKHIPYREHKSLTGTARYMSINTHLGKEQSRRDDLEALGHMFMYFLRGSLPWQGLKADTLKERYQKIGDTKRATPIEVLCENFPEEMATYLRYVRRLDFFEKPDYDYLRKLFTDLFDRSGFVFDYDRPPSAPSTPTCPPSLSSGTKPSRTAKTRR

SEQ ID NO: 891060 - protein, 179 aa, Homo sapiens
RPGRRAGTQGGSKADHRPPQADTLKERYQKIGDTKRATPIEVLCENFPEEMATYLRYVRRLDFFEKPDYDYLRKLFTDLFDRSGFVFDYEYDWAGKPLPTPIGTVHTDLPSQPQLRDKTQPHSKNQALNSTNGELNADDPTAGHSNAPITAPAEVEVADETKCCCFFKRRKRKSLQRHK

SEQ ID NO: 891061 - protein, 154 aa, Homo sapiens; identical to SEQ ID NO: 891052

SEQ ID NO: 891062 - protein, 415 aa, Homo sapiens; identical to SEQ ID NO: 891046

SEQ ID NO: 891063 - protein, 363 aa, Homo sapiens
MDFDKKGGKGETEEGRRMSKAGGGRSSHGIRSSGTSSGVLMVGPNFRVGKKIGCGNFGELRLGKNLYTNEYVAIKLEPIKSRAPQLHLEYRFYKQLSATEGVPQVYYFGPCGKYNAMVLELLGPSLEDLFDLCDRTFTLKTVLMIAIQLITRMEYVHTKSLIYRDVKPENFLVGRPGTKRQHAIHIIDFGLAKEYIDPETKKHIPYREHKSLTGTARYMSINTHLGKEQSRRDDLEALGHMFMYFLRGSLPWQGLKADTLKERYQKIGDTKRATPIEVLCENFPEEMATYLKNIGALPVDMVRLYFAETVLALEYLHNYGIVHRDLKPDNLLITSMGHIKLTDFGLSKIGLIQVRCQTHEANF

SEQ ID NO: 891064 - protein, 779 aa, Homo sapiens
SVSRPGRRLPPTLSAVASQLLRRGEDSGRHRSGAAPRSPGGSQARIPPDWDVASADPSEAEATPEAGQGHWLVVQKGNLKKKPKGLVGAQAERRESLKATSFEFKGKKESRRENQVDLPGHILDQAFLLKHHCVRKPSDLCTINVSGLKFSKAKENDFKHFHSVIYINASENLLPLEAFHTFPALKELDLAFNGIKTIYVKYGDFKLLEFLDLSFNSLTVEAICDLGILPHLRVLLLTGNGLTSLPPNLAVAEQEASVTSLTSKRYILRFPALETLMLDDNRLSNPSCFASLAGLRRLKKLSLDENRIIRIPYLQQVQLYDESVDWNGGRGSPHKEPQFMLQSKPRMLEDSDEQLDYTVLPMKKDVDRKIAKEDAVLPVALFPSLCEFVFHNNPLVAHTRGVPPLLKSFLQERLGIHLIRRKIVKPKHHVLMSRKESWKVKSEIPKVPKQPLVLHHPRMTTTKSPSKDMLEPEAELAEDLPTTKSTSVESEMPTENLEGHSPSCRTFVPLPPICSNSTVHSEETLSHLSDTTVRLSPERPSDEDSKSTESIFLTQVSELPSSVIHKDDLELKEKDQKKPPTAPREVKGTRRKLPTAFLPSKYHGYEELLTAKPDPAFIEPKGIQKNAQALQQMLKHPLLCHSSKPKLDTLQKPYVHKEKRAQRIPIPPPKKTRAQLLDDIFIRLRDPRNITEAPLGAVLHQWTERRLVNHKQYLEAKRLLKEFQARYRQLVSGSLRTVFGTTPLPMACPALSESQPKFGHFLEFMDEFCQEPTASDSQG

SEQ ID NO: 891065 - protein, 720 aa, Homo sapiens
MSQSQRSSQGHWLVVQKGNLKKKPKGLVGAQAERRESLKATSFEFKGKKESRRENQVDLPGHILDQAFLLKHHCVRKPSDLCTINVSGLKFSKAKENDFKHFHSVIYINASENLLPLEAFHTFPALKELDLAFNGIKTIYVKYGDFKLLEFLDLSFNSLTVEAICDLGILPHLRVLLLTGNGLTSLPPNLAVAEQEASVTSLTSKRYILRFPALETLMLDDNRLSNPSCFASLAGLRRLKKLSLDENRIIRIPYLQQVQLYDESVDWNGGRGSPHKEPQFMLQSKPRMLEDSDEQLDYTVLPMKKDVDRTDRKRGCCPTSSSLPISLEFVFHNNPLVAHTRGVPPLLKSFLQERLGIHLIRRKIVKPKHHVLMSRKESWKVKSEIPKVPKQPLVLHHPRMTTTKSPSKDMLEPEAELAEDLPTTKSTSVESEMPTENLEGHSPSCRTFVPLPPICSNSTVHSEETLSHLSDTTVRLSPERPSDEDSKSTESIFLTQVSELPSSVIHKDDLELKEKDQKKPPTAPREVKGTRRKLPTAFLPSKYHGYEELLTAKPDPAFIEPKGIQKNAQALQQMLKHPLLCHSSKPKLDTLQKPYVHKEKRAQRIPIPPPKKTRAQLLDDIFIRLRDPRNITEAPLGAVLHQWTERRLVNHKQYLEAKRLLKEFQARYRQLVSGSLRTVFGTTPLPMACPALSESQPKFGHFLEFMDEFCQEPTASDSQG

SEQ ID NO: 891066 - protein, 348 aa, Homo sapiens [sequence omitted]

SEQ ID NO: 891067 - protein, 382 aa, Homo sapiens
MAPGVPPLLKSFLQERLGIHLIRRKIVKPKHHVLMSRKESWKVKSEIPKVPKQPLVLHHPRMTTTKSPSKDMLEPEAELAEDLPTTKSTSVESEMPTENLEGHSPSCRTFVPLPPICSNSTVHSEETLSHLSDTTVRLSPERPSDEDSKSTESIFLTQVSELPSSVIHKDDLELKEKDQKKPPTAPREVKGTRRKLPTAFLPSKYHGYEELLTAKPDPAFIEPKGIQKNAQALQQMLKHPLLCHSSKPKLDTLQKPYVHKEKRAQRIPIPPPKKTRAQLLDDIFIRLRDPRNITEAPLGAVLHQWTERRLVNHKQYLEAKRLLKEFQARYRQLVSGSLRTVFGTTPLPMACPALSESQPKFGHFLEFMDEFCQEPTASDSQG

SEQ ID NO: 891068 - protein, 779 aa, Homo sapiens; identical to SEQ ID NO: 891064

SEQ ID NO: 891069 - protein, 779 aa, Homo sapiens; identical to SEQ ID NO: 891064

SEQ ID NO: 891070 - protein, 779 aa, Homo sapiens; identical to SEQ ID NO: 891064

SEQ ID NO: 891071 - protein, 386 aa, Homo sapiens
SVSRPGRRLPPTLSAVASQLLRRGEDSGRHRSGAAPRSPGGSQARIPPDWDVASADPSEAEATPEAGQGHWLVVQKGNLKKKPKGLVGAQAERRESLKATSFEFKGKKESRRENQVDLPGHILDQAFLLKHHCVRKPSDLCTINVSGLKFSKAKENDFKHFHSVIYINASENLLPLEAFHTFPALKELDLAFNGIKTIYVKYGDFKLLEFLDLSFNSLTVEAICDLGILPHLRVLLLTGNGLTSLPPNLAVAEQEASVTSLTSKRYILRFPALETLMLDDNRLSNPSCFASLAGLRRLKKLSLDENRIIRIPYLQQVQLYDESVDWNGGRGSPHKEPQFMLQSKPRMLEDSDEQLDYTVLPMKKDVDRTDRKRGCCPTSSSLPISL

SEQ ID NO: 891072 - protein, 182 aa, Homo sapiens
GTVTFEDVAVNFSQEEWSLLSEAQRCLYHDVMLENLTLISSLGCWYGAKDETPSKQTLSIQQESPLRTHWTGVCTKKVHLWGMCGPLLGDILHQGTQHNQKLNGFGAYEKKLDDDANHHQDQKQHIGEKSYRSNAKGTSFVKNCKFHMSHEPFIFHEVGKDFLSSLRLLQQEDIHTSGKSKL

SEQ ID NO: 891073 - protein, 131 aa, Homo sapiens
GTVTFEDVAVNFSQEEWSLLSEAQRCLYHDVMLENLTLISSLGCWYGAKDETPSKQTLSIQQESPLRTHWTGGNDVTLKLRLEYTGMVIPHCGLKLLGSSDPPASASRVPEISPGNLRIFYRDRVLLFYPD

SEQ ID NO: 891074 - protein, 370 aa, Homo sapiens
MAAERQEALREFVAVTGAEEDRARFFLESAGWDLQIALASFYEDGGDEDIVTISQATPSSVSRGTAPSDNRVTSFRDLIHDQDEDEEEEEGQRFYAGGSERSGQQIVGPPRKKSPNELVDDLFKGAKEHGAVAVERVTKSPGETSKPRPFAGGGYRLGAAPEEESAYVAGEKRQHSSQDVHVVLKLWKSGFSLDNGELRSYQDPSNAQFLESIRRGEVPAELRRLAHGGQVNLDMEDHRDEDFVKPKGAFKAFTGEGQKLGSTAPQVLSTSSPAQQAENEAKASSSILIDESEPTTNIQIRLADGGRLVQKFNHSHRISDIRLFIVDARPAMAATSFILMTTFPNKELADESQTLKEANLLNAVIVQRLT

SEQ ID NO: 891075 - protein, 75 aa, Homo sapiens
MEDHRDEDFVKPKGAFKAFTGEGQKLGSTAPQVLSTSSPAQQAENEAKASSSILIDESEPTTEQCVHLLSGTELI

SEQ ID NO: 891076 - protein, 370 aa, Homo sapiens; identical to SEQ ID NO: 891074

SEQ ID NO: 891077 - protein, 370 aa, Homo sapiens; identical to SEQ ID NO: 891074

SEQ ID NO: 891078 - protein, 423 aa, Homo sapiens
MAAERQEALREFVAVTGAEEDRARFFLESAGWDLQIALASFYEDGGDEDIVTISQATPSSVSRGTAPSDNRVTSFRDLIHDQDEDEEEEEGQRGHSVCHMNGKVEVRLGGAPGAVSHHLTCVHYSVLVLLHTSADLNLSGSDLRSRFYAGGSERSGQQIVGPPRKKSPNELVDDLFKGAKEHGAVAVERVTKSPGETSKPRPFAGGGYRLGAAPEEESAYVAGEKRQHSSQDVHVVLKLWKSGFSLDNGELRSYQDPSNAQFLESIRRGEVPAELRRLAHGGQVNLDMEDHRDEDFVKPKGAFKAFTGEGQKLGSTAPQVLSTSSPAQQAENEAKASSSILIDESEPTTNIQIRLADGGRLVQKFNHSHRISDIRLFIVDARPAMAATSFILMTTFPNKELADESQTLKEANLLNAVIVQRLT

SEQ ID NO: 891079 - protein, 256 aa, Homo sapiens
MKMRRKRKARGAKEHGAVAVERVTKSPGETSKPRPFAGGGYRLGAAPEEESAYVAGEKRQHSSQDVHVVLKLWKSGFSLDNGELRSYQDPSNAQFLESIRRGEVPAELRRLAHGGQVNLDMEDHRDEDFVKPKGAFKAFTGEGQKLGSTAPQVLSTSSPAQQAENEAKASSSILIDESEPTTNIQIRLADGGRLVQKFNHSHRISDIRLFIVDARPAMAATSFILMTTFPNKELADESQTLKEANLLNAVIVQRLT

SEQ ID NO: 891080 - protein, 411 aa, Homo sapiens
MAAERQEALREFVAVTGAEEDRARFFLESAGWDLQIALASFYEDGGDEDIVTISQATPSSVSRGTAPSDNRVTSFRDLIHDQDEDEEEEEGQRFYAGGSERSGQQIVGPPRKKSPNELVDDLFKGAKEHGAVAVERVTKSPGETSKPRPFAGGGYRLGAAPEEESAYVAGEKRQHSSQDVHVVLKLWKSGFSLDNGELRSYQDPSNAQFLESIRRGEVPAELRRLAHGGQVNLDMEDHRDEDFVKPKGAFKAFTGEGQKLGSTAPQVLSTSSPAQQAENEAKASSSILIDESEPTTNIQIRLADGGRLVDDLFKGAKEHGAVAVERVTKSPGETSKPAQCCHRAAVNITAQPAAWPPSCVSHGQWPCPMGIAPPAPLCTPSSPVQRLLHSSGFLDLGWTFVFSLVAFPGFL

SEQ ID NO: 891081 - protein, 278 aa, Homo sapiens
MFYAGGSERSGQQIVGPPRKKSPNELVDDLFKGAKEHGAVAVERVTKSPGETSKPRPFAGGGYRLGAAPEEESAYVAGEKRQHSSQDVHVVLKLWKSGFSLDNGELRSYQDPSNAQFLESIRRGEVPAELRRLAHGGQVNLDMEDHRDEDFVKPKGAFKAFTGEGQKLGSTAPQVLSTSSPAQQAENEAKASSSILIDESEPTTNIQIRLADGGRLVQKFNHSHRISDIRLFIVDARPAMAATSFILMTTFPNKELADESQTLKEANLLNAVIVQRLT

SEQ ID NO: 891082 - protein, 278 aa, Homo sapiens
MAAERQEALREFVAVTGAEEDRARFFLESAGWDLQIALASFYEDGGDEDIVTISQATPSSVSRGTAPSDNRVTSFRDLIHDQDEDEEEEEGQRFYAGGSERSGQQIVGPPRKKSPNELVDDLFKGAKEHGAVAVERVTKSPGETSKPRPFAGGGYRLGAAPEEESAYVAGEKRQHSSQDVHVVLKLWKSGFSLDNGELRSYQDPSNAQFLESIRRGEVPAELRRLAHGGQVNLDMEDHRDEDFVKPKGAFKAFTGEGQKLGSTAPQVLSTSSPAQQAE

SEQ ID NO: 891083 - protein, 274 aa, Homo sapiens
MAAERQEALREFVAVTGAEEDRARFFLESAGWDLQIALASFYEDGGDEDIVTISQATPSSVSRGTAPSDNRVTSFRDLIHDQDEDEEEEEGQRFYAGGSERSGQQIVGPPRKKSPNELVDDLFKGAKEHGAVAVERVTKSPGETSKPRPFAGGGYRLGAAPEEESAYVAGEKRQHSSQDVHVVLKLWKSGFSLDNGELRSYQDPSNAQFLESIRRGEVPAELRRLAHGGQVNLDMEDHRDEDFVKPKGAFKAFTGEGQKLGSVHTQQSSATSPP

SEQ ID NO: 891084 - protein, 137 aa, Homo sapiens
MLSNSPRRDSLLARGLVSACVLMPSSLLSTAPQVLSTSSPAQQAENEAKASSSILIDESEPTTNIQIRLADGGRLVQKFNHSHRISDIRLFIVDARPAMAATSFILMTTFPNKELADESQTLKEANLLNAVIVQRLT

SEQ ID NO: 891085 - protein, 164 aa, Homo sapiens
MKMRRKRKARGAKEHGAVAVERVTKSPGETSKPRPFAGGGYRLGAAPEEESAYVAGEKRQHSSQDVHVVLKLWKSGFSLDNGELRSYQDPSNAQFLESIRRGEVPAELRRLAHGGQVNLDMEDHRDEDFVKPKGAFKAFTGEGQKLGSTAPQVLSTSSPAQQAE

SEQ ID NO: 891086 - protein, 175 aa, Homo sapiens
MAAERQEALREFVAVTGAEEDRARFFLESAGWDLQIALASFYEDGGDEDIVTISQATPSSVSRGTAPSDNRVTSFRDLIHDQDEDEEEEEGQRFYAGGSERSGQQIVGPPRKKSPNELVDDLFKGAKEHGAVAVERVTKSLCTPSSPVQRLLHSSGFLDLGWTFVFSLVAFPGFL

SEQ ID NO: 891087 - protein, 339 aa, Homo sapiens
MAAERQEALREFVAVTGAEEDRARFFLESAGWDLQIALASFYEDGGDEDIVTISQATPSSVSRGTAPSDNRVTSFRDLIHDQDEDEEEEEGQRFYAGGSERSGQQIVGPPRKKSPNELVDDLFKGAKEHGAVAVERVTKSPGETSKPRVHVVLKLWKSGFSLDNGELRSYQDPSNAQFLESIRRGEVPAELRRLAHGGQVNLDMEDHRDEDFVKPKGAFKAFTGEGQKLGSTAPQVLSTSSPAQQAENEAKASSSILIDESEPTTNIQIRLADGGRLVQKFNHSHRISDIRLFIVDARPAMAATSFILMTTFPNKELADESQTLKEANLLNAVIVQRLT

SEQ ID NO: 891088 - protein, 120 aa, Homo sapiens
MAAERQEALREFVAVTGAEEDRARFFLESAGWDLQIALASFYEDGGDEDIVTISQQENGVNPGGGACSESRLRHCTPAWATEQDSVSKKKKKKWKVGKLFYFGHRGVNWGGFKGTFFQGA

SEQ ID NO: 891089 - protein, 370 aa, Homo sapiens; identical to SEQ ID NO: 891074

SEQ ID NO: 891090 - protein, 256 aa, Homo sapiens; identical to SEQ ID NO: 891079

SEQ ID NO: 891091 - protein, 352 aa, Homo sapiens
MAAERQEALREFVAVTGAEEDRARFFLESAGWDLQIALASFYEDGGDEDIVTISQATPSSVSRGTAPSDNRVTSFRDLIHDQDEDEEEEEGQRFYAGGSERSGQQIVGPPRKKSPNELVDDLFKGAKEHGAVAVERVTKSPGETSKPRPFAGGGYRLGAAPEEESAYVAGEKRQHSSQDVHVVLKLWKSGFSLDNGELRSYQDPSNAQFLESIRRGEVPAELRRLAHGGQVNLDMEDHRDEDFVKPKGAFKAFTGEGQKLGSTAPQVLSTSSPAQQAENIQIRLADGGRLVQKFNHSHRISDIRLFIVDARPAMAATSFILMTTFPNKELADESQTLKEANLLNAVIVQRLT

SEQ ID NO: 891092 - protein, 274 aa, Homo sapiens
MAAERQEALREFVAVTGAEEDRARFFLESAGWDLQIALASFYEDGGDEDIVTISQATPSSVSRGTAPSDNRVTSFRDLIHDQDEDEEEEEGQRFYAGGSERSGQQIVGPPRKKSPNELVDDLFKGAKEHGAVAVERVTKSPGETSKPRPFAGGGYRLGAAPEEESAYVAGEKRQHSSQDVHVVLKLWKSGFSLDNGELRSYQDPSNAQFLESIRRGEVPAELRRLAHGGQVNLDMEDHRDEDFVKPKGAFKAFTGEGQKLGRLSCFPPFKPLFS

SEQ ID NO: 891093 - protein, 361 aa, Homo sapiens
MAAERQEALREFVAVTGAEEDRARFFLESAGWDLQIALASFYEDGGDEDIVTISQATPSSVSRGTAPSDNRVTSFRDLIHDQDEDEEEEEGQRFYAGGSERSGQQIVGPPRKKSPNELVDDLFKGAKEHGAVAVERVTKSPGETSKPRPFAGGGYRLGAAPEEESAYVAGEKRQHSSQDSGFSLDNGELRSYQDPSNAQFLESIRRGEVPAELRRLAHGGQVNLDMEDHRDEDFVKPKGAFKAFTGEGQKLGSTAPQVLSTSSPAQQAENEAKASSSILIDESEPTTNIQIRLADGGRLVQKFNHSHRISDIRLFIVDARPAMAATSFILMTTFPNKELADESQTLKEANLLNAVIVQRLT

SEQ ID NO: 891094 - protein, 103 aa, Homo sapiens
MQDNWQVPGTARRARRLEQRKLADPLMRGRNWPISHGSCRQAMRLSFMRGEITRHGRVVSGGLACSRSEFLPLECKKHGSRDFVLLPAISTALEKRRAIDSSQ

SEQ ID NO: 891095 - protein, 106 aa, Homo sapiens
MARFYAGGSERSGQQIVGPPRKKSPNELVDDLFKGAKEHGAVAVERVTKSPGETSKPRPFAGGGYRLGAAPEEESAYVAGEKRQHSSQDCAHPAVQCNVSSIALGS

SEQ ID NO: 891096 - protein, 137 aa, Homo sapiens
MAAERQEALREFVAVTGAEEDRARFFLESAGWDLQIALASFYEDGGDEDIVTISHQSSLKWEVRATCTQCLQKVKINISLCSFYSTPGVSNLARSWPVEILFHLPAWPFPPLPSRLLASWGFSGAPLWLDLLHVQKS

SEQ ID NO: 891097 - protein, 222 aa, Homo sapiens
MPPRLPPMPAVLGKLPRTLGERPENLRRKPPGLLATCSVSLPAPLPSGIRKRAGPCAPSPLPRAANNTPPWGASFLLWKLRHWTEGTGLRGADRGPVLLGALRTRGRRGHGQEPQPRVLAFLLRRSPPKSTQRLEQPFLPFPRPPEAPTQFSVTSSGRKASRCPPELLWAQGWLRDHLMDVLGSMGSQGSIPSCSPTPPQLPGGWAHEGSGDTSIGKGPGTL

SEQ ID NO: 891098 - protein, 242 aa, Homo sapiens
MPPRLPPMPAVLGKLPRTLGERPENLRRKPPGLLATCSVSLPAPLPSGIRKRAGPCAPSPLPRAANNTPPWGASFLLWKLRHWTEGTGLRGADRGPVLLGALRTRGRRGHGQEPQPRVLAFLLRRSPPKSTQRLEQPSTQPEEGRAPPPALGGGVWPFLPFPRPPEAPTQFSVTSSGRKASRCPPELLWAQGWLRDHLMDVLGSMGSQGSIPSCSPTPPQLPGGWAHEGSGDTSIGKGPGTL

SEQ ID NO: 891099 - protein, 242 aa, Homo sapiens; identical to SEQ ID NO: 891098

SEQ ID NO: 891100 - protein, 310 aa, Homo sapiens
RGISSWDRPPGLRCDRRREVPWEPGGRRAELCGQTRGPCPPPVSPAVPVGAMKLNERSVAHYALSDSPADHMGFLRTWGGPGTPPTPSGTGRRCWFVLKGNLLFSFESREGRAPLSLVVLEGCTVELAEAPVPEEFAFAICFDAPGVRPHLLAAEGPAAQEAWVKVLSRASFGYMRLVVRELESQLQDARQSLALQRRSSWKSVASRCKPQAPNHRAAGLENGHCLSKDSSPVGLVEEAGSRSAGWGLAEWELQGPASLLLGKGQSPVSPETSCFSTLHDWYGQEIVELRQCWQKRAQGSHSKCEEQDRP

SEQ ID NO: 891101 - protein, 251 aa, Homo sapiens
LDWIGLDWIGLVDWIGLDWIGLDWWIGLDWIGLDWIGGLDWIGLDWIGLVDWIGLDWIGLDWWIGLDWIGLDWIGGLDWIGLDWIGLVDWIGLDWIGLDWWIGLDWIGLDWIGGLDWIGLDWIGLVDWIGLDWIGLDWWIGLDWIGLDWIGGLDWIGLDWIGLVDWIGLDWIGLDWWIGLDWIGLDWIGGLDWIGLDWIGLVDWIGLDWIGLDWWIGLDWIGLDWIGGLDWIGLDGIAFPVLKFSLLAGLR

SEQ ID NO: 891102 - protein, 1035 aa, Homo sapiens
RHRCRLAGNSWVASSLCQESPPHPHIAGLGWDVVAAKSSEATPAWDGLPQDGPENPERRLGPLGHLPPPADPAFQHHRGSRRRKRKGVWPAKAAERGGGARKSRMAARDSDSEEDLVSYGTGLEPLEEGERPKKPIPLQDQTVRDEKGRYKRFHGAFSGGFSAGYFNTVGSKEGWTPSTFVSSRQNRADKSVLGPEDFMDEEDLSEFGIAPKAIVTTDDFASKTKDRIREKARQLAAATAPIPGATLLDDLITPAKLSVGFELLRKMGWKEGQGVGPRVKRRPRRQKPDPGVKIYGCALPPGSSEGSEGEDDDYLPDNVTFAPKDVTPVDFTPKDNVHGLAYKGLDPHQALFGTSGEHFNLFSGGSERAGDLGEIGLNKGRKLGISGQAFGVGALEEEDDDIYATETLSKYDTVLKDEEPGDGLYGWTAPRQYKNQKESEKDLRYVGKILDGFSLASKPLSSKKIYPPPELPRDYRPVHYFRPMVAATSENSHLLQVLSESAGKATPDPGTHSKHQLNASKRAELLGETPIQGSATSVLEFLSQKDKERIKEMKQATDLKAAQLKARSLAQNAQSSRAQLSPAAAAGHCSWNMALGGGTATLKASNFKPFAKDPEKQKRYDEFLVHMKQGQKDALERCLDPSMTEWERGRERDEFARAALLYASSHSTLSSRFTHAKEEDDSDQVEVPRDQENDVGDKQSAVKMKMFGKLTRDTFEWHPDKLLCKRFNVPDPYPDSTLVGLPRVKRDKYSVFNFLTLPETASLPTTQASSEKVSQHRGPDKSRKPSRWDTSKHEKKEDSISEFLSLARSKAEPPKQQSSPLVNKEEEHAPELSANQTVNKDVDAQAEGEGSRPSMDLFRAIFASSSDEKSSSSEDEQGDSEDDQAGSGEANFQSSQDTDLGETSSVAHALVPAPQEPPPSFPIQKMQIDEREEFGPRLPPVFCPNARQTLEVPQKEKHKKNKDKHKAKKEHRRKKEKKKKHRKHKHKGKQKNKKPEKSSSSESSDSSDSQSDEETADVSPQELLRRLKSLPLRRQ

SEQ ID NO: 891103 - protein, 949 aa, Homo sapiens
RHRCRLAGNSWVASSLCQESPPHPHIAGLGWDVVAAKSSEATPAWDGLPQDGPENPERRLGPLGHLPPPADPAFQHHRGSRRRKRKGVWPAKAAERGGGARKSRMAARDSDSEEDLVSYGTGLEPLEEGERPKKPIPLQDQTVRDEKGRYKRFHGAFSGGFSAGYFNTVGSKEGWTPSTFVSSRQNRADKSVLGPEDFMDEEDPGVKIYGCALPPGSSEGSEGEDDDYLPDNVTFAPKDVTPVDFTPKDNVHGLAYKGLDPHQALFGTSGEHFNLFSGGSERAGDLGEIGLNKGRKLGISGQAFGVGALEEEDDDIYATETLSKYDTVLKDEEPGDGLYGWTAPRQYKNQKESEKDLRYVGKILDGFSLASKPLSSKKIYPPPELPRDYRPVHYFRPMVAATSENSHLLQVLSESAGKATPDPGTHSKHQLNASKRAELLGETPIQGSATSVLEFLSQKDKERIKEMKQATDLKAAQLKARSLAQNAQSSRAQLSPAAAAGHCSWNMALGGGTATLKASNFKPFAKDPEKQKRYDEFLVHMKQGQKDALERCLDPSMTEWERGRERDEFARAALLYASSHSTLSSRFTHAKEEDDSDQVEVPRDQENDVGDKQSAVKMKMFGKLTRDTFEWHPDKLLCKRFNVPDPYPDSTLVGLPRVKRDKYSVFNFLTLPETASLPTTQASSEKVSQHRGPDKSRKPSRWDTSKHEKKEDSISEFLSLARSKAEPPKQQSSPLVNKEEEHAPELSANQTVNKDVDAQAEGEGSRPSMDLFRAIFASSSDEKSSSSEDEQGDSEDDQAGSGEANFQSSQDTDLGETSSVAHALVPAPQEPPPSFPIQKMQIDEREEFGPRLPPVFCPNARQTLEVPQKEKHKKNKDKHKAKKEHRRKKEKKKKHRKHKHKGKQKNKKPEKSSSSESSDSSDSQSDEETADVSPQELLRRLKSLPLRRQ

SEQ ID NO: 891104 - protein, 735 aa, Homo sapiens
RHRCRLAGNSWVASSLCQESPPHPHIAGLGWDVVAAKSSEATPAWDGLPQDGPENPERRLGPLGHLPPPADPAFQHHRGSRRRKRKGVWPAKAAERGGGARKSRMAARDSDSEEDLVSYGTGLEPLEEGERPKKPIPLQDQTVRDEKGRYKRFHGAFSGGFSAGYFNTVGSKEGWTPSTFVSSRQNRADKSVLGPEDFMDEEDLSEFGIAPKAIVTTDDFASKTKDRIREKARQLAAATAPIPGATLLDDLITPAKLSVGFELLRKMGWKEGQGVGPRVKRRPRRQKPDPGVKIYGCALPPGSSEGSEGEDDDYLPDNVTFAPKDVTPVDFTPKDNVHGLAYKGLDPHQALFGTSGEHFNLFSGGSERAGDLGEIGLNKGRKLGISGQAFGVGALEEEDDDIYATETLSKYDTVLKDEEPGDGLYGWTAPRQYKNQKESEKDLRYVGKILDGFSLASKPLSSKKIYPPPELPRDYRPVHYFRPMVAATSENSHLLQVLSESAGKATPDPGTHSKHQLNASKRAELLGETPIQGSATSVLEFLSQKDKERIKEMKQATDLKAAQLKARSLAQNAQSSRAQLSPAAAAGHCSWNMALGGGTATLKASNFKPFAKDPEKQKRYDEFLVHMKQGQKDALERCLDPSMTEWERGRERDEFARAALLYASSHSTLSSRFTHAKEEDDSDQVEVPRDQENDVGDKQSAVKMKMFGKLTRDTFEWHPDKLLCKRFNVPDPYPE

SEQ ID NO: 891105 - protein, 308 aa, Homo sapiens
MILFSIPSSTLVGLPRVKRDKYSVFNFLTLPETASLPTTQASSEKVSQHRGPDKSRKPSRWDTSKHEKKEDSISEFLSLARSKAEPPKQQSSPLVNKEEEHAPELSANQTVNKDVDAQAEGEGSRPSMDLFRAIFASSSDEKSSSSEDEQGDSEDDQAGSGEANFQSSQDTDLGETSSVAHALVPAPQEPPPSFPIQKMQIDEREEFGPRLPPVFCPNARQTLEVPQKEKHKKNKDKHKAKKEHRRKKEKKKKHRKHKHKGKQKNKKPEKSSSSESSDSSDSQSDEETADVSPQELLRRLKSLPLRRQ

SEQ ID NO: 891106 - protein, 1995 aa, Homo sapiens
MGLGKTIQSITFLYEILLTGIRGPFLIIAPLSTIANWEREFRTWTDINVVVYHGSLISRQMIQQYEMYFRDSQGRIIRGAYRFQAIITTFEMILGGCGELNAIEWRCVIIDEAHRLKNKNCKLLEGLKLMNLEHKVLLTGTPLQNTVEELFSLLHFLEPLRFPSESTFMQEFGDLKTEEQVQKLQAILKPMMLRRLKEDVEKKLAPKEETIIEVELTNIQKKYYRAILEKNFSFLSKGAGQTNVPNLVNTMMELRKCCNHPYLIKGAEEKILGEFRDTYNPAASDFHLQAMIQSAGKLVLIDKLLPKMKAGGHKVLIFSQMVRCLDILEDYLIHKRYLYERIDGRVRGNLRQAAIDRFSKPDSDRFVFLLCTRAGGLGINLTAADTCIIFDSDWNPQNDLQAQARCHRIGQNKAVKVYRLVTRNSYEREMFDRASLKLGLDKAVLQSMSGRESNVGGIQQLSKKEIEDLLRRGAYGAIMEEEDEGSKFCEEDIDQILLRRTKTITIESEGRGSTFAKASFVASGNRTDISLDDPNFWQKWAKKAEIDIEAISGRNSLVIDTPRIRKQTRPFSATKDELAELSEAESEGDEKPKLRRPCDRSNGYGRTECFRVEKNLLVYGWGRWREILSHGRFKRQLNEHDVEIICRALLAYCLVHYRGDEKIKGFIWDLITPTEDGQTRELQNHLGLSAPVPRGRKGKKVKTQTSSFDIQKAEWLRKYNPEQLLQDEGYKKHIKHHCNKVLLRVRMLYYLKQEVIGNECQKVFDGVDASDIDVWVPEPDHSEVPAEWWDFDADKSLLIGVFKHGYEKYNTIRADPALCFLERVGKPDEKAVAAEQRANDYMDGDVEDPEYKPAPAIFKDDIEDDVSSPGDLVIADGDGQLMEGDKVYWPTQSALTTRLRRLITAYQRTNKNRQIQQIQPTFSVPTSVMQPIYEEATLNPKMAAKIERQQRWTRREEADFYRVVSTFGVVFDPDRGQFDWTKFRAMARLHKKTDDSLEKYLYAFMSMCRRVCRLPSKEELVDPNIFIQPITEERASRTLYRIELLRKVREQALRHPQLFERLKLCHPNPDLPVWWECGPHDRDLLIGAAKHGVSRTDYHILRDPELSFMAAQRNYSQSKMAHSRTSTPLLQQYQVALSASPLTSLPRLLDAKGIILEEMKVKSENLKEEPQSSEEESMSSVETRTLIKSEPVSPKNGVLPQATGDQKSGGKCETDRRMVAARTEPLTPNPASKKPRVHKRGSESSSDSDSDSERSSCSSRSSSSSSSSSCSHSRSGSSSSSSSSCSSASSSSSSSTSSSSSSSSSSSEESDSDEEEAQKRESTTHMKAYDEESVASLSTTQDETQDSFQMNNGTPESAYILQGGYMLAASYWPKDRVMINRLDSICQTVLKGKWPSARRSYDANTVASFYTTKLLDSPGAATEYSEPSVPTPPGAGVKEEHDQSTQMSKEGGLKLTFQKQGLAQKRPFDGEDGALGQQQYLTRLRELQSASETSLVNFPKSIPVSGTSIQPTLGANGVILDNQPIVKKRRGRRKNVEGVDIFFFNRNKPPNHVSLGLTSSQISTGINPALSYTQPQGIPDTESPVPVINLKDGTRLAGDDAPKRKDLEKWLKEHPGYVEDLGAFIPRMQLHEGRPKQKRHRCRNPNKLDVNSLTGEERVQLINRRNARKVGGAFAPPLKDLCRFLKENSEYGVAPEWGDVVKQSGFLPESMYERILTGPVVREEVSRRGRRPKSGIAKATAAAAAASATSVSGNPLLANGLLPGVDLTTLQALQQNLQNLQSLQVTAGLMGMPTGLPSGGEAKNMAAMFPMLLSGMAGLPNLLGMGGLLTKPTESGTEDKKGSDSKESEGKTERTESQSSENGGENSVSSSPSTSSTAALNTAAAANPLALNPLLLSNILYPGMLLTPGLNLHIPTLSQSNTFDVQNKNSDLGSSKSVEVKEEDSRIKDQEDKGGTEPSPLNENSTDEGSEKADASSGSDSTSSSSEDSDSSNED

SEQ ID NO: 891107 - protein, 1533 aa, Homo sapiens
MGLGKTIQSITFLYEILLTGIRGPFLIIAPLSTIANWEREFRTWTDINVVVYHGSLISRQMIQQYEMYFRDSQGRIIRGAYRFQAIITTFEMILGGCGELNAIEWRCVIIDEAHRLKNKNCKLLEGLKLMNLEHKVLLTGTPLQNTVEELFSLLHFLEPLRFPSESTFMQEFGDLKTEEQVQKLQAILKPMMLRRLKEDVEKKLAPKEETIIEVELTNIQKKYYRAILEKNFSFLSKGAGQTNVPNLVNTMMELRKCCNHPYLIKGAEEKILGEFRDTYNPAASDFHLQAMIQSAGKLVLIDKLLPKMKAGGHKVLIFSQMVRCLDILEDYLIHKRYLYERIDGRVRGNLRQAAIDRFSKPDSDRFVFLLCTRAGGLGINLTAADTCIIFDSDWNPQNDLQAQARCHRIGQNKAVKVYRLVTRNSYEREMFDRASLKLGLDKAVLQSMSGRESNVGGIQQLSKKEIEDLLRRGAYGAIMEEEDEGSKFCEEDIDQILLRRTKTITIESEGRGSTFAKASFVASGNRTDISLDDPNFWQKWAKKAEIDIEAISGRNSLVIDTPRIRKQTRPFSATKDELAELSEAESEGDEKPKLRRPCDRSNGYGRTECFRVEKNLLVYGWGRWREILSHGRFKRQLNEHDVEIICRALLAYCLVHYRGDEKIKGFIWDLITPTEDGQTRELQNHLGLSAPVPRGRKGKKVKTQTSSFDIQKAEWLRKYNPEQLLQDEGYKKHIKHHCNKVLLRVRMLYYLKQEVIGNECQKVFDGVDASDIDVWVPEPDHSEVPAEWWDFDADKSLLIGVFKHGYEKYNTIRADPALCFLERVGKPDEKAVAAEQRANDYMDGDVEDPEYKPAPAIFKDDIEDDVSSPGDLVIADGDGQLMEGDKVYWPTQSALTTRLRRLITAYQRTNKNRQIQQIQPTFSVPTSVMQPIYEEATLNPKMAAKIERQQRWTRREEADFYRVVSTFGVVFDPDRGQFDWTKFRAMARLHKKTDDSLEKYLYAFMSMCRRVCRLPSKEELVDPNIFIQPITEERASRTLYRIELLRKVREQALRHPQLFERLKLCHPNPDLPVWWECGPHDRDLLIGAAKHGVSRTDYHILRDPELSFMAAQRNYSQSKMAHSRTSTPLLQQYQVALSASPLTSLPRLLDAKGIILEEMKVKSENLKEEPQSSEEESMSSVETRTLIKSEPVSPKNGVLPQATGDQKSGGKCETDRRMVAARTEPLTPNPASKKPRVHKRGSESSSDSDSDSERSSCSSRSSSSSSSSSCSHSRSGSSSSSSSSCSSASSSSSSSTSSSSSSSSSSSEESDSDEEEAQKRESTTHMKAYDEESVASLSTTQDETQDSFQMNNGTPESAYILQGGYMLAASYWPKDRVMINRLDSICQTVLKGKWPSARRSYDANTVASFYTTKLLDSPGAATEYSEPSVPTPPGAGVKEEHDQSTQMSKVKKHVREKEFTVKIKDEGGLKLTFQKQGLAQKRPFDGEDGALGQQQYLTRLRELQSASSSSSSSTSSSSSSSSSSSEESDSDEE

SEQ ID NO: 891108 - protein, 407 aa, Homo sapiens
MGLGKTIQSITFLYEILLTGIRGPFLIIAPLSTIANWEREFRTWTDINVVVYHGSLISRQMIQQYEMYFRDSQGRIIRGAYRFQAIITTFEMILGGCGELNAIEWRCVIIDEAHRLKNKNCKLLEGLKLMNLEHKVLLTGTPLQNTVEELFSLLHFLEPLRFPSESTFMQEFGDLKTEEQVQKLQAILKPMMLRRLKEDVEKKLAPKEETIIEVELTNIQKKYYRAILEKNFSFLSKGAGQTNVPNLVNTMMELRKCCNHPYLIKGAEEKILGEFRDTYNPAASDFHLQAMIQSAGKLVLIDKLLPKMKAGGHKVLIFSQMVRCLDILEDYLIHKRYLYERIDGRVRGNLRQAAIDRFSKPDSDRFVFLLCTRAGGLGINLTAADTCIIFDSDWNPQNDLQVNNFLG

SEQ ID NO: 891109 - protein, 473 aa, Homo sapiens
MGLGKTIQSITFLYEILLTGIRGPFLIIAPLSTIANWEREFRTWTDINVVVYHGSLISRQMIQQYEMYFRDSQGRIIRGAYRFQAIITTFEMILGGCGELNAIEWRCVIIDEAHRLKNKNCKLLEGLKLMNLEHKVLLTGTPLQNTVEELFSLLHFLEPLRFPSESTFMQEFGDLKTEEQVQKLQAILKPMMLRRLKEDVEKKLAPKEETIIEVELTNIQKKYYRAILEKNFSFLSKGAGQTNVPNLVNTMMELRKCCNHPYLIKGAEEKILGEFRDTYNPAASDFHLQAMIQSAGKLVLIDKLLPKMKAGGHKVLIFSQMVRCLDILEDYLIHKRYLYERIDGRVRGNLRQAAIDRFSKPDSDRFVFLLCTRAGGLGINLTAADTCIIFDSDWNPQNDLQAQARCHRIGQNKAVKVYRLVTRNSYEREMFDRASLKLGLDKAVLQSMSGRESNVGGVCIVSFSLEIFVCFCI

SEQ ID NO: 891110 - protein, 336 aa, Homo sapiens
MGLGKTIQSITFLYEILLTGIRGPFLIIAPLSTIANWEREFRTWTDINVVVYHGSLISRQMIQQYEMYFRDSQGRIIRGAYRFQAIITTFEMILGGCGELNAIEWRCVIIDEAHRLKNKNCKLLEGLKLMNLEHKVLLTGTPLQNTVEELFSLLHFLEPLRFPSESTFMQEFGDLKTEEQVQKLQAILKPMMLRRLKEDVEKKLAPKEETIIEVELTNIQKKYYRAILEKNFSFLSKGAGQTNVPNLVNTMMELRKCCNHPYLIKGAEEKILGEFRDTYNPAASDFHLQAMIQSAGKLVLIDKLLPKMKAGGHKVLIFSQMVRCLDILEDYLIHKR

SEQ ID NO: 891111 - protein, 2011 aa, Homo sapiens
MGLGKTIQSITFLYEILLTGIRGPFLIIAPLSTIANWEREFRTWTDINVVVYHGSLISRQMIQQYEMYFRDSQGRIIRGAYRFQAIITTFEMILGGCGELNAIEWRCVIIDEAHRLKNKNCKLLEGLKLMNLEHKVLLTGTPLQNTVEELFSLLHFLEPLRFPSESTFMQEFGDLKTEEQVQKLQAILKPMMLRRLKEDVEKKLAPKEETIIEVELTNIQKKYYRAILEKNFSFLSKGAGQTNVPNLVNTMMELRKCCNHPYLIKGAEEKILGEFRDTYNPAASDFHLQAMIQSAGKLVLIDKLLPKMKAGGHKVLIFSQMVRCLDILEDYLIHKRYLYERIDGRVRGNLRQAAIDRFSKPDSDRFVFLLCTRAGGLGINLTAADTCIIFDSDWNPQNDLQAQARCHRIGQNKAVKVYRLVTRNSYEREMFDRASLKLGLDKAVLQSMSGRESNVGGIQQLSKKEIEDLLRRGAYGAIMEEEDEGSKFCEEDIDQILLRRTKTITIESEGRGSTFAKASFVASGNRTDISLDDPNFWQKWAKKAEIDIEAISGRNSLVIDTPRIRKQTRPFSATKDELAELSEAESEGDEKPKLRRPCDRSNGYGRTECFRVEKNLLVYGWGRWREILSHGRFKRQLNEHDVEIICRALLAYCLVHYRGDEKIKGFIWDLITPTEDGQTRELQNHLGLSAPVPRGRKGKKVKTQTSSFDIQKAEWLRKYNPEQLLQDEGYKKHIKHHCNKVLLRVRMLYYLKQEVIGNECQKVFDGVDASDIDVWVPEPDHSEVPAEWWDFDADKSLLIGVFKHGYEKYNTIRADPALCFLERVGKPDEKAVAAEQRANDYMDGDVEDPEYKPAPAIFKDDIEDDVSSPGDLVIADGDGQLMEGDKVYWPTQSALTTRLRRLITAYQRTNKNRQIQQIQPTFSVPTSVMQPIYEEATLNPKMAAKIERQQRWTRREEADFYRVVSTFGVVFDPDRGQFDWTKFRAMARLHKKTDDSLEKYLYAFMSMCRRVCRLPSKEELVDPNIFIQPITEERASRTLYRIELLRKVREQALRHPQLFERLKLCHPNPDLPVWWECGPHDRDLLIGAAKHGVSRTDYHILRDPELSFMAAQRNYSQSKMAHSRTSTPLLQQYQVALSASPLTSLPRLLDAKGIILEEMKVKSENLKEEPQSSEEESMSSVETRTLIKSEPVSPKNGVLPQATGDQKSGGKCETDRRMVAARTEPLTPNPASKKPRVHKRGSESSSDSDSDSERSSCSSRSSSSSSSSSCSHSRSGSSSSSSSSCSSASSSSSSSTSSSSSSSSSSSEESDSDEEEAQKRESTTHMKAYDEESVASLSTTQDETQDSFQMNNGTPESAYILQGGYMLAASYWPKDRVMINRLDSICQTVLKGKWPSARRSYDANTVASFYTTKLLDSPGAATEYSEPSVPTPPGAGVKEEHDQSTQMSKVKKHVREKEFTVKIKDEGGLKLTFQKQGLAQKRPFDGEDGALGQQQYLTRLRELQSASETSLVNFPKSIPVSGTSIQPTLGANGVILDNQPIVKKRRGRRKNVEGVDIFFFNRNKPPNHVSLGLTSSQISTGINPALSYTQPQGIPDTESPVPVINLKDGTRLAGDDAPKRKDLEKWLKEHPGYVEDLGAFIPRMQLHEGRPKQKRHRCRNPNKLDVNSLTGEERVQLINRRNARKVGGAFAPPLKDLCRFLKENSEYGVAPEWGDVVKQSGFLPESMYERILTGPVVREEVSRRGRRPKSGIAKATAAAAAASATSVSGNPLLANGLLPGVDLTTLQALQQNLQNLQSLQVTAGLMGMPTGLPSGGEAKNMAAMFPMLLSGMAGLPNLLGMGGLLTKPTESGTEDKKGSDSKESEGKTERTESQSSENGGENSVSSSPSTSSTAALNTAAAANPLALNPLLLSNILYPGMLLTPGLNLHIPTLSQSNTFDVQNKNSDLGSSKSVEVKEEDSRIKDQEDKGGTEPSPLNENSTDEGSEKADASSGSDSTSSSSEDSDSSNED

SEQ ID NO: 891112 - protein, 140 aa, Homo sapiens
RKPGFALRGAIGPREGRGGGRGYRRSSGRQPLVSWQRQARCGSGGAMSFCSFFGGEVFQNHFEPGVYVCAKCGYELFSSRSKYAHSSPWPAFTETIHADSVAKRPEHNRSEALKVSCGKCGNGLGHEFLNDGPKPGQSRF

SEQ ID NO: 891113 - protein, 141 aa, Homo sapiens
MPRHGAMRRIKEIIVKGDSPGLWHIYKRVYVCAKCGYELFSSRSKYAHSSPWPAFTETIHADSVAKRPEHNRSEALKLQGLRGVYSRPVASARELPPQAIGRAWPSGANVGNRTGFLYGLQDKGQPLMSAVSLGNRRVGRN

SEQ ID NO: 891114 - protein, 119 aa, Homo sapiens
LGKEHSLPSERGQRCLCLGWWIWELDPGKAGADDSTFASPSTTGVYVCAKCGYELFSSRSKYAHSSPWPAFTETIHADSVAKRPEHNRSEALKVSCGKCGNGLGHEFLNDGPKPGQSRF

SEQ ID NO: 891115 - protein, 89 aa, Homo sapiens
RGLWVTGFKMPKALITGVGMCGYELFSSRSKYAHSSPWPAFTETIHADSVAKRPEHNRSEALKVSCGKCGNGLGHEFLNDGPKPGQSRF

SEQ ID NO: 891116 - protein, 140 aa, Homo sapiens; identical to SEQ ID NO: 891112

SEQ ID NO: 891117 - protein, 145 aa, Homo sapiens
MNHQQMTVLFIHKKRKGLMFQSRGPWECPDVSTTAPCLPVSTPRVPTPRWNAQRNFCLPGSLGGQPTPTPDGHHTEATRWPFHLGVGTLGVETGRQGAVVETSGHSQGPGSEQDLFVSWKRDSFADGSCLLLGQAWAVQPHCRLT

SEQ ID NO: 891118 - protein, 116 aa, Homo sapiens
LGKEHSLPSERGQRCLCLGWWIWELDPGKAGADDSTFASPSTTGVYVCAKCGYELFSSRSKYAHSSPWPAFTETIHADSVAKRPEHNRSEALKAKKLLPPRVTRRAAHTHPRRPPH

SEQ ID NO: 891119 - protein, 140 aa, Homo sapiens; identical to SEQ ID NO: 891112

SEQ ID NO: 891120 - protein, 72 aa, Homo sapiens
DSVNRSRVNAGHRRRVCILRAAGEQLIATLGTHVKRQVHNRSEALKVSCGKCGNGLGHEFLNDGPKPGQSRF

SEQ ID NO: 891121 - protein, 522 aa, Homo sapiens
MDLEEAEEFKERCTQCAAVSWGLTDEGKYYCTSCHNVTERYQEVTNTDLIPNTQIKALNRGLKKKNNTEKGWDWYVCEGFQYILYQQAEALKNLGVGPELKNDVLHNFWKRYLQKSKQAYCKNPVYTTGRKPTVLEDNLSHSDWASEPELLSDVSCPPFLESGAESQSDIHTRKPFPVSKASQSETSVCSGSLDGVEYSQRKEKGIVKMTMPQTLAFCYLSLLWQREAITLSDLLRFVEEDHIPYINAFQHFPEQMKLYGRDRGIFGIESWPDYEDIYKKTIEVGTFLDLPRFPDITEDCYLHPNILCMKYLMEVNLPDEMHSLTCHVVKMTGMGEVDFLTFDPIAKMAKAVKYDVQAVAIIVVVLKLLFLLDDSFEWSLSNLAEKHNEKNKKDKPWFDFRKWYQIMKKAFDEKKQKWEEARAKYLWKSEKPLYYSFVDKPVAYKKREMVVNLQKQFSTLVESTATAGKKSPSSFQFNWTEEDTDRTCFHGHSLQGVLKEKGQSLLTKNSLYWLSTQKFCRW

SEQ ID NO: 891122 - protein, 106 aa, Homo sapiens
MDLEEAEEFKERCTQCAAVSWGLTDEGKYYCTSCHNVTERYQEVTNTDLIPNTQIKALNRGLKKKNNTEKGWDWYVCEGFQYILYQQAEALKNLGVGPELKERCFT

SEQ ID NO: 891123 - protein, 110 aa, Homo sapiens
MAHALMEEFKERCTQCAAVSWGLTDEGKYYCTSCHNVTERYQEVTNTDLIPNTQIKALNRGLKKKNNTEKGWDWYVCEGFQYILYQQAEALKNLGVGPELKGMSCVLFTI

SEQ ID NO: 891124 - protein, 588 aa, Homo sapiens
MDLEEAEEFKERCTQCAAVSWGLTDEGKYYCTSCHNVTERYQEVTNTDLIPNTQIKALNRGLKKKNNTEKGWDWYVCEGFQYILYQQAEALKNLGVGPELKNDVLHNFWKRYLQKSKQAYCKNPVYTTGRKPTVLEDNLSHSDWASEPELLSDVSCPPFLESGAESQSDIHTRKPFPVSKASQSETSVCSGSLDGVEYSQRKEKGIVKMTMPQTLAFCYLSLLWQREAITLSDLLRFVEEDHIPYINAFQHFPEQMKLYGRDRGIFGIESWPDYEDIYKKTIEVGTFLDLPRFPDITEDCYLHPNILCMKYLMEVNLPDEMHSLTCHVVKMTGMGEVDFLTFDPIAKMAKAVKYDVQAVAIIVVVLKLLFLLDDSFEWSLSNLAEKHNEKNKKDKPWFDFRKWYQIMKKAFDEKKQKWEEARAKYLWKSEKPLYYSFVDKPVAYKKREMVVNLQKQFSTLVESTATAGKKSPSSFQFNWTEEDTDRTCFHGHSLQGVLKEKGQSLLTKNSLYWLSTQKFCRCYCTHVTTYEESNYSLSYQFILNLFSFLLRIKTSLLHEEVSLVEKKLFEKKYSVKRKKSRSKKVRRH

SEQ ID NO: 891125 - protein, 588 aa, Homo sapiens; identical to SEQ ID NO: 891124

SEQ ID NO: 891126 - protein, 588 aa, Homo sapiens; identical to SEQ ID NO: 891124

SEQ ID NO: 891127 - protein, 537 aa, Homo sapiens
MDLEEAEEFKERCTQCAAVSWGLTDEGKYYCTSCHNVTERYQEVTNTDLIPNTQIKALNRGLKKKNNTEKGWDWYVCEGFQYILYQQAEALKNLGVGPELKNDVLHNFWKRYLQKSKQAYCKNPVYTTGRKPTVLEDNLSHSDWASEPELLSDVSCPPFLESGAESQSDIHTRKPFPVSKASQSGLLKRTIFLTSNAFQHFPEQMKLYGRDRGIFGIESWPDYEDIYKKTIEVGTFLDLPRFPDITEDCYLHPNILCMKYLMEVNLPDEMHSLTCHVVKMTGMGEVDFLTFDPIAKMAKAVKYDVQAVAIIVVVLKLLFLLDDSFEWSLSNLAEKHNEKNKKDKPWFDFRKWYQIMKKAFDEKKQKWEEARAKYLWKSEKPLYYSFVDKPVAYKKREMVVNLQKQFSTLVESTATAGKKSPSSFQFNWTEEDTDRTCFHGHSLQGVLKEKGQSLLTKNSLYWLSTQKFCRCYCTHVTTYEESNYSLSYQFILNLFSFLLRIKTSLLHEEVSLVEKKLFEKKYSVKRKKSRSKKVRRH

SEQ ID NO: 891128 - protein, 444 aa, Homo sapiens
MDLEEAEEFKERCTQCAAVSWGLTDEGKYYCTSCHNVTERYQEVTNTDLIPNTQIKALNRGLKKKNNTEKGWDWYVCEGFQYILYQQAEALKNLGVGPELKNDVLHNFWKRYLQKSKQAYCKNPVYTTGRKPTVLEDNLSHSDWASEPELLSDVSCPPFLESGAESQSDIHTRKPFPVSKASQSETSVCSGSLDGVEYSQRKEKGIVKMTMPQTLAFCYLSLLWQREAITLSDLLRFVEEDHIPYINAFQHFPEQMKLYGRDRGIFGIESWPDYEDIYKKTIEVGTFLDLPRFPDITEDCYLHPNILCMKYLMEVNLPDEMHSLTCHVVKMTGMGEVDFLTFDPIAKMAKAVKYDVQAVAIIVVVLKLLFLLDDSFEWSLSNLAEKHNEKNKKDKPWFDFRKWYQIMKKAFDEKKQKWEEARAKYVLLPGLDAPALLLCLLLYI

SEQ ID NO: 891129 - protein, 191 aa, Homo sapiens
ISDSASDNVFMSVSSPSCSSCFFTLYRYLWKSEKPLYYSFVDKPVAYKKREMVVNLQKQFSTLVESTATAGKKSPSSFQFNWTEEDTDRTCFHGHSLQGVLKEKGQSLLTKNSLYWLSTQKFCRCYCTHVTTYEESNYSLSYQFILNLFSFLLRIKTSLLHEEVSLVEKKLFEKKYSVKRKKSRSKKVRRH

SEQ ID NO: 891130 - protein, 140 aa, Homo sapiens [sequence omitted]

SEQ ID NO: 891131 - protein, 140 aa, Homo sapiens [sequence omitted]

SEQ ID NO: 891132 - protein, 167 aa, Homo sapiens
MASAEPLTALSRWYLYAIHGYFCEVMFTAAWEFVVNLNWKFPGVTSVWALFIYGTSILIVERMYLRLRGRCPLLLRCLIYTLWTYLWEFTTGFILRQFNACPWDYSQFDFDFMGLITLEYAVPWFCGALIMEQFIIRNTLRLRFDKDAEPGEPSGALALANGHVKTD

SEQ ID NO: 891133 - protein, 115 aa, Homo sapiens [sequence omitted]

SEQ ID NO: 891134 - protein, 167 aa, Homo sapiens; identical to SEQ ID NO: 891132

SEQ ID NO: 891135 - protein, 128 aa, Homo sapiens
MAYSEEHKGMPCGFIRQNSGNSISLDFEPSIEYQFVERLEERYKCAFCHSVLHNPHQTGCGHRFCQHCILSLREIEDSAIHGHVDKEVIKSKEGYKGASVAKTEKFLRVIMLRIGSKGSLDGNCQRII

SEQ ID NO: 891136 - protein, 557 aa, Homo sapiens
MAYSEEHKGMPCGFIRQNSGNSISLDFEPSIEYQFVERLEERYKCAFCHSVLHNPHQTGCGHRFCQHCILSLRELNTVPICPVDKEVIKSQEVFKDNCCKREVLNLYVYCSNAPGCNAKVILGRYQDHLQQCLFQPVQCSNEKCREPVLRKDLKEHLSASCQFRKEKCLYCKKDVVVINLQNHEENLCPEYPVFCPNNCAKIILKTEVDEHLAVCPEAEQDCPFKHYGCAVTDKRRNLQQHEHSALREHMRLVLEKNVQLEEQISDLHKSLEQKESKIQQLAETIKKLEKEFKQFAQLFGKNGSFLPNIQVFASHIDKSAWLEAQVHQLLQMVNQQQNKFDLRPLMEAVDTVKQKITLLENNDQRLAVLEEETNKHDTHINIHKAQLSKNEERFKLLEGTCYNGKLIWKVTDYKMKKREAVDGHTVSIFSQSFYTSRCGYRLCARAYLNGDGSGRGSHLSLYFVVMRGEFDSLLQWPFRQRVTLMLLDQSGKKNIMETFKPDPNSSSFKRPDGEMNIASGCPRFVAHSVLENAKNAYIKDDTLFLKVAVDLTDLEDL

SEQ ID NO: 891137 - protein, 226 aa, Homo sapiens
MVNQQQNKFDLRPLMEAVDTVKQKITLLENNDQRLAVLEEETNKHDTHINIHKAQLSKNEERFKLLEGTCYNGKLIWKVTDYKMKKREAVDGHTVSIFSQSFYTSRCGYRLCARAYLNGDGSGRGSHLSLYFVVMRGEFDSLLQWPFRQRVTLMLLDQSGKKNIMETFKPDPNSSSFKRPDGEMNIASGCPRFVAHSVLENAKNAYIKDDTLFLKVAVDLTDLEDL

SEQ ID NO: 891138 - protein, 508 aa, Homo sapiens
MAYSEEHKGMPCGFIRQNSGNSISLDFEPSIEYQFVERLEERYKCAFCHSVLHNPHQTGCGHRFCQHCILSLRELNTVPICPVDKEVIKSQEVFKDNCCKREVLNLYVYCSNAPGCNAKVILGRYQDHLQQCLFQPVQCSNEKCREPVLRKDLKEHLSASCQFRKEKCLYCKKDVVVINLQNHEENLCPEYPVFCPNNCAKIILKTEVDEHLAVCPEAEQDCPFKHYGCAVTDKRRNLQQHEHSALREHMRLVLEKNVQLEEQISDLHKSLEQKESKIQQLAETIKKLEKEFKQFAQLFGKNGSFLPNIQVFASHIDKSAWLEAQVHQLLQMVNQQQNKFDLRPLMEAVDTVKQKITLLENNDQRLAVLEEETNKHDTHINIHKAQLSKNEERFKLLEGTCYNGKLIWKVTDYKMKKREAVDGHTVSIFSQSFYTSRCGYRLCARAYLNGDGSGRGSHLSLYFVVMRGEFDSLLQWPFRQRVTLMLLDQSGKKNIMETFKPDPNEQQL

SEQ ID NO: 891139 - protein, 557 aa, Homo sapiens; identical to SEQ ID NO: 891136

SEQ ID NO: 891140 - protein, 557 aa, Homo sapiens; identical to SEQ ID NO: 891136

SEQ ID NO: 891141 - protein, 557 aa, Homo sapiens; identical to SEQ ID NO: 891136

SEQ ID NO: 891142 - protein, 1716 aa, Homo sapiens
MAQFPTPFGGSLDIWAITVEERAKHDQQFHSLKPISGFITGDQARNFFFQSGLPQPVLAQIWALADMNNDGRMDQVEFSIAMKLIKLKLQGYQLPSALPPVMKQQPVAISSAPAFGMGGIASMPPLTAVAPVPMGSIPVVGMSPTLVSSVPTAAVPPLANGAPPVIQPLPAFAHPAATLPKSSSFSRSGPGSQLNTKLQKAQSFDVASVPPVAEWAVPQSSRLKYRQLFNSHDKTMSGHLTGPQARTILMQSSLPQAQLASIWNLSDIDQDGKLTAEEFILAMHLIDVAMSGQPLPPVLPPEYIPPSFRRVRSGSGISVISSTSVDQRLPEEPVLEDEQQQLEKKLPVTFEDKKRENFERGNLELEKRRQALLEQQRKEQERLAQLERAEQERKERERQEQERKRQLELEKQLEKQRELERQREEERRKEIERREAAKRELERQRQLEWERNRRQELLNQRNKEQEDIVVLKAKKKTLEFELEALNDKKHQLEGKLQDIRCRLTTQRQEIESTNKSRELRIAEITHLQQQLQESQQMLGRLIPEKQILNDQLKQVQQNSLHRDSLVTLKRALEAKELARQHLRDQLDEVEKETRSKLQEIDIFNNQLKELREIHNKQQLQKQKSMEAERLKQKEQERKIIELEKQKEEAQRRAQERDKQWLEHVQQEDEHQRPRKLHEEEKLKREESVKKKDGEEKGKQEAQDKLGRLFHQHQEPAKPAVQAPWSTAEKGPLTISAQENVKVVYYRALYPFESRSHDEITIQPGDIVMVDESQTGEPGWLGGELKGKTGWFPANYAEKIPENEVPAPVKPVTDSTSAPAPKLALRETPAPLAVTSSEPSTTPNNWADFSSTWPTSTNEKPETDNWDAWAAQPSLTVPSAGQLRQRSAFTPATATGSSPSPVLGQGEKVEGLQAQALYPWRAKKDNHLNFNKNDVITVLEQQDMWWFGEVQGQKGWFPKSYVKLISGPIRKSTSMDSGSSESPASLKRVASPAAKPVVSGEEFIAMYTYESSEQGDLTFQQGDVILVTKKDGDWWTGTVGDKAGVFPSNYVRLKDSEGSGTAGKTGSLGKKPEIAQVIASYTATGPEQLTLAPGQLILIRKKNPGGWWEGELQARGKKRQIGWFPANYVKLLSPGTSKITPTEPPKSTALAAVCQVIGMYDYTAQNDDELAFNKGQIINVLNKEDPDWWKGEVNGQVGLFPSNYVKLTTDMDPSQQWCSDLHLLDMLTPTERKRQGYIHELIVTEENYVNDLQLVTEIFQKPLMESELLTEKEVAMIFVNWKELIMCNIKLLKALRVRKKMSGEKMPVKMIGDILSAQLPHMQPYIRFCSRQLNGAALIQQKTDEAPDFKEFVKRLAMDPRCKGMPLSSFILKPMQRVTRYPLIIKNILENTPENHPDHSHLKHALEKAEELCSQVNEGVREKENSDRLEWIQAHVQCEGLSEQLVFNSVTNCLGPRKFLHSGKLYKAKSNKELYGFLFNDFLLLTQITKPLGSSGTDKVFSPKSNLQYKMYKTPIFLNEVLVKLPTDPSGDEPIFHISHIDRVYTLRAESINERTAWVQKIKAASELYIETEKKKREKAYLVRSQRATGIGRLMVNVVEGIELKPCRSHGKSNPYCEVTMGSQCHITKTIQDTLNPKWNSNCQFFIRDLEQEVLCITVFERDQFSPDDFLGRTEIRVADIKKDQGSKGPVTKCLLLHEVPTGEIVVRLDLQLFDEP

SEQ ID NO: 891143 - protein, 1215 aa, Homo sapiens
MAQFPTPFGGSLDIWAITVEERAKHDQQFHSLKPISGFITGDQARNFFFQSGLPQPVLAQIWALADMNNDGRMDQVEFSIAMKLIKLKLQGYQLPSALPPVMKQQPVAISSAPAFGMGGIASMPPLTAVAPVPMGSIPVVGMSPTLVSSVPTAAVPPLANGAPPVIQPLPAFAHPAATLPKSSSFSRSGPGSQLNTKLQKAQSFDVASVPPVAEWAVPQSSRLKYRQLFNSHDKTMSGHLTGPQARTILMQSSLPQAQLASIWNLSDIDQDGKLTAEEFILAMHLIDVAMSGQPLPPVLPPEYIPPSFRRVRSGSGISVISSTSVDQRLPEEPVLEDEQQQLEKKLPVTFEDKKRENFERGNLELEKRRQALLEQQRKEQERLAQLERAEQERKERERQEQERKRQLELEKQLEKQRELERQREEERRKEIERREAAKRELERQRQLEWERNRRQELLNQRNKEQEDIVVLKAKKKTLEFELEALNDKKHQLEGKLQDIRCRLTTQRQEIESTNKSRELRIAEITHLQQQLQESQQMLGRLIPEKQILNDQLKQVQQNSLHRDSLVTLKRALEAKELARQHLRDQLDEVEKETRSKLQEIDIFNNQLKELREIHNKQQLQKQKSMEAERLKQKEQERKIIELEKQKEEAQRRAQERDKQWLEHVQQEDEHQRPRKLHEEEKLKREESVKKKDGEEKGKQEAQDKLGRLFHQHQEPAKPAVQAPWSTAEKGPLTISAQENVKVVYYRALYPFESRSHDEITIQPGDIVMVDESQTGEPGWLGGELKGKTGWFPANYAEKIPENEVPAPVKPVTDSTSAPAPKLALRETPAPLAVTSSEPSTTPNNWADFSSTWPTSTNEKPETDNWDAWAAQPSLTVPSAGQLRQRSAFTPATATGSSPSPVLGQGEKVEGLQAQALYPWRAKKDNHLNFNKNDVITVLEQQDMWWFGEVQGQKGWFPKSYVKLISGPIRKSTSMDSGSSESPASLKRVASPAAKPVVSGEEFIAMYTYESSEQGDLTFQQGDVILVTKKDGDWWTGTVGDKAGVFPSNYVRLKDSEGSGTAGKTGSLGKKPEIAQVIASYTATGPEQLTLAPGQLILIRKKNPGGWWEGELQARGKKRQIGWFPANYVKLLSPGTSKITPTEPPKSTALAAVCQVIGMYDYTAQNDDELAFNKGQIINVLNKEDPDWWKGEVNGQVGLFPSNYVKLTTDMDPSQQ

SEQ ID NO: 891144 - protein, 78 aa, Homo sapiens
ETESGSVTQARVRWRRLTVAGACAAGGRASETKKTPRRGKTEKGGECQKEGWRSGSMALWRAYQRACRSPVKARQPTA

SEQ ID NO: 891145 - protein, 1215 aa, Homo sapiens; identical to SEQ ID NO: 891143

SEQ ID NO: 891146 - protein, 1144 aa, Homo sapiens
MAQFPTPFGGSLDIWAITVEERAKHDQQFHSLKPISGFITGDQARNFFFQSGLPQPVLAQIWALADMNNDGRMDQVEFSIAMKLIKLKLQGYQLPSALPPVMKQQPVAISSAPAFGMGGIASMPPLTAVAPVPMGSIPVVGMSPTLVSSVPTAAVPPLANGAPPVIQPLPAFAHPAATLPKSSSFSRSGPGSQLNTKLQKAQSFDVASVPPVAEWAVPQSSRLKYRQLFNSHDKTMSGHLTGPQARTILMQSSLPQAQLASIWNLSDIDQDGKLTAEEFILAMHLIDVAMSGQPLPPVLPPEYIPPSFRRVRSGSGISVISSTSVDQRLPEEPVLEDEQQQLEKKLPVTFEDKKRENFERGNLELEKRRQALLEQQRKEQERLAQLERAEQERKERERQEQERKRQLELEKQLEKQRELERQREEERRKEIERREAAKRELERQRQLEWERNRRQELLNQRNKEQEDIVVLKAKKKTLEFELEALNDKKHQLEGKLQDIRCRLTTQRQEIESTNKSRELRIAEITHLQQQLQESQQMLGRLIPEKQILNDQLKQVQQNSLHRDSLVTLKRALEAKELARQHLRDQLDEVEKETRSKLQEIDIFNNQLKELREIHNKQQLQKQKSMEAERLKQKEQERKIIELEKQKEEAQRRAQERDKQWLEHVQQEDEHQRPRKLHEEEKLKREESVKKKDGEEKGKQEAQDKLGRLFHQHQEPAKPAVQAPWSTAEKGPLTISAQENVKVVYYRALYPFESRSHDEITIQPGDIVMVDESQTGEPGWLGGELKGKTGWFPANYAEKIPENEVPAPVKPVTDSTSAPAPKLALRETPAPLAVTSSEPSTTPNNWADFSSTWPTSTNEKPETDNWDAWAAQPSLTVPSAGQLRQRSAFTPATATGSSPSPVLGQGEKVEGLQAQALYPWRAKKDNHLNFNKNDVITVLEQQDMWWFGEVQGQKGWFPKSYVKLISGPIRKSTSMDSGSSESPASLKRVASPAAKPVVSGEEIAQVIASYTATGPEQLTLAPGQLILIRKKNPGGWWEGELQARGKKRQIGWFPANYVKLLSPGTSKITPTEPPKSTALAAVCQVIGMYDYTAQNDDELAFNKGQIINVLNKEDPDWWKGEVNGQVGLFPSNYVKLTTDMDPSQQ

SEQ ID NO: 891147 - protein, 1107 aa, Homo sapiens
MAQFPTPFGGSLDIWAITVEERAKHDQQFHSLKPISGFITGDQARNFFFQSGLPQPVLAQIWALADMNNDGRMDQVEFSIAMKLIKLKLQGYQLPSALPPVMKQQPVAISSAPAFAAVPPLANGAPPVIQPLPAFAHPAATLPKSSSFSRSGPGSQLNTKLQKAQSFDVASVPPVAEWAVPQSSRLKYRQLFNSHDKTMSGHLTGPQARTILMQSSLPQAQLASIWNLSDIDQDGKLTAEEFILAMHLIDVAMSGQPLPPVLPPEYIPPSFRRVRSGSGISVISSTSVDQRLPEEPVLEDEQQQLEKKLPVTFEDKKRENFERGNLELEKRRQALLEQQRKEQERLAQLERAEQERKERERQEQERKRQLELEKQLEKQRELERQREEERRKEIERREAAKRELERQRQLEWERNRRQELLNQRNKEQEDIVVLKAKKKTLEFELEALNDKKHQLEGKLQDIRCRLTTQRQEIESTNKSRELRIAEITHLQQQLQESQQMLGRLIPEKQILNDQLKQVQQNSLHRDSLVTLKRALEAKELARQHLRDQLDEVEKETRSKLQEIDIFNNQLKELREIHNKQQLQKQKSMEAERLKQKEQERKIIELEKQKEEAQRRAQERDKQWLEHVQQEDEHQRPRKLHEEEKLKREESVKKKDGEEKGKQEAQDKLGRLFHQHQEPAKPAVQAPWSTAEKGPLTISAQENVKVVYYRALYPFESRSHDEITIQPGDIVMVDESQTGEPGWLGGELKGKTGWFPANYAEKIPENEVPAPVKPVTDSTSAPAPKLALRETPAPLAVTSSEPSTTPNNWADFSSTWPTSTNEKPETDNWDAWAAQPSLTVPSAGQLRQRSAFTPATATGSSPSPVLGQGEKVEGLQAQALYPWRAKKDNHLNFNKNDVITVLEQQDMWWFGEVQGQKGWFPKSYVKLISGPIRKSTSMDSGSSESPASLKRVASPAAKPVVSGEEIAQVIASYTATGPEQLTLAPGQLILIRKKNPGGWWEGELQARGKKRQIGWFPANYVKLLSPGTSKITPTEPPKSTALAAVCQVIGMYDYTAQNDDELAFNKGQIINVLNKEDPDWWKGEVNGQVGLFPSNYVKLTTDMDPSQQ

SEQ ID NO: 891148 - protein, 1076 aa, Homo sapiens
MAQFPTPFGGSLDIWAITVEERAKHDQQFHSLKPISGFITGDQARNFFFQSGLPQPVLAQIWALADMNNDGRMDQVEFSIAMKLIKLKLQGYQLPSALPPVMKQQPVAISSAPAFGMGGIASMPPLTAVAPVPMGSIPVVGMSPTLVSSVPTAAVPPLANGAPPVIQPLPAFAHPAATLPKSSSFSRSGPGSQLNTKLQKAQSFDVASVPPVAEWAVPQSSRLKYRQLFNSHDKTMSGHLTGPQARTILMQSSLPQAQLASIWNLSDIDQDGKLTAEEFILAMHLIDVAMSGQPLPPVLPPEYIPPSFRRVRSGSGISVISSTSVDQRLPEEPVLEDEQQQLEKKLPVTFEDKKRENFERGNLELEKRRQALLEQQRKEQERLAQLERAEQERKERERQEQERKRQLELEKQLEKQRELERQREEERRKEIERREAAKRELERQRQLEWERNRRQELLNQRNKEQEDIVVLKAKKKTLEFELEALNDKKHQLEGKLQDIRCRLTTQRQEIESTNKSRELRIAEITHLQQQLQESQQMLGRLIPEKQILNDQLKQVQQNSLHRDSLVTLKRALEAKELARQHLRDQLDEVEKETRSKLQEDEHQRPRKLHEEEKLKREESVKKKDGEEKGKQEAQDKLGRLFHQHQEPAKPAVQAPWSTAEKGPLTISAQENVKVVYYRALYPFESRSHDEITIQPGDIVMVDESQTGEPGWLGGELKGKTGWFPANYAEKIPENEVPAPVKPVTDSTSAPAPKLALRETPAPLAVTSSEPSTTPNNWADFSSTWPTSTNEKPETDNWDAWAAQPSLTVPSAGQLRQRSAFTPATATGSSPSPVLGQGEKVEGLQAQALYPWRAKKDNHLNFNKNDVITVLEQQDMWWFGEVQGQKGWFPKSYVKLISGPIRKSTSMDSGSSESPASLKRVASPAAKPVVSGEEIAQVIASYTATGPEQLTLAPGQLILIRKKNPGGWWEGELQARGKKRQIGWFPANYVKLLSPGTSKITPTEPPKSTALAAVCQVIGMYDYTAQNDDELAFNKGQIINVLNKEDPDWWKGEVNGQVGLFPSNYVKLTTDMDPSQQ

SEQ ID NO: 891149 - protein, 1215 aa, Homo sapiens; identical to SEQ ID NO: 891143

SEQ ID NO: 891150 - protein, 1215 aa, Homo sapiens; identical to SEQ ID NO: 891143

SEQ ID NO: 891151 - protein, 1042 aa, Homo sapiens
QKYPQQNRSCVPPVAEWAVPQSSRLKYRQLFNSHDKTMSGHLTDGASLLLPRPECNGVISAHCNLHLLGSSESPASASQVAGITGMYHHAQANFVFLVETGFHHVAQAGLKLLTSGDPPTSASQSAGITGMSHHTRPTEGPQARTILMQSSLPQAQLASIWNLSDIDQDGKLTAEEFILAMHLIDVAMSGQPLPPVLPPEYIPPSFRRVRSGSGISVISSTSVDQRLPEEPVLEDEQQQLEKKLPVTFEDKKRENFERGNLELEKRRQALLEQQRKEQERLAQLERAEQERKERERQEQERKRQLELEKQLEKQRELERQREEERRKEIERREAAKRELERQRQLEWERNRRQELLNQRNKEQEDIVVLKAKKKTLEFELEALNDKKHQLEGKLQDIRCRLTTQRQEIESTNKSRELRIAEITHLQQQLQESQQMLGRLIPEKQILNDQLKQVQQNSLHRDSLVTLKRALEAKELARQHLRDQLDEVEKETRSKLQEIDIFNNQLKELREIHNKQQLQKQKSMEAERLKQKEQERKIIELEKQKEEAQRRAQERDKQWLEHVQQEDEHQRPRKLHEEEKLKREESVKKKDGEEKGKQEAQDKLGRLFHQHQEPAKPAVQAPWSTAEKGPLTISAQENVKVVYYRALYPFESRSHDEITIQPGDIVMVDESQTGEPGWLGGELKGKTGWFPANYAEKIPENEVPAPVKPVTDSTSAPAPKLALRETPAPLAVTSSEPSTTPNNWADFSSTWPTSTNEKPETDNWDAWAAQPSLTVPSAGQLRQRSAFTPATATGSSPSPVLGQGEKVEGLQAQALYPWRAKKDNHLNFNKNDVITVLEQQDMWWFGEVQGQKGWFPKSYVKLISGPIRKSTSMDSGSSESPASLKRVASPAAKPVVSGEEIAQVIASYTATGPEQLTLAPGQLILIRKKNPGGWWEGELQARGKKRQIGWFPANYVKLLSPGTSKITPTEPPKSTALAAVCQVIGMYDYTAQNDDELAFNKGQIINVLNKEDPDWWKGEVNGQVGLFPSNYVKLTTDMDPSQQ

SEQ ID NO: 891152 - protein, 1215 aa, Homo sapiens; identical to SEQ ID NO: 891143

SEQ ID NO: 891153 - protein, 273 aa, Homo sapiens [sequence omitted]

SEQ ID NO: 891154 - protein, 1020 aa, Homo sapiens
MAQFPTPFGGSLDIWAITVEERAKHDQQFHSLKPISGFITGDQARNFFFQSGLPQPVLAQIWALADMNNDGRMDQVEFSIAMKLIKLKLQGYQLPSALPPVMKQQPVAISSAPAFGMGGIASMPPLTAVAPVPMGSIPVVGMSPTLVSSVPTAAVPPLANGAPPVIQPLPAFAHPAATLPKSSSFSRSGPGSQLNTKLQKAQSFDVASVPPVAEWAVPQSSRLKYRQLFNSHDKTMSGHLTGPQARTILMQSSLPQAQLASIWNLSDIDQDGKLTAEEFILAMHLIDVAMSGQPLPPVLPPEYIPPSFRRVRSGSGISVISSTSVDQRLPEEPVLEDEQQQLEKKLPVTFEDKKRENFERGNLELEKRRQALLEQQRKEQERLAQLERAEQERKERERQEQERKRQLELEKQLEKQRELERQREEERRKEIERREAAKRELERQRQLEWERNRRQELLNQRNKEQEDIVVLKAKKKTLEFELEALNDKKHQLEGKLQDIRCRLTTQRQEIESTNKSRELRIAEITHLQQQLQESQQMLGRLIPEKQILNDQLKQVQQNSLHRDSLVTLKRALEAKELARQHLRDQLDEVEKETRSKLQEIDIFNNQLKELREIHNKQQLQKQKSMEAERLKQKEQERKIIELEKQKEEAQRRAQERDKQWLEHVQQEDEHQRPRKLHEEEKLKREESVKKKDGEEKGKQEAQDKLGRLFHQHQEPAKPAVQAPWSTAEKGPLTISAQENVKVVYYRALYPFESRSHDEITIQPGDIVMVDESQTGEPGWLGGELKGKTGWFPANYAEKIPENEVPAPVKPVTDSTSAPAPKLALRETPAPLAVTSSEPSTTPNNWADFSSTWPTSTNEKPETDNWDAWAAQPSLTVPSAGQLRQRSAFTPATATGSSPSPVLGQPDFLLHPSMRLGHMQPRIVLLFPDPLQCSTSRLLPMLRPRPGVPFLRSPSCQSPSHPSRPISDAAPSVKFTLMPPGRIHPCFLFIPAVNSRNSFLVYFILPGGTLGCFYLCLPHYL

SEQ ID NO: 891155 - protein, 770 aa, Homo sapiens
MAQFPTPFGGSLDIWAITVEERAKHDQQFHSLKPISGFITGDQARNFFFQSGLPQPVLAQIWALADMNNDGRMDQVEFSIAMKLIKLKLQGYQLPSALPPVMKQQPVAISSAPAFGMGGIASMPPLTAVAPVPMGSIPVVGMSPTLVSSVPTAAVPPLANGAPPVIQPLPAFAHPAATLPKSSSFSRSGPGSQLNTKLQKAQSFDVASVPPVAEWAVPQSSRLKYRQLFNSHDKTMSGHLTGPQARTILMQSSLPQAQLASIWNLSDIDQDGKLTAEEFILAMHLIDVAMSGQPLPPVLPPEYIPPSFRRVRSGSGISVISSTSVDQRLPEEPVLEDEQQQLEKKLPVTFEDKKRENFERGNLELEKRRQALLEQQRKEQERLAQLERAEQERKERERQEQERKRQLELEKQLEKQRELERQREEERRKEIERREAAKRELERQRQLEWERNRRQELLNQRNKEQEDIVVLKAKKKTLEFELEALNDKKHQLEGKLQDIRCRLTTQRQEIESTNKSRELRIAEITHLQQQLQESQQMLGRLIPEKQILNDQLKQVQQNSLHRDSLVTLKRALEAKELARQHLRDQLDEVEKETRSKLQEIDIFNNQLKELREIHNKQQLQKQKSMEAERLKQKEQERKIIELEKQKEEAQRRAQERDKQWLEHVQQEDEHQRPRKLHEEEKLKREESVKKKDGEEKGKQEAQDKLGRLFHQHQEPAKPAVQAPWSTAEKGPLTISAQENVKVVYYRALYPFESRSHDEITIQPGDIVNGG

SEQ ID NO: 891156 - protein, 697 aa, Homo sapiens
  misc_feature (671)..(671): Xaa can be any naturally occurring amino acid
MAQFPTPFGGSLDIWAITVEERAKHDQQFHSLKPISGFITGDQARNFFFQSGLPQPVLAQIWALADMNNDGRMDQVEFSIAMKLIKLKLQGYQLPSALPPVMKQQPVAISSAPAFGMGGIASMPPLTAVAPVPMGSIPVVGMSPTLVSSVPTAAVPPLANGAPPVIQPLPAFAHPAATLPKSSSFSRSGPGSQLNTKLQKAQSFDVASVPPVAEWAVPQSSRLKYRQLFNSHDKTMSGHLTGPQARTILMQSSLPQAQLASIWNLSDIDQDGKLTAEEFILAMHLIDVAMSGQPLPPVLPPEYIPPSFRRVRSGSGISVISSTSVDQRLPEEPVLEDEQQQLEKKLPVTFEDKKRENFERGNLELEKRRQALLEQQRKEQERLAQLERAEQERKERERQEQERKRQLELEKQLEKQRELERQREEERRKEIERREAAKRELERQRQLEWERNRRQELLNQRNKEQEDIVVLKAKKKTLEFELEALNDKKHQLEGKLQDIRCRLTTQRQEIESTNKSRELRIAEITHLQQQLQESQQMLGRLIPEKQILNDQLKQVQQNSLHRDSLVTLKRALEAKELARQHLRDQLDEVEKETRSKLQEIDIFNNQLKELREIHNKQQLQKQKSMEAERLKQKEQERKIIELEKQKEEAQRFLILADDLCALAIVHRMAVXGWRLLGPGCLGLKPMHVWLCDVDKSF

SEQ ID NO: 891157 - protein, 120 aa, Homo sapiens
MAQFPTPFGGSLDIWAITVEERAKHDQQFHSLKPISGFITGDQARNFFFQSGLPQPVLAQIWALADMNNDGRMDQVEFSIAMKLIKLKLQGYQLPSALPPVMKQQPVAISSAPAFGGNSV

SEQ ID NO: 891158 - protein, 115 aa, Homo sapiens [sequence omitted]

SEQ ID NO: 891159 - protein, 115 aa, Homo sapiens [sequence omitted]

SEQ ID NO: 891160 - protein, 115 aa, Homo sapiens [sequence omitted]

SEQ ID NO: 891161 - protein, 80 aa, Homo sapiens
FPILSQTKKRRNNGRAKKGRGHVQPIRCTNCARCVPKDKAIKKFVIRNIVEAAAVRDISEASVFDGKWVTGANCVRIPVS

SEQ ID NO: 891162 - protein, 634 aa, Homo sapiens
MELQTLQEALKVEIQVHQKLVAQMKQDPQNADLKKQLHELQAKITALSEKQKRVVEQLRKNLIVKQEQPDKFQIQPLPQSENKLQTAQQQPLQQLQQQQQYHHHHAQQSAAASPNLTASQKTVTTASMITTKTLPLVLKAATATMPASVVGQRPTIAMVTAINSQKAVLSTDVQNTPVNLQTSSKVTGPGAEAVQIVAKNTVTLQVQATPPQPIKVPQFIPPPRLTPRPNFLPQVRPKPVAQNNIPIAPAPPPMLAAPQLIQRPVMLTKFTPTTLPTSQNSIHPVRVVNGQTATIAKTFPMAQLTSIVIATPGTRLAGPQTVQLSKPSLEKQTVKSHTETDEKQTESRTITPPAAPKPKREENPQKLAFMVSLGLVTHDHLEEIQSKRQERKRRTTANPVYSGAVFEPERKKSAVTYLNSTMHPGTRKRANEEHWPKGDIHEDFCSVCRKSGQLLMCDTCSRVYHLDCLDPPLKTIPKGMWICPRCQDQMLKKEEAIPWPGTLAIVHSYIAYKAAKEEEKQKLLKWSSDLKQEREQLEQKVKQLSNSISKCMEMKNTILARQKEMHSSLEKVKQLIRLIHGIDLSKPVDSEATVGAISNGPDCTPPANAATSTPAPSPSSQSCTANCNQGEETK

SEQ ID NO: 891163 - protein, 634 aa, Homo sapiens; identical to SEQ ID NO: 891162

SEQ ID NO: 891164 - protein, 557 aa, Homo sapiens
KVLEITAPPRALVICRPRARQQQYHHHHAQQSAAASPNLTASQKTVTTASMITTKTLPLVLKAATATMPASVVGQRPTIAMVTAINSQKAVLSTDVQNTPVNLQTSSKVTGPGAEAVQIVAKNTVTLQVQATPPQPIKVPQFIPPPRLTPRPNFLPQVRPKPVAQNNIPIAPAPPPMLAAPQLIQRPVMLTKFTPTTLPTSQNSIHPVRVVNGQTATIAKTFPMAQLTSIVIATPGTRLAGPQTVQLSKPSLEKQTVKSHTETDEKQTESRTITPPAAPKPKREENPQKLAFMVSLGLVTHDHLEEIQSKRQERKRRTTANPVYSGAVFEPERKKSAVTYLNSTMHPGTRKRANEEHWPKGDIHEDFCSVCRKSGQLLMCDTCSRVYHLDCLDPPLKTIPKGMWICPRCQDQMLKKEEAIPWPGTLAIVHSYIAYKAAKEEEKQKLLKWSSDLKQEREQLEQKVKQLSNSISKCMEMKNTILARQKEMHSSLEKVKQLIRLIHGIDLSKPVDSEATVGAISNGPDCTPPANAATSTPAPSPSSQSCTANCNQGEETK

SEQ ID NO: 891165 - protein, 681 aa, Homo sapiens
MELQTLQEALKVEIQVHQKLVAQMKQDPQNADLKKQLHELQAKITALSEKQKRVVEQLRKNLIVKQEQPDKFQIQPLPQSENKLQTAQQQPLQQLQQQQQYHHHHAQQSAAASPNLTASQKTVTTASMITTKTLPLVLKAATATMPASVVGQRPTIAMVTAINSQKAVLSTDVQNTPVNLQTSSKVTGPGAEAVQIVAKNTVTLQVQATPPQPIKVPQFIPPPRLTPRPNFLPQVRPKPVAQNNIPIAPAPPPMLAAPQLIQRPVMLTKFTPTTLPTSQNSIHPVRVVNGQTATIAKTFPMAQLTSIVIATPGTRLAGPQTVQLSKPSLEKQTVKSHTETDEKQTESRTITPPAAPKPKREENPQKLAFMVSLGLVTHDHLEEIQSKRQERKRRTTANPVYSGAVFEPERKKSAVTYLNSTMHPGTRKRGRPPKYNAVLGFGALTPTSPQSSHPDSPENEKTETTFTFPAPVQPVSLPSPTSTDGDIHEDFCSVCRKSGQLLMCDTCSRVYHLDCLDPPLKTIPKGMWICPRCQDQMLKKEEAIPWPGTLAIVHSYIAYKAAKEEEKQKLLKWSSDLKQEREQLEQKVKQLSNSISKCMEMKNTILARQKEMHSSLEKVKQLIRLIHGIDLSKPVDSEATVGAISNGPDCTPPANAATSTPAPSPSSQSCTANCNQGEETK

SEQ ID NO: 891166 - protein, 693 aa, Homo sapiens
MELQTLQEALKVEIQVHQKLVAQMKQDPQNADLKKQLHELQAKITALSEKQKRVVEQLRKNLIVKQEQPDKFQIQPLPQSENKLQTAQQQPLQQLQQQQQYHHHHAQQSAAASPNLTASQKTVTTASMITTKTLPLVLKAATATMPASVVGQRPTIAMVTAINSQKAVLSTDVQNTPVNLQTSSKVTGPGAEAVQIVAKNTVTLQVQATPPQPIKVPQFIPPPRLTPRPNFLPQVRPKPVAQNNIPIAPAPPPMLAAPQLIQRPVMLTKFTPTTLPTSQNSIHPVRVVNGQTATIAKTFPMAQLTSIVIATPGTRLAGPQTVQLSKPSLEKQTVKSHTETDEKQTESRTITPPAAPKPKREENPQKLAFMVSLGLVTHDHLEEIQSKRQERKRRTTANPVYSGAVFEPERKKSAVTYLNSTMHPGTRKRGRPPKYNAVLGFGALTPTSPQSSHPDSPENEKTETTFTFPAPVQPVSLPSPTSTDGDIHEDFCSVCRKSGQLLMCDTCSRVYHLDCLDPPLKTIPKGMWICPRCQDQMLKKEEAIPWPGTLAIVHSYIAYKAAKEEEKQKLLKWSSDLKQEREQLEQKVKQLSNSISCEEAGFLETVLEKCMEMKNTILARQKEMHSSLEKVKQLIRLIHGIDLSKPVDSEATVGAISNGPDCTPPANAATSTPAPSPSSQSCTANCNQGEETK

SEQ ID NO: 891167 - protein, 723 aa, Homo sapiens
MELQTLQEALKVEIQVHQKLVAQMKQDPQNADLKKQLHELQAKITALSEKQKRVVEQLRKNLIVKQEQPDKFQIQPLPQSENKLQTAQQQPLQQLQQQQQYHHHHAQQSAAASPNLTASQKTVTTASMITTKTLPLVLKAATATMPASVVGQRPTIAMVTAINSQKAVLSTDVQNTPVNLQTSSKVTGPGAEAVQIVAKNTVTLQVQATPPQPIKVPQFIPPPRLTPRPNFLPQVRPKPVAQNNIPIAPAPPPMLAAPQLIQRPVMLTKFTPTTLPTSQNSIHPVRVVNGQTATIAKTFPMAQLTSIVIATPGTRLAGPQTVQLSKPSLEKQTVKSHTETDEKQTESRTITPPAAPKPKREENPQKLAFMVSLGLVTHDHLEEIQSKRQERKRRTTANPVYSGAVFEPERKKSAVTYLNSTMHPGTRKRGRPPKYNAVLGFGALTPTSPQSSHPDSPENEKTETTFTFPAPVQPVSLPSPTSTDGDIHEDFCSVCRKSGQLLMCDTCSRVYHLDCLDPPLKTIPKGMWICPRCQDQMLKKEEAIPWPGTLAIVHSYIAYKAAKEEEKQKLLKWSSDLKQEREQLEQKVKQLSNSISSPERVGPSVRPSLCSFFHTMLIAFPGFPDQCEEAGFLETVLEKCMEMKNTILARQKEMHSSLEKVKQLIRLIHGIDLSKPVDSEATVGAISNGPDCTPPANAATSTPAPSPSSQSCTANCNQGEETK

SEQ ID NO: 891168 - protein, 430 aa, Homo sapiens
MELQTLQEALKVEIQVHQKLVAQMKQDPQNADLKKQLHELQAKITALSEKQKRVVEQLRKNLIVKQEQPDKFQIQPLPQSENKLQTAQQQPLQQLQQQQQYHHHHAQQSAAASPNLTASQKTVTTASMITTKTLPLVLKAATATMPASVVGQRPTIAMVTAINSQKAVLSTDVQNTPVNLQTSSKVTGPGAEAVQIVAKNTVTLQVQATPPQPIKVPQFIPPPRLTPRPNFLPQVRPKPVAQNNIPIAPAPPPMLAAPQLIQRPVMLTKFTPTTLPTSQNSIHPVRVVNGQTATIAKTFPMAQLTSIVIATPGTRLAGPQTVQLSKPSLEKQTVKSHTETDEKQTESRTITPPAAPKPKREENPQKLAFMVSLGLVTHDHLEEIQSKRQERKRRTTANPVYSGAVFEPERKKSAVTYLNSTMHPGTRKRG

SEQ ID NO: 891169 - protein, 721 aa, Homo sapiens
MELQTLQEALKVEIQVHQKLVAQMKQDPQNADLKKQLHELQAKITALSEKQKRVVEQLRKNLIVKQEQPDKFQIQPLPQSENKLQTAQQQPLQQLQQQQQYHHHHAQQSAAASPNLTASQKTVTTASMITTKTLPLVLKAATATMPASVVGQRPTIAMVTAINSQKAVLSTDVQNTPVNLQTSSKVTGPGAEAVQIVAKNTVTLQVQATPPQPIKVPQFIPPPRLTPRPNFLPQVRPKPVAQNNIPIAPAPPPMLAAPQLIQRPVMLTKFTPTTLPTSQNSIHPVRVVNGQTATIAKTFPMAQLTSIVIATPGTRLAGPQTVQLSKPSLEKQTVKSHTETDEKQTESRTITPPAAPKPKREENPQKLAFMVSLGLVTHDHLEEIQSKRQERKRRTTANPVYSGAVFEPERKKSAVTYLNSTMHPGTRKRGRPPKYNAVLGFGALTPTSPQSSHPDSPENEKTETTFTFPAPVQPVSLPSPTSTDGDIHEDFCSVCRKSGQLLMCDTCSRVYHLDCLDPPLKTIPKGMWICPRCQDQMLKKEEAIPWPGTLAIVHSYIAYKAAKEEEKQKLLKWSSDLKQEREQLEQKVKQLSNSISKCMEMKNTILARQKEMHSSLEKVKQLIRLIHGIDLSKPVDSEATVGAISNGPDCTPPANAAGIPWLLPQFIPPPRLTPRPNFLPQVRPKPVAQNNIPIAPAPPPMLAAPQLIQRRVMLTSSPHNL

SEQ ID NO: 891170 - protein, 634 aa, Homo sapiens; identical to SEQ ID NO: 891162

SEQ ID NO: 891171 - protein, 634 aa, Homo sapiens; identical to SEQ ID NO: 891162

SEQ ID NO: 891172 - protein, 560 aa, Homo sapiens
YDLDFYRETVYILQSGTHLVSTTQQQYHHHHAQQSAAASPNLTASQKTVTTASMITTKTLPLVLKAATATMPASVVGQRPTIAMVTAINSQKAVLSTDVQNTPVNLQTSSKVTGPGAEAVQIVAKNTVTLQVQATPPQPIKVPQFIPPPRLTPRPNFLPQVRPKPVAQNNIPIAPAPPPMLAAPQLIQRPVMLTKFTPTTLPTSQNSIHPVRVVNGQTATIAKTFPMAQLTSIVIATPGTRLAGPQTVQLSKPSLEKQTVKSHTETDEKQTESRTITPPAAPKPKREENPQKLAFMVSLGLVTHDHLEEIQSKRQERKRRTTANPVYSGAVFEPERKKSAVTYLNSTMHPGTRKRANEEHWPKGDIHEDFCSVCRKSGQLLMCDTCSRVYHLDCLDPPLKTIPKGMWICPRCQDQMLKKEEAIPWPGTLAIVHSYIAYKAAKEEEKQKLLKWSSDLKQEREQLEQKVKQLSNSISKCMEMKNTILARQKEMHSSLEKVKQLIRLIHGIDLSKPVDSEATVGAISNGPDCTPPANAATSTPAPSPSSQSCTANCNQGEETK

SEQ ID NO: 891173 - protein, 681 aa, Homo sapiens; identical to SEQ ID NO: 891165

SEQ ID NO: 891174 - protein, 629 aa, Homo sapiens
MELQTLQEALKVEIQVHQKLVAQMKQDPQNADLKKQLHELQAKITALSEKQKRVVEQLRKNLIVKQEQPDKFQIQPLPQSENKLQTAQQQPLQQLQQQQQYHHHHAQQSAAASPNLTASQKTVTTASMITTKTLPLVLKAATATMPASVVGQRPTIAMVTAINSQKAVLSTDVQNTPVNLQTSSKVTGPGAEAVQIVAKNTVTLQVQATPPQPIKVPQFIPPPRLTPRPNFLPQVRPKPVAQNNIPIAPAPPPMLAAPQLIQRPVMLTKFTPTTLPTSQNSIHPVRVVNGQTATIAKTFPMAQLTSIVIATPGTRLAGPQTVQLSKPSLEKQTVKSHTETDEKQTESRTITPPAAPKPKREENPQKLAFMVSLGLVTHDHLEEIQSKRQERKRRTTANPVYSGAVFEPERKKSAVTYLNSTMHPGTRKRGRPPKYNAVLGFGALTPTSPQSSHPDSPENEKTETTFTFPAPVQPVSLPSPTSTDMLKKEEAIPWPGTLAIVHSYIAYKAAKEEEKQKLLKWSSDLKQEREQLEQKVKQLSNSISKCMEMKNTILARQKEMHSSLEKVKQLIRLIHGIDLSKPVDSEATVGAISNGPDCTPPANAATSTPAPSPSSQSCTANCNQGEETK

SEQ ID NO: 891175 - protein, 157 aa, Homo sapiens
MLKKEEAIPWPGTLAIVHSYIAYKAAKEEEKQKLLKWSSDLKQEREQLEQKVKQLSNSISCEEAGFLETVLEKCMEMKNTILARQKEMHSSLEKVKQLIRLIHGIDLSKPVDSEATVGAISNGPDCTPPANAATSTPAPSPSSQSCTANCNQGEETK

SEQ ID NO: 891176 - protein, 475 aa, Homo sapiens
MELQTLQEALKVEIQVHQKLVAQMKQDPQNADLKKQLHELQAKITALSEKQKRVVEQLRKNLIVKQEQPDKFQIQPLPQSENKLQTAQQQPLQQLQQQQQYHHHHAQQSAAASPNLTASQKTVTTASMITTKTLPLVLKAATATMPASVVGQRPTIAMVTAINSQKAVLSTDVQNTPVNLQTSSKVTGPGAEAVQIVAKNTVTLQVQATPPQPIKVPQFIPPPRLTPRPNFLPQVRPKPVAQNNIPIAPAPPPMLAAPQLIQRPVMLTKFTPTTLPTSQNSIHPVRVVNGQTATIAKTFPMAQLTSIVIATPGTRLAGPQTVQLSKPSLEKQTVKSHTETDEKQTESRTITPPAAPKPKREENPQKLAFMVSLGLVTHDHLEEIQSKRQERKRRTTANPVYSGAVFEPERKKSAVTYLNSTMHPGTRKRANEEHWPKGDIHEDFCSVCRKSGQLLMCDTCSRVYHLDCLDPLYPL

SEQ ID NO: 891177 - protein, 312 aa, Homo sapiens
MSDEDDLEDSEPDQDDSEKEEDEKETEEGEDYRKEGEEFPEEWLPTPLTEDMMKEGLSLLCKTGNGLAHAYVKLEVKERDLTDIYLLRSYIHLRYVDISENHLTDLSPLNYLTHLLWLKADGNRLRSAQMNELPYLQIASFAYNQITDTEGISHPRLETLNLKGNSIHMVTGLDPEKLISLHTVELRGNQLESTLGINLPKLKNLYLAQNMLKKVEGLEDLSNLTTLHLRDNQIDTLSGFSREMKSLQYLNLRRSKTLAFRPDQTPRGSHHMYDREQRMPVFAPKLEIHHNLRPRICSVPVLWAVWGAEWGA

SEQ ID NO: 891178 - protein, 261 aa, Homo sapiens
MILRKKRTRRRQRRGRTTEKRGKSSLRKDLTDIYLLRSYIHLRYVDISENHLTDLSPLNYLTHLLWLKADGNRLRSAQMNELPYLQIASFAYNQITDTEGISHPRLETLNLKGNSIHMVTGLDPEKLISLHTVELRGNQLESTLGINLPKLKNLYLAQNMLKKVEGLEDLSNLTTLHLRDNQIDTLSGFSREMKSLQYLNLRRSKTLAFRPDQTPRGSHHMYDREQRMPVFAPKLEIHHNLRPRICSVPVLWAVWGAEWGA

SEQ ID NO: 891179 - protein, 179 aa, Homo sapiens [sequence omitted]

SEQ ID NO: 891180 - protein, 159 aa, Homo sapiens
RLEDSLWMQVSDEWLPYLQIASFAYNQITDTEGISHPRLENPENHLTDLSPLNYLTHLLWLKADGNRLRSAQMNELPYLQIASFAYNQITDTEGISHPRLETLNLKGNSIHMVTGLDPEKLISLHTVELRGNQLESTLGINLPKLKNLYLEIKDAGLQT

SEQ ID NO: 891181 - protein, 292 aa, Homo sapiens [sequence omitted]

SEQ ID NO: 891182 - protein, 343 aa, Homo sapiens
MSDEDDLEDSEPDQDDSEKEEDEKETEEGEDYRKEGEEFPEEWLPTPLTEDMMKEGLSLLCKTGNGLAHAYVKLEVKERDLTDIYLLRSYIHLRYVDISENHLTDLSPLNYLTHLLWLKADGNRLRSAQMNELPYLQIASFAYNQITDTEGISHPRLETLNLKGNSIHMVTGLDPEKLISLHTVELRGNQLESTLGINLPKLKNLYLAQNMLKKVEGLEDLSNLTTLHLRDNQIDTLSGFSREMKSLQYLNLRGNMVANLGELAKLRDLPKLRALVLLDNPCTDETSYRQEALVQMPYLERLDKEFYEEEERAEADVIRQRLKEEKEQEPEPQRDLEPEQSLI

SEQ ID NO: 891183 - protein, 214 aa, Homo sapiens
MNELPYLQIASFAYNQITDTEGISHPRLETLNLKGNSIHMVTGLDPEKLISLHTVELRGNQLESTLGINLPKLKNLYLAQNMLKKVEGLEDLSNLTTLHLRDNQIDTLSGFSREMKSLQYLNLRGNMVANLGELAKLRDLPKLRALVLLDNPCTDETSYRQEALVQMPYLERLDKEFYEEEERAEADVIRQRLKEEKEQEPEPQRDLEPEQSLI

SEQ ID NO: 891184 - protein, 292 aa, Homo sapiens [sequence omitted]

SEQ ID NO: 891185 - protein, 286 aa, Homo sapiens
RLEDSLWMQVSDEWLPYLQIASFAYNQITDTEGISHPRLENPENHLTDLSPLNYLTHLLWLKADGNRLRSAQMNELPYLQIASFAYNQITDTEGISHPRLETLNLKGNSIHMVTGLDPEKLISLHTVELRGNQLESTLGINLPKLKNLYLAQNMLKKVEGLEDLSNLTTLHLRDNQIDTLSGFSREMKSLQYLNLRGNMVANLGELAKLRDLPKLRALVLLDNPCTDETSYRQEALVQMPYLERLDKEFYEEEERAEADVIRQRLKEEKEQEPEPQRDLEPEQSLI

SEQ ID NO: 891186 - protein, 220 aa, Homo sapiens [sequence omitted]

SEQ ID NO: 891187 - protein, 139 aa, Homo sapiens
MILRKKRTRRRQRRGRTTEKRGKSSLRKDLTDIYLLRSYIHLRYVDISENHLTDLSPLNYLTHLLWLKADGNRLRSAQMNELPYLQIASFAYNQITDTEGISHPRLETLNLKGGSLGWATQDSFLPSLRPTEVGSMVLG

SEQ ID NO: 891188 - protein, 343 aa, Homo sapiens; identical to SEQ ID NO: 891182

SEQ ID NO: 891189 - protein, 165 aa, Homo sapiens
MILRKKRTRRRQRRGRTTEKRGKSSLRKDLTDIYLLRSYIHLRYVDISENHLTDLSPLNYLTHLLWLKADGNRLRSAQMNELPYLQIASFAYNQITDTEGISHPRLETLNLKGNSIHMVTGLDPEKLISLHTVELRGNQLESTLGINLPKLKNLYLEIKDAGLQT

SEQ ID NO: 891190 - protein, 216 aa, Homo sapiens
MSDEDDLEDSEPDQDDSEKEEDEKETEEGEDYRKEGEEFPEEWLPTPLTEDMMKEGLSLLCKTGNGLAHAYVKLEVKERDLTDIYLLRSYIHLRYVDISENHLTDLSPLNYLTHLLWLKADGNRLRSAQMNELPYLQIASFAYNQITDTEGISHPRLETLNLKGNSIHMVTGLDPEKLISLHTVELRGNQLESTLGINLPKLKNLYLEIKDAGLQT

SEQ ID NO: 891191 - protein, 110 aa, Homo sapiens
KKSWGLSSGHPETMRPVIFLRYFFLQVRYLKSQRFEGGIKTFHFSWQRATRLLSRVLLCVSVRITAAVLLVCLLLCKPRMQKGVNKVIPISPEFKGLCLYKVCPYGARKI

SEQ ID NO: 891192 - protein, 202 aa, Homo sapiens
GELGLPGAPGIDGEKGPKGQKGDPGEPGPAGLKGEAGEMGLSGLPGADGLKGEKGESASDSLQESLAQLIVEPGPPGPPGPPGPMGLQGIQGPKGLDGAKGEKGASGERGPSGLPGPVGPPGLIGLPGTKGEKGRPGEPGLDGFPGPRGEKGDRSERGEKGERGVPGRKGVKGQKGEPGPPGLDQPCPVGPDGLPVPGCWHK

SEQ ID NO: 891193 - protein, 446 aa, Homo sapiens
MLLPQLCWLPLLAGLLPPVPAQKFSALTFLRVDQDKDKDCSLDCAGSPQKPLCASDGRTFLSRCEFQRAKCKDPQLEIAYRGNCKDVSRCVAERKYTQEQARKEFQQVFIPECNDDGTYSQVQCHSYTGYCWCVTPNGRPISGTAVAHKTPRCPGSVNEKLPQREGTGKTDDAAAPALETQPQGDEEDIASRYPTLWTEQVKSRQNKTNKNSVSSCDQEHQSALEEAKQPKNDNVVIPECAHGGLYKPVQCHPSTGYCWCVLVDTGRPIPGTSTRYEQPKCDNTARAHPAKARDLYKGRQLQGCPGAKKHEFLTSVLDALSTDMVHAASDPSSSSGRLSEPDPSHTLEERVVHWYFKLLDKNSSGDIGKKEIKPFKRFLRKKSKPKKCVKKFVEYCDVNNDKSISVQELMGCLGVAKEDGKADTKKRHTPRGHAESTSNRQPRKQG

SEQ ID NO: 891194 - protein, 434 aa, Homo sapiens
MLLPQLCWLPLLAGLLPPVPAQKFSALTFLRVDQDKDKDCSLDCAGSPQKPLCASDGRTFLSRCEFQRAKCKDPQLEIAYRGNCKDVSRCVAERKYTQEQARKEFQQVFIPECNDDGTYSQVQCHSYTGYCWCVTPNGRPISGTAVAHKTPRCPGSVNEKLPQREGTGKTDDAAAPALETQPQGDEEDIASRYPTLWTEQVKSRQNKTNKNSVSSCDQEHQSALEEAKQPKNDNVVIPECAHGGLYKPVQCHPSTGYCWCVLVDTGRPIPGTSTRYEQPKCDNTARAHPAKARDLYKGRQLQGCPGAKKHEFLTSVLDALSTDMVHAASDPSSSSGRLSEPDPSHTLEERVVHWYFKLLDKNSSGDIGKKEIKPFKRFLRKKSKPKKCVKKFVEYCDVNNDKSISVQELMGCLGVAKEDGKADTKKRHRSKRNL

SEQ ID NO: 891195 - protein, 170 aa, Homo sapiens
GVHTHNIVGRTESDSGQSCCWATADKGCPGAKKHEFLTSVLDALSTDMVHAASDPSSSSGRLSEPDPSHTLEERVVHWYFKLLDKNSSGDIGKKEIKPFKRFLRKKSKPKKCVKKFVEYCDVNNDKSISVQELMGCLGVAKEDGKADTKKRHTPRGHAESTSNRQPRKQG

SEQ ID NO: 891196 - protein, 446 aa, Homo sapiens; identical to SEQ ID NO: 891193

SEQ ID NO: 891197 - protein, 457 aa, Homo sapiens
MLLPQLCWLPLLAGLLPPVPAQKFSALTFLRVDQDKDKDCSLDCAGSPQKPLCASDGRTFLSRCEFQRAKCKDPQLEIAYRGNCKDVSRCVAERKYTQEQARKEFQQVFIPECNDDGTYSQVQCHSYTGYCWCVTPNGRPISGTAVAHKTPRCPGSVNEKLPQREGTGKTVSLQIFSVLNSDDAAAPALETQPQGDEEDIASRYPTLWTEQVKSRQNKTNKNSVSSCDQEHQSALEEAKQPKNDNVVIPECAHGGLYKPVQCHPSTGYCWCVLVDTGRPIPGTSTRYEQPKCDNTARAHPAKARDLYKGRQLQGCPGAKKHEFLTSVLDALSTDMVHAASDPSSSSGRLSEPDPSHTLEERVVHWYFKLLDKNSSGDIGKKEIKPFKRFLRKKSKPKKCVKKFVEYCDVNNDKSISVQELMGCLGVAKEDGKADTKKRHTPRGHAESTSNRQPRKQG

SEQ ID NO: 891198 - protein, 446 aa, Homo sapiens; identical to SEQ ID NO: 891193

SEQ ID NO: 891199 - protein, 592 aa, Homo sapiens
MASEIHMTGPMCLIENTNGRLMANPEALKILSAITQPMVVVAIVGLYRTGKSYLMNKLAGKKKGFSLGSTVQSHTKGIWMWCVPHPKKPGHILVLLDTEGLGDVEKGDNQNDSWIFALAVLLSSTFVYNSIGTINQQAMDQLYYVTELTHRIRSKSSPDENENEVEDSADFVSFFPDFVWTLRDFSLDLEADGQPLTPDEYLTYSLKLKKGTSQKDETFNLPRLCIRKFFPKKKCFVFDRPVHRRKLAQLEKLQDEELDPEFVQQVADFCSYIFSNSKTKTLSGGIQVNGPRLESLVLTYVNAISSGDLPCMENAVLALAQIENSAAVQKAIAHYEQQMGQKVQLPTESLQELLDLHRDSEREAIEVFIRSSFKDVDHLFQKELAAQLEKKRDDFCKQNQEASSDRCSGLLQVIFSPLEEEVKAGIYSKPGGYRLFVQKLQDLKKKYYEEPRKGIQAEEILQTYLKSKESMTDAILQTDQTLTEKEKEIEVERVKAESAQASAKMLQEMQRKNEQMMEQKERSYQEHLKQLTEKMENDRVQLLKEQERTLALKLQEQEQLLKEGFQKESRIMKNEIQDLQTKMRRRKACTIS

SEQ ID NO: 891200 - protein, 592 aa, Homo sapiens; identical to SEQ ID NO: 891199

SEQ ID NO: 891201 - protein, 453 aa, Homo sapiens
MLLSYVTELTHRIRSKSSPDENENEVEDSADFVSFFPDFVWTLRDFSLDLEADGQPLTPDEYLTYSLKLKKGTSQKDETFNLPRLCIRKFFPKKKCFVFDRPVHRRKLAQLEKLQDEELDPEFVQQVADFCSYIFSNSKTKTLSGGIQVNGPRLESLVLTYVNAISSGDLPCMENAVLALAQIENSAAVQKAIAHYEQQMGQKVQLPTESLQELLDLHRDSEREAIEVFIRSSFKDVDHLFQKELAAQLEKKRDDFCKQNQEASSDRCSGLLQVIFSPLEEEVKAGIYSKPGGYRLFVQKLQDLKKKYYEEPRKGIQAEEILQTYLKSKESMTDAILQTDQTLTEKEKEIEVERVKAESAQASAKMLQEMQRKNEQMMEQKERSYQEHLKQLTEKMENDRVQLLKEQERTLALKLQEQEQLLKEGFQKESRIMKNEIQDLQTKMRRRKACTIS

SEQ ID NO: 891202 - protein, 256 aa, Homo sapiens
MASEIHMTGPMCLIENTNGRLMANPEALKILSAITQPMVVVAIVGLYRTGKSYLMNKLAGKKKGFSLGSTVQSHTKGIWMWCVPHPKKPGHILVLLDTEGLGDVEKGDNQNDSWIFALAVLLSSTFVYNSIGTINQQAMDQLYYVTELTHRIRSKSSPDENENEVEDSADFVSFFPDFVWTLRDFSLDLEADGQPLTPDEYLTYSLKLKKGNRELQLINEDEKTQEIIIFQFTIASFPAFAVFYVFSWLFLEINTC

SEQ ID NO: 891203 - protein, 493 aa, Homo sapiens
MASEIHMTGPMCLIENTNGRLMANPEALKILSAITQPMVVVAIVGLYRTGKSYLMNKLAGKKKGFSLGSTVQSHTKGIWMWCVPHPKKPGHILVLLDTEGLGDVEKGDNQNDSWIFALAVLLSSTFVYNSIGTINQQAMDQLYYVTELTHRIRSKSSPDENENEVEDSADFVSFFPDFVWTLRDFSLDLEADGQPLTPDEYLTYSLKLKKGTSQKDETFNLPRLCIRKFFPKKKCFVFDRPVHRRKLAQLEKLQDEELDPEFVQQVADFCSYIFSNSKTKTLSGGIQVNGPRLESLVLTYVNAISSGDLPCMENAVLALAQIENSAAVQKAIAHYEQQMGQKVQLPTESLQELLDLHRDSEREAIEVFIRSSFKDVDHLFQKELAAQLEKKRDDFCKQNQEASSDRCSGLLQVIFSPLEEEVKAGIYSKPGGYRLFVQKLQDLKKKYYEEPRKGIQAEEILQTYLKSKESMTDAILQTDQTLTEKEKEIEGEE

SEQ ID NO: 891204 - protein, 161 aa, Homo sapiens [sequence omitted]

SEQ ID NO: 891205 - protein, 397 aa, Homo sapiens
MASEIHMTGPMCLIENTNGRLMANPEALKILSAITQPMVVVAIVGLYRTGKSYLMNKLAGKKKGFSLGSTVQSHTKGIWMWCVPHPKKPGHILVLLDTEGLGDVEKGDNQNDSWIFALAVLLSSTFVYNSIGTINQQAMDQLYYVTELTHRIRSKSSPDENENEVEDSADFVSFFPDFVWTLRDFSLDLEADGQPLTPDEYLTYSLKLKKGTSQKDETFNLPRLCIRKFFPKKKCFVFDRPVHRRKLAQLEKLQDEELDPEFVQQVADFCSYIFSNSKTKTLSGGIQVNGPRLESLVLTYVNAISSGDLPCMENAVLALAQIENSAAVQKAIAHYEQQMGQKVQLPTESLQELLDLHRDSEREAIEVFIRSSFKDVDHLFQKELAVIFVSNVYGLGS

SEQ ID NO: 891206 - protein, 592 aa, Homo sapiens; identical to SEQ ID NO: 891199

SEQ ID NO: 891207 - protein, 256 aa, Homo sapiens; identical to SEQ ID NO: 891202

SEQ ID NO: 891208 - protein, 453 aa, Homo sapiens; identical to SEQ ID NO: 891201

SEQ ID NO: 891209 - protein, 511 aa, Homo sapiens
MASEIHMTGPMCLIENTNGRLMANPEALKILSAITQPMVVVAIVGLYRTGKSYLMNKLAGKKKGFSLGSTVQSHTKGIWMWCVPHPKKPGHILVLLDTEGLGDVEKGDNQNDSWIFALAVLLSSTFVYNSIGTINQQAMDQLYYVTELTHRIRSKSSPDENENEVEDSADFVSFFPDFVWTLRDFSLDLEADGQPLTPDEYLTYSLKLKKGTSQKDETFNLPRLCIRKFFPKKKCFVFDRPVHRRKLAQLEKLQDEELDPEFVQQVADFCSYIFSNSKTKTLSGGIQVNGPRLESLVLTYVNAISSGDLPCMENAVLALAQIENSAAVQKAIAHYEQQMGQKVQLPTESLQELLDLHRDSEREAIEVFIRSSFKDVDHLFQKELAAQLEKKRDDFCKQNQEASSDRCSGLLQVIFSPLEEEVKAGIYSKPGGYRLFVQKLQDLKKKYYEEPRKGIQAEEILQTYLKSKESMTDAILQTDQTLTEKEKEIEVERVKAESAQASAKIGVIRNT

SEQ ID NO: 891210 - protein, 96 aa, Homo sapiens
IPDLQLAGELQEMQRKNEQMMEQKERSYQEHLKQLTEKMENDRVQLLKEQERTLALKLQEQEQLLKEGFQKESRIMKNEIQDLQTKMRRRKACTIS

SEQ ID NO: 891211 - protein, 200 aa, Homo sapiens
MASEIHMTGPMCLIENTNGRLMANPEALKILSAITQPMVVVAIVGLYRTGKSYLMNKLAGKKKGFSLGSTVQSHTKGIWMWCVPHPKKPGHILVLLDTEGLGDVEKGDNQNDSWIFALAVLLSSTFVYNSIGTINQQAMDQLYYVTELTHRIRSKSSPDENENEVEDSADFVSFFPDFVWTLRDFSITESAFEQYCNKIN

SEQ ID NO: 891212 - protein, 570 aa, Homo sapiens
LTLCGCRRRGIWVRTGAAMGKVNVAKLRYMSRDDFRVLTAVEMGMKNHEIVPGSLIASIASLKHGGCNKVLRELVKHKLIAWERTKTVQGYRLTNAGYDYLALKTLSSRQVVESVGNQMGVGKESDIYIVANEEGQQFALKLHRLGRTSFRNLKNKRDYHKHRHNVSWLYLSRLSAMKEFAYMKALYERKFPVPKPIDYNRHAVVMELINGYPLCQIHHVEDPASVYDEAMELIVKLANHGLIHGDFNEFNLILDESDHITMIDFPQMVSTSHPNAEWYFDRDVKCIKDFFMKRFSYESELFPTFKDIRREDTLDVEVSASGYTKEMQADDELLHPLGPDDKNIETKEGSEFSFSDGEVAEKAEVYRSENESERNCLEESEGCYCRSSGDPEQIKEDSLSEESADARSFEMTEFNQALEEIKGQVVENNSVTEFSEEKNRTENYNRQDGQRVQGGVPAGSDEYEDECPHLIALSSLNREFRPFRDEENVGAMNQYRTRTLSITSSGSAVSCSTIPPELVKQKVKRQLTKQQKSAVRRRLQKGEANIFTKQRRENMQNIKSSLEAASFWGE

SEQ ID NO: 891213 - protein, 121 aa, Homo sapiens
LTLCGCRRRGIWVRTGAAMGKVNVAKLRYMSRDDFRVLTAVEMGMKNHEIVPGSLIASIASLKHGGCNKVLRELVKHKLIAWERTKSKYFEAPFVIFQVIGFHQSKCSKSQEVEVARLVKH

SEQ ID NO: 891214 - protein, 312 aa, Homo sapiens
IRFDASPPQIVSTSHPNAEWYFDRDVKCIKDFFMKRFSYESELFPTFKDIRREDTLDVEVSASGYTKEMQADDELLHPLGPDDKNIETKEGSEFSFSDGEVAEKAEVYRSENESERNCLEESEGCYCRSSGDPEQIKEDSLSEESADARSFEMTEFNQALEEIKGQVVENNSVTEFSEEKNRTENYNRQDGQRVQGGVPAGSDEYEDECPHLIALSSLNREFRPFRDEENVGAMNQYRTRTLSITSSGSAVSCSTIPPELVKQKVKRQLTKQQKSAVRRRLQKGEANIFTKQRRENMQNIKSSLEAASFWGE

SEQ ID NO: 891215 - protein, 570 aa, Homo sapiens; identical to SEQ ID NO: 891212

SEQ ID NO: 891216 - protein, 335 aa, Homo sapiens
LVRSGVLGQCQGRGLTQGSCSSGGRPEPCTRPTTVQPLTGHPILRGSALAPTEAGDLTDSEPGWMLQACKMEGFPLVPPQPSEDLVPYDTDLYQRQTHEYYPYLSSDGESHSDHYWDFHPHHVHSEFESFAENNFTELQSVQPPQLQQLYRHMELEQMHVLDTPMVPPHPSLGHQVSYLPRMCLQYPSLSPAQPSSDEEEGERQSPPLEVSDGEADGLEPGPGLLPGETGSKKKIRLYQFLLDLLRSGDMKDSIWWVDKDKGTFQFSSKHKEALAHRWGIQKGNRKKMTYQKMARALRNYGKTGEVKKVKKKLTYQFSGEVLGRGGLAERRHPPH

SEQ ID NO: 891217 - protein, 335 aa, Homo sapiens
NQELVLALQCQGRGLTQGSCSSGGRPEPCTRPTTVQPLTGHPILRGSALAPTEAGDLTDSEPGWMLQACKMEGFPLVPPQPSEDLVPYDTDLYQRQTHEYYPYLSSDGESHSDHYWDFHPHHVHSEFESFAENNFTELQSVQPPQLQQLYRHMELEQMHVLDTPMVPPHPSLGHQVSYLPRMCLQYPSLSPAQPSSDEEEGERQSPPLEVSDGEADGLEPGPGLLPGETGSKKKIRLYQFLLDLLRSGDMKDSIWWVDKDKGTFQFSSKHKEALAHRWGIQKGNRKKMTYQKMARALRNYGKTGEVKKVKKKLTYQFSGEVLGRGGLAERRHPPH

SEQ ID NO: 891218 - protein, 354 aa, Homo sapiens
MEPHSSTMHLLTSCPDHGRHSIKTEGTHQRSLGQKNNNNNNNNKTKMPLLIPPPPRKDQELSEATWMELEDIIICETTQKQKVKYCLFSWGSWKPKLKQPSEDLVPYDTDLYQRQTHEYYPYLSSDGESHSDHYWDFHPHHVHSEFESFAENNFTELQSVQPPQLQQLYRHMELEQMHVLDTPMVPPHPSLGHQVSYLPRMCLQYPSLSPAQPSSDEEEGERQSPPLEVSDGEADGLEPGPGLLPGETGSKKKIRLYQFLLDLLRSGDMKDSIWWVDKDKGTFQFSSKHKEALAHRWGIQKGNRKKMTYQKMARALRNYGKTGEVKKVKKKLTYQFSGEVLGRGGLAERRHPPH

SEQ ID NO: 891219 - protein, 310 aa, Homo sapiens
NQELVLALQCQGRGLTQGSCSSGGRPEPCTRPTTVQPLTGHPILRGSALAPTEAGDLTDSEPGWMLQACKMEGFPLVPPQPSEDLVPYDTDLYQRQTHEYYPYLSSDGESHSDHYWDFHPHHVHSEFESFAENNFTELQSVQPPQLQQLYRHMELEQMHVLDTPMVPPHPSLGHQVSYLPRMCLQYPSLSPAQPSSDEEEGERQSPPLEVSDGEADGLEPGPGLLPGETGGAPGPPPWPRPWPCLCPDPTQPGQLTQQPRHRVACVCVCMFASVCVLWGCLWLSLCVCICCVVHTGISMKCARCVCLSVP

SEQ ID NO: 891220 - protein, 213 aa, Homo sapiens
NQELVLALQCQGRGLTQGSCSSGGRPEPCTRPTTVQPLTGHPILRGSALAPTEAGDLTDSEPGWMLQACKMEGFPLVPPQPSEDLVPYDTDLYQRQTHEYYPYLSSDGESHSDHYWDFHPHHVHSEFESFAENNFTELQSVQPPQLQQLYRHMELEQMHVLDTPMVPPHPSLGHQVSYLPRMCLQYPSLSPAQPSLYKMPCSRGVVERILYLE

SEQ ID NO: 891221 - protein, 335 aa, Homo sapiens; identical to SEQ ID NO: 891217

SEQ ID NO: 891222 - protein, 390 aa, Homo sapiens
TELQSVQPPQLQQLYRHMELEQMHVLDTPMVPPHPSLGHQVSYLPRMCLQYPSLSSSELGWLGQCQGRGLTQGSCSSGGRPEPCTRPTTVQPLTGHPILRGSALAPTEAGDLTDSEPGWMLQACKMEGFPLVPPQPSEDLVPYDTDLYQRQTHEYYPYLSSDGESHSDHYWDFHPHHVHSEFESFAENNFTELQSVQPPQLQQLYRHMELEQMHVLDTPMVPPHPSLGHQVSYLPRMCLQYPSLSPAQPSSDEEEGERQSPPLEVSDGEADGLEPGPGLLPGETGSKKKIRLYQFLLDLLRSGDMKDSIWWVDKDKGTFQFSSKHKEALAHRWGIQKGNRKKMTYQKMARALRNYGKTGEVKKVKKKLTYQFSGEVLGRGGLAERRHPPH

SEQ ID NO: 891223 - protein, 175 aa, Homo sapiens
MLQACKMEGFPLVPPVSYLPRMCLQYPSLSPAQPSSDEEEGERQSPPLEVSDGEADGLEPGPGLLPGETGSKKKIRLYQFLLDLLRSGDMKDSIWWVDKDKGTFQFSSKHKEALAHRWGIQKGNRKKMTYQKMARALRNYGKTGEVKKVKKKLTYQFSGEVLGRGGLAERRHPPH

SEQ ID NO: 891224 - protein, 224 aa, Homo sapiens
NQELVLALQCQGRGLTQGSCSSGGRPEPCTRPTTVQPLTGHPILRGSALAPTEAGDLTDSEPGWMLQACKMEGFPLVPPQPSEDLVPYDTDLYQRQTHEYYPYLSSDGESHSDHYWDFHPHHVHSEFESFAENNFTELQSVQPPQLQQLYRHMELEQMHVLDTPMVPPHPSLGHQVSYLPRMCLQYPSLSPAQPRRTRAPSSSRPSTRRRWRTAGASRRATARR

SEQ ID NO: 891225 - protein, 137 aa, Homo sapiens
LVRSGVLGQCQGRGLTQGSCSSGGRPEPCTRPTTVQPLTGHPILRGSALAPTEAGDLTDSEPGWMLQACKMEGFPLVPPQPSEDLVPYDTDLYQRQTHEYYPYLSSDGESHSGEYGACHAPIPQPSLGSWGLEREKE

SEQ ID NO: 891226 - protein, 234 aa, Homo sapiens
MPSGCHSSPPSGLRGDMASLVPLSPYLSPTVLLLVSCDLGFVRADRPPSPVNVTVTHLRANSATVSWDVPEGNIVIGYSISQQRQNGPGQRVIREVNTTTRACALWGLAEDSDYTVQVRSIGLRGESPPGPRVHFRTLKGSDRLPSNSSSPGDITVEGLDGERPLQTGEVVIIVVVLLMWAAVIGLFCRQYDIIKDNDSNNNPKEKGKGPEQSPQGRPVGTRQKKSPSINTIDV

SEQ ID NO: 891227 - protein, 234 aa, Homo sapiens; identical to SEQ ID NO: 891226

SEQ ID NO: 891228 - protein, 306 aa, Homo sapiens
MPSGCHSSPPSGLRGDMASLVPLSPYLSPTVLLLVSCDLGFVRADRPPSPVNVTVTHLRANSATVSWDVPEGNIVIGYSISQQVMNHPSAPPTCVLGFRHISSLKWGGSGSWRILAQAALFTLLPRSAWMLKSLWLSLVAWHWGEAVLLSLISLQRQNGPGQRVIREVNTTTRACALWGLAEDSDYTVQVRSIGLRGESPPGPRVHFRTLKGSDRLPSNSSSPGDITVEGLDGERPLQTGEVVIIVVVLLMWAAVIGLFCRQYDIIKDNDSNNNPKEKGKGPEQSPQGRPVGTRQKKSPSINTIDV

SEQ ID NO: 891229 - protein, 234 aa, Homo sapiens; identical to SEQ ID NO: 891226

SEQ ID NO: 891230 - protein, 158 aa, Homo sapiens
ARASRPGCGGASGASAAEGGGWLSGTVTSRCRGGRRPPHCLPHRGPRPASGQRPLLPDRLRGPLEPWGLRRPAPAPPAARPRAARVAGPAPGWGRGSATESGDGPPSGHRAAPRGLTNREDRRRSPAWMSSGCQADATVPPPADSVGTWLRWCPFPHI

SEQ ID NO: 891231 - protein, 181 aa, Homo sapiens
MPSGCHSSPPSGLRGDMASLVPLSPYLSPTVLLLVSCDLGFVRADRPPSPVNVTVTHLRANSATVSWDVPEGNIVIGYSISQQRQNGPGQRVIREVNTTTRACALWGLAEDSDYTVQVRSIGLRGESPPGPRVHFRTLKGSDRLPSNSSSPGDITVEGLDGERPNLRPGTHPLSTVSRARR

SEQ ID NO: 891232 - protein, 234 aa, Homo sapiens; identical to SEQ ID NO: 891226

SEQ ID NO: 891233 - protein, 105 aa, Homo sapiens
PTPLGPKWGPHFTCIRTLSIPSCPTSCLWPSERGVSVGTPLTPANKRNCLTLEADAALHYSNVFHGASGAPPLTWQPLQLLVISLVGHFSNKGSWTNCLGQTGAD

SEQ ID NO: 891234 - protein, 347 aa, Homo sapiens
ARASRPGCGGASGASAAEGGGWLSGTVTSRCRGGRRPPHCLPHRGPRPASGQRPLLPDRLRGPLEPWGLRRPAPAPPARHRVGRWAALWAPSSPPRPDQPRGPAEEPRLDVKRMPSGCHSSPPSGLRGDMASLVPLSPYLSPTVLLLVSCDLGFVRADRPPSPVNVTVTHLRANSATVSWDVPEGNIVIGYSISQQRQNGPGQRVIREVNTTTRACALWGLAEDSDYTVQVRSIGLRGESPPGPRVHFRTLKGSDRLPSNSSSPGDITVEGLDGERPLQTGEVVIIVVVLLMWAAVIGLFCRQYDIIKDNDSNNNPKEKGKGPEQSPQGRPVGTRQKKSPSINTIDV

SEQ ID NO: 891235 - protein, 141 aa, Homo sapiens
MPSGCHSSPPSGLRGDMASLVPLSPYLSPTVLLLVSCDLGFVRADRPPSPVNVTVTHLRANSATVSWLKTVTTQCRSGASAFGERVPQGPGCTSELSRVLTGYLQTVQAQVTSQWKVWMESGHCRLGKWSSLWWCCSCGLL

SEQ ID NO: 891236 - protein, 158 aa, Homo sapiens; identical to SEQ ID NO: 891230

SEQ ID NO: 891237 - protein, 234 aa, Homo sapiens; identical to SEQ ID NO: 891226

SEQ ID NO: 891238 - protein, 269 aa, Homo sapiens
MPSGCHSSPPSGLRGDMASLVPLSPYLSPTVLLLVSCDLGFVRADRPPSPVNVTVTHLRANSATVSWDVPEGNIVIGYSISQQRQNGPGQRVIREVNTTTRACALWGLAEDSDYTVQVRSIGLRGESPPGPRVHFRTLKGSDRLPSNSSSPGDITVEGLDGERPLQTGEVVIIVVVLLMWAAVIGLFCRQYDIIKDNDSNNNPKEKGKGPEQSPQGRPVGTRQVMWGPVRAERVILPLRGSQGKEEGQRGAEKDGEWKIWDGGSLANTV

SEQ ID NO: 891239 - protein, 221 aa, Homo sapiens
MSMYVLGMAEEFKGEIAVNALWPKTAIHTAAMDMLGGPGIESQCRKVDIIADAAYSIFQKPKSFTGNFVIDENILKEEGIENFDVYAIKPAVFPMKEENPYQHNLKKKMNEKRGHPLQPDFFLDEYPEAVSKKVESTGRLSINPSRIGAMAKFWANITTCAGNELRQSNWAATQQLTKLVRSLKTLKGLEFFLGSLNLGSEQFGTGQTVALGAAKAGIYGK

SEQ ID NO: 891240 - protein, 418 aa, Homo sapiens
MLPNTGRLAGCTVFITGASRGIGKAIALKAAKDGANIVIAAKTAQPHPKLLGTIYTAAEEIEAVGGKALPCIVDVRDEQQISAAVEKAIKKFGGIDILVNNASAISLTNTLDTPTKRLDLMMNVNTRGTYLASKACIPYLKKSKVAHILNISPPLNLNPVWFKQHCAYTIAKYGMSMYVLGMAEEFKGEIAVNALWPKTAIHTAAMDMLGGPGIESQCRKVDIIADAAYSIFQKPKSFTGNFVIDENILKEEGIENFDVYAIKPGHPLQPDFFLDEYPEAVSKKVESTGAVPEFKEEKLQLQPKPRSGAVEETFRIVKDSLSDDVVKATQAIYLFELSGEDGGTWFLDLKSKGGNVGYGEPSDQADVVMSMTTDDFVKMFSGKLKPTMAFMSGKLKIKGNMALAIKLEKLMNQMNARL

SEQ ID NO: 891241 - protein, 418 aa, Homo sapiens; identical to SEQ ID NO: 891240

SEQ ID NO: 891242 - protein, 418 aa, Homo sapiens; identical to SEQ ID NO: 891240

SEQ ID NO: 891243 - protein, 418 aa, Homo sapiens; identical to SEQ ID NO: 891240

SEQ ID NO: 891244 - protein, 418 aa, Homo sapiens; identical to SEQ ID NO: 891240

SEQ ID NO: 891245 - protein, 82 aa, Homo sapiens
GALGDPGFSARSSRTGIGGGRGGAGAGINAEGRSSFSSLLAAAAVAATSSDLRKSCYPTPGGWQDVQFLSQVQAVALAKLLH

SEQ ID NO: 891246 - protein, 345 aa, Homo sapiens
MLPNTGRLAGCTVFITGASRGIGKAIALKAAKDGANIVIAAKTAQPHPKLLGTIYTAAEEIEAVGGKALPCIVDVRDEQQISAAVEKAIKKFGAYTIAKYGMSMYVLGMAEEFKGEIAVNALWPKTAIHTAAMDMLGGPGIESQCRKVDIIADAAYSIFQKPKSFTGNFVIDENILKEEGIENFDVYAIKPGHPLQPDFFLDEYPEAVSKKVESTGAVPEFKEEKLQLQPKPRSGAVEETFRIVKDSLSDDVVKATQAIYLFELSGEDGGTWFLDLKSKGGNVGYGEPSDQADVVMSMTTDDFVKMFSGKLKPTMAFMSGKLKIKGNMALAIKLEKLMNQMNARL

SEQ ID NO: 891247 - protein, 418 aa, Homo sapiens; identical to SEQ ID NO: 891240

SEQ ID NO: 891248 - protein, 418 aa, Homo sapiens; identical to SEQ ID NO: 891240

SEQ ID NO: 891249 - protein, 418 aa, Homo sapiens; identical to SEQ ID NO: 891240

SEQ ID NO: 891250 - protein, 418 aa, Homo sapiens; identical to SEQ ID NO: 891240

SEQ ID NO: 891251 - protein, 169 aa, Homo sapiens
MLPNTGRLAGCTVFITGASRGIGKAIALKAAKDGANIVIAAKTAQPHPKLLGTIYTAAEEIEAVGGKALPCIVDVRDEQQISAAVEKAIKKFGGIDILVNNASAISLTNTLDTPTKRLDLMMNVNTRGTYLASKACIPYLKKSKVAHILNISPPLNLNPVWFKQHCGRW

SEQ ID NO: 891252 - protein, 173 aa, Homo sapiens
MVFLAPHLMLRAHCEPLVPLLDSVLPSLPQTFPSSNESRQCPNARCQFAFYGGESGYHRALLGLQIFNAFMFFWLANFVLALGQVTLYGPGSGELPGSVFCWRGQDNKSWLGPLAGDTGERYRERETAQSRGPGVQGSGKHIQKDTGRIGRSAEKEGAAGNREEQDPVHVVAR

SEQ ID NO: 891253 - protein, 74 aa, Homo sapiens
TPAPRVLIRVAVLDKVTDFLFLLGKLLIVGSVGECRPPSLSGCGSLISVFCDECHLLRRLFPISRTLRHLAFFS

SEQ ID NO: 891254 - protein, 706 aa, Homo sapiens [sequence omitted]

SEQ ID NO: 891255 - protein, 703 aa, Homo sapiens
MKREKNGAYGTPQKYDPTFKGPIYNRGCTDIICCVFLLLAIVGYVAVGIIAWTHGDPRKVIYPTDSRGEFCGQKGTKNENKPYLFYFNIVKCASPLVLLEFQCPTPQICVEKCPDRYLTYLNARSSRDFEYYKQFCVPGFKNNKGVAEVLRDGDCPAVLIPSKPLARRCFPAIHAYKGVLMVGNETTYEDGHGSRKNITDLVEGAKKANGVLEARQLAMRIFEDYTVSWYWIIIGLVIAMAMSLLFIILLRFLAGIMVWVMIIMVILVLGYGIFHCYMEYSRLRGEAGSDVSLVDLGFQTDFRVYLHLRQTWLAFMIILSILEVIIILLLIFLRKRILIAIALIKEASRAVGYVMCSLLYPLVTFFLLCLCIAYWASTAVFLSTSNEAVYKIFDDSPCPFTAKTCNPETFPSSNESRQCPNARCQFAFYGGESGYHRALLGLQIFNAFMFFWLANFVLALGQVTLAGAFASYYWALRKPDDLPAFPLFSAFGRALRYHTGSLAFGALILAIVQIIRVILEYLDQRLKAAENKFAKCLMTCLKCCFWCLEKFIKFLNRNAYIMIAIYGTNFCTSARNAFFLLMRNIIRVAVLDKVTDFLFLLGKLLIVGSVGILAFFFFTHRIRIVQDTAPPLNYYWVPILTVIVGSYLIAHGFFSVYGMCVDTLFLCFLEDLERNDGSAERPYFMSSTLKKLLNKTNKKAAES

SEQ ID NO: 891256 - protein, 733 aa, Homo sapiens
MEDERKNGAYGTPQKYDPTFKGPIYNRGCTDIICCVFLLLAIVGYVAVGIIAWTHGDPRKVIYPTDSRGEFCGQKGTKNENKPYLFYFNIVKCASPLVLLEFQCPTPQICVEKCPDRYLTYLNARSSRDFEYYKQFCVPGFKNNKGVAEVLRDGDCPAVLIPSKPLARRCFPAIHAYKGVLMVGNETTYEDGHGSRKNITDLVEGAKKANGVLEARQLAMRIFEDYTVSWYWIIIGLVIAMAMSLLFIILLRFLAGIMVWVMIIMVILVLGYGIFHCYMEYSRLRGEAGSDVSLVDLGFQTDFRVYLHLRQTWLAFSESQSPIPAPNMRPWREWGAQPAQPLPFAVIILSILEVIIILLLIFLRKRILIAIALIKEASRAVGYVMCSLLYPLVTFFLLCLCIAYWASTAVFLSTSNEAVYKIFDDSPCPFTAKTCNPETFPSSNESRQCPNARCQFAFYGGESGYHRALLGLQIFNAFMFFWLANFVLALGQVTLAGAFASYYWALRKPDDLPAFPLFSAFGRALRYHTGSLAFGALILAIVQIIRVILEYLDQRLKAAENKFAKCLMTCLKCCFWCLEKFIKFLNRNAYIMIAIYGTNFCTSARNAFFLLMRNIIRVAVLDKVTDFLFLLGKLLIVGSVGILAFFFFTHRIRIVQDTAPPLNYYWVPILTVIVGSYLIAHGFFSVYGMCVDTLFLCFLEDLERNDGSAERPYFMSSTLKKLLNKTNKKAAES

SEQ ID NO: 891257 - protein, 706 aa, Homo sapiens [sequence omitted]

SEQ ID NO: 891258 - protein, 706 aa, Homo sapiens [sequence omitted]

SEQ ID NO: 891259 - protein, 518 aa, Homo sapiens
MEDERKNGAYGTPQKYDPTFKGPIYNRGCTDIICCVFLLLAIVGYVAVGIIAWTHGDPRKVIYPTDSRGEFCGQKGTKNENKPYLFYFNIVKCASPLVLLEFQCPTPQICVEKCPDRYLTYLNARSSRDFEYYKQFCVPGFKNNKGVAEVLRDGDCPAVLIPSKPLARRCFPAIHAYKGVLMVGNETTYEDGHGSRKNITDLVEGAKKANGVLEARQLAMRIFEDYTVSWYWIIIGLVIAMAMSLLFIILLRFLAGIMVWVMIIMVILVLGYGIFHCYMEYSRLRGEAGSDVSLVDLGFQTDFRVYLHLRQTWLAFMIILSILEVIIILLLIFLRKRILIAIALIKEASRAVGYVMCSLLYPLEKFIKFLNRNAYIMIAIYGTNFCTSARNAFFLLMRNIIRVAVLDKVTDFLFLLGKLLIVGSVGILAFFFFTHRIRIVQDTAPPLNYYWVPILTVIVGSYLIAHGFFSVYGMCVDTLFLCFLEDLERNDGSAERPYFMSSTLKKLLNKTNKKAAES

SEQ ID NO: 891260 - protein, 738 aa, Homo sapiens
GRGVQPAEPPARPGWGRAGSDSAPRPAAAMEDERKNGAYGTPQKYDPTFKGPIYNRGCTDIICCVFLLLAIVGYVAVGIIAWTHGDPRKVIYPTDSRGEFCGQKGTKNENKPYLFYFNIVKCASPLVLLEFQCPTPQICVEKCPDRYLTYLNARSSRDFEYYKQFCVPGFKNNKGVAEVLRDGDCPAVLIPSKPLARRCFPAIHAYKGVLMVGNETTYEDGHGSRKNITDLVEGAKKANGVLEARQLAMRIFEDYTVSWYWIIIGLVIAMAMSLLFIILLRFLAGIMVWVMIIMVILVLGYGIFHCYMEYSRLRGEAGSDVSLVDLGFQTDFRVYLHLRQTWLAFMIILSILEVIIILLLIFLRKRILIAIALIKEASRAVGYVMCSLLYPLVTFFLLCLCIAYWASTAVFLSTSNEAVYKIFDDSPCPFTAKTCNPETFPSSNESRQCPNARCQFAFYGGESGYHRALLGLQIFNAFMFFWLANFVLALGQVTLAGAFASYYWALRKPDDLPAFPLFSAFGRALRYHTGSLAFGALILAIVQIIRVILEYLDQRLKAAENKFAKCLMTCLKCCFWCLEKFIKFLNRNAYIMIAIYGTNFCTSARNAFFLLMRNIIRVAVLDKVTDFLFLLGKLLIVGSVGILAFFFFTHRIRIVQDTAPPLNYYWVPILTVIVGSYLIAHGFFSVYGMCVDTLFLCFCEDLERNDGSQERPYFMSPELRDILLKGSAEEGKRAEAEE

SEQ ID NO: 891261 - protein, 738 aa, Homo sapiens; identical to SEQ ID NO: 891260

SEQ ID NO: 891262 - protein, 180 aa, Homo sapiens
FETGHEALGTRSCLMTCLQAPEAALEKFIKFLNRNAYIMIAIYGTNFCTSARNAFFLLMRNIIRVAVLDKVTDFLFLLGKLLIVGSVGILAFFFFTHRIRIVQDTAPPLNYYWVPILTVIVGSYLIAHGFFSVYGMCVDTLFLCFLEDLERNDGSAERPYFMSSTLKKLLNKTNKKAAES

SEQ ID NO: 891263 - protein, 706 aa, Homo sapiens [sequence omitted]

SEQ ID NO: 891264 - protein, 706 aa, Homo sapiens [sequence omitted]

SEQ ID NO: 891265 - protein, 706 aa, Homo sapiens [sequence omitted]

SEQ ID NO: 891266 - protein, 706 aa, Homo sapiens [sequence omitted]

SEQ ID NO: 891267 - protein, 706 aa, Homo sapiens [sequence omitted]

SEQ ID NO: 891268 - protein, 706 aa, Homo sapiens [sequence omitted]

SEQ ID NO: 891269 - protein, 706 aa, Homo sapiens [sequence omitted]

SEQ ID NO: 891270 - protein, 653 aa, Homo sapiens
MEDERKNGAYGTPQKYDPTFKGPIYNRGCTDIICCVFLLLAIVGYVAVGIIAWTHGDPRKVIYPTDSRGEFCGQKGTKNENKPYLFYFNIVKCASPLVLLEFQCPTPQICVEKCPDRYLTYLNARSSRDFEYYKQFCVPGFKNNKGVAEVLRDGDCPAVLIPSKPLARRCFPAIHAYKGVLMVGNETTYEDGHGSRKNITDLVEGAKKANGVLEARQLAMRIFEDYTVSWYWIIIGLVIAMAMSLLFIILLRFLAGIMVWVMIIMVILVLGYGIFHCYMEYSRLRGEAGSDVSLVDLGFQTDFRVYLHLRQTWLAFMIILSILEVIIILLLIFLRKRILIAIALIKEASRAVGYVMCSLLYPLVTFFLLCLCIAYWASTAVFLSTSNEAVYKIFDDSPCPFTAKTCNPETFPSSNESRQCPNARCQFAFYGGESGYHRALLGLQIFNAFMFFWLANFVLALGQVTLAGAFASYYWALRKPDDLPAFPLFSAFGRALRYHTGSLAFGALILAIVQIIRVILEYLDQRLKAAENKFAKCLMTCLKCCFWCLEKFIKFLNRNAYIMIAIYGTNFCTSARNAFFLLMRNIIRVAVLDKVTDFLFLLGKLLIVGSVGECRPPSLSGCGSLISVFCDECHLLRRLFPISRTLRHLAFFS

SEQ ID NO: 891271 - protein, 559 aa, Homo sapiens
MEDERKNGAYGTPQKYDPTFKGPIYNRGCTDIICCVFLLLAIVGYVAVGIIAWTHGDPRKVIYPTDSRGEFCGQKGTKNENKPYLFYFNIVKCASPLVLLEFQCPTPQICVEKCPDRYLTYLNARSSRDFEYYKQFCVPGFKNNKGVAEVLRDGDCPAVLIPSKPLARRCFPAIHAYKGVLMVGNETTYEDGHGSRKNITDLVEGAKKANGVLEARQLAMRIFEDYTVSWYWIIIGLVIAMAMSLLFIILLRFLAGIMVWVMIIMVILVLGYGIFHCYMEYSRLRGEAGSDVSLVDLGFQTDFRVYLHLRQTWLAFMIILSILEVIIILLLIFLRKRILIAIALIKEASRAVGYVMCSLLYPLVTFFLLCLCIAYWASTAVFLSTSNEAVYKIFDDSPCPFTAKTCNPETFPSSNESRQCPNARCQFAFYGGESGYHRALLGLQIFNAFMFFWLANFVLALGQVTLAGAFASYMGPGSGELPGSVFCWRGQDNKSWLGPLAGDTGERYRERETAQSRGPGVQGSGKHIQKDTGRIGRSAEKEGAAGNREEQDPVHVVAR

SEQ ID NO: 891272 - protein, 733 aa, Homo sapiens
GRGVQPAEPPARPGWGRAGSDSAPRPAAAMEDERKNGAYGTPQKYDPTFKGPIYNRGCTDIICCVFLLLAIVGYVAVGIIAWTHGDPRKVIYPTDSRGEFCGQKGTKNENKPYLFYFNIVKCASPLVLLEFQCPTPQICVEKCPDRYLTYLNARSSRDFEYYKQFCVPGFKNNKGVAEVLRDGDCPAVLIPSKPLARRCFPAIHAYKGVLMVGNETTYEDGHGSRKNITDLVEGAKKANGVLEARQLAMRIFEDYTVSWYWIIIGLVIAMAMSLLFIILLRFLAGIMVWVMIIMVILVLGYGIFHCYMEYSRLRGEAGSDVSLVDLGFQTDFRVYLHLRQTWLAFMIILSILEVIIILLLIFLRKRILIAIALIKEASRAVGYVMCSLLYPLVTFFLLCLCIAYWASTAVFLSTSNEAVYKIFDDSPCPFTAKTCNPETFPSSNESRQCPNARCQFAFYGGESGYHRALLGLQIFNAFMFFWLANFVLALGQVTLAGAFASYYWALRKPDDLPAFPLFSAFGRALRYHTGSLAFGALILAIVQIIRVILEYLDQRLKAAENKFAKCLMTCLKCCFWCLEKFIKFLNRNAYIMIAIYGTNFCTSARNAFFLLMRNIIRVAVLDKVTDFLFLLGKLLIVGSVGILAFFFFTHRIRIVQDTAPPLNYYWVPILTVIVGSYLIAHGFFSVYGMCVDTLFLCFLEDLERNDGSAERPYFMSSTLKKLLNKTNKKAAES

SEQ ID NO: 891273 - protein, 706 aa, Homo sapiens [sequence omitted]

SEQ ID NO: 891274 - protein, 664 aa, Homo sapiens
MIPLSKDPFTIAWTHGDPRKVIYPTDSRGEFCGQKGTKNENKPYLFYFNIVKCASPLVLLEFQCPTPQICVEKCPDRYLTYLNARSSRDFEYYKQFCVPGFKNNKGVAEVLRDGDCPAVLIPSKPLARRCFPAIHAYKGVLMVGNETTYEDGHGSRKNITDLVEGAKKANGVLEARQLAMRIFEDYTVSWYWIIIGLVIAMAMSLLFIILLRFLAGIMVWVMIIMVILVLGYGIFHCYMEYSRLRGEAGSDVSLVDLGFQTDFRVYLHLRQTWLAFMIILSILEVIIILLLIFLRKRILIAIALIKEASRAVGYVMCSLLYPLVTFFLLCLCIAYWASTAVFLSTSNEAVYKIFDDSPCPFTAKTCNPETFPSSNESRQCPNARCQFAFYGGESGYHRALLGLQIFNAFMFFWLANFVLALGQVTLAGAFASYYWALRKPDDLPAFPLFSAFGRALRYHTGSLAFGALILAIVQIIRVILEYLDQRLKAAENKFAKCLMTCLKCCFWCLEKFIKFLNRNAYIMIAIYGTNFCTSARNAFFLLMRNIIRVAVLDKVTDFLFLLGKLLIVGSVGILAFFFFTHRIRIVQDTAPPLNYYWVPILTVIVGSYLIAHGFFSVYGMCVDTLFLCFLEDLERNDGSAERPYFMSSTLKKLLNKTNKKAAES

SEQ ID NO: 891275 - protein, 763 aa, Homo sapiens
MEDERKNGAYGTPQKYDPTFKGPIYNRGCTDIICCVFLLLAIVGYVAVGIIAWTHGDPRKVIYPTDSRGEFCGQKGTKNENKPYLFYFNIVKCASPLVLLEFQCPTPQICVEKCPDRYLTYLNARSSRDFEYYKQFCVPGFKNNKGVAEVLRDGDCPAVLIPSKPLARRCFPAIHAYKGVLMVGNETTYEDGHGSRKNITDLVEGAKKANGVLEARQLAMRIFEDYTVSWYWIIIGLVIAMAMSLLFIILLRFLAGIMVWVMIIMVILVLGYGIFHCYMEYSRLRGEAGSDVSLVDLGFQTDFRVYLHLRQTWLAFMIILSILEVIIILLLIFLRKRILIAIALIKEASRAVGYVMCSLLYPLVTFFLLCLCIAYWASTAVYLPPDTDLLTPGMAKDQLCLEVTCSLGIGLETGGRMDSFPQKSLGSSVLDLCFLNEPPGFLSTSNEAVYKIFDDSPCPFTAKTCNPETFPSSNESRQCPNARCQFAFYGGESGYHRALLGLQIFNAFMFFWLANFVLALGQVTLAGAFASYYWALRKPDDLPAFPLFSAFGRALRYHTGSLAFGALILAIVQIIRVILEYLDQRLKAAENKFAKCLMTCLKCCFWCLEKFIKFLNRNAYIMIAIYGTNFCTSARNAFFLLMRNIIRVAVLDKVTDFLFLLGKLLIVGSVGILAFFFFTHRIRIVQDTAPPLNYYWVPILTVIVGSYLIAHGFFSVYGMCVDTLFLCFLEDLERNDGSAERPYFMSSTLKKLLNKTNKKAAES

SEQ ID NO: 891276 - protein, 578 aa, Homo sapiens
MEDERKNGAYGTPQKYDPTFKGPIYNRGCTDIICCVFLLLAIVGYVAVGIIAWTHGDPRKVIYPTDSRGEFCGQKGTKNENKPYLFYFNIVKCASPLVLLEFQCPTPQICVEKCPDRYLTYLNARSSRDFEYYKQFCVPGFKNNKGVAEVLRDGDCPAVLIPSKPLARRCFPAIHAYKGVLMVGNETTYEDGHGSRKNITDLVEGAKKANGVLEARQLAMRIFEDYTVSWYWIIIGLVIAMAMSLLFIILLRFLAGIMVWVMIIMVILVLGYGIFHCYMEYSRLRGEAGSDVSLVDLGFQTDFRVYLHLRQTWLAFMIILSILEVIIILLLIFLRKRILIAIALIKEASRAVGYVMCSLLYPLVTFFLLCLCIAYWASTAVFLSTSNEAVYKIFDDSPCPFTAKTCNPETFPSSNESRQCPNARCQFAFYGGESGYHRALLGLQIFNAFMFFWLANFVLALGQVTLAGAFASYYWALRKPDDLPAFPLFSAFGRALRYHTGSLAFGALILAIVQIIRVILEYLDQRLKAAENKFAKCLMTCLKCCFWCLEKFIKFLNRNAYIMLLPAHEKHHQSGCPG

SEQ ID NO: 891277 - protein, 406 aa, Homo sapiens [sequence omitted]

SEQ ID NO: 891278 - protein, 166 aa, Homo sapiens [sequence omitted]

SEQ ID NO: 891279 - protein, 146 aa, Homo sapiens
PTLLQIAIYGTNFCTSARNAFFLLMRNIIRVAVLDKVTDFLFLLGKLLIVGSVGILAFFFFTHRIRIVQDTAPPLNYYWVPILTVIVGSYLIAHGFFSVYGMCVDTLFLCFLEDLERNDGSAERPYFMSSTLKKLLNKTNKKAAES

SEQ ID NO: 891280 - protein, 125 aa, Homo sapiens
TPAPRVLIRVAVLDKVTDFLFLLGKLLIVGSVGILAFFFFTHRIRIVQDTAPPLNYYWVPILTVIVGSYLIAHGFFSVYGMCVDTLFLCFLEDLERNDGSAERPYFMSSTLKKLLNKTNKKAAES

SEQ ID NO: 891281 - protein, 81 aa, Homo sapiens
RIVLNLGHTFILTCKPMLTVIVGSYLIAHGFFSVYGMCVDTLFLCFLEDLERNDGSAERPYFMSSTLKKLLNKTNKKAAES

SEQ ID NO: 891282 - protein, 73 aa, Homo sapiens
SRDSSFLLAQTVIVGSYLIAHGFFSVYGMCVDTLFLCFLEDLERNDGSAERPYFMSSTLKKLLNKTNKKAAES

SEQ ID NO: 891283 - protein, 738 aa, Homo sapiens; identical to SEQ ID NO: 891260

SEQ ID NO: 891284 - protein, 666 aa, Homo sapiens
MEDERKNGAYGTPQKYDPTFKGPIYNRGCTDIICCVFLLLAIVGYVAVGIIAWTHGDPRKVIYPTDSRGEFCGQKGTKNENKPYLFYFNIVKCASPLVLLEFQCPTPQICVEKCPDRYLTYLNARSSRDFEYYKQFCVPGFKNNKGVAEVLRDGDCPAVLIPSKPLARRCFPAIHAYKGVLMVGNETTYEDGHGSRKNITDLVEGAKKANGVLEARQLAMRIFEDYTVSWYWIIIGLVIAMAMSLLFIILLRFLAGIMVWVMIIMVILVLGYGIFHCYMEYSRLRGEAGSDVSLVDLGFQTDFRVYLHLRQTWLAFMIILSILEVIIILLLIFLRKRILIAIALIKEASRAVGYVMCSLLYPLVTFFLLCLCIAYWASTAVFLSTSNEAVYKIFDDSPCPFTAKTCNPETFPSSNESRQCPNARCQFAFYGGESGYHRALLGLQIFNAFMFFWLANFVLALGQVTLAGAFASYYWALRKPDDLPAFPLFSAFGRALRYHTGSLAFGALILAIVQIIRVILEYLDQRLKAAENKFAKCLMTCLKCCFWCLEKFIKFLNRNAYIMIAIYGTNFCTSARNAFFLLMRNIIRVAVLDKVTDFLFLLGKLLIVGSVGILAFFFFTHRIRIVQDTAPPLNYYWVPILVWTSGERWGFGKKEVLGFAWSSLTR

SEQ ID NO: 891285 - protein, 507 aa, Homo sapiens
MEDERKNGAYGTPQKYDPTFKGPIYNRGCTDIICCVFLLLAIVGYVAVGIIAWTHGDPRKVIYPTDSRGEFCGQKGTKNENKPYLFYFNIVKCASPLVLLEFQCPTPQICVEKCPDRYLTYLNARSSRDFEYYKQFCVPGFKNNKGVAEVLRDGDCPAVLIPSKPLARRCFPAIHAYKGVLMVGNETTYEDGHGSRKNITDLVEGAKKANGVLEARQLAMRIFEDYTVSWYWIIIGLVIAMAMSLLFIILLRFLAGIMVWVMIIMVILVLGYGIFHCYMEYSRLRGEAGSDVSLVDLGFQTDFRVYLHLRQTWLAFMIILSILEVIIILLLIFLRKRILIAIALIKEASRAVGYVMCSLLYPLVTFFLLCLCIAYWASTAVFLSTSNEAVYKIFDDSPCPFTAKTCNPETFPSSNESRQCPNARCQFAFYGGESGYHRALLGLQIFNAFMFFWLANFVLALGQVTLAGAFASYYWALRKPDDLPAFPLFSAFGRALRYHTTTTNSGT

SEQ ID NO: 891286 - protein, 389 aa, Homo sapiens
MEDERKNGAYGTPQKYDPTFKGPIYNRGCTDIICCVFLLLAIVGYVAVGIIAWTHGDPRKVIYPTDSRGEFCGQKGTKNENKPYLFYFNIVKCASPLVLLEFQCPTPQICVEKCPDRYLTYLNARSSRDFEYYKQFCVPGFKNNKGVAEVLRDGDCPAVLIPSKPLARRCFPAIHAYKGVLMVGNETTYEDGHGSRKNITDLVEGAKKANGVLEARQLAMRIFEDYTVSWYWIIIGLVIAMAMSLLFIILLRFLAGIMVWVMIIMVILVLGYGIFHCYMEYSRLRGEAGSDVSLVDLGFQTDFRVYLHLRQTWLAFMIILSILEVIIILLLIFLRKRILIAIALIKEASRAVGYVMCSLLYPLVTFFLLCLCIAYWASTAVYLPPDTDL

SEQ ID NO: 891287 - protein, 274 aa, Homo sapiens
MGAGNLPPITQEEALHILGFQPPFEDIRFGPFTGNTTLMRWFRQINDHFHVKGCSYVLYKPHGKNKTAGETASGALSKLTRGLKDESLAYIYHCQNHYFCPIGFEATPVKANKAFSRGPLSPQEVEYWILIGESSRKHPAIHCKKWADIVTDLNTQNPEYLDIRHLERGLQYRKTKKVGGNLHCIIAFQRLNWQRFGLWNFPFGTIRQESQPPTHAQGIAKSESEDNISKKQHGRLGRSFSASFHQDSAWKKMSSIHERRNSGYQGYSDYDGND

SEQ ID NO: 891288 - protein, 503 aa, Homo sapiens
MPNVAETERSNDSGNGEHKSERKSPEENLQGAVKSFCTSASGAPLGPKGDGHYPWSCPVTHTREKIYAICSDYAFLNQATSIYKTPNPSRSPCLPDSTSLSAGNNSSRYIGIPTSTSEIIYNEENSLENLSNSLGKLPLAWEIDKSEFDGVTTNSKHKSGNAKKQVSKRKTSDKKGRYQKECPQHSPLEDIKQRKVLDLRRWYCISRPQYKTSCGISSLISCWNFLYSTMGAGNLPPITQEEALHILGFQPPFEDIRFGPFTGNTTLMRWFRQINDHFHVKGCSYVLYKPHGKNKTAGETASGALSKLTRGLKDESLAYIYHCQNHYFCPIGFEATPVKANKAFSRGPLSPQEVEYWILIGESSRKHPAIHCKKWADIVTDLNTQNPEYLDIRHLERGLQYRKTKKVGGNLHCIIAFQRLNWQRFGLWNFPFGTIRQESQPPTHAQGIAKSESEDNISKKQHGRLGRSFSASFHQDSAWKKMSSIHERRNSGYQGYSDYDGND

SEQ ID NO: 891289 - protein, 503 aa, Homo sapiens; identical to SEQ ID NO: 891288

SEQ ID NO: 891290 - protein, 485 aa, Homo sapiens
MPNVAETERSNDSGNGEHKSERKSPEENLQGAVKSFCTSASGAPLGPKGDGHYPWSCPVTHTREKIYAICSDYAFLNQATSIYKTPNPSRSPCLPDSTSLSAGNNSSRYIGIPTSTSEIIYNEENSLENLSNSLGKLPLAWEIDKSEFDGVTTNSKHKSGNAKKQVSKRKTSDKKRKVLDLRRWYCISRPQYKTSCGISSLISCWNFLYSTMGAGNLPPITQEEALHILGFQPPFEDIRFGPFTGNTTLMRWFRQINDHFHVKGCSYVLYKPHGKNKTAGETASGALSKLTRGLKDESLAYIYHCQNHYFCPIGFEATPVKANKAFSRGPLSPQEVEYWILIGESSRKHPAIHCKKWADIVTDLNTQNPEYLDIRHLERGLQYRKTKKVGGNLHCIIAFQRLNWQRFGLWNFPFGTIRQESQPPTHAQGIAKSESEDNISKKQHGRLGRSFSASFHQDSAWKKMSSIHERRNSGYQGYSDYDGND

SEQ ID NO: 891291 - protein, 274 aa, Homo sapiens; identical to SEQ ID NO: 891287

SEQ ID NO: 891292 - protein, 503 aa, Homo sapiens; identical to SEQ ID NO: 891288

SEQ ID NO: 891293 - protein, 491 aa, Homo sapiens
MPNVAETERSNDSGNGEHKSERKSPEENLQGAVKSFCTSASGAPLGPKGDGHYPWSCPVTHTREKIYAICSDYAFLNQATSIYKTPNPSRSPCLPDSTSLSAGNNSSRYIGIPTSTSEIIYNEENSLENLSNSLGKLPLAWEIDKSEFDGVTTNSKHKSGNAKKQVSKRKTSDKKGRYQKECPQHSPLEDIKQRKVLDLRRWYCISRPQYKTSCGISSLISCWNFLYSTMGAGNLPPITQEEALHILGFQPPFEDIRFGPFTGNTTLMRWFRQINDHFHVKGCSYVLYKPHGKNKTAGETASGALSKLTRGLKDESLAYIYHCQNHYFCPIGFEATPVKANKAFSRGPLSPQEVEYWILIGESSRKHPAIHCKKWADIVTDLNTQNPEYLDIRHLERGLQYRKTKKVGGNLHCIIAFQRLNWQRFGLWNFPFGTIRQESQPPTHAQGIAKSESEDNISKKQHGRLGRSFSASFHQDSAWMITMGMIDYACY

SEQ ID NO: 891294 - protein, 503 aa, Homo sapiens; identical to SEQ ID NO: 891288

SEQ ID NO: 891295 - protein, 503 aa, Homo sapiens; identical to SEQ ID NO: 891288

SEQ ID NO: 891296 - protein, 274 aa, Homo sapiens; identical to SEQ ID NO: 891287

SEQ ID NO: 891297 - protein, 202 aa, Homo sapiens
MPNVAETERSNDSGNGEHKSERKSPEENLQGAVKSFCTSASGAPLGPKGDGHYPWSCPVTHTREKIYAICSDYAFLNQATSIYKTPNPSRSPCLPDSTSLSAGNNSSRYIGIPTSTSEIIYNEENSLENLSNSLGKLPLAWEIDKSEFDGVTTNSKHKSGNAKKQVSKRKTSDKKGRYQKECPQHSPLEDIKQRKVLDLRRW

SEQ ID NO: 891298 - protein, 647 aa, Homo sapiens
MAEEEAPKKSRAAGGGASWELCAGALSARLAEEGSGDAGGRRRPPVDPRRLARQLLLLLWLLEAPLLLGVRAQAAGQGPGQGPGPGQQPPPPPQQQQSGQQYNGERGISVPDHGYCQPISIPLCTDIAYNQTIMPNLLGHTNQEDAGLEVHQFYPLVKVQCSAELKFFLCSMYAPVCTVLEQALPPCRSLCERARQGCEALMNKFGFQWPDTLKCEKFPVHGAGELCVGQNTSDKGTPTPSLLPEFWTSNPQHGGGGHRGGFPGGAGASERGKFSCPRALKVPSYLNYHFLGEKDCGAPCEPTKVYGLMYFGPEELRFSRTWIGIWSVLCCASTLFTVLTYLVDMRRFSYPERPIIFLSGCYTAVAVAYIAGFLLEDRVVCNDKFAEDGARTVAQGTKKEGCTILFMMLYFFSMASSIWWVILSLTWFLAAGMKWGHEAIEANSQYFHLAAWAVPAIKTITILALGQVDGDVLSGVCFVGLNNVDALRGFVLAPLFVYLFIGTSFLLAGFVSLFRIRTIMKHDGTKTEKLEKLMVRIGVFSVLYTVPATIVIACYFYEQAFRDQWERSWVAQSCKSYAIPCPHLQAGGGAPPHPPMSPDFTVFMIKYLMTLIVGITSGFWIWSGKTLNSWRKFYTRLTNSKQGETTV

SEQ ID NO: 891299 - protein, 647 aa, Homo sapiens; identical to SEQ ID NO: 891298

SEQ ID NO: 891300 - protein, 647 aa, Homo sapiens; identical to SEQ ID NO: 891298

SEQ ID NO: 891301 - protein, 647 aa, Homo sapiens; identical to SEQ ID NO: 891298

SEQ ID NO: 891302 - protein, 111 aa, Homo sapiens
MAEEEAPKKSLATIVIACYFYEQAFRDQWERSWVAQSCKSYAIPCPHLQAGGGAPPHPPMSPDFTVFMIKYLMTLIVGITSGFWIWSGKTLNSWRKFYTRLTNSKQGETTV

SEQ ID NO: 891303 - protein, 84 aa, Homo sapiens
LKVQNSTNLPNLGGGPPYITIPPLLGGGLRRPMSPDFTVFMIKYLMTLIVGITSGFWIWSGKTLNSWRKFYTRLTNSKQGETTV

SEQ ID NO: 891304 - protein, 647 aa, Homo sapiens; identical to SEQ ID NO: 891298

SEQ ID NO: 891305 - protein, 1004 aa, Homo sapiens
MLSATPLYGNVHSWMNSERVRMCGASEDRKILVNDGDASKARLELREENPLNHNVVDASTAHRIDGLAALSMDRTGLIREGLRVPGNIVYSSLCGLGSEKGREAATSTLGGLGFSSERNPEMQFKPNTPETVEASAVSGKPPNGFSAIYKTPPGIQKSAVATAEALGLDRPASDKQSPLNINGASYLRLPWVNPYMEGATPAIYPFLDSPNKYSLNMYKALLPQQSYSLAQPLYSPVCTNGERFLYLPPPHYVGPHIPSSLASPMRLSTPSASPAIPPLVHCADKSLPWKMGVSPGNPVDSHAYPHIQNSKQPRVPSAKAVTSGLPGDTALLLPPSPRPSPRVHLPTQPAADTYSEFHKHYARISTSPSVALSKPYMTVSSEFPAARLSNGKYPKAPEGGEGAQPVPGHARKTAVQDRKDGSSPPLLEKQTVTKDVTDKPLDLSSKVVDVDASKADHMKKMAPTVLVHSRAGSGLVLSGSEIPKETLSPPGNGCAIYRSEIISTAPSSWVVPGPSPNEENNGKSMSLKNKALDWAIPQQRSSSCPRMGGTDAVITNVSGSVSSAGRPASASPAPNANADGTKTSRSSVETTPSVIQHVGQPPATPAKHSSSTSSKGAKASNPEPSFKANENGLPPSSIFLSPNEAFRSPPIPYPRSYLPYPAPEGIAVSPLSLHGKGPVYPHPVLLPNGSLFPGHLAPKPGLPYGLPTGRPEFVTYQDALGLGMVHPMLIPHTPIEITKEEKPERRSRSHERARYEDPTLRNRFSEILETSSTKLHPDVPTDKNLKPNPNWNQGKTVVKSDKLVYVDLLREEPDAKTDTNVSKPSFAAESVGQSAEPPKPSVEPALQQHRDFIALREELGRISDFHETYTFKQPVFTVSKDSVLAGTNKENLGLPVSTPFLEPPLGSDGPAVTFGKTQEDPKPFCVGSAPPSVDVTPTYTKDGADEAESNDGKVLKPKPSKLAKRIANSAGYVGDRFKCVTTELYADSSQLSREQRALQVSPPT

SEQ ID NO: 891306 - protein, 1721 aa, Homo sapiens
MLSATPLYGNVHSWMNSERVRMCGASEDRKILVNDGDASKARLELREENPLNHNVVDASTAHRIDGLAALSMDRTGLIREGLRVPGNIVYSSLCGLGSEKGREAATSTLGGLGFSSERNPEMQFKPNTPETVEASAVSGKPPNGFSAIYKTPPGIQKSAVATAEALGLDRPASDKQSPLNINGASYLRLPWVNPYMEGATPAIYPFLDSPNKYSLNMYKALLPQQSYSLAQPLYSPVCTNGERFLYLPPPHYVGPHIPSSLASPMRLSTPSASPAIPPLVHCADKSLPWKMGVSPGNPVDSHAYPHIQNSKQPRVPSAKAVTSGLPGDTALLLPPSPRPSPRVHLPTQPAADTYSEFHKHYARISTSPSVALSKPYMTVSSEFPAARLSNGKYPKAPEGGEGAQPVPGHARKTAVQDRKDGSSPPLLEKQTVTKDVTDKPLDLSSKVVDVDASKADHMKKMAPTVLVHSRAGSGLVLSGSEIPKETLSPPGNGCAIYRSEIISTAPSSWVVPGPSPNEENNGKSMSLKNKALDWAIPQQRSSSCPRMGGTDAVITNVSGSVSSAGRPASASPAPNANADGTKTSRSSVETTPSVIQHVGQPPATPAKHSSSTSSKGAKASNPEPSFKANENGLPPSSIFLSPNEAFRSPPIPYPRSYLPYPAPEGIAVSPLSLHGKGPVYPHPVLLPNGSLFPGHLAPKPGLPYGLPTGRPEFVTYQDALGLGMVHPMLIPHTPIEITKEEKPERRSRSHERARYEDPTLRNRFSEILETSSTKLHPDVPTDKNLKPNPNWNQGKTVVKSDKLVYVDLLREEPDAKTDTNVSKPSFAAESVGQSAEPPKPSVEPALQQHRDFIALREELGRISDFHETYTFKQPVFTVSKDSVLAGTNKENLGLPVSTPFLEPPLGSDGPAVTFGKTQEDPKPFCVGSAPPSVDVTPTYTKDGADEAESNDGKVLKPKPSKLAKRIANSAGYVGDRFKCVTTELYADSSQLSREQRALQMEGLQEDSILCLPAAYCERAMMRFSELEMKEREGGHPATKDSEMCKFSPADWERLKGNQDKKPKSVTLEEAIAEQNESERCEYSVGNKHRDPFEAPEDKDLPVEKYFVERQPVSEPPADQVASDMPHSPTLRVDRKRKVSGDSSHTETTAEEVPEDPLLKAKRRRVSKGLHPKKQRHLLHLRERWEQQVSAADGKPGRQSRKEVTQATQPEAIPQGTNITEEKPGRKRAEAKGNRSWSEESLKPSDNEQGLPVFSGSPPMKSLSSTSAGGKKQAQPSCAPASRPPAKQQKIKENQKTDVLCADEEEDCQAASLLQKYTDNSEKPSGKRLCKTKHLIPQESRRGLPLTGEYYVENADGKVTVRRFRKRPEPSSDYDLSPAKQEPKPFDRLQQLLPASQSTQLPCSSSPQETTQSRPMPPEARRLIVNKNAGETLLQRAARLGYEEVVLYCLENKICDVNHRDNAGYCALHEACARGWLNIVRHLLEYGADVNCSAQDGTRPLHDAVENDHLEIVRLLLSYGADPTLATYSGRTIMKMTHSELMEKFLTDYLNDLQGRNDDDASGTWDFYGSSVCEPDDESGYDVLANPPGPEDQDDDDDAYSDVFEFEFSETPLLPCYNIQVSVAQGPRNWLLLSDVLKKLKMSSRIFRCNFPNVEIVTIAEAEFYRQVSASLLFSCSKDLEAFNPESKELLDLVEFTNEIQTLLGSSVEWLHPSDLASDNYW

SEQ ID NO: 891307 - protein, 1625 aa, Homo sapiens
MLSATPLYGNVHSWMNSERVRMCGASEDRKILVNDGDASKARLELREENPLNHNVVDASTAHRIDGLAALSMDRTGLIREGLRVPGNIVYSSLCGLGSEKGREAATSTLGGLGFSSERNPEMQFKPNTPETVEASAVSGKPPNGFSAIYKTPPGIQKSAVATAEALGLDRPASDKQSPLNINGASYLRLPWVNPYMEGATPAIYPFLDSPNKYSLNMYKALLPQQSYSLAQPLYSPVCTNGERFLYLPPPHYVGPHIPSSLASPMRLSTPSASPAIPPLVHCADKSLPWKMGVSPGNPVDSHAYPHIQNSKQPRVPSAKAVTSGLPGDTALLLPPSPRPSPRVHLPTQPAADTYSEFHKHYARISTSPSVALSKPYMTVSSEFPAARLSNGKYPKAPEGGEGAQPVPGHARKTAVQDRKDGSSPPLLEKQTVTKDVTDKPLDLSSKVVDVDASKADHMKKMAPTVLVHSRAGSGLVLSGSEIPKETLSPPGNGCAIYRSEIISTAPSSWVVPGPSPNEENNGKSMSLKNKALDWAIPQQRSSSCPRMGGTDAVITNVSGSVSSAGRPASASPAPNANADGTKTSRSSVETTPSVIQHVGQPPATPAKHSSSTSSKGAKASNPEPSFKANENGLPPSSIFLSPNEAFRSPPIPYPRSYLPYPAPEGIAVSPLSLHGKGPVYPHPVLLPNGSLFPGHLAPKPGLPYGLPTGRPEFVTYQDALGLGMVHPMLIPHTPIEITKEEKPERRSRSHERARYEDPTLRNRFSEILETSSTKLHPDVPTDKNLKPNPNWNQGKTVVKSDKLVYVDLLREEPDAKTDTNVSKPSFAAESVGQSAEPPKPSVEPALQQHRDFIALREELGRISDFHETYTFKQPVFTVSKDSVLAGTNKENLGLPVSTPFLEPPLGSDGPAVTFGKTQEDPKPFCVGSAPPSVDVTPTYTKDGADEAESNDGKVLKPKPSKLAKRIANSAGYVGDRFKCVTTELYADSSQLSREQRALQMEGLQEDSILCLPAAYCERAMMRFSELEMKEREGGHPATKDSEMCKFSPADWERLKGNQDKKPKSVTLEEAIAEQNESERCEYSVGNKHRDPFEAPEDKDLPVEKYFVERQPVSEPPADQVASDMPHSPTLRVDRKRKVSGDSSHTETTAEEVPEDPLLKAKRRRVSKGLHPKKQRHLLHLRERWEQQVSAADGKPGRQSRKEVTQATQPEAIPQGTNITEEKPGRKRAEAKGNRSWSEESLKPSDNEQGLPVFSGSPPMKSLSSTSAGGKKQAQPSCAPASRPPAKQQKIKENQKTDVLCADEEEDCQAASLLQKYTDNSEKPSGKRLCKTKHLIPQESRRGLPLTGEYYVENADGKVTVRRFRKRPEPSSDYDLSPAKQEPKPFDRLQQLLPASQSTQLPCSSSPQETTQSRPMPPEARRLIVNKNAGETLLQRAARLGYEEVVLYCLENKICDVNHRDNAGYCALHEACARGWLNIVRHLLEYGADVNCSAQDGTRPLHDAVENDHLEIVRLLLSYGADPTLATYSGRTIMKMTHSELMEKFLTDYLNDLQGRNDDDASGTWDFYGSSVCEPDDESGYDVLANPPGPEDQDDDDDAYSDVFEFEFSETPLLPCYNIQVSVAQG

SEQ ID NO: 891308 - protein, 1607 aa, Homo sapiens
MLSATPLYGNVHSWMNSERVRMCGASEDRKILVNDGDASKARLELREENPLNHNVVDASTAHRIDGLAALSMDRTGLIREGLRVPGNIVYSSLCGLGSEKGREAATSTLGGLGFSSERNPEMQFKPNTPETVEASAVSGKPPNGFSAIYKTPPGIQKSAVATAEALGLDRPASDKQSPLNINGASYLRLPWVNPYMEGATPAIYPFLDSPNKYSLNMYKALLPQQSYSLAQPLYSPVCTNGERFLYLPPPHYVGPHIPSSLASPMRLSTPSASPAIPPLVHCADKSLPWKMGVSPGNPVDSHAYPHIQNSKQPRVPSAKAVTSGLPGDTALLLPPSPRPSPRVHLPTQPAADTYSEFHKHYARISTSPSVALSKPYMTVSSEFPAARLSNGKYPKAPEGGEGAQPVPGHARKTAVQDRKDGSSPPLLEKQTVTKDVTDKPLDLSSKVVDVDASKADHMKKMAPTVLVHSRAGSGLVLSGSEIPKETLSPPGNGCAIYRSEIISTAPSSWVVPGPSPNEENNGKSMSLKNKALDWAIPQQRSSSCPRMGGTDAVITNVSGSVSSAGRPASASPAPNANADGTKTSRSSVETTPSVIQHVGQPPATPAKHSSSTSSKGAKASNPEPSFKANENGLPPSSIFLSPNEAFRSPPIPYPRSYLPYPAPEGIAVSPLSLHGKGPVYPHPVLLPNGSLFPGHLAPKPGLPYGLPTGRPEFVTYQDALGLGMVHPMLIPHTPIEITKEEKPERRSRSHERARYEDPTLRNRFSEILETSSTKLHPDVPTDKNLKPNPNWNQGKTVVKSDKLVYVDLLREEPDAKTDTNVSKPSFAAESVGQSAEPPKPSVEPALQQHRDFIALREELGRISDFHETYTFKQPVFTVSKDSVLAGTNKENLGLPVSTPFLEPPLGSDGPAVTFGKTQEDPKPFCVGSAPPSVDVTPTYTKDGADEAESNDGKVLKPKPSKLAKRIANSAGYVGDRFKCVTTELYADSSQLSREQRALQRAMMRFSELEMKEREGGHPATKDSEMCKFSPADWERLKGNQDKKPKSVTLEEAIAEQNESERCEYSVGNKHRDPFEAPEDKDLPVEKYFVERQPVSEPPADQVASDMPHSPTLRVDRKRKVSGDSSHTETTAEEVPEDPLLKAKRRRVSKGLHPKKQRHLLHLRERWEQQVSAADGKPGRQSRKEVTQATQPEAIPQGTNITEEKPGRKRAEAKGNRSWSEESLKPSDNEQGLPVFSGSPPMKSLSSTSAGGKKQAQPSCAPASRPPAKQQKIKENQKTDVLCADEEEDCQAASLLQKYTDNSEKPSGKRLCKTKHLIPQESRRGLPLTGEYYVENADGKVTVRRFRKRPEPSSDYDLSPAKQEPKPFDRLQQLLPASQSTQLPCSSSPQETTQSRPMPPEARRLIVNKNAGETLLQRAARLGYEEVVLYCLENKICDVNHRDNAGYCALHEACARGWLNIVRHLLEYGADVNCSAQDGTRPLHDAVENDHLEIVRLLLSYGADPTLATYSGRTIMKMTHSELMEKFLTDYLNDLQGRNDDDASGTWDFYGSSVCEPDDESGYDVLANPPGPEDQDDDDDAYSDVFEFEFSETPLLPCYNIQVSVAQG

SEQ ID NO: 891309 - protein, 214 aa, Homo sapiens
REKKSDNFQVIVLNSIVQRPGSRTIMKMTHSELMEKFLTDYLNDLQGRNDDDASGTWDFYGSSVCEPDDESGYDVLANPPGPEDQDDDDDAYSDVFEFEFSETPLLPCYNIQVSVAQGPRNWLLLSDVLKKLKMSSRIFRCNFPNVEIVTIAEAEFYRQVSASLLFSCSKDLEAFNPESKELLDLVEFTNEIQTLLGSSVEWLHPSDLASDNYW

SEQ ID NO: 891310 - protein, 1744 aa, Homo sapiens
MLSATPLYGNVHSWMNSERVRMCGASEDRKILVNDGDASKARLELREENPLNHNVVDASTAHRIDGLAALSMDRTGLIREGLRVPGNIVYSSLCGLGSEKGREAATSTLGGLGFSSERNPEMQFKPNTPETVEASAVSGKPPNGFSAIYKTPPGIQKSAVATAEALGLDRPASDKQSPLNINGASYLRLPWVNPYMEGATPAIYPFLDSPNKYSLNMYKALLPQQSYSLAQPLYSPVCTNGERFLYLPPPHYVGPHIPSSLASPMRLSTPSASPAIPPLVHCADKSLPWKMGVSPGNPVDSHAYPHIQNSKQPRVPSAKAVTSGLPGDTALLLPPSPRPSPRVHLPTQPAADTYSEFHKHYARISTSPSVALSKPYMTVSSEFPAARLSNGKYPKAPEGGEGAQPVPGHARKTAVQDRKDGSSPPLLEKQTVTKDVTDKPLDLSSKVVDVDASKADHMKKMAPTVLVHSRAGSGLVLSGSEIPKETLSPPGNGCAIYRSEIISTAPSSWVVPGPSPNEENNGKSMSLKNKALDWAIPQQRSSSCPRMGGTDAVITNVSGSVSSAGRPASASPAPNANADGTKTSRSSVETTPSVIQHVGQPPATPAKHSSSTSSKGAKASNPEPSFKANENGLPPSSIFLSPNEAFRSPPIPYPRSYLPYPAPEGIAVSPLSLHGKGPVYPHPVLLPNGSLFPGHLAPKPGLPYGLPTGRPEFVTYQDALGLGMVHPMLIPHTPIEITKEEKPERRSRSHERARYEDPTLRNRFSEILETSSTKLHPDVPTDKNLKPNPNWNQGKTVVKSDKLVYVDLLREEPDAKTDTNVSKPSFAAESVGQSAEPPKPSVEPALQQHRDFIALREELGRISDFHETYTFKQPVFTVSKDSVLAGTNKENLGLPVSTPFLEPPLGSDGPAVTFGKTQEDPKPFCVGSAPPSVDVTPTYTKDGADEAESNDGKVLKPKPSKLAKRIANSAGYVGDRFKCVTTELYADSSQLSREQRALQMEGLQEDSILCLPAAYCERAMMRFSELEMKEREGGHPATKDSEMCKFSPADWERLKGNQDKKPKSVTLEEAIAEQNESERCEYSVGNKHRDPFEAPEDKDLPVEKYFVERQPVSEPPADQVASDMPHSPTLRVDRKRKVSGDSSHTETTAEEVPEDPLLKAKRRRVSKGLHPKKQRHLLHLRERWEQQVSAADGKPGRQSRKEVTQATQPEAIPQGTNITEEKPGRKRAEAKGNRSWSEESLKPSDNEQGLPVFSGSPPMKSLSSTSAGGKKQAQPSCAPASRPPAKQQKIKENQKTDVLCADEEEDCQAASLLQKYTDNSEKPSGKRLCKTKHLIPQESRRGLPLTGEYYVENADGKVTVRRFRKRPEPSSDYDLSPAKQEPKPFDRLQQLLPASQSTQLPCSSSPQETTQSRPMPPEARRLIVNKNAGETLLQRAARLGYEEVVLYCLENKICDVNHRDNAGYCALHEACARGWLNIVRHLLEYGADVNCSAQDGTRPLHDAVENDHLEIVRLLLSYGADPTLATYSGRTIMKMTHSELMEKFLTDYLNDLQGRNDDDASGTWDFYGSSVCEPDDESGYDVLANPPGPEDQDDDDDAYSDVFEFEFSETPLLPCYNIQVSVAQGPRNWLLLSDVLKKLKMSSRIFRCNFPNVEIVTIAEAEFYRLWMQKVSEDEEEEDVKLLSISGKAAAPGGGSKVPQKKVKLAADDDDDDDDKGDDDQDDDDDDFDAEEAEEQAPVKKSIR

SEQ ID NO: 891311 - protein, 1721 aa, Homo sapiens; identical to SEQ ID NO: 891306

SEQ ID NO: 891312 - protein, 1721 aa, Homo sapiens; identical to SEQ ID NO: 891306

SEQ ID NO: 891313 - protein, 469 aa, Homo sapiens
LTNLKVCIELTGLHPKKQRHLLHLRERWEQQVSAADGKPGRQSRKEVTQATQPEAIPQGTNITEEKPGRKRAEAKGNRSWSEESLKPSDNEQGLPVFSGSPPMKSLSSTSAGGKKQAQPSCAPASRPPAKQQKIKENQKTDVLCADEEEDCQAASLLQKYTDNSEKPSGKRLCKTKHLIPQESRRGLPLTGEYYVENADGKVTVRRFRKRPEPSSDYDLSPAKQEPKPFDRLQQLLPASQSTQLPCSSSPQETTQSRPMPPEARRLIVNKNAGETLLQRAARLGYEEVVLYCLENKICDVNHRDNAGYCALHEACARGWLNIVRHLLEYGADVNCSAQDGTRPLHDAVENDHLEIVRLLLSYGADPTLATYSGRTIMKMTHSELMEKFLTDYLNDLQGRNDDDASGTWDFYGSSVCEPDDESGYDVLANPPGPEDQDDDDDAYSDVFEFEFSETPLLPCYNIQVSVAQG

SEQ ID NO: 891314 - protein, 1625 aa, Homo sapiens; identical to SEQ ID NO: 891307

SEQ ID NO: 891315 - protein, 437 aa, Homo sapiens
MAEAEEDCHSDTVRADDDEENESPAETDLQAQLQMFRAQWMFELAPGVSSSNLENRPCRAARGSLQKTSADTKGKQEQAKEEKARELFLKAVEEEQNGALYEAIKFYRRAMQLVPDIEFKITYTRSPDGDGVGNSYIEDNDDDSKMADLLSYFQQQLTFQESVLKLCQPELESSQIHISVLPMEVLMYIFRWVVSSDLDLRSLEQLSLVCRGFYICARDPEIWRLACLKVWGRSCIKLVPYTSWREMFLERPRVRFDGVYISKTTYIRQGEQSLDGFYRAWHQVEYYRYIRFFPDGHVMMLTTPEEPQSIVPRLRTRNTRTDAILLGHYRLSQDTDNQTKVFAVITKKKEEKPLDYKYRYFRRVPVQEADQSFHVGLQLCSSGHQRFNKLIWIHHSCHITYKSTGETAVSAFEIDKMYTPLFFARVRSYTAFSERPL

SEQ ID NO: 891316 - protein, 778 aa, Homo sapiens
MAEAEEDCHSDTVRADDDEENESPAETDLQAQLQMFRAQWMFELAPGVSSSNLENRPCRAARGSLQKTSADTKGKQEQAKEEKARELFLKAVEEEQNGALYEAIKFYRRAMQLVPDIEFKITYTRSPDGDGVGNSYIEDNDDDSKMADLLSYFQQQLTFQESVLKLCQPELESSQIHISVLPMEVLMYIFRWVVSSDLDLRSLEQLSLVCRGFYICARDPEIWRLACLKVWGRSCIKLVPYTSWREMFLERPRVRFDGVYISKTTYIRQGEQSLDGFYRAWHQVEYYRYIRFFPDGHVMMLTTPEEPQSIVPRLRTRNTRTDAILLGHYRLSQDTDNQTKVFAVITKKKEEKKKLETSSQRNMNLLYQLEWGKRRRKQRDQMLPANCQLVTPHTQCRLKLLKLERIKDYLLMEEEFIRNQEQMKPLEEKQEEERSKVDDLRGTPMSVGTLEEIIDDNHAIVSTSVGSEHYVSILSFVDKDLLEPGCSVLLNHKVHAVIGVLMDDTDPLVTVMKVEKAPQETYADIGGLDNQIQEIKESVELPLTHPEYYEEMGIKPPKGVILYGPPGTGKTLLAKAVANQTSATFLRVVGSELIQKYLGDGPKLVRELFRVAEEHAPSIVFIDEIDAIGTKRYDSNSGGEREIQRTMLELLNQLDGFDSRGDVKVIMATNRIETLDPALIRPGRIDRKIEFPLPDEKTKKRIFQIHTSRMTLADDVTLDDLIMAKDDLSGADIKAICTEAGLMALRERRMKVTNEDFKKSKENVLYKKQEGTPEGLYL

SEQ ID NO: 891317 - protein, 403 aa, Homo sapiens
MFRAQWMFELAPGVSSSNLENRPCRAARGSLQKTSADTKGKQEQAKEEKARELFLKAVEEEQNGALYEAIKFYRRAMQLVPDIEFKITYTRSPDGDGVGNSYIEDNDDDSKMADLLSYFQQQLTFQESVLKLCQPELESSQIHISVLPMEVLMYIFRWVVSSDLDLRSLEQLSLVCRGFYICARDPEIWRLACLKVWGRSCIKLVPYTSWREMFLERPRVRFDGVYISKTTYIRQGEQSLDGFYRAWHQVEYYRYIRFFPDGHVMMLTTPEEPQSIVPRLRTRNTRTDAILLGHYRLSQDTDNQTKVFAVITKKKEEKPLDYKYRYFRRVPVQEADQSFHVGLQLCSSGHQRFNKLIWIHHSCHITYKSTGETAVSAFEIDKMYTPLFFARVRSYTAFSERPL

SEQ ID NO: 891318 - protein, 128 aa, Homo sapiens
LSPCWPRKNWRLHFPLMGSWSLGSSSLRDRESCFDCDCRFPEKPLDYKYRYFRRVPVQEADQSFHVGLQLCSSGHQRFNKLIWIHHSCHITYKSTGETAVSAFEIDKMYTPLFFARVRSYTAFSERPL

SEQ ID NO: 891319 - protein, 127 aa, Homo sapiens
MPDIIWVFPPQAEAEEDCHSDTVRADDDEENESPAETDLQAQLQMFRAQWMFELAPGVSSSNLENRPCRAARGSLQKTSADTKGKQEQAKEEKLSIIDIVTNYIFFFWHMEIFTDTVSRHYNQTFGT

SEQ ID NO: 891320 - protein, 437 aa, Homo sapiens; identical to SEQ ID NO: 891315

SEQ ID NO: 891321 - protein, 437 aa, Homo sapiens; identical to SEQ ID NO: 891315

SEQ ID NO: 891322 - protein, 437 aa, Homo sapiens; identical to SEQ ID NO: 891315

SEQ ID NO: 891323 - protein, 447 aa, Homo sapiens
MPDIIWVFPPQAEAEEDCHSDTVRADDDEENESPAETDLQAQLQMFRAQWMFELAPGVSSSNLENRPCRAARGSLQKTSADTKGKQEQAKEEKARELFLKAVEEEQNGALYEAIKFYRRAMQLVPDIEFKITYTRSPDGDGVGNSYIEDNDDDSKMADLLSYFQQQLTFQESVLKLCQPELESSQIHISVLPMEVLMYIFRWVVSSDLDLRSLEQLSLVCRGFYICARDPEIWRLACLKVWGRSCIKLVPYTSWREMFLERPRVRFDGVYISKTTYIRQGEQSLDGFYRAWHQVEYYRYIRFFPDGHVMMLTTPEEPQSIVPRLRTRNTRTDAILLGHYRLSQDTDNQTKVFAVITKKKEEKPLDYKYRYFRRVPVQEADQSFHVGLQLCSSGHQRFNKLIWIHHSCHITYKSTGETAVSAFEIDKMYTPLFFARVRSYTAFSERPL

SEQ ID NO: 891324 - protein, 437 aa, Homo sapiens; identical to SEQ ID NO: 891315

SEQ ID NO: 891325 - protein, 588 aa, Homo sapiens
  misc_feature (59)..(59): Xaa can be any naturally occurring amino acid
GVVRHVRAADGAGSVKGATGDHPCRRRTASVVSSQLSASGHFRALDNTERQRPAQVTPXVAPWKHRSHECELLAAVIRWHLIRQRDRECELEINSYCTPPLPGALLRPRTLLSSAAETGRSRHPDTQHPSSGGRCRGGTESPSSAAGRPASMAEAEEDCHSDTVRADDDEENESPAETDLQAQLQMFRAQWMFELAPGVSSSNLENRPCRAARGSLQKTSADTKGKQEQAKEEKARELFLKAVEEEQNGALYEAIKFYRRAMQLVPDIEFKITYTRSPDGDGVGNSYIEDNDDDSKMADLLSYFQQQLTFQESVLKLCQPELESSQIHISVLPMEVLMYIFRWVVSSDLDLRSLEQLSLVCRGFYICARDPEIWRLACLKVWGRSCIKLVPYTSWREMFLERPRVRFDGVYISKTTYIRQGEQSLDGFYRAWHQVEYYRYIRFFPDGHVMMLTTPEEPQSIVPRLRTRNTRTDAILLGHYRLSQDTDNQTKVFAVITKKKEEKPLDYKYRYFRRVPVQEADQSFHVGLQLCSSGHQRFNKLIWIHHSCHITYKSTGETAVSAFEIDKMYTPLFFARVRSYTAFSERPL

SEQ ID NO: 891326 - protein, 403 aa, Homo sapiens; identical to SEQ ID NO: 891317

SEQ ID NO: 891327 - protein, 444 aa, Homo sapiens
QTSRCVSAGLSFSSSSSALTVSDDDEENESPAETDLQAQLQMFRAQWMFELAPGVSSSNLENRPCRAARGSLQKTSADTKGKQEQAKEEKARELFLKAVEEEQNGALYEAIKFYRRAMQLVPDIEFKITYTRSPDGDGVGNSYIEDNDDDSKMADLLSYFQQQLTFQESVLKLCQPELESSQIHISVLPMEVLMYIFRWVVSSDLDLRSLEQLSLVCRGFYICARDPEIWRLACLKVWGRSCIKLVPYTSWREMFLERPRVRFDGVYISKTTYIRQGEQSLDGFYRAWHQVEYYRYIRFFPDGHVMMLTTPEEPQSIVPRLRTRNTRTDAILLGHYRLSQDTDNQTKVFAVITKKKEEKPLDYKYRYFRRVPVQEADQSFHVGLQLCSSGHQRFNKLIWIHHSCHITYKSTGETAVSAFEIDKMYTPLFFARVRSYTAFSERPL

SEQ ID NO: 891328 - protein, 315 aa, Homo sapiens [sequence omitted]

SEQ ID NO: 891329 - protein, 437 aa, Homo sapiens; identical to SEQ ID NO: 891315

SEQ ID NO: 891330 - protein, 392 aa, Homo sapiens
CNSYIEYSDKNTEGHFAGSLQKTSADTKGKQEQAKEEKARELFLKAVEEEQNGALYEAIKFYRRAMQLVPDIEFKITYTRSPDGDGVGNSYIEDNDDDSKMADLLSYFQQQLTFQESVLKLCQPELESSQIHISVLPMEVLMYIFRWVVSSDLDLRSLEQLSLVCRGFYICARDPEIWRLACLKVWGRSCIKLVPYTSWREMFLERPRVRFDGVYISKTTYIRQGEQSLDGFYRAWHQVEYYRYIRFFPDGHVMMLTTPEEPQSIVPRLRTRNTRTDAILLGHYRLSQDTDNQTKVFAVITKKKEEKPLDYKYRYFRRVPVQEADQSFHVGLQLCSSGHQRFNKLIWIHHSCHITYKSTGETAVSAFEIDKMYTPLFFARVRSYTAFSERPL

SEQ ID NO: 891331 - protein, 463 aa, Homo sapiens
MAEAEEDCHSDTVRADDDEENESPAETDLQAQLQMFRAQWMFELAPGVSSSNLENRPCRAARGSLQKTSADTKGKQEQAKEEKARELFLKAVEEEQNGALYEAIKFYRRAMQLVPDIEFKITYTRSPDGDGVGNSYIEDNDDDSKMADLLSYFQQQLTFQESVLKLCQPELESSQIHISVLPMEVLMYIFRWVVSSDLDLRSLEQLSLVCRGFYICASWRVVVQSWRKLGEFIKQSGVRVDNNRDPEIWRLACLKVWGRSCIKLVPYTSWREMFLERPRVRFDGVYISKTTYIRQGEQSLDGFYRAWHQVEYYRYIRFFPDGHVMMLTTPEEPQSIVPRLRTRNTRTDAILLGHYRLSQDTDNQTKVFAVITKKKEEKPLDYKYRYFRRVPVQEADQSFHVGLQLCSSGHQRFNKLIWIHHSCHITYKSTGETAVSAFEIDKMYTPLFFARVRSYTAFSERPL

SEQ ID NO: 891332 - protein, 437 aa, Homo sapiens; identical to SEQ ID NO: 891315

SEQ ID NO: 891333 - protein, 437 aa, Homo sapiens; identical to SEQ ID NO: 891315

SEQ ID NO: 891334 - protein, 264 aa, Homo sapiens
MIFLLPVLPMEVLMYIFRWVVSSDLDLRSLEQLSLVCRGFYICARDPEIWRLACLKVWGRSCIKLVPYTSWREMFLERPRVRFDGVYISKTTYIRQGEQSLDGFYRAWHQVEYYRYIRFFPDGHVMMLTTPEEPQSIVPRLRTRNTRTDAILLGHYRLSQDTDNQTKVFAVITKKKEEKPLDYKYRYFRRVPVQEADQSFHVGLQLCSSGHQRFNKLIWIHHSCHITYKSTGETAVSAFEIDKMYTPLFFARVRSYTAFSERPL

SEQ ID NO: 891335 - protein, 389 aa, Homo sapiens
MAEAEEDCHSDTVRADDDEENESPAETDLQAQLQMFRAQWMFELAPGVSSSNLENRPCRAARGSLQKTSADTKGKQEQAKEEKARELFLKAVEEEQNGALYEAIKFYRRAMQLVPDIEFKITYTRSPDGDGVGNSYIEDNDDDSKMADLLSYFQQQLTFQESVLKLCQPELESSQIHISVLPMEVLMYIFRWVVSSDLDLRSLEQLSLVCRGFYICARDPEIWRLACLKVWGRSCIKLVPYTSWREMFLERPRVRFDGVYISKTTYIRQGEQSLDGFYRAWHQVEYYRYIRFFPDGHVMMLTTPEEPQSIVPRLRTRNTRTDAILLGHYRLSQDTDNQTKVFAVITKKKEEKPLDYKYRYFRRVPVQEADQSFHVGLQPFRYSHLGTAI

SEQ ID NO: 891336 - protein, 315 aa, Homo sapiens [sequence omitted]

SEQ ID NO: 891337 - protein, 239 aa, Homo sapiens
RRFTRAEKASRGSRVLRALKDPEIWRLACLKVWGRSCIKLVPYTSWREMFLERPRVRFDGVYISKTTYIRQGEQSLDGFYRAWHQVEYYRYIRFFPDGHVMMLTTPEEPQSIVPRLRTRNTRTDAILLGHYRLSQDTDNQTKVFAVITKKKEEKPLDYKYRYFRRVPVQEADQSFHVGLQLCSSGHQRFNKLIWIHHSCHITYKSTGETAVSAFEIDKMYTPLFFARVRSYTAFSERPL

SEQ ID NO: 891338 - protein, 181 aa, Homo sapiens
MGVYISKTTYIRQGEQSLDGFYRAWHQVEYYRYIRFFPDGHVMMLTTPEEPQSIVPRLRTRNTRTDAILLGHYRLSQDTDNQTKVFAVITKKKEEKPLDYKYRYFRRVPVQEADQSFHVGLQLCSSGHQRFNKLIWIHHSCHITYKSTGETAVSAFEIDKMYTPLFFARVRSYTAFSERPL

SEQ ID NO: 891339 - protein, 315 aa, Homo sapiens [sequence omitted]

SEQ ID NO: 891340 - protein, 271 aa, Homo sapiens
MAEAEEDCHSDTVRADDDEENESPAETDLQAQLQMFRAQWMFELAPGVSSSNLENRPCRAARGSLQKTSADTKGKQEQAKEEKARELFLKAVEEEQNGALYEAIKFYRRAMQLVPDIEFKITYTRSPDGDGVGNSYIEDNDDDSKMADLLSYFQQQLTFQESVLKLCQPELESSQIHISVLPMEVLMYIFRWVVSSDLDLRSLEQLSLVCRGFYICARDPEIWRLACLKVWGRSCIKLVPYTSWREMFLERPRVRFDGKLDSVELSRNTDL

SEQ ID NO: 891341 - protein, 117 aa, Homo sapiens [sequence omitted]

SEQ ID NO: 891342 - protein, 112 aa, Homo sapiens
  misc_feature (2)..(2): Xaa can be any naturally occurring amino acid
SXNFGRGRGYDCCHMAHEHGHEHGHHKMELPDYRQWKIEGTPLETIQKKLAAKGLRDPWGRNEAWRYMGGFAKSVSFSDVFFKGFKWGFAAFVVAVGAEYYLESLNKDKKHH

SEQ ID NO: 891343 - protein, 112 aa, Homo sapiens; identical to SEQ ID NO: 891342
  misc_feature (2)..(2): Xaa can be any naturally occurring amino acid

SEQ ID NO: 891344 - protein, 112 aa, Homo sapiens
MAQVECPERSDCCHMAHEHGHEHGHHKMELPDYRQWKIEGTPLETIQKKLAAKGLRDPWGRNEAWRYMGGFAKSVSFSDVFFKGFKWGFAAFVVAVGAEYYLESLNKDKKHH

SEQ ID NO: 891345 - protein, 96 aa, Homo sapiens
MGGGPRVVTGPGVPRKPGQGTGVGSPHKKRAGTRGSDNPSGFGPPVHTRAQEAHTPPRGGERQRRKRKKNTRRGKNNGKKERREQKAKKTQHKRHT

SEQ ID NO: 891346 - protein, 269 aa, Homo sapiens
MARASSGNGSEEAWGALRAPQQQLRELCPGVNNQPYLCESGHCCGETGCCTYYYELWWFWLLWTVLILFSCCCAFRHRRAKLRLQQQQRQREINLLAYHGACHGAGPFPTGSLLDLRFLSTFKPPAYEDVVHRPGTPPPPYTVAPGRPLTASSEQTCCSSSSSCPAHFEGTNVEGVSSHQSAPPHQEGEPGAGVTPASTPPSCRYRRLTGDSGIELCPCPASGEGEPVKEVRVSATLPDLEDYSPCALPPESVPQIFPMGLSSSEGDIP

SEQ ID NO: 891347 - protein, 128 aa, Homo sapiens [sequence omitted]

SEQ ID NO: 891348 - protein, 128 aa, Homo sapiens [sequence omitted]

SEQ ID NO: 891349 - protein, 128 aa, Homo sapiens [sequence omitted]

SEQ ID NO: 891350 - protein, 325 aa, Homo sapiens
MCLLSQQSPAASSLEGAIWRRAGTQTRALDAILYHPQQSHLTDSCYSKSSSTLTAFRYFNTPLSILHFPHLSKLNLVHRLRELCPGVNNQPYLCESGHCCGETGCCTYYYELWWFWLLWTVLILFSCCCAFRHRRAKLRLQQQQRQREINLLAYHGACHGAGPFPTGSLLDLRFLSTFKPPAYEDVVHRPGTPPPPYTVAPGRPLTASSEQTCCSSSSSCPAHFEGTNVEGVSSHQSAPPHQEGEPGAGVTPASTPPSCRYRRLTGDSGIELCPCPASGEGEPVKEVRVSATLPDLEDYSPCALPPESVPQIFPMGLSSSEGDIP

SEQ ID NO: 891351 - protein, 128 aa, Homo sapiens [sequence omitted]

SEQ ID NO: 891352 - protein, 325 aa, Homo sapiens
MVASAKMGRAGTMAVAAESPAASSLEGAIWRRAGTQTRALDAILYHPQQSHLCQPFRYFNTPLSILHFPHLSKLNLVHRLRELCPGVNNQPYLCESGHCCGETGCCTYYYELWWFWLLWTVLILFSCCCAFRHRRAKLRLQQQQRQREINLLAYHGACHGAGPFPTGSLLDLRFLSTFKPPAYEDVVHRPGTPPPPYTVAPGRPLTASSEQTCCSSSSSCPAHFEGTNVEGVSSHQSAPPHQEGEPGAGVTPASTPPSCRYRRLTGDSGIELCPCPASGEGEPVKEVRVSATLPDLEDYSPCALPPESVPQIFPMGLSSSEGDIP

SEQ ID NO: 891353 - protein, 303 aa, Homo sapiens
MARASSGNGSEEAWGALRAPQQQSPAASSLEGAIWRRAGTQTRALDAILYHPQQSHLLRELCPGVNNQPYLCESGHCCGETGCCTYYYELWWFWLLWTVLILFSCCCAFRHRRAKLRLQQQQRQREINLLAYHGACHGAGPFPTGSLLDLRFLSTFKPPAYEDVVHRPGTPPPPYTVAPGRPLTASSEQTCCSSSSSCPAHFEGTNVEGVSSHQSAPPHQEGEPGAGVTPASTPPSCRYRRLTGDSGIELCPCPASGEGEPVKEVRVSATLPDLEDYSPCALPPESVPQIFPMGLSSSEGDIP

SEQ ID NO: 891354 - protein, 264 aa, Homo sapiens
MVASAKMGRAGTMAVAAELRELCPGVNNQPYLCESGHCCGETGCCTYYYELWWFWLLWTVLILFSCCCAFRHRRAKLRLQQQQRQREINLLAYHGACHGAGPFPTGSLLDLRFLSTFKPPAYEDVVHRPGTPPPPYTVAPGRPLTASSEQTCCSSSSSCPAHFEGTNVEGVSSHQSAPPHQEGEPGAGVTPASTPPSCRYRRLTGDSGIELCPCPASGEGEPVKEVRVSATLPDLEDYSPCALPPESVPQIFPMGLSSSEGDIP

SEQ ID NO: 891355 - protein, 126 aa, Homo sapiens
MPIFSPAASSEQTCCSSSSSCPAHFEGTNVEGVSSHQSAPPHQEGEPGAGVTPASTPPSCRYRRLTGDSGIELCPCPASGEGEPVKEVRVSATLPDLEDYSPCALPPESVPQIFPMGLSSSEGDIP

SEQ ID NO: 891356 - protein, 262 aa, Homo sapiens
MAAVEACGGSPVTRGILRELCPGVNNQPYLCESGHCCGETGCCTYYYELWWFWLLWTVLILFSCCCAFRHRRAKLRLQQQQRQREINLLAYHGACHGAGPFPTGSLLDLRFLSTFKPPAYEDVVHRPGTPPPPYTVAPGRPLTASSEQTCCSSSSSCPAHFEGTNVEGVSSHQSAPPHQEGEPGAGVTPASTPPSCRYRRLTGDSGIELCPCPASGEGEPVKEVRVSATLPDLEDYSPCALPPESVPQIFPMGLSSSEGDIP

SEQ ID NO: 891357 - protein, 273 aa, Homo sapiens
MSSGGSGCSGLSSSSLAAVAPSATDELNSGCNNSSGSVKSTCWPIMGHAMGLVLSLPVHCLTFVSDLMPWVSYQWPSPNQNPKSSHIPFSTHFKVFFPNIKTSTLYLVVFNQSCQFSPLQGFLSTFKPPAYEDVVHRPGTPPPPYTVAPGRPLTASSEQTCCSSSSSCPAHFEGTNVEGVSSHQSAPPHQEGEPGAGVTPASTPPSCRYRRLTGDSGIELCPCPASGEGEPVKEVRVSATLPDLEDYSPCALPPESVPQIFPMGLSSSEGDIP

SEQ ID NO: 891358 - protein, 269 aa, Homo sapiens; identical to SEQ ID NO: 891346

SEQ ID NO: 891359 - protein, 269 aa, Homo sapiens; identical to SEQ ID NO: 891346

SEQ ID NO: 891360 - protein, 128 aa, Homo sapiens [sequence omitted]

SEQ ID NO: 891361 - protein, 128 aa, Homo sapiens [sequence omitted]

SEQ ID NO: 891362 - protein, 128 aa, Homo sapiens [sequence omitted]

SEQ ID NO: 891363 - protein, 128 aa, Homo sapiens [sequence omitted]

SEQ ID NO: 891364 - protein, 128 aa, Homo sapiens [sequence omitted]

SEQ ID NO: 891365 - protein, 110 aa, Homo sapiens
PVRKFPGRLTTTKLTAASTPDSWKTLDQQQFFTEEELKEYENIIALQENELKKKADELQKQKEELQRQHDQLEAQKLEYHQVIQQMEQKKLQQGIPPSGPAGELKFEPHI

SEQ ID NO: 891366 - protein, 420 aa, Homo sapiens
MRWRTILLQYCFLLITCLLTALEAVPIDIDKTKVQNIHPVESAKIEPPDTGLYYDEYLKQVIDVLETDKHFREKLQKADIEEIKSGRLSKELDLVSHHVRTKLDELKRQEVGRLRMLIKAKLDSLQDIGMDHQALLKQFDHLNHLNPDKFESTDLDMLIKAATSDLEHYDKTRHEEFKKYEMMKEHERREYLKTLNEEKRKEEESKFEEMKKKHENHPKVNHPGSKDQLKEVWEETDGLDPNDFDPKTFFKLHDVNSDGFLDEQELEALFTKELEKVYDPKNEEDDMVEMEEERLRMREHVMNEVDTNKDRLVTLEEFLKATEKKEFLEPDSWETLDQQQFFTEEELKEYENIIALQENELKKKADELQKQKEELQRQHDQLEAQKLEYHQVIQQMEQKKLQQGIPPSGPAGELKFEPHI

SEQ ID NO: 891367 - protein, 421 aa, Homo sapiens
MMRWRTILLQYCFLLITCLLTALEAVPIDIDKTKVQNIHPVESAKIEPPDTGLYYDEYLKQVIDVLETDKHFREKLQKADIEEIKSGRLSKELDLVSHHVRTKLDELKRQEVGRLRMLIKAKLDSLQDIGMDHQALLKQFDHLNHLNPDKFESTDLDMLIKAATSDLEHYDKTRHEEFKKYEMMKEHERREYLKTLNEEKRKEEESKFEEMKKKHENHPKVNHPGSKDQLKEVWEETDGLDPNDFDPKTFFKLHDVNSDGFLDEQELEALFTKELEKVYDPKNEEDDMVEMEEERLRMREHVMNEVDTNKDRLVTLEEFLKATEKKEFLEPDSWETLDQQQFFTEEELKEYENIIALQENELKKKADELQKQKEELQRQHDQLEAQKLEYHQVIQQMEQKKLQQGIPPSGPAGELKFEPHI

SEQ ID NO: 891368 - protein, 424 aa, Homo sapiens
MRWRTILLQYCFLLITCLLTALEAVPIDIDKTKVQNIHPVESAKIEPPDTGLYYDEYLKQVIDVLETDKHFREKLQKADIEEIKSGRLSKELDLVSHHVRTKLDELKRQEVGRLRMLIKAKLDSLQDIGMDHQALLKQFDHLNHLNPDKFESTDLDMLIKAATSDLEHYDKTRHEEFKKYEMMKEHERREYLKTLNEEKRKEEESKFEEMKKKHENHPKVNHPGSKDQLKEVWEETDGLDPNDFDPKTFFKLHDVNSDGFLDEQELEALFTKELEKVYDPKNEEDDMVEMEEERLRMREHVMNEVDTNKDRLVTLEEFLKATEKKEFLEPDSWETLDQQQFFTEEELKEYENIIALQENELKKKADELQKQKEELQRQHDQLEAQKLEYHQVIQQMEQKKLQQGIPPSGPAGELKFEPRPEVSF

SEQ ID NO: 891369 - protein, 420 aa, Homo sapiens
MRWRTILLQYCFLLITCLLTALEAVPIDIDKTKVQNIHPVESAKIEPPDTGLYYDEYLKQVIDVLETDKHFREKLQKADIEEIKSGRLSKELDLVSHHVRTKLDELKRQEVGRLRMLIKAKLDSLQDIGMDHQALLKQFDHLNHLNPDKFESTDLDMLIKAATSDLEHYDKTRHEEFKKYEMMKEHERREYLKTLNEEKRKEEESKFEEMKKKHENHPKVNHPGSKDQLKEVWEETDGLDPNDFDPKTFFKLHDVNSDGFLDEQELEALFTKELEKVYDPKNEEDDMVEMEEERLRMREHVMNEVDTNKDRLVTLEEFLKATEKKEFLEPDSWETLDQQQFFTEEELKEYENIIALQENELKKKADELQKQKEELQRQHDQLEAQKLEYHQVIQQMEQKKLQQGIPPSGPAGELKFEPRV

SEQ ID NO: 891370 - protein, 373 aa, Homo sapiens
SCSEDPRLKESKQVIDVLETDKHFREKLQKADIEEIKSGRLSKELDLVSHHVRTKLDELKRQEVGRLRMLIKAKLDSLQDIGMDHQALLKQFDHLNHLNPDKFESTDLDMLIKAATSDLEHYDKTRHEEFKKYEMMKEHERREYLKTLNEEKRKEEESKFEEMKKKHENHPKVNHPGSKDQLKEVWEETDGLDPNDFDPKTFFKLHDVNSDGFLDEQELEALFTKELEKVYDPKNEEDDMVEMEEERLRMREHVMNEVDTNKDRLVTLEEFLKATEKKEFLEPDSWETLDQQQFFTEEELKEYENIIALQENELKKKADELQKQKEELQRQHDQLEAQKLEYHQVIQQMEQKKLQQGIPPSGPAGELKFEPHI

SEQ ID NO: 891371 - protein, 257 aa, Homo sapiens
PTSHFFTFSRHEEFKKYEMMKEHERREYLKTLNEEKRKEEESKFEEMKKKHENHPKVNHPGSKDQLKEVWEETDGLDPNDFDPKTFFKLHDVNSDGFLDEQELEALFTKELEKVYDPKNEEDDMVEMEEERLRMREHVMNEVDTNKDRLVTLEEFLKATEKKEFLEPDSWETLDQQQFFTEEELKEYENIIALQENELKKKADELQKQKEELQRQHDQLEAQKLEYHQVIQQMEQKKLQQGIPPSGPAGELKFEPHI

SEQ ID NO: 891372 - protein, 227 aa, Homo sapiens
NSRSRRRKEEESKFEEMKKKHENHPKVNHPGSKDQLKEVWEETDGLDPNDFDPKTFFKLHDVNSDGFLDEQELEALFTKELEKVYDPKNEEDDMVEMEEERLRMREHVMNEVDTNKDRLVTLEEFLKATEKKEFLEPDSWETLDQQQFFTEEELKEYENIIALQENELKKKADELQKQKEELQRQHDQLEAQKLEYHQVIQQMEQKKLQQGIPPSGPAGELKFEPHI

SEQ ID NO: 891373 - protein, 390 aa, Homo sapiens
MRWRTILLQYCFLLITCLLTALEAVPIDIDKTKVQNIHPVESAKIEPPDTGLYYDEYLKQVIDVLETDKHFREKLQKADIEEIKSGRLSKELDLVSHHVRTKLDELKRQEVGRLRMLIKAKLDSLQDIGMDHQALLKQFDHLNHLNPDKFESTDLDMLIKAATSDLEHYDKTRHEEFKKYEMMKEHERREYLKTLNEEKRKEEESKFEEMKKKHENHPKVNHPGSKDQLKEVWEETDGLDPNDFDPKTFFKLHDVNSDGFLDEQELEALFTKELEKVYDPKNEEDDMVEMEEERLRMREHVMNETLDQQQFFTEEELKEYENIIALQENELKKKADELQKQKEELQRQHDQLEAQKLEYHQVIQQMEQKKLQQGIPPSGPAGELKFEPHI

SEQ ID NO: 891374 - protein, 341 aa, Homo sapiens
MRWRTILLQYCFLLITCLLTALEAVPIDIDKTKVQNIHPVESAKIEPPDTGLYYDEYLKQVIDVLETDKHFREKLQKADIEEIKSGRLSKELDLVSHHVRTKLDELKRQEVGRLRMLIKAKLDSLQDIGMDHQALLKQFDHLNHLNPDKFESTDLDMLIKAATSDLEHYDKTRHEEFKKYEMMKEHERREYLKTLNEEKRKEEESKFEEMKKKHENHPKVNHPGSKDQLKEVWEETDGLDPNDFDPKTFFKLHDVNSDGFLDEQELEALFTKELEKVYDPKNEEDDMVEMEEERLRMREHVMNESWVPIYIDSNSSMRCVHVALPDLAQGHRIVSAQSHVI

SEQ ID NO: 891375 - protein, 420 aa, Homo sapiens; identical to SEQ ID NO: 891366

SEQ ID NO: 891376 - protein, 420 aa, Homo sapiens; identical to SEQ ID NO: 891366

SEQ ID NO: 891377 - protein, 420 aa, Homo sapiens; identical to SEQ ID NO: 891366

SEQ ID NO: 891378 - protein, 424 aa, Homo sapiens; identical to SEQ ID NO: 891368

SEQ ID NO: 891379 - protein, 347 aa, Homo sapiens
MVQEAEIEEIKSGRLSKELDLVSHHVRTKLDELKRQEVGRLRMLIKAKLDSLQDIGMDHQALLKQFDHLNHLNPDKFESTDLDMLIKAATSDLEHYDKTRHEEFKKYEMMKEHERREYLKTLNEEKRKEEESKFEEMKKKHENHPKVNHPGSKDQLKEVWEETDGLDPNDFDPKTFFKLHDVNSDGFLDEQELEALFTKELEKVYDPKNEEDDMVEMEEERLRMREHVMNEVDTNKDRLVTLEEFLKATEKKEFLEPDSWETLDQQQFFTEEELKEYENIIALQENELKKKADELQKQKEELQRQHDQLEAQKLEYHQVIQQMEQKKLQQGIPPSGPAGELKFEPHI

SEQ ID NO: 891380 - protein, 390 aa, Homo sapiens; identical to SEQ ID NO: 891373

SEQ ID NO: 891381 - protein, 363 aa, Homo sapiens
MRWRTILLQYCFLLITCLLTALEAVPIDIDKTKVQNIHPVESAKIEPPDTGLYYDEYLKQVIDVLETDKHFREKLQKADIEEIKSGRLSKELDLVSHHVRTKLDELKRQEVGRLRMLIKAKLDSLQDIGMDHQALLKQFDHLNHLNPDKFESTDLDMLIKAATSDLEHYDKTRHEEFKKYEMMKEHERREYLKTLNEEKRKEEESKFEEMKKKHENHPKVNHPGSKDQLKEVWEETDGLDPNDFDPKTFFKLHDVNSDGFLDEQELEALFTKELEKVYDPKNEEDDMVEMEEERLRMREHVMNEVDTNKDRLVTLEEFLKATEKKEFLEPDSWEVIQQMEQKKLQQGIPPSGPAGELKFEPHI

SEQ ID NO: 891382 - protein, 385 aa, Homo sapiens
MRWRTILLQYCFLLITCLLTALEAVPIDIDKTKVQNIHPVESAKIEPPDTGLYYDEYLKQVIDVLETDKHFREKLQKADIEEIKSGRLSKELDLVSHHVRTKLDELKRQEVGRLRMLIKAKLDSLQDIGMDHQALLKQFDHLNHLNPDKFESTDLDMLIKAATSDLEHYDKTRHEEFKKYEMMKEHERREYLKTLNEEKRKEEESKFEEMKKKHENHPKVNHPGSKDQLKEVWEETDGLDPNDFDPKTFFKLHDVNSDGFLDEQELEALFTKELDTTYIERLKIDDRWYWVRTLAASKRLRNARDLRMNRRVDTQPKDRNCGNPWTETFGKGPETQKKFLGPQLLGNTLADRECFLKGKNLYDTLTMYCCVYETRVHNNRHWMFS

SEQ ID NO: 891383 - protein, 1182 aa, Homo sapiens
MCSTNPGKWVTFDDDPAVQSSQKSKNFPLENQGVCRPNGLKLNLPGLREFPSGSSSTSSTPLSSPIVDFYFSPGPPSNSPLSTPTKDFPGFPGIPKAGTHVLYPIPESSSDSPLAISGGESSLLPTRPTCLSHALLPSDHSCTHPTPKVGLPDEVNPQQAESLGFQSDDLPQFQYFREDCAFSSPFRKDEGSDSHFTLDPPGSKKMFSSRNKEMPIDQKSLNKCSLNYICEKLEHLQSAENQDSLRSLSMHCLCAEENASSFVPHTLFRSQPKSGWSFMLRIPEKKNMMSSRQWGPIFLKVLPGGILQMYYEQGLEKPFKEIQLDPYCRLSEPKVENFSVAGKIHTVKIEHVSYTEKRKYHSKTEVVHEPDIEQMLKLGSTSYHDFLDFLTTVEEELMKLPAVSKPKKNYEEQEISLEIVDNFWGKVTKEGKFVESAVITQIYCLCFVNGNLECFLTLNDLELPKRDESYYEKDSEKKGIDILDYHFHKCVNVQEFEQSRIIKFVPLDACRFELMRFKTLYNGDNLPFSLKSVVVVQGAYVELQAFVNMASLAQRSSYAGSLRSCDNIRIHFPVPSQWIKALWTMNLQRQKSLKAKMNRRACLGSLQELESEPVIQVTVGSAKYESAYQAVVWKIDRLPDKNSSLDHPHCLSYKLELGSDQEIPSDWYPFATVQFSVPDTCASRTEVRSLGVESDVQPQKHVQQRACYNIQPKLYRSVIEDVIEGVRNLFAEEGIEEQVLKDLKQLWETKVLQSKATEDFFRNSIQSPLFTLQLPHSLHQTLQSSTASLVIPAGRTLPSFTTAELGTSNSSANFTFPGYPIHVPAGVTLQTVSGHLYKVNVPIMVTETSGRAGILQHPIQQVFQQLGQPSVIQTSVPQLNPWSLQATTEKSQRIETVLQQPAILPSGPVDRKHLENATSDILVSPGNEHKIVPEALLCHQESSHYISLPGVVFSPQVSQTNSDVESVLSGSASMAQNLHDESLSTSPHGALHQHVTDIQLHILKNRMYGCDSVKQPRNIEEPSNIPVSEKDSNSQVDLSIRVTDDDIGEIIQVDGSGDTSSNEEIGSTRDADENEFLGNIDGGDLKVPEEEADSISNEDSATNSSDNEDPQVNIVEEDPLNSGDDVSEQDVPDLFDTDNVIVCQYDKIHRSKNKWKFYLKDGVMCFGGRDYVFAKAIGDAEW

SEQ ID NO: 891384 - protein, 501 aa, Homo sapiens
PSVSLRGHCVPRRRKGPGAGGAVMACLNPVPKLYRSVIEDVIEGVRNLFAEEGIEEQVLKDLKQLWETKVLQSKATEDFFRNSIQSPLFTLQLPHSLHQTLQSSTASLVIPAGRTLPSFTTAELGTSNSSANFTFPGYPIHVPAGVTLQTVSGHLYKVNVPIMVTETSGRAGILQHPIQQVFQQLGQPSVIQTSVPQLNPWSLQATTEKSQRIETVLQQPAILPSGPVDRKHLENATSDILVSPGNEHKIVPEALLCHQESSHYISLPGVVFSPQVSQTNSDVESVLSGSASMAQNLHDESLSTSPHGALHQHVTDIQLHILKNRMYGCDSVKQPRNIEEPSNIPVSEKDSNSQVDLSIRVTDDDIGEIIQVDGSGDTSSNEEIGSTRDADENEFLGNIDGGDLKVPEEEADSISNEDSATNSSDNEDPQVNIVEEDPLNSGDDVSEQDVPDLFDTDNVIVCQYDKIHRSKNKWKFYLKDGVMCFGGRDYVFAKAIGDAEW

SEQ ID NO: 891385 - protein, 735 aa, Homo sapiens
MCSTNPGKWVTFDDDPAVQSSQKSKNFPLENQGVCRPNGLKLNLPGLREFPSGSSSTSSTPLSSPIVDFYFSPGPPSNSPLSTPTKDFPGFPGIPKAGTHVLYPIPESSSDSPLAISGGESSLLPTRPTCLSHALLPSDHSCTHPTPKVGLPDEVNPQQAESLGFQSDDLPQFQYFREDCAFSSPFRKDEGSDSHFTLDPPGSKKMFSSRNKEMPIDQKSLNKCSLNYICEKLEHLQSAENQDSLRSLSMHCLCAEENASSFVPHTLFRSQPKSGWSFMLRIPEKKNMMSSRQWGPIFLKVLPGGILQMYYEQGLEKPFKEIQLDPYCRLSEPKVENFSVAGKIHTVKIEHVSYTEKRKYHSKTEVVHEPDIEQMLKLGSTSYHDFLDFLTTVEEELMKLPAVSKPKKNYEEQEISLEIVDNFWGKVTKEGKFVESAVITQIYCLCFVNGNLECFLTLNDLELPKRDESYYEKDSEKKGIDILDYHFHKCVNVQEFEQSRIIKFVPLDACRFELMRFKTLYNGDNLPFSLKSVVVVQGAYVELQAFVNMASLAQRSSYAGSLRSCDNIRIHFPVPSQWIKALWTMNLQRQKSLKAKMNRRACLGSLQELESEPVIQVTVGSAKYESAYQAVVWKIDRLPDKNSSLDHPHCLSYKLELGSDQEIPSDWYPFATVQFSVPDTCASRTEVRSLGVESDVQPQKHVQQRACYNIQVEIEKKWIKIDGEDPDKIGDCITQ

SEQ ID NO: 891386 - protein, 735 aa, Homo sapiens; identical to SEQ ID NO: 891385

SEQ ID NO: 891387 - protein, 735 aa, Homo sapiens; identical to SEQ ID NO: 891385

SEQ ID NO: 891388 - protein, 476 aa, Homo sapiens
PSVSLRGHCVPRRRKGPGAGGAVMACLNPVPKLYRSVIEDVIEGVRNLFAEEGIEEQVLKDLKQLWETKVLQSKATEDFFRNSIQSPLFTLQLPHSLHQTLQSSTASLVIPAGRTLPSFTTAELGTSNSSANFTFPGYPIHVPAGVTLQTVSGHLYKVNVPIMVTETSGRAGILQHPIQQVFQQLGQPSVIQTSVPQLNPWSLQATTEKSQRIETVLQQPAILPSGPVDRKHLENATSDILVSPGNEHKIVPEALLCHQESSHYISLPGVVFSPQVSQTNSDVESVLSGSASMAQNLHDESLSTSPHGALHQHVTDIQLHILKNRMYGCDSVKQPRNIEEPSNIPVSEKDSNSQVDLSIRVTDDDIGEIIQVDGSGDTSSNEEIGSTRDADENEFLGNIDGGDLKVPEEEADSISNEDSATNSSDNEDPQVNIVEEDPLNSGDDVSEQDVPDLFDTDNVIVCQYDKAFPRRTSFNT

SEQ ID NO: 891389 - protein, 129 aa, Homo sapiens
MCSTNPGKWVTFDDDPAVQSSQKSKNFPLENQGVCRPNGLKLNLPGLREFPSGSSSTSSTPLSSPIVDFYFSPGPPSNSPLSTPTKDFPGFPGIPKAGTHVLYPIPESSSDSTSTPAPARIPLAPARIP

SEQ ID NO: 891390 - protein, 437 aa, Homo sapiens
MPKFKAARGVGGQEKHAPLADQILAGNAVRAGVREKRRGRGTGEAEEEYVGPRLSRRILQQARQQQEELEAEHGTGDKPAAPRERTTRLGPRMPQDGSDDEDEEWPTLEKAATMTAAGHHAEVVVDPEDERAIEMFMNKNPPARRTLADIIMEKLTEKQTEVETVMSEVSGFPMPQLDPRVLEVYRGVREVLSKYRSGKLPKAFKIIPALSNWEQILYVTEPEAWTAAAMYQATRIFASNLKERMAQRFYNLVLLPRVRDDVAEYKRLNFHLYMALKKALFKPGAWFKGILIPLCESGTCTLREAIIVGSIITKCSIPVLHSSAAMLKIAEMEYSGANSIFLRLLLDKKYALPYRVLDALVFHFLGFRTEKRELPVLWHQCLLTLVQRYKADLATDQKEALLELLRLQPHPQLSPEIRRELQSAVPRDVEDVPITVE

SEQ ID NO: 891391 - protein, 437 aa, Homo sapiens; identical to SEQ ID NO: 891390

SEQ ID NO: 891392 - protein, 437 aa, Homo sapiens; identical to SEQ ID NO: 891390

SEQ ID NO: 891393 - protein, 437 aa, Homo sapiens; identical to SEQ ID NO: 891390

SEQ ID NO: 891394 - protein, 32 aa, Homo sapiens
MPKFKAARGVGGQEKHAPLADQILAGNAVRAG

SEQ ID NO: 891395 - protein, 437 aa, Homo sapiens; identical to SEQ ID NO: 891390

SEQ ID NO: 891396 - protein, 445 aa, Homo sapiens
MPKFKAARGVGGQEKHAPLADQILAGNAVRAGVREKRRGRGTGEAEEEYVGPRLSRRILQQARQQQEELEAEHGTGDKPAAPRERTTRLGPRMPQDGSDDEDEEWPTLEKAATMTAAGHHAEVVVDPEDERAIEMFMNKNPPARRTLADIIMEKLTEKQTEVETVMSEVSGFPMPQLDPRVLEVYRGVREVLSKYRSGKLPKAFKIIPALSNWEQILYVTEPEAWTAAAMYQATRIFASNLKERMAQRFYNLVLLPRVRDDVAEYKRLNFHLYMALKKALFKPGAWFKVAALCLSLGILIPLCESGTCTLREAIIVGSIITKCSIPVLHSSAAMLKIAEMEYSGANSIFLRLLLDKKYALPYRVLDALVFHFLGFRTEKRELPVLWHQCLLTLVQRYKADLATDQKEALLELLRLQPHPQLSPEIRRELQSAVPRDVEDVPITVE

SEQ ID NO: 891397 - protein, 396 aa, Homo sapiens
  misc_feature (9)..(9): Xaa can be any naturally occurring amino acid
  misc_feature (47)..(47): Xaa can be any naturally occurring amino acid
  misc_feature (99)..(99): Xaa can be any naturally occurring amino acid
  misc_feature (102)..(102): Xaa can be any naturally occurring amino acid
  misc_feature (130)..(130): Xaa can be any naturally occurring amino acid
MTDGVSTRXSDAKRIGHELTAWGLRACMPQRYILGAETRAAITCTEXRRADTLGAGEQKTAWADQTEETQATTGVRSEGMPSRMASTSDRRDAGTLATXPEXDSSMRNTIEQLSRGSISADQSLALGHSXQGMSRASRDGSGTKEPSCQVLSKYRSGKLPKAFKIIPALSNWEQILYVTEPEAWTAAAMYQATRIFASNLKERMAQRFYNLVLLPRVRDDVAEYKRLNFHLYMALKKALFKPGAWFKGILIPLCESGTCTLREAIIVGSIITKCSIPVLHSSAAMLKIAEMEYSGANSIFLRLLLDKKYALPYRVLDALVFHFLGFRTEKRELPVLWHQCLLTLVQRYKADLATDQKEALLELLRLQPHPQLSPEIRRELQSAVPRDVEDVPITVE

SEQ ID NO: 891398 - protein, 424 aa, Homo sapiens
MASDDFDIVIEAMLEAPYKKEEDEQQRKEVKKDYPSNTTSSTSNSGNETSGSSTIGETSNRSRDRDRYRRRNSRSRSPGRQCRHRSRSWDRRHGSESRSRDHRREDRVHYRSPPLATGYRYGHSKSPHFREKSPVREPVDNLSPEERDARTVFCMQLAARIRPRDLEDFFSAVGKVRDVRIISDRNSRRSKGIAYVEFCEIQSVPLAIGLTGQRLLGVPIIVQASQAEKNRLAAMANNLQKGNGGPMRLYVGSLHFNITEDMLRGIFEPFGKIDNIVLMKDSDTGRSKGYGFITFSDSECARRALEQLNGFELAGRPMRVGHVTERLDGGTDITFPDGDQELDLGSAGGRFQLMAKLAEGAGIQLPSTAAAAAAAAAAQAAALQLNGAVPLGALNPAALTALSPALNLASQCFQLSSLFTPQTM

SEQ ID NO: 891399 - protein, 406 aa, Homo sapiens
MASDDFDIVIEAMLEAPYKKEEDEQQRKEVKKDYPSNTTSSTSNSGNETSGSSTIGETSNRSRDRDRYRRRNSRSRSPGRQCRHRSRSWDRRHGSESRSRDHRREDRVHYRSPPLATGEPVDNLSPEERDARTVFCMQLAARIRPRDLEDFFSAVGKVRDVRIISDRNSRRSKGIAYVEFCEIQSVPLAIGLTGQRLLGVPIIVQASQAEKNRLAAMANNLQKGNGGPMRLYVGSLHFNITEDMLRGIFEPFGKIDNIVLMKDSDTGRSKGYGFITFSDSECARRALEQLNGFELAGRPMRVGHVTERLDGGTDITFPDGDQELDLGSAGGRFQLMAKLAEGAGIQLPSTAAAAAAAAAAQAAALQLNGAVPLGALNPAALTALSPALNLASQCFQLSSLFTPQTM

SEQ ID NO: 891400 - protein, 424 aa, Homo sapiens; identical to SEQ ID NO: 891398

SEQ ID NO: 891401 - protein, 424 aa, Homo sapiens; identical to SEQ ID NO: 891398

SEQ ID NO: 891402 - protein, 424 aa, Homo sapiens; identical to SEQ ID NO: 891398

SEQ ID NO: 891403 - protein, 440 aa, Homo sapiens
MASDDFDIVIEAMLEAPYKKEEDEQQRKEVKKDYPSNTTSSTSNSGNETSGSSTIGETSKKKRSRSHNKSRDRKRSRSRDRDRYRRRNSRSRSPGRQCRHRSRSWDRRHGSESRSRDHRREDRVHYRSPPLATGYRYGHSKSPHFREKSPVREPVDNLSPEERDARTVFCMQLAARIRPRDLEDFFSAVGKVRDVRIISDRNSRRSKGIAYVEFCEIQSVPLAIGLTGQRLLGVPIIVQASQAEKNRLAAMANNLQKGNGGPMRLYVGSLHFNITEDMLRGIFEPFGKIDNIVLMKDSDTGRSKGYGFITFSDSECARRALEQLNGFELAGRPMRVGHVTERLDGGTDITFPDGDQELDLGSAGGRFQLMAKLAEGAGIQLPSTAAAAAAAAAAQAAALQLNGAVPLGALNPAALTALSPALNLASQCFQLSSLFTPQTM

SEQ ID NO: 891404 - protein, 424 aa, Homo sapiens; identical to SEQ ID NO: 891398

SEQ ID NO: 891405 - protein, 424 aa, Homo sapiens; identical to SEQ ID NO: 891398

SEQ ID NO: 891406 - protein, 270 aa, Homo sapiens
MQLAARIRPRDLEDFFSAVGKVRDVRIISDRNSRRSKGIAYVEFCEIQSVPLAIGLTGQRLLGVPIIVQASQAEKNRLAAMANNLQKGNGGPMRLYVGSLHFNITEDMLRGIFEPFGKIDNIVLMKDSDTGRSKGYGFITFSDSECARRALEQLNGFELAGRPMRVGHVTERLDGGTDITFPDGDQELDLGSAGGRFQLMAKLAEGAGIQLPSTAAAAAAAAAAQAAALQLNGAVPLGALNPAALTALSPALNLASQCFQLSSLFTPQTM

SEQ ID NO: 891407 - protein, 542 aa, Homo sapiens
RAWSNFVFLVETEFLHVGQAGLELSTSGDLPALASQSAGITGVSHRAQPWVLFFLLNDIFVSIHLLLFIPPTAAILPSFHPSQPLVNTSLSIFMRFTLYIMDVLYFYTTGSAVGNEFGLHQYHHKHISNTLRHYSGCNITRLYELLSTVIILWDHCVYALGCWPKHDVGMTVVVSLCSRSRDRDRYRRRNSRSRSPGRQCRHRSRSWDRRHGSESRSRDHRREDRVHYRSPPLATGYRYGHSKSPHFREKSPVREPVDNLSPEERDARTVFCMQLAARIRPRDLEDFFSAVGKVRDVRIISDRNSRRSKGIAYVEFCEIQSVPLAIGLTGQRLLGVPIIVQASQAEKNRLAAMANNLQKGNGGPMRLYVGSLHFNITEDMLRGIFEPFGKIDNIVLMKDSDTGRSKGYGFITFSDSECARRALEQLNGFELAGRPMRVGHVTERLDGGTDITFPDGDQELDLGSAGGRFQLMAKLAEGAGIQLPSTAAAAAAAAAAQAAALQLNGAVPLGALNPAALTALSPALNLASQCFQLSSLFTPQTM

SEQ ID NO: 891408 - protein, 270 aa, Homo sapiens; identical to SEQ ID NO: 891406

SEQ ID NO: 891409 - protein, 422 aa, Homo sapiens
MASDDFDIVIEAMLEAPYKKEEDEQQRKEVKKDYPSNTTSSTSNSGNETSGSSTIGETSKKKRSRSHNKSRDRKRSRSRDRDRYRRRNSRSRSPGRQCRHRSRSWDRRHGSESRSRDHRREDRVHYRSPPLATGEPVDNLSPEERDARTVFCMQLAARIRPRDLEDFFSAVGKVRDVRIISDRNSRRSKGIAYVEFCEIQSVPLAIGLTGQRLLGVPIIVQASQAEKNRLAAMANNLQKGNGGPMRLYVGSLHFNITEDMLRGIFEPFGKIDNIVLMKDSDTGRSKGYGFITFSDSECARRALEQLNGFELAGRPMRVGHVTERLDGGTDITFPDGDQELDLGSAGGRFQLMAKLAEGAGIQLPSTAAAAAAAAAAQAAALQLNGAVPLGALNPAALTALSPALNLASQCFQLSSLFTPQTM

SEQ ID NO: 891410 - protein, 270 aa, Homo sapiens; identical to SEQ ID NO: 891406

SEQ ID NO: 891411 - protein, 270 aa, Homo sapiens; identical to SEQ ID NO: 891406

SEQ ID NO: 891412 - protein, 270 aa, Homo sapiens; identical to SEQ ID NO: 891406

SEQ ID NO: 891413 - protein, 304 aa, Homo sapiens
MTRYWEGWSQHISLFREPVDNLSPEERDARTVFCMQLAARIRPRDLEDFFSAVGKVRDVRIISDRNSRRSKGIAYVEFCEIQSVPLAIGLTGQRLLGVPIIVQASQAEKNRLAAMANNLQKGNGGPMRLYVGSLHFNITEDMLRGIFEPFGKIDNIVLMKDSDTGRSKGYGFITFSDSECARRALEQLNGFELAGRPMRVGHVTERLDGGTDITFPDGDQELDLGSAGGRFQLMAKLAEGAGIQLPSTAAAAAAAAAAQAAALQLNGAVPLGALNPAALTALSPALNLASQCFQLSSLFTPQTM

SEQ ID NO: 891414 - protein, 250 aa, Homo sapiens
MVRDVRIISDRNSRRSKGIAYVEFCEIQSVPLAIGLTGQRLLGVPIIVQASQAEKNRLAAMANNLQKGNGGPMRLYVGSLHFNITEDMLRGIFEPFGKIDNIVLMKDSDTGRSKGYGFITFSDSECARRALEQLNGFELAGRPMRVGHVTERLDGGTDITFPDGDQELDLGSAGGRFQLMAKLAEGAGIQLPSTAAAAAAAAAAQAAALQLNGAVPLGALNPAALTALSPALNLASQCFQLSSLFTPQTM

SEQ ID NO: 891415 - protein, 227 aa, Homo sapiens
NRLGRGRVLNRHRGGQRLLGVPIIVQASQAEKNRLAAMANNLQKGNGGPMRLYVGSLHFNITEDMLRGIFEPFGKIDNIVLMKDSDTGRSKGYGFITFSDSECARRALEQLNGFELAGRPMRVGHVTERLDGGTDITFPDGDQELDLGSAGGRFQLMAKLAEGAGIQLPSTAAAAAAAAAAQAAALQLNGAVPLGALNPAALTALSPALNLASQCFQLSSLFTPQTM

SEQ ID NO: 891416 - protein, 424 aa, Homo sapiens; identical to SEQ ID NO: 891398

SEQ ID NO: 891417 - protein, 116 aa, Homo sapiens
SVLGDLEDPGIEWHVTERLDGGTDITFPDGDQELDLGSAGGRFQLMAKLAEGAGIQLPSTAAAAAAAAAAQAAALQLNGAVPLGALNPAALTALSPALNLASQCFQLSSLFTPQTM

SEQ ID NO: 891418 - protein, 424 aa, Homo sapiens; identical to SEQ ID NO: 891398

SEQ ID NO: 891419 - protein, 130 aa, Homo sapiens
SQQLPASSLGGVTVRHECWVTGPQRRCTGWFEYLGSSNPSAVAAGPVLDLGSAGGRFQLMAKLAEGAGIQLPSTAAAAAAAAAAQAAALQLNGAVPLGALNPAALTALSPALNLASQCFQLSSLFTPQTM

SEQ ID NO: 891420 - protein, 101 aa, Homo sapiens
MVTRDELEARTSVLARPVLDLGSAGGRFQLMAKLAEGAGIQLPSTAAAAAAAAAAQAAALQLNGAVPLGALNPAALTALSPALNLASQCFQLSSLFTPQTM

SEQ ID NO: 891421 - protein, 194 aa, Homo sapiens
MASDDFDIVIEAMLEAPYKKEEDEQQRKEVKKDYPSNTTSSTSNSGNETSGSSTIGETSNRSRDRDRYRRRNSRSRSPGRQCRHRSRSWDRRHGSESRSRDHRREDRVHYRSPPLATGYRYGHSKSPHFREKSPVSSESSPEPCLPVFPALQPLYPPDHVNQWHSILPPCASGSCHFTSTLPWPHFSILWTKPS

SEQ ID NO: 891422 - protein, 424 aa, Homo sapiens; identical to SEQ ID NO: 891398

SEQ ID NO: 891423 - protein, 424 aa, Homo sapiens; identical to SEQ ID NO: 891398

SEQ ID NO: 891424 - protein, 424 aa, Homo sapiens; identical to SEQ ID NO: 891398

SEQ ID NO: 891425 - protein, 424 aa, Homo sapiens; identical to SEQ ID NO: 891398

SEQ ID NO: 891426 - protein, 122 aa, Homo sapiens
MASDDFDIVIEAMLEAPYKKEEDEQQRKEVKKDYPSNTTSSTSNSGNETSGSSTIGETSKKKRSRSHNKSRDRKRRSVILGQAQWLVSLILALWKPRREDHFRPGVQNQPGQHSKILSLQKI

SEQ ID NO: 891427 - protein, 280 aa, Homo sapiens
MASDDFDIVIEAMLEAPYKKEEDEQQRKEVKKDYPSNTTSSTSNSGNETSGSSTIGETSNRSRDRDRYRRRNSRSRSPGRQCRHRSRSWDRRHGSESRSRDHRREDRVHYRSPPLATGYRYGHSKSPHFREKSPVREPVDNLSPEERDARTVFCMQLAARIRPRDLEDFFSAVGKVRDVRIISDRNSRRSKGIAYVEFCEIQSVPLAIGLTGQRLLGVPIIVQASQAEKNRLAAMANNLQKGNGGPMRLYVGSLHFNITEDMLRGIFEPFGKVSRSERNL

SEQ ID NO: 891428 - protein, 43 aa, Homo sapiens
MANNLQKGNGGPMRLYVGSLHFNITEDMLRGIFEPFGKVSRSE

SEQ ID NO: 891429 - protein, 105 aa, Homo sapiens
SHAQAPGWCGGHRSHASAEVPPPEPRQPEGRPEDNGGEADPGCGNLQESSALDAPDRPLGSNNDKVSSGSGFILTCGFIFQHLSTLIQAQLVGFVTPQRTPSQMP

SEQ ID NO: 891430 - protein, 212 aa, Homo sapiens
AAAADSAQWLSVKEETIFLHDGLIRVTDLAELPSEILGAPEAADTDLEILTFETKNPSELAERLRSVCGNQSNAYARLLEYRLNALRGLWNAQRQLALEEQHERESSGGFKFFFSPQTERNRDIIRRSGLLLWQLLMAPKDQICPEIQKEVCLAISSGLNILYPGETEINNLLKLVLTEGERNSGLSQLRDVILTNLAEQLQNNRFGSDEDD

SEQ ID NO: 891431 - protein, 482 aa, Homo sapiens
RRAAADSAQWLSVKEETIFLHDGLIRVTDLAELPSEILGAPEAADTDLEILTFETKNPSELAERLRSVCGNQSNAYARLLEYRLNALRGLWNAQRQLALEEQHERESSGDEETLALLKRQGLLQQPEQAPFTSRMGLLLVFPLIQSQSRTDPSLCNITAEVLLNCLRDCQPLSLTKEPADCLNGIETLLCSWLEETSDTGRHIPHKQKENAAAALVALACARGSLKTFVHTVHLLQKQTDLGSLPVADVLYRLLLLEGGPGSPSCLLGGKHIVSWGYEDMLPAPDSNTGSSSENKDADLGRCLTADGLYLYTTNSVGRGVSKLGSGLHGTLRGFVYCRNEELEPGWVAFGSGSLLHRPVSFDNKPHSLFQVIDQNTLQVCQVVPMPANHLPIGSTMSTVHLSSDGTYFYWIWSPASLNEKTPKGHSVFMDIFELVVENGVFVANPLQERTILMRKEGESAKSINEMLLSRLSRYRASPSATL

SEQ ID NO: 891432 - protein, 476 aa, Homo sapiens
RRAAADSAQWLSVKEETIFLHDGLIRVTDLAELPSEILGAPEAADTDLEILTFETKNPSELAERLRSVCGNQSNAYARLLEYRLNALRGLWNAQRQLALEEQHERESSGDEETLALLKRQGLLQQPEQAPFTSRMGLLLVFPLIQSQSRTDPSLCNITAEVLLNCLRDCQPLSLTKEPADCLNGIETLLCSWLEETSDTGRHIPHKQKENAAAALVALACARGSLKTFVHTVHLLQKQTDLGSLPVADVLYRLLLLEGGPGSPSCLLGGKHIVSWGYEDMLPAPDSNTGSSSENKDADLGRCLTADGLYLYTTNSVGRGVSKLGSGLHGTLRGFVYCRNEELEPGWVAFGSGSLLHRPVSFDNKPHSLFQVIDQNTLQVCQVVPMPANHLPIGSTMSTVHLSSDGTYFYWIWSPASLNEKTPKGHSVFMDIFELVTGFRYVASASLELLDSSSPACLVFPKCCGCRYEPLRPPVLE

SEQ ID NO: 891433 - protein, 221 aa, Homo sapiens
MLWTCSNDYIDQWCNPGNQAFHYVCQRLGVSHIITEPKEEAITTNEVINQLLHHVGAMCIHQLNLLATNPNLPITSVLGKQHPIEAHHLSSICDIMEKAMVNGDTCIIRCILVVFQVVFKFFFSPQTERNRDIIRRSGLLLWQLLMAPKDQICPEIQKEVCLAISSGLNILYPGETEINNLLKLVLTEGERNSGLSQLRDVILTNLAEQLQNNRFGSDEDD

SEQ ID NO: 891434 - protein, 1188 aa, Homo sapiens
MQFETLRQVCNSVLSHFHGVFSSPPNILQNELFGQTLNNARKRSPSVSRDQNRRYDQREEREEYSQYATSDTAMPRSPSDYADRRSQHEPQFYEDSDHLSYRDSNRRSHRHSKEYIVDDEDVESRDEYERQRREEEYQSRYRSDPNLARYPVKPQPYEEQMRIHAEVSRARHERRHSDVSLANADLEDSRISMLRMDRPSRQRSISERRAAMENQRSYSMERTREAQGPSSYAQRTTNHSPPTPRRSPLPIDRPDLRRTDSLRKQHHLDPSSAVRKTKREKMETMLRNDSLSSDQSESVRPPPPKPHKSKKGGKMRQISLSSSEEELASTPEYTSCDDVEIESESVSEKGDSQKGKRKTSEQAVLSDSNTRSERQKEMMYFGGHSLEEDLEWSEPQIKDSGVDTCSSTTLNEEHSHSDKHPVTWQPSKDGDRLIGRILLNKRLKDGSVPRDSGAMLGLKVVGGKMTESGRLCAFITKVKKGSLADTVGHLRPGDEVLEWNGRLLQGATFEEVYNIILESKPEPQVELVVSRPIGDIPRIPDSTHAQLESSSSSFESQKMDRPSISVTSPMSPGMLRDVPQFLSGQLSIKLWFDKVGHQLIVTILGAKDLPSREDGRPRNPYVKIYFLPDRSDKNKRRTKTVKKTLEPKWNQTFIYSPVHRREFRERMLEITLWDQARVREEESEFLGEILIELETALLDDEPHWYKLQTHDVSSLPLPHPSPYMPRRQLHGESPTRRLQRSKRISDSEVSDYDCDDGIGVVSDYRHDGRDLQSSTLSVPEQVMSSNHCSPSGSPHRVDVIGRTRSWSPSVPPPQSRNVEQGLRGTRTMTGHYNTISRMDRHRVMDDHYSPDRDRIVKQQIDSHITDPDQQNNGLSLRRTTTRSRSTERPDTNLMRSMPSLMTGRSAPPSPALSRSHPRTGSVQTSPSSTPVAGRRGRQLPQLPPKGTLDRKAGGKKLRSTVQRSTETGLAVEMRNWMTRQASRESTDGSMNSYSSEGNLIFPGVRLASDSQFSDFLDGLGPAQLVGRQTLATPAMGDIQVGMMDKKGQLEVEIIRARGLVVKPGSKTLPAPYVKVYLLDNGVCIAKKKTKVARKTLEPLYQQLLSFEESPQGKVLQIIVWGDYGRMDHKSFMGVAQILLDELELSNMVIGWFKLFPPSSLVDPTLAPLTRRASQSSLESSTGPSYSRS

SEQ ID NO: 891435 - protein, 1188 aa, Homo sapiens; identical to SEQ ID NO: 891434

SEQ ID NO: 891436 - protein, 1210 aa, Homo sapiens
MQFETLRQVCNSVLSHFHGVFSSPPNILQNELFGQTLNNARKRSPSVSRDQNRRYDQREEREEYSQYATSDTAMPRSPSDYADRRSQHEPQFYEDSDHLSYRDSNRRSHRHSKEYIVDDEDVESRDEYERQRREEEYQSRYRSDPNLARYPVKPQPYEEQMRIHAEVSRARHERRHSDVSLANADLEDSRISMLRMDRPSRQRSISERRAAMENQRSYSMERTREAQGPSSYAQRTTNHSPPTPRRSPLPIDRPDLRRTDSLRKQHHLDPSSAVRKTKREKMETMLRNDSLSSDQSESVRPPPPKPHKSKKGGKMRQISLSSSEEELASTPEYTSCDDVEIESESVSEKGDSQKGKRKTSEQAVLSDSNTRSERQKEMMYFGGHSLEEDLEWSEPQIKDSGVDTCSSTTLNEEHSHSDKHPVTWQPSKDGDRLIGRILLNKRLKDGSVPRDSGAMLGLKVVGGKMTESGRLCAFITKVKKGSLADTVGHLRPGDEVLEWNGRLLQGATFEEVYNIILESKPEPQVELVVSRPIGDIPRIPDSTHAQLESSSSSFESQKMDRPSISVTSPMSPGMLRDVPQFLSGQLSIKLWFDKVGHQLIVTILGAKDLPSREDGRPRNPYVKIYFLPDRSDKNKRRTKTVKKTLEPKWNQTFIYSPVHRREFRERMLEITLWDQARVREEESEFLGEILIELETALLDDEPHWYKLQTHDVSSLPLPHPSPYMPRRQLHGESPTRRLQRSKRISDSEVSDYDCDDGIGVVSDYRHDGRDLQSSTLSVPEQVMSSNHCSPSGSPHRVDVIGRTRSWSPSVPPPQSRNVEQGLRGTRTMTGHYNTISRMDRHRVMDDHYSPDRDSHFLTLPRSRYSQTIDHHHRDGRDCEAADRQPYHRSRSTEQRPLLERTTTRSRSTERPDTNLMRSMPSLMTGRSAPPSPALSRSHPRTGSVQTSPSSTPVAGRRGRQLPQLPPKGTLDRKAGGKKLRSTVQRSTETGLAVEMRNWMTRQASRESTDGSMNSYSSEGNLIFPGVRLASDSQFSDFLDGLGPAQLVGRQTLATPAMGDIQVGMMDKKGQLEVEIIRARGLVVKPGSKTLPAPYVKVYLLDNGVCIAKKKTKVARKTLEPLYQQLLSFEESPQGKVLQIIVWGDYGRMDHKSFMGVAQILLDELELSNMVIGWFKLFPPSSLVDPTLAPLTRRASQSSLESSTGPSYSRS

SEQ ID NO: 891437 - protein, 314 aa, Homo sapiens
MQSRQMGISGKNMTKSTSISGDMCSLEKNDGSQSDTAVGTLGTSGKKRRSSLGAKMVAIVGLSRKSRSASQLSQTGKAGGKKLRSTVQRSTETGLAVEMRNWMTRQASRESTDGSMNSYSSEGNLIFPGVRLASDSQFSDFLDGLGPAQLVGRQTLATPAMGDIQVGMMDKKGQLEVEIIRARGLVVKPGSKTLPAPYVKVYLLDNGVCIAKKKTKVARKTLEPLYQQLLSFEESPQGKVLQIIVWGDYGRMDHKSFMGVAQILLDELELSNMVIGWFKLFPPSSLVDPTLAPLTRRASQSSLESSTGPSYSRS

SEQ ID NO: 891438 - protein, 145 aa, Homo sapiens
  misc_feature (141)..(141): Xaa can be any naturally occurring amino acid
MQSRQMGISGKNMTKSTSISGDMCSLEKNDGSQSDTAVGTLGTSGKKRRSSLGAKMVAIVGLSRKSRSASQLSQTGTGSDPRLEQDYHSKYRSGWDPHRGADNVSTSSDSDVSDISAVQGLVVLLVSAAQATCLSNQNAQXDRSA

SEQ ID NO: 891439 - protein, 1188 aa, Homo sapiens; identical to SEQ ID NO: 891434

SEQ ID NO: 891440 - protein, 815 aa, Homo sapiens
MQFETLRQVCNSVLSHFHGVFSSPPNILQNELFGQTLNNARKRSPSVSRDQNRRYDQREEREEYSQYATSDTAMPRSPSDYADRRSQHEPQFYEDSDHLSYRDSNRRSHRHSKEYIVDDEDVESRDEYERQRREEEYQSRYRSDPNLARYPVKPQPYEEQMRIHAEVSRARHERRHSDVSLANADLEDSRISMLRMDRPSRQRSISERRAAMENQRSYSMERTREAQGPSSYAQRTTNHSPPTPRRSPLPIDRPDLRRTDSLRKQHHLDPSSAVRKTKREKMETMLRNDSLSSDQSESVRPPPPKPHKSKKGGKMRQISLSSSEEELASTPEYTSCDDVEIESESVSEKGDSQKGKRKTSEQAVLSDSNTRSERQKEMMYFGGHSLEEDLEWSEPQIKDSGVDTCSSTTLNEEHSHSDKHPVTWQPSKDGDRLIGRILLNKRLKDGSVPRDSGAMLGLKVVGGKMTESGRLCAFITKVKKGSLADTVGHLRPGDEVLEWNGRLLQGATFEEVYNIILESKPEPQVELVVSRPIGDIPRIPDSTHAQLESSSSSFESQKMDRPSISVTSPMSPGMLRDVPQFLSGQLSIKLWFDKVGHQLIVTILGAKDLPSREDGRPRNPYVKIYFLPDRSDKNKRRTKTVKKTLEPKWNQTFIYSPVHRREFRERMLEITLWDQARVREEESEFLGEILIELETALLDDEPHWYKLQTHDVSSLPLPHPSPYMPRRQLHGESPTRRLQRSKRISDSEVSDYDCDDGIGVVSDYRHDGRDLQSSTLSVPEQVMSSNHCSPSGSPHRVDVIGRTRSWSPSVPPPQR

SEQ ID NO: 891441 - protein, 814 aa, Homo sapiens
MQDAENVAVPEAAEERAEPGQQQPAAEPPPAEGLLRPAGPGAPEAAGTEASSEEVGIAEAGPEPEVRTEPAAEAEAASGPSESPSPPAAEELPGSHAEPPVPAQGEAPGEQARDERSDSRAQAVSEDAGGNEGRAAEAEPRALENGDADEPSFSDPEDFVDDVSEEELLGDVLKDRPQEADGIDSVIVVDNVPQVGPDRLEKLKNVIHKIFSKFGKITNDFYPEEDGKTKGYIFLEYASPAHAVDAVKNADGYKLDKQHTFRVNLFTDFDKYMTISDEWDIPEKQPFKDLGNLRYWLEEAECRDQYSVIFESGDRTSIFWNDVKDPVSIEERARWTETYVRWSPKGTYLATFHQRGIALWGGEKFKQIQRFSHQGVQLIDFSPCERYLVTFSPLMDTQDDPQAIIIWDILTGHKKRGFHCESSAHWPIFKWSHDGKFFARMTLDTLSIYETPSMGLLDKKSLKISGIKDFSWSPGGNIIAFWVPEDKDIPARVTLMQLPTRQEIRVRNLFNVVDCKLHWQKNGDYLCVKVDRTPKGTQGVVTNFEIFRMREKQVPVDVVEMKETIIAFAWEPNGSKFAVLHGEAPRISVSFYHVKNNGKIELIKMFDKQQANTIFWSPQGQFVVLAGLRSMNGALAFVDTSDCTVMNIAEHYMASDVEWDPTGRYVVTSVSWWSHKVDNAYWLWTFQGRLLQKNNKDRFCQLLWRPRPPTLLSQEQIKQIKKDLKKYSKIFEQKDRLSQSKASKELVERRRTMMEDFRKYRKMAQELYMEQKNERLELRGGVDTDELDSNVDDWEEETIEFFVTEEIIPLGNQE

SEQ ID NO: 891442 - protein, 102 aa, Homo sapiens
VERRRTNSFEALELTQTILLFKDRLSQSKASKELVERRRTMMEDFRKYRKMAQELYMEQKNERLELRGGVDTDELDSNVDDWEEETIEFFVTEEIIPLGNQE

SEQ ID NO: 891443 - protein, 104 aa, Homo sapiens
MEKRRKEGLKIGEKMGNMAALPGRETGGQDPTVGAHWVRGKRHPQLLTMSGSCGPAVGVLLSGREQFHVGHSTQVEAAVSETPGMCTFPAVACSPVLLMNFYTS

SEQ ID NO: 891444 - protein, 775 aa, Homo sapiens
MQDAENVAVPEAAEERAEPGQQQPAAEPPPAEGLLRPAGPGAPEAAGTEASSEEVGIAEAGPEPEGEAPGEQARDERSDSRAQAVSEDAGGNEGRAAEAEPRALENGDADEPSFSDPEDFVDDVSEEELLGDVLKDRPQEADGIDSVIVVDNVPQVGPDRLEKLKNVIHKIFSKFGKITNDFYPEEDGKTKGYIFLEYASPAHAVDAVKNADGYKLDKQHTFRVNLFTDFDKYMTISDEWDIPEKQPFKDLGNLRYWLEEAECRDQYSVIFESGDRTSIFWNDVKDPVSIEERARWTETYVRWSPKGTYLATFHQRGIALWGGEKFKQIQRFSHQGVQLIDFSPCERYLVTFSPLMDTQDDPQAIIIWDILTGHKKRGFHCESSAHWPIFKWSHDGKFFARMTLDTLSIYETPSMGLLDKKSLKISGIKDFSWSPGGNIIAFWVPEDKDIPARVTLMQLPTRQEIRVRNLFNVVDCKLHWQKNGDYLCVKVDRTPKGTQGVVTNFEIFRMREKQVPVDVVEMKETIIAFAWEPNGSKFAVLHGEAPRISVSFYHVKNNGKIELIKMFDKQQANTIFWSPQGQFVVLAGLRSMNGALAFVDTSDCTVMNIAEHYMASDVEWDPTGRYVVTSVSWWSHKVDNAYWLWTFQGRLLQKNNKDRFCQLLWRPRPPTLLSQEQIKQIKKDLKKYSKIFEQKDRLSQSKASKELVERRRTMMEDFRKYRKMAQELYMEQKNERLELRGGVDTDELDSNVDDWEEETIEFFVTEEIIPLGNQE

SEQ ID NO: 891445 - protein, 586 aa, Homo sapiens
SPVPEAHDGASPAHAVDAVKNADGYKLDKQHTFRVNLFTDFDKYMTISDEWDIPEKQPFKDLGNLRYWLEEAECRDQYSVIFESGDRTSIFWNDVKDPVSIEERARWTETYVRWSPKGTYLATFHQRGIALWGGEKFKQIQRFSHQGVQLIDFSPCERYLVTFSPLMDTQDDPQAIIIWDILTGHKKRGFHCESSAHWPIFKWSHDGKFFARMTLDTLSIYETPSMGLLDKKSLKISGIKDFSWSPGGNIIAFWVPEDKDIPARVTLMQLPTRQEIRVRNLFNVVDCKLHWQKNGDYLCVKVDRTPKGTQGVVTNFEIFRMREKQVPVDVVEMKETIIAFAWEPNGSKFAVLHGEAPRISVSFYHVKNNGKIELIKMFDKQQANTIFWSPQGQFVVLAGLRSMNGALAFVDTSDCTVMNIAEHYMASDVEWDPTGRYVVTSVSWWSHKVDNAYWLWTFQGRLLQKNNKDRFCQLLWRPRPPTLLSQEQIKQIKKDLKKYSKIFEQKDRLSQSKASKELVERRRTMMEDFRKYRKMAQELYMEQKNERLELRGGVDTDELDSNVDDWEEETIEFFVTEEIIPLGNQE

SEQ ID NO: 891446 - protein, 814 aa, Homo sapiens; identical to SEQ ID NO: 891441

SEQ ID NO: 891447 - protein, 814 aa, Homo sapiens; identical to SEQ ID NO: 891441

SEQ ID NO: 891448 - protein, 443 aa, Homo sapiens
LSIVRGWVWFHLVNRYLVTFSPLMDTQDDPQAIIIWDILTGHKKRGFHCESSAHWPIFKWSHDGKFFARMTLDTLSIYETPSMGLLDKKSLKISGIKDFSWSPGGNIIAFWVPEDKDIPARVTLMQLPTRQEIRVRNLFNVVDCKLHWQKNGDYLCVKVDRTPKGTQGVVTNFEIFRMREKQVPVDVVEMKETIIAFAWEPNGSKFAVLHGEAPRISVSFYHVKNNGKIELIKMFDKQQANTIFWSPQGQFVVLAGLRSMNGALAFVDTSDCTVMNIAEHYMASDVEWDPTGRYVVTSVSWWSHKVDNAYWLWTFQGRLLQKNNKDRFCQLLWRPRPPTLLSQEQIKQIKKDLKKYSKIFEQKDRLSQSKASKELVERRRTMMEDFRKYRKMAQELYMEQKNERLELRGGVDTDELDSNVDDWEEETIEFFVTEEIIPLGNQE

SEQ ID NO: 891449 - protein, 733 aa, Homo sapiens
MQDAENVAVPEAAEERAEPGQQQPAAEPPPAEGLLRPAGPGAPEAAGTEASSEEVGIAEAGPEPEVRTEPAAEAEAASGPSESPSPPAAEELPGSHAEPPVPAQGEAPGEQARDERSDSRAQAVSEDAGGNEGRAAEAEPRALENGDADEPSFSDPEDFVDDVSEEELLGDVLKDRPQEADGIDSVIVVDNVPQVGPDRLEKLKNVIHKIFSKFGKITNDFYPEEDGKTKGYIFLEYASPAHAVDAVKNADGYKLDKQHTFRVNLFTDFDKYMTISDEWDIPEKQPFKDLGNLRYWLEEAECRDQYSVIFESGDRTSIFWNDVKDPVSIEERAKRGFHCESSAHWPIFKWSHDGKFFARMTLDTLSIYETPSMGLLDKKSLKISGIKDFSWSPGGNIIAFWVPEDKDIPARVTLMQLPTRQEIRVRNLFNVVDCKLHWQKNGDYLCVKVDRTPKGTQGVVTNFEIFRMREKQVPVDVVEMKETIIAFAWEPNGSKFAVLHGEAPRISVSFYHVKNNGKIELIKMFDKQQANTIFWSPQGQFVVLAGLRSMNGALAFVDTSDCTVMNIAEHYMASDVEWDPTGRYVVTSVSWWSHKVDNAYWLWTFQGRLLQKNNKDRFCQLLWRPRPPTLLSQEQIKQIKKDLKKYSKIFEQKDRLSQSKASKELVERRRTMMEDFRKYRKMAQELYMEQKNERLELRGGVDTDELDSNVDDWEEETIEFFVTEEIIPLGNQE

SEQ ID NO: 891450 - protein, 814 aa, Homo sapiens; identical to SEQ ID NO: 891441

SEQ ID NO: 891451 - protein, 791 aa, Homo sapiens
MQDAENVAVPEAAEERAEPGQQQPAAEPPPAEGLLRPAGPGAPEAAGTEASSEEVGIAEAGPEPEVRTEPAAEAEAASGPSESPSPPAAEELPGSHAEPPVPAQGEAPGEQARDERSDSRAQAVSEDAGGNEGRAAEAEPRALENGDADEPSFSDPEDFVDDVSEEELLGDVLKDRPQEADGIDSVIVVDNVPQVGPDRLEKLKNVIHKIFSKFGKITNDFYPEEDGKTKGYIFLEYASPAHAVDAVKNADGYKLDKQHTFRVNLFTDFDKYMTISDEWDIPEKQPFKDLGNLRYWLEEAECRDQYSVIFESGDRTSIFWNDVKDPVSIEERARWTETYVRWSPKGTYLATFHQRGIALWGGEKFKQIQRFSHQGVQLIDFSPCERYLVTFSPLMDTQDDPQAIIIWDILTGHKKRGFHCESSAHWPIFKWSHDGKFFARMTLDTLSIYETPSMGLLDKKSLKISGIKDFSWSPGGNIIAFWVPEDKDIPARVTLMQLPTRQEIRVRNLFNVVDCKLHWQKNGDYLCVKVDRTPKGTQGVVTNFEIFRMREKQVPVDVVEMKETIIAFAWEPNGSKFAVLHGEAPRISVSFYHVKNNGKIELIKMFDKQQANTIFWSPQGQFVVLAGLRSMNGALAFVDTSDCTVMNIAEHYMASDVEWDPTGRYVVTSVSWWSHKVDNAYWLWTFQGRLLQKNNKDRFCQLLWRPRPPTLLSQEQIKQIKKDLKKYSKIFEQKDRLSQSKASKELVERRRTMMEDFRKYRKMAQELYMEQKNERLELRGGVDTDELDTKT

SEQ ID NO: 891452 - protein, 319 aa, Homo sapiens [sequence omitted]

SEQ ID NO: 891453 - protein, 299 aa, Homo sapiens
MCVGLLRAPTWLPFIKEALLYGGERNSSKFRDSATKGFSLLTSHLVKETIIAFAWEPNGSKFAVLHGEAPRISVSFYHVKNNGKIELIKMFDKQQANTIFWSPQGQFVVLAGLRSMNGALAFVDTSDCTVMNIAEHYMASDVEWDPTGRYVVTSVSWWSHKVDNAYWLWTFQGRLLQKNNKDRFCQLLWRPRPPTLLSQEQIKQIKKDLKKYSKIFEQKDRLSQSKASKELVERRRTMMEDFRKYRKMAQELYMEQKNERLELRGGVDTDELDSNVDDWEEETIEFFVTEEIIPLGNQE

SEQ ID NO: 891454 - protein, 489 aa, Homo sapiens
MQDAENVAVPEAAEERAEPGQQQPAAEPPPAEGLLRPAGPGAPEAAGTEASSEEVGIAEAGPEPEVRTEPAAEAEAASGPSESPSPPAAEELPGSHAEPPVPAQGEAPGEQARDERSDSRAQAVSEDAGGNEGRAAEAEPRALENGDADEPSFSDPEDFVDDVSEEELLGDVLKDRPQEADGIDSVIVVDNVPQVGPDRLEKLKNVIHKIFSKFGKITNDFYPEEDGKTKGYIFLEYASPAHAVDAVKNADGYKLDKQHTFRVNLFTDFDKYMTISDEWDIPEKQPFKDLGNLRYWLEEAECRDQYSVIFESGDRTSIFWNDVKDPVSIEERARWTETYVRWSPKGTYLATFHQRGIALWGGEKFKQIQRFSHQGVQLIDFSPCERYLVTFSPLMDTQDDPQAIIIWDILTGHKKRGFHCESSAHWPIFKWSHDGKFFARMTLDTLSIYETPSTTSKTTGRLNSSRCSTSSRRTPSSGAPKDSSWCWRA

SEQ ID NO: 891455 - protein, 360 aa, Homo sapiens
DDFPLIVTPDWRIALPRAWILLDVEDVSKSSSVSSKCLKEHQSYQINTIVCEPWTWRSGVACPWLLSKDCEKRRIDCEDTRGKRDGMQVADNRIDRSTRYVLLLVVIEDAERHGLDARVRAEECRRELVVSVVLLHSQNCEMSKDGTPVQMFDKQQANTIFWSPQGQFVVLAGLRSMNGALAFVDTSDCTVMNIAEHYMASDVEWDPTGRYVVTSVSWWSHKVDNAYWLWTFQGRLLQKNNKDRFCQLLWRPRPPTLLSQEQIKQIKKDLKKYSKIFEQKDRLSQSKASKELVERRRTMMEDFRKYRKMAQELYMEQKNERLELRGGVDTDELDSNVDDWEEETIEFFVTEEIIPLGNQE

SEQ ID NO: 891456 - protein, 195 aa, Homo sapiens
MKPDGPVCLCSMNGALAFVDTSDCTVMNIAEHYMASDVEWDPTGRYVVTSVSWWSHKVDNAYWLWTFQGRLLQKNNKDRFCQLLWRPRPPTLLSQEQIKQIKKDLKKYSKIFEQKDRLSQSKASKELVERRRTMMEDFRKYRKMAQELYMEQKNERLELRGGVDTDELDSNVDDWEEETIEFFVTEEIIPLGNQE

SEQ ID NO: 891457 - protein, 218 aa, Homo sapiens
MDFVKLFSEVVQHYQLCPHGQHEHGQSPPALAAPALWKPSQLVTGALFPFRDVRQAAGEHHLLEPPRTVRGVGGPEEYERCLSVCGHFGLHGHEHRRNNKDRFCQLLWRPRPPTLLSQEQIKQIKKDLKKYSKIFEQKDRLSQSKASKELVERRRTMMEDFRKYRKMAQELYMEQKNERLELRGGVDTDELDSNVDDWEEETIEFFVTEEIIPLGNQE

SEQ ID NO: 891458 - protein, 121 aa, Homo sapiens
TSDRVPTSDRVPTSDRVPTSDRVPKQIKKDLKKYSKIFEQKDRLSQSKASKELVERRRTMMEDFRKYRKMAQELYMEQKNERLELRGGVDTDELDSNVDDWEEETIEFFVTEEIIPLGNQE

SEQ ID NO: 891459 - protein, 583 aa, Homo sapiens
MQDAENVAVPEAAEERAEPGQQQPAAEPPPAEGLLRPAGPGAPEAAGTEASSEEVGIAEAGPEPEVRTEPAAEAEAASGPSESPSPPAAEELPGSHAEPPVPAQGEAPGEQARDERSDSRAQAVSEDAGGNEGRAAEAEPRALENGDADEPSFSDPEDFVDDVSEEELLGDVLKDRPQEADGIDSVIVVDNVPQVGPDRLEKLKNVIHKIFSKFGKITNDFYPEEDGKTKGYIFLEYASPAHAVDAVKNADGYKLDKQHTFRVNLFTDFDKYMTISDEWDIPEKQPFKDLGNLRYWLEEAECRDQYSVIFESGDRTSIFWNDVKDPVSIEERARWTETYVRWSPKGTYLATFHQRGIALWGGEKFKQIQRFSHQGVQLIDFSPCERYLVTFSPLMDTQDDPQAIIIWDILTGHKKRGFHCESSAHWPIFKWSHDGKFFARMTLDTLSIYETPSMGLLDKKSLKISGIKDFSWSPGGNIIAFWVPEDKDIPARVTLMQLPTRQEIRVRNLFNVVDCKLHWQKNGDYLCVKVDRTPKGTQGVVTNFEIFRMREKQVPVDVVEMKGKLYFSHFEANGAYVLFYSWL

SEQ ID NO: 891460 - protein, 430 aa, Homo sapiens [sequence omitted]

SEQ ID NO: 891461 - protein, 468 aa, Homo sapiens
MQDAENVAVPEAAEERAEPGQQQPAAEPPPAEGLLRPAGPGAPEAAGTEASSEEVGIAEAGPEPEVRTEPAAEAEAASGPSESPSPPAAEELPGSHAEPPVPAQGEAPGEQARDERSDSRAQAVSEDAGGNEGRAAEAEPRALENGDADEPSFSDPEDFVDDVSEEELLGDVLKDRPQEADGIDSVIVVDNVPQVGPDRLEKLKNVIHKIFSKFGKITNDFYPEEDGKTKGYIFLEYASPAHAVDAVKNADGYKLDKQHTFRVNLFTDFDKYMTISDEWDIPEKQPFKDLGNLRYWLEEAECRDQYSVIFESGDRTSIFWNDVKDPVSIEERARWTETYVRWSPKGTYLATFHQRGIALWGGEKFKQIQRFSHQGVQLIDFSPCERYLVTFSPLMDTQDDPQAIIIWDILTGHKKRGFHCESSAHWPIFKWSHDGKFFARMTLDTLSIYETPSMGLLDKKSLKISGIK

SEQ ID NO: 891462 - protein, 814 aa, Homo sapiens; identical to SEQ ID NO: 891441

SEQ ID NO: 891463 - protein, 814 aa, Homo sapiens; identical to SEQ ID NO: 891441

SEQ ID NO: 891464 - protein, 106 aa, Homo sapiens
VKLGARLGGEQIKKDLKKYSKIFEQKDRLSQSKASKELVERRRTMMEDFRKYRKMAQELYMEQKNERLELRGGVDTDELDSNVDDWEEETIEFFVTEEIIPLGNQE

SEQ ID NO: 891465 - protein, 814 aa, Homo sapiens; identical to SEQ ID NO: 891441

SEQ ID NO: 891466 - protein, 492 aa, Homo sapiens
MILEDKTRSKARWTETYVRWSPKGTYLATFHQRGIALWGGEKFKQIQRFSHQGVQLIDFSPCERYLVTFSPLMDTQDDPQAIIIWDILTGHKKRGFHCESSAHWPIFKWSHDGKFFARMTLDTLSIYETPSMGLLDKKSLKISGIKDFSWSPGGNIIAFWVPEDKDIPARVTLMQLPTRQEIRVRNLFNVVDCKLHWQKNGDYLCVKVDRTPKGTQGVVTNFEIFRMREKQVPVDVVEMKETIIAFAWEPNGSKFAVLHGEAPRISVSFYHVKNNGKIELIKMFDKQQANTIFWSPQGQFVVLAGLRSMNGALAFVDTSDCTVMNIAEHYMASDVEWDPTGRYVVTSVSWWSHKVDNAYWLWTFQGRLLQKNNKDRFCQLLWRPRPPTLLSQEQIKQIKKDLKKYSKIFEQKDRLSQSKASKELVERRRTMMEDFRKYRKMAQELYMEQKNERLELRGGVDTDELDSNVDDWEEETIEFFVTEEIIPLGNQE

SEQ ID NO: 891467 - protein, 820 aa, Homo sapiens
MQDAENVAVPEAAEERAEPGQQQPAAEPPPAEGLLRPAGPGAPEAAGTEASSEEVGIAEAGPEPEVRTEPAAEAEAASGPSESPSPPAAEELPGSHAEPPVPAQGEAPGEQARDERSDSRAQAVSEDAGGNEGRAAEAEPRALENGDADEPSFSDPEDFVDDVSEEELLGDVLKDRPQEADGIDSVIVVDNVPQVGPDRLEKLKNVIHKIFSKFGKITNDFYPEEDGKTKGYIFLEYASPAHAVDAVKNADGYKLDKQHTFRVNLFTDFDKYMTISDEWDIPEKQPFKDLGNLRYWLEEAECRDQYSVIFESGDRTSIFWNDVKDPVSIEERARWTETYVRWSPKGTYLATFHQRGIALWGGEKFKQIQRFSHQGVQLIDFSPCESVALLFWYLVTFSPLMDTQDDPQAIIIWDILTGHKKRGFHCESSAHWPIFKWSHDGKFFARMTLDTLSIYETPSMGLLDKKSLKISGIKDFSWSPGGNIIAFWVPEDKDIPARVTLMQLPTRQEIRVRNLFNVVDCKLHWQKNGDYLCVKVDRTPKGTQGVVTNFEIFRMREKQVPVDVVEMKETIIAFAWEPNGSKFAVLHGEAPRISVSFYHVKNNGKIELIKMFDKQQANTIFWSPQGQFVVLAGLRSMNGALAFVDTSDCTVMNIAEHYMASDVEWDPTGRYVVTSVSWWSHKVDNAYWLWTFQGRLLQKNNKDRFCQLLWRPRPPTLLSQEQIKQIKKDLKKYSKIFEQKDRLSQSKASKELVERRRTMMEDFRKYRKMAQELYMEQKNERLELRGGVDTDELDSNVDDWEEETIEFFVTEEIIPLGNQE

SEQ ID NO: 891468 - protein, 361 aa, Homo sapiens [sequence omitted]

SEQ ID NO: 891469 - protein, 814 aa, Homo sapiens; identical to SEQ ID NO: 891441

SEQ ID NO: 891470 - protein, 367 aa, Homo sapiens
MLAGALKSAEADRVEESLGLKDFSWSPGGNIIAFWVPEDKDIPARVTLMQLPTRQEIRVRNLFNVVDCKLHWQKNGDYLCVKVDRTPKGTQGVVTNFEIFRMREKQVPVDVVEMKETIIAFAWEPNGSKFAVLHGEAPRISVSFYHVKNNGKIELIKMFDKQQANTIFWSPQGQFVVLAGLRSMNGALAFVDTSDCTVMNIAEHYMASDVEWDPTGRYVVTSVSWWSHKVDNAYWLWTFQGRLLQKNNKDRFCQLLWRPRPPTLLSQEQIKQIKKDLKKYSKIFEQKDRLSQSKASKELVERRRTMMEDFRKYRKMAQELYMEQKNERLELRGGVDTDELDSNVDDWEEETIEFFVTEEIIPLGNQE

SEQ ID NO: 891471 - protein, 401 aa, Homo sapiens
ETEEEETIEFFVTEEIIPPGLPTLLSQEQIKQIKKDLKKYSKIFEQKDRLSQSKASKELVERRRTMMEDFRKYRKMAQELYMEQKNERLELRGGVDTDELDSNVDDWEEGDYLCVKVDRTPKGTQGVVTNFEIFRMREKQVPVDVVEMKETIIAFAWEPNGSKFAVLHGEAPRISVSFYHVKNNGKIELIKMFDKQQANTIFWSPQGQFVVLAGLRSMNGALAFVDTSDCTVMNIAEHYMASDVEWDPTGRYVVTSVSWWSHKVDNAYWLWTFQGRLLQKNNKDRFCQLLWRPRPPTLLSQEQIKQIKKDLKKYSKIFEQKDRLSQSKASKELVERRRTMMEDFRKYRKMAQELYMEQKNERLELRGGVDTDELDSNVDDWEEETIEFFVTEEIIPLGNQE

SEQ ID NO: 891472 - protein, 735 aa, Homo sapiens
MQDAENVAVPEAAEERAEPGQQQPAAEPPPAEGLLRPAGPGAPEAAGTEASSEEVGIAEAGPEPEVRTEPAAEAEAASGPSESPSPPAAEELPGSHAEPPVPAQGEAPGEQARDERSDSRAQAVSEDAGGNEGRAAEAEPRALENGDADEPSFSDPEDFVDDVSEEELLGDVLKDRPQEADGIDSVIVVDNVPQVGPDRLEKLKNVIHKIFSKFGKITNDFYPEEDGKTKGYIFLEYASPAHAVDAVKNADGYKLDKQHTFRVNLFTDFDKYMTISDEWDIPEKQPFKDLGNLRYWLEEAECRDQYSVIFESGDRTSIFWNDVKDPVSIEERARWTETYVRWSPKGTYLATFHQRGIALWGGEKFKQIQRFSHQGVQLIDFSPCERYLVTFSPLMDTQDDPQAIIIWDILTGHKKRGFHCESSAHWPIFKWSHDGKFFARMTLDTLSIYETPSMGLLDKKSLKISGIKDFSWSPGGNIIAFWVPEDKDIPARVTLMQLPTRQEIRVRNLFNVVDCKLHWQKNGDYLCVKVDRTPKGTQGVVTNFEIFRMREKQVPVDVVEMKETIIAFAWEPNGSKFAVLHGEAPRISVSFYHVKNNGKIELIKMFDKQQANTIFWSPQGQFVVLAGLRSMNGALAFVDTSDCTVMNIAEHYMASDVEWDPTGRYVVTSVSWWSHKVDNAYWLWTFQGRLLQKNNKDRFCQLLWRPRPPTLLSQEQIKVSMPPPPGAGHMEAIVA

SEQ ID NO: 891473 - protein, 106 aa, Homo sapiens; identical to SEQ ID NO: 891464

SEQ ID NO: 891474 - protein, 601 aa, Homo sapiens
MQDAENVAVPEAAEERAEPGQQQPAAEPPPAEGLLRPAGPGAPEAAGTEASSEEVGIAEAGPEPEVRTEPAAEAEAASGPSESPSPPAAEELPGSHAEPPVPAQGEAPGEQARDERSDSRAQAVSEDAGGNEGRAAEAEPRALENGDADEPSFSDPEDFVDDVSEEELLGDVLKDRPQEADGIDSVIVVDNVPQVGPDRLEKLKNVIHKIFSKFGKITNDFYPEEDGKTKGYIFLEYASPAHAVDAVKNADGYKLDKQHTFRVNLFTDFDKYMTISDEWDIPEKQPFKDLGNLRYWLEEAECRDQYSVIFESGDRTSIFWNDVKDPVSIEERARWTETYVRWSPKGTYLATFHQRGIALWGGEKFKQIQRFSHQGVQLIDFSPCERYLVTFSPLMDTQDDPQAIIIWDILTGHKKRGFHCESSAHWPIFKWSHDGKFFARMTLDTLSIYETPSMGLLDKKSLKISGIKDFSWSPGGNIIAFWVPEDKDIPARVTLMQLPTRQEIRVRNLFNVVDCKLHWQKNGDYLCVKVDRTPKGTQGVVTNFEIFRMREKQVPVDVVEMKETIIAFAWEPNGSKFAVLLVEHLDEFNLPVVFDVVERHR

SEQ ID NO: 891475 - protein, 580 aa, Homo sapiens
MQDAENVAVPEAAEERAEPGQQQPAAEPPPAEGLLRPAGPGAPEAAGTEASSEEVGIAEAGPEPEVRTEPAAEAEAASGPSESPSPPAAEELPGSHAEPPVPAQGEAPGEQARDERSDSRAQAVSEDAGGNEGRAAEAEPRALENGDADEPSFSDPEDFVDDVSEEELLGDVLKDRPQEADGIDSVIVVDNVPQVGPDRLEKLKNVIHKIFSKFGKITNDFYPEEDGKTKGYIFLEYASPAHAVDAVKNADGYKLDKQHTFRVNLFTDFDKYMTISDEWDIPEKQPFKDLGNLRYWLEEAECRDQYSVIFESGDRTSIFWNDVKDPVSIEERARWTETYVRWSPKGTYLATFHQRGIALWGGEKFKQIQRFSHQGVQLIDFSPCERYLVTFSPLMDTQDDPQAIIIWDILTGHKKRGFHCESSAHWPIFKWSHDGKFFARMTLDTLSIYETPSMGLLDKKSLKISGIKDFSWSPGGNIIAFWVPEDKDIPARVTLMQLPTRQEIRVRNLFNVVDCKLHWQKNGDYLCVKVDRTPKGTQAVVTDFEKGFIMAEVMKYEDFKEEGSENAVRLLESTRQQGGH

SEQ ID NO: 891476 - protein, 104 aa, Homo sapiens; identical to SEQ ID NO: 891443

SEQ ID NO: 891477 - protein, 769 aa, Homo sapiens
SVISPSSPWTTIYINVSYLLGVGVFPSQDPAQPRMPPWIYNESLVPDAYKKILETTMTPTGIDTAKLYPILMSSGLPRETLGQIWALANRTTPGKLTKEELYTVLAMIAVTQRGVPAMSPDALNQFPAAPIPTLSGFSMTLPTPVSQPTVIPSGPAGSMPLSLGQPVMGINLVGPVGGAAAQASSGFIPTYPANQVVKPEEDDFQDFQDASKSGSLDDSFSDFQELPASSKTSNSQHGNSAPSLLMPLPGTKALPSMDKYAVFKGIAADKSSENTVPPGDPGDKYSAFRELEQTAENKPLGESFAEFRSAGTDDGFTDFKTADSVSPLEPPTKDKTFPPSFPSGTIQQKQQTQVKNPLNLADLDMFSSVNCSSEKPLSFSAVFSTSKSVSTPQSTGSAATMTALAATKTSSLADDFGEFSLFGEYSGLAPVGEQDDFADFMAFSNSSISSEQKPDDKYDALKEEASPVPLTSNVGSTVKGGQNSTAASTKYDVFRQLSLEGSGLGVEDLKDNTPSGKSDDDFADFHSSKFSSINSDKSLGEKAVAFRHTKEDSASVKSLDLPSIGGSSVGKEDSEDALSVQFDMKLADVGGDLKHVMSDSSLDLPTVSGQHPPAAGSGSPSATSILQKKETSFGSSENITMTSLSKVTTFVSEDALPETTFPALASFKDTIPQTSEQKEYENRDYKDFTKQDLPTAERSQEATCPSPASSGASQETPNECSDDFGEFQSEKPKISKFDFLVATSQSKMKSSEEMIKSELATFDLSVQGE

SEQ ID NO: 891478 - protein, 1328 aa, Homo sapiens
IRWRRRRQRQVGSKMALRPGAGSGGGGAAGAGAGSAGGGGFMFPVAGGIRPPQAGLMPMQQQGFPMVSVMQPNMQGIMGMNYSSQMSQGPIAMQAGIPMGPMPAAGMPYLGQAPFLGMRPPGPQYTPDMQKQFAEEQQKRFEQQQKLLEEERKRRQFEEQKQKLRLLSSVKPKTGEKSRDDALEAIKGNLDGFSRDAKMHPTPASHPKKPGPSLEEKFLVSCDISTSGQEQIKLNTSEVGHKALGPGSSKKYPSLMASNGVAVDGCVSGTTTAEAENTSDQNLSIEESGVGVFPSQDPAQPRMPPWIYNESLVPDAYKKILETTMTPTGIDTAKLYPILMSSGLPRETLGQIWALANRTTPGKLTKEELYTVLAMIAVTQRGVPAMSPDALNQFPAAPIPTLSGFSMTLPTPVSQPTVIPSGPAGSMPLSLGQPVMGINLVGPVGGAAAQASSGFIPTYPANQVVKPEEDDFQDFQDASKSGSLDDSFSDFQELPASSKTSNSQHGNSAPSLLMPLPGTKALPSMDKYAVFKGIAADKSSENTVPPGDPGDKYSAFRELEQTAENKPLGESFAEFRSAGTDDGFTDFKTADSVSPLEPPTKDKTFPPSFPSGTIQQKQQTQVKNPLNLADLDMFSSVNCSSEKPLSFSAVFSTSKSVSTPQSTGSAATMTALAATKTSSLADDFGEFSLFGEYSGLAPVGEQDDFADFMAFSNSSISSEQKPDDKYDALKEEASPVPLTSNVGSTVKGGQNSTAASTKYDVFRQLSLEGSGLGVEDLKDNTPSGKSDDDFADFHSSKFSSINSDKSLGEKAVAFRHTKEDSASVKSLDLPSIGGSSVGKEDSEDALSVQFDMKLADVGGDLKHVMSDSSLDLPTVSGQHPPAADIEDLKYAAFGSYSSNFAVSTLTSYDWSDRDDATQGRKLSPFVLSAGSGSPSATSILQKKETSFGSSENITMTSLSKVTTFVSEDALPETTFPALASFKDTIPQTSEQKEYENRDYKDFTKQDLPTAERSQEATCPSPASSGASQETPNECSDDFGEFQSEKPKISKFDFLVATSQSKMKSSEEMIKSELATFDLSVQGSHKRSLSLGDKEISRSSPSPALEQPFRDRSNTLNEKPALPVIRDKYKDLTGEVEENERYAYEWQRCLGSALNVIKKANDTLNGISSSSVCTEVIQSAQGMEYLLGVVEVYRVTKRVELGIKATAVCSEKLQQLLKDIDKVWNNLIGFMSLATLTPDENSLDFSSCMLRPGIKNAQELACGVCLLNVDSRSRKEEKPAEEHPKKAFNSETDSFKLAYGGHQYHASCANFWINCVEPKPPGLVLPDLL

SEQ ID NO: 891479 - protein, 1328 aa, Homo sapiens; identical to SEQ ID NO: 891478

SEQ ID NO: 891480 - protein, 1328 aa, Homo sapiens; identical to SEQ ID NO: 891478

SEQ ID NO: 891481 - protein, 1107 aa, Homo sapiens
MSKKLLLCRAGIPMGPMPAAGMPYLGQAPFLGMRPPGPQYTPDMQKQFAEEQQKRFEQQQKLLEEERKRRQFEEQKQKLRLLSSVKPKTGEKSRDDALEAIKGNLDGFSRDAKMHPTPASHPKKPGVGVFPSQDPAQPRMPPWIYNESLVPDAYKKILETTMTPTGIDTAKLYPILMSSGLPRETLGQIWALANRTTPGKLTKEELYTVLAMIAVTQRGVPAMSPDALNQFPAAPIPTLSGFSMTLPTPVSQPTVIPSGPAGSMPLSLGQPVMGINLVGPVGGAAAQASSGFIPTYPANQVVKPEEDDFQDFQDASKSGSLDDSFSDFQELPASSKTSNSQHGNSAPSLLMPLPGTKALPSMDKYAVFKGIAADKSSENTVPPGDPGDKYSAFRELEQTAENKPLGESFAEFRSAGTDDGFTDFKTADSVSPLEPPTKDKTFPPSFPSGTIQQKQQTQVKNPLNLADLDMFSSVNCSSEKPLSFSAVFSTSKSVSTPQSTGSAATMTALAATKTSSLADDFGEFSLFGEYSGLAPVGEQDDFADFMAFSNSSISSEQKPDDKYDALKEEASPVPLTSNVGSTVKGGQNSTAASTKYDVFRQLSLEGSGLGVEDLKDNTPSGKSDDDFADFHSSKFSSINSDKSLGEKAVAFRHTKEDSASVKSLDLPSIGGSSVGKEDSEDALSVQFDMKLADVGGDLKHVMSDSSLDLPTVSGQHPPAAGSGSPSATSILQKKETSFGSSENITMTSLSKVTTFVSEDALPETTFPALASFKDTIPQTSEQKEYENRDYKDFTKQDLPTAERSQEATCPSPASSGASQETPNECSDDFGEFQSEKPKISKFDFLVATSQSKMKSSEEMIKSELATFDLSVQGSHKRSLSLGDKEISRSSPSPALEQPFRDRSNTLNEKPALPVIRDKYKDLTGEVEENERYAYEWQRCLGSALNVIKKANDTLNGISSSSVCTEVIQSAQGMEYLLGVVEVYRVTKRVELGIKATAVCSEKLQQLLKDIDKVWNNLIGFMSLATLTPDENSLDFSSCMLRPGIKNAQELACGVCLLNVDSRSRAFNSETDSFKLAYGGHQYHASCANFWINCVEPKPPGLVLPDLL

SEQ ID NO: 891482 - protein, 549 aa, Homo sapiens
MARKYDALKEEASPVPLTSNVGSTVKGGQNSTAASTKYDVFRQLSLEGSGLGVEDLKDNTPSGKSDDDFADFHSSKFSSINSDKSLGEKAVAFRHTKEDSASVKSLDLPSIGGSSVGKEDSEDALSVQFDMKLADVGGDLKHVMSDSSLDLPTVSGQHPPAAGSGSPSATSILQKKETSFGSSENITMTSLSKVTTFVSEDALPETTFPALASFKDTIPQTSEQKEYENRDYKDFTKQDLPTAERSQEATCPSPASSGASQETPNECSDDFGEFQSEKPKISKFDFLVATSQSKMKSSEEMIKSELATFDLSVQGSHKRSLSLGDKEISRSSPSPALEQPFRDRSNTLNEKPALPVIRDKYKDLTGEVEENERYAYEWQRCLGSALNVIKKANDTLNGISSSSVCTEVIQSAQGMEYLLGVVEVYRVTKRVELGIKATAVCSEKLQQLLKDIDKVWNNLIGFMSLATLTPDENSLDFSSCMLRPGIKNAQELACGVCLLNVDSRSRAFNSETDSFKLAYGGHQYHASCANFWINCVEPKPPGLVLPDLL

SEQ ID NO: 891483 - protein, 1016 aa, Homo sapiens
IRWRRRRQRQVGSKMALRPGAGSGGGGAAGAGAGSAGGGGFMFPVAGGIRPPQAGLMPMQQQGFPMVSVMQPNMQGIMGMNYSSQMSQGPIAMQAGIPMGPMPAAGMPYLGQAPFLGMRPPGPQYTPDMQKQFAEEQQKRFEQQQKLLEEERKRRQFEEQKQKLRLLSSVKPKTGEKSRDDALEAIKGNLDGFSRDAKMHPTPASHPKKPGPSLEEKFLVSCDISTSGQEQIKLNTSEVGHKALGPGSSKKYPSLMASNGVAVDGCVSGTTTAEAENTSDQNLSIEESGVGVFPSQDPAQPRMPPWIYNESLVPDAYKKILETTMTPTGIDTAKLYPILMSSGLPRETLGQIWALANRTTPGKLTKEELYTVLAMIAVTQRGVPAMSPDALNQFPAAPIPTLSGFSMTLPTPVSQPTVIPSGPAGSMPLSLGQPVMGINLVGPVGGAAAQASSGFIPTYPANQVVKPEEDDFQDFQDASKSGSLDDSFSDFQELPASSKTSNSQHGNSAPSLLMPLPGTKALPSMDKYAVFKGIAADKSSENTVPPGDPGDKYSAFRELEQTAENKPLGESFAEFRSAGTDDGFTDFKTADSVSPLEPPTKDKTFPPSFPSGTIQQKQQTQVKNPLNLADLDMFSSVNCSSEKPLSFSAVFSTSKSVSTPQSTGSAATMTALAATKTSSLADDFGEFSLFGEYSGLAPVGEQDDFADFMAFSNSSISSEQKPDDKYDALKEEASPVPLTSNVGSTVKGGQNSTAASTKYDVFRQLSLEGSGLGVEDLKDNTPSGKSDDDFADFHSSKFSSINSDKSLGEKAVAFRHTKEDSASVKSLDLPSIGGSSVGKEDSEDALSVQFDMKLADVGGDLKHVMSDSSLDLPTVSGQHPPAADIEDLKYAAFGSYSSNFAVSTLTSYDWSDRDDATQGRKLSPFVLSAGSGSPSATSILQKKETSFGSSENITMTSLSKVTTFVSEDALPETTFPALASFKDTIPQTSELAASGELPVVSSLRVVSSLRVVSSLR

SEQ ID NO: 891484 - protein, 821 aa, Homo sapiens
IRWRRRRQRQVGSKMALRPGAGSGGGGAAGAGAGSAGGGGFMFPVAGGIRPPQAGLMPMQQQGFPMVSVMQPNMQGIMGMNYSSQMSQGPIAMQAGIPMGPMPAAGMPYLGQAPFLGMRPPGPQYTPDMQKQFAEEQQKRFEQQQKLLEEERKRRQFEEQKQKLRLLSSVKPKTGEKSRDDALEAIKGNLDGFSRDAKMHPTPASHPKKPGPSLEEKFLVSCDISTSGQEQIKLNTSEVGHKALGPGSSKKYPSLMASNGVAVDGCVSGTTTAEAENTSDQNLSIEESGVGVFPSQDPAQPRMPPWIYNESLVPDAYKKILETTMTPTGIDTAKLYPILMSSGLPRETLGQIWALANRTTPGKLTKEELYTVLAMIAVTQRGVPAMSPDALNQFPAAPIPTLSGFSMTLPTPVSQPTVIPSGPAGSMPLSLGQPVMGINLVGPVGGAAAQASSGFIPTYPANQVVKPEEDDFQDFQDASKSGSLDDSFSDFQELPASSKTSNSQHGNSAPSLLMPLPGTKALPSMDKYAVFKGIAADKSSENTVPPGDPGDKYSAFRELEQTAENKPLGESFAEFRSAGTDDGFTDFKTADSVSPLEPPTKDKTFPPSFPSGTIQQKQQTQVKNPLNLADLDMFSSVNCSSEKPLSFSAVFSTSKSVSTPQSTGSAATMTALAATKTSSLADDFGEFSLFGEYSGLAPVGEQDDFADFMAFSNSSISSEQKPDDKYDALKEEASPVPLTSNVGSTVKGGFSGDKKFKQQGYSVSYQSNRTLRNEVSKAKKQDELPGFSKMGVSQDPLMTQFSDTKRCLIHRYNEVTRMHGT

SEQ ID NO: 891485 - protein, 1328 aa, Homo sapiens; identical to SEQ ID NO: 891478

SEQ ID NO: 891486 - protein, 1328 aa, Homo sapiens; identical to SEQ ID NO: 891478

SEQ ID NO: 891487 - protein, 1270 aa, Homo sapiens
IRWRRRRQRQVGSKMALRPGAGSGGGGAAGAGAGSAGGGGFMFPVAGGIRPPQAGLMPMQQQGFPMVSVMQPNMQGIMGMNYSSQMSQGPIAMQAGIPMGPMPAAGMPYLGQAPFLGMRPPGPQYTPDMQKQFAEEQQKRFEQQQKLLEEERKRRQFEEQKQKLRLLSSVKPKTGEKSRDDALEAIKGNLDGFSRDAKMHPTPASHPKKPGPSLEEKFLVSCDISTSGQEQIKLNTSEVGHKALGPGSSKKYPSLMASNGVAVDGCVSGTTTAEAENTSDQNLSIEESGVGVFPSQDPAQPRMPPWIYNESLVPDAYKKILETTMTPTGIDTAKLYPILMSSGLPRETLGQIWALANRTTPGKLTKEELYTVLAMIAVTQRGVPAMSPDALNQFPAAPIPTLSGFSMTLPTPVSQPTVIPSGPAGSMPLSLGQPVMGINLVGPVGGAAAQASSGFIPTYPANQVVKPEEDDFQDFQDASKSGSLDDSFSDFQELPASSKTSNSQHGNSAPSLLMPLPGTKALPSMDKYAVFKGIAADKSSENTVPPGDPGDKYSAFRELEQTAENKPLGESFAEFRSAGTDDGFTDFKTADSVSPLEPPTKDKTFPPSFPSGTIQQKQQTQVKNPLNLADLDMFSSVNCSSEKPLSFSAVFSTSKSVSTPQSTGSAATMTALAATKTSSLADDFGEFSLFGEYSGLAPVGEQDDFADFMAFSNSSISSEQKPDDKYDALKEEASPVPLTSNVGSTVKGGQNSTAASTKYDVFRQLSLEGSGLGVEDLKDNTPSGKSDDDFADFHSSKFSSINSDKSLGEKAVAFRHTKEDSASVKSLDLPSIGGSSVGKEDSEDALSVQFDMKLADVGGDLKHVMSDSSLDLPTVSGQHPPAAGSGSPSATSILQKKETSFGSSENITMTSLSKVTTFVSEDALPETTFPALASFKDTIPQTSEQKEYENRDYKDFTKQDLPTAERSQEATCPSPASSGASQETPNECSDDFGEFQSEKPKISKFDFLVATSQSKMKSSEEMIKSELATFDLSVQGSHKRSLSLGDKEISRSSPSPALEQPFRDRSNTLNEKPALPVIRDKYKDLTGEVEENERYAYEWQRCLGSALNVIKKANDTLNGISSSSVCTEVIQSAQGMEYLLGVVEVYRVTKRVELGIKATAVCSEKLQQLLKDIDKVWNNLIGFMSLATLTPDENSLDFSSCMLRPGIKNAQELACGVCLLNVDSRSRAFNSETDSFKLAYGGHQYHASCANFWINCVEPKPPGLVLPDLL

SEQ ID NO: 891488 - protein, 1097 aa, Homo sapiens
TQPLPPSQSPVPFALHGVPGQIPYFSTASASHSVPEAGPSLEEKFLVSCDISTSGQEQIKLNTSEVGHKALGPGSSKKYPSLMASNGVAVDGCVSGTTTAEAENTSDQNLSIEESGVGVFPSQDPAQPRMPPWIYNESLVPDAYKKILETTMTPTGIDTAKLYPILMSSGLPRETLGQIWALANRTTPGKLTKEELYTVLAMIAVTQRGVPAMSPDALNQFPAAPIPTLSGFSMTLPTPVSQPTVIPSGPAGSMPLSLGQPVMGINLVGPVGGAAAQASSGFIPTYPANQVVKPEEDDFQDFQDASKSGSLDDSFSDFQELPASSKTSNSQHGNSAPSLLMPLPGTKALPSMDKYAVFKGIAADKSSENTVPPGDPGDKYSAFRELEQTAENKPLGESFAEFRSAGTDDGFTDFKTADSVSPLEPPTKDKTFPPSFPSGTIQQKQQTQVKNPLNLADLDMFSSVNCSSEKPLSFSAVFSTSKSVSTPQSTGSAATMTALAATKTSSLADDFGEFSLFGEYSGLAPVGEQDDFADFMAFSNSSISSEQKPDDKYDALKEEASPVPLTSNVGSTVKGGQNSTAASTKYDVFRQLSLEGSGLGVEDLKDNTPSGKSDDDFADFHSSKFSSINSDKSLGEKAVAFRHTKEDSASVKSLDLPSIGGSSVGKEDSEDALSVQFDMKLADVGGDLKHVMSDSSLDLPTVSGQHPPAAGSGSPSATSILQKKETSFGSSENITMTSLSKVTTFVSEDALPETTFPALASFKDTIPQTSEQKEYENRDYKDFTKQDLPTAERSQEATCPSPASSGASQETPNECSDDFGEFQSEKPKISKFDFLVATSQSKMKSSEEMIKSELATFDLSVQGSHKRSLSLGDKEISRSSPSPALEQPFRDRSNTLNEKPALPVIRDKYKDLTGEVEENERYAYEWQRCLGSALNVIKKANDTLNGISSSSVCTEVIQSAQGMEYLLGVVEVYRVTKRVELGIKATAVCSEKLQQLLKDIDKVWNNLIGFMSLATLTPDENSLDFSSCMLRPGIKNAQELACGVCLLNVDSRSRAFNSETDSFKLAYGGHQYHASCANFWINCVEPKPPGLVLPDLL

SEQ ID NO: 891489 - protein, 1316 aa, Homo sapiens
IRWRRRRQRQVGSKMALRPGAGSGGGGAAGAGAGSAGGGGFMFPVAGGIRPPQAGLMPMQQQGFPMVSVMQPNMQGIMGMNYSSQMSQGPIAMQAGIPMGPMPAAGMPYLGQAPFLGMRPPGPQYTPDMQKQFAEEQQKRFEQQQKLLEEERKRRQFEEQKQKLRLLSSVKPKTGEKSRDDALEAIKGNLDGFSRDAKMHPTPASHPKKPGPSLEEKFLVSCDISTSGQEQIKLNTSEVGHKALGPGSSKKYPSLMASNGVAVDGCVSGTTTAEAENTSDQNLSIEESGVGVFPSQDPAQPRMPPWIYNESLVPDAYKKILETTMTPTGIDTAKLYPILMSSGLPRETLGQIWALANRTTPGKLTKEELYTVLAMIAVTQRGVPAMSPDALNQFPAAPIPTLSGFSMTLPTPVSQPTVIPSGPAGSMPLSLGQPVMGINLVGPVGGAAAQASSGFIPTYPANQVVKPEEDDFQDFQDASKSGSLDDSFSDFQELPASSKTSNSQHGNSAPSLLMPLPGTKALPSMDKYAVFKGIAADKSSENTVPPGDPGDKYSAFRELEQTAENKPLGESFAEFRSAGTDDGFTDFKTADSVSPLEPPTKDKTFPPSFPSGTIQQKQQTQVKNPLNLADLDMFSSVNCSSEKPLSFSAVFSTSKSVSTPQSTGSAATMTALAATKTSSLADDFGEFSLFGEYSGLAPVGEQDDFADFMAFSNSSISSEQKPDDKYDALKEEASPVPLTSNVGSTVKGGQNSTAASTKYDVFRQLSLEGSGLGVEDLKDNTPSGKSDDDFADFHSSKFSSINSDKSLGEKAVAFRHTKEDSASVKSLDLPSIGGSSVGKEDSEDALSVQFDMKLADVGGDLKHVMSDSSLDLPTVSGQHPPAADIEDLKYAAFGSYSSNFAVSTLTSYDWSDRDDATQGRKLSPFVLSAGSGSPSATSILQKKETSFGSSENITMTSLSKVTTFVSEDALPETTFPALASFKDTIPQTSEQKEYENRDYKDFTKQDLPTAERSQEATCPSPASSGASQETPNECSDDFGEFQSEKPKISKFDFLVATSQSKMKSSEEMIKSELATFDLSVQGSHKRSLSLGDKEISRSSPSPALEQPFRDRSNTLNEKPALPVIRDKYKDLTGEVEENERYAYEWQRCLGSALNVIKKANDTLNGISSSSVCTEVIQSAQGMEYLLGVVEVYRVTKRVELGIKATAVCSEKLQQLLKDIDKVWNNLIGFMSLATLTPDENSLDFSSCMLRPGIKNAQELACGVCLLNVDSRSRAFNSETDSFKLAYGGHQYHASCANFWINCVEPKPPGLVLPDLL

SEQ ID NO: 891490 - protein, 250 aa, Homo sapiens
IRWRRRRQRQVGSKMALRPGAGSGGGGAAGAGAGSAGGGGFMFPVAGGIRPPQAGLMPMQQQGFPMVSVMQPNMQGIMGMNYSSQMSQGPIAMQAGIPMGPMPAAGMPYLGQAPFLGMRPPGPQYTPDMQKQFAEEQQKRFEQQQKLLEEERKRRQFEEQKQKLRLLSSVKPKTGEKSRDDALEAIKGNLDGFSRDAKMHPTPASHPKKPGSFKRHYIFLFWEGDLCSPCFFTSPLYVCVKSQCRTLPSS

SEQ ID NO: 891491 - protein, 483 aa, Homo sapiens
MTMPVNGAHKDADLWSSHDKMLAQPLKDSDVEVYNIIKKESNRQRVGLELIASENFASRAVLEALGSCLNNKYSEGYPGQRYYGGTEFIDELETLCQKRALQAYKLDPQCWGVNVQPYSGSPANFAVYTALVEPHGRIMGLDLPDGGHLTHGFMTDKKKISATSIFFESMPYKVNPDTGYINYDQLEENARLFHPKLIIAGTSCYSRNLEYARLRKIADENGAYLMADMAHISGLVAAGVVPSPFEHCHVVTTTTHKTLRGCRAGMIFYRKGVKSVDPKTGKEILYNLESLINSAVFPGLQGGPHNHAIAGVAVALKQAMTLEFKVYQHQVVANCRALSEALTELGYKIVTGGSDNHLILVDLRSKGTDGGRAEKVLEACSIACNKNTCPGDRSALRPSGLRLGTPALTSRGLLEKDFQKVAHFIHRGIELTLQIQSDTGVRATLKEFKERLAGDKYQAAVQALREEVESFASLFPLPGLPDF

SEQ ID NO: 891492 - protein, 483 aa, Homo sapiens; identical to SEQ ID NO: 891491

SEQ ID NO: 891493 - protein, 483 aa, Homo sapiens; identical to SEQ ID NO: 891491

SEQ ID NO: 891494 - protein, 444 aa, Homo sapiens
MTMPVNGAHKDADLWSSHDKMLAQPLKDSDVEVYNIIKKESNRQRVGLELIASENFASRAVLEALGSCLNNKYSEGYPGQRYYGGTEFIDELETLCQKRALQAYKLDPQCWGVNVQPYSGSPANFAVYTALVEPHGRIMGLDLPDGGHLTHGFMTDKKKISATSIFFESMPYKVNPDTGYINYDQLEENARLFHPKLIIAGTSCYSRNLEYARLRKIADENGAYLMADMAHISGLVAAGVVPSPFEHCHVVTTTTHKTLRGCRAGMIFYRKGVAVALKQAMTLEFKVYQHQVVANCRALSEALTELGYKIVTGGSDNHLILVDLRSKGTDGGRAEKVLEACSIACNKNTCPGDRSALRPSGLRLGTPALTSRGLLEKDFQKVAHFIHRGIELTLQIQSDTGVRATLKEFKERLAGDKYQAAVQALREEVESFASLFPLPGLPDF

SEQ ID NO: 891495 - protein, 483 aa, Homo sapiens; identical to SEQ ID NO: 891491

SEQ ID NO: 891496 - protein, 127 aa, Homo sapiens
ALRPSGLRLGTPALTSRGLLEKDFQKEPTLFTEGGPHNHAIAGVAVALKQAMTLEFKVYQHQVVANCRALSEALTELGYKIVTGVRATLKEFKERLAGDKYQAAVQALREEVESFASLFPLPGLPDF

SEQ ID NO: 891497 - protein, 483 aa, Homo sapiens; identical to SEQ ID NO: 891491

SEQ ID NO: 891498 - protein, 443 aa, Homo sapiens
MPFVSFSCLIILGIEVVLAGILVLFLKVTILVSIVWSRHICFILQVLFGSFSAGSAPAAGLTTTLGLLRDSWVCEPYLVEQAEHTSIHPVSPSSPHLGHHSSCHGGWSQFKWEDRRQVWLEEAARTCLPDIPQVNPDTGYINYDQLEENARLFHPKLIIAGTSCYSRNLEYARLRKIADENGAYLMADMAHISGLVAAGVVPSPFEHCHVVTTTTHKTLRGCRAGMIFYRKGVKSVDPKTGKEILYNLESLINSAVFPGLQGGPHNHAIAGVAVALKQAMTLEFKVYQHQVVANCRALSEALTELGYKIVTGGSDNHLILVDLRSKGTDGGRAEKVLEACSIACNKNTCPGDRSALRPSGLRLGTPALTSRGLLEKDFQKVAHFIHRGIELTLQIQSDTGVRATLKEFKERLAGDKYQAAVQALREEVESFASLFPLPGLPDF

SEQ ID NO: 891499 - protein, 483 aa, Homo sapiens; identical to SEQ ID NO: 891491

SEQ ID NO: 891500 - protein, 483 aa, Homo sapiens; identical to SEQ ID NO: 891491

SEQ ID NO: 891501 - protein, 434 aa, Homo sapiens
MTMPVNGAHKDADLWSSHDKMLAQPLKDSDVEVYNIIKKESNRQRVGLELIASENFASRAVLEALGSCLNNKYSEGYPGQRYYGGTEFIDELETLCQKRALQAYKLDPQCWGVNVQPYSGSPANFAVYTALVEPHGRIMGLDLPDGGHLTHGFMTDKKKISATSIFFESMPYKVNPDTGYINYDQLEENARLFHPKLIIAGTSCYSRNLEYARLRKIADENGAYLMADMAHISGLVAAGVVPSPFEHCHVVTTTTHKTLRGCRAGMIFYRKGVKSVDPKTGKEILYNLESLINSAVFPGLQGGPHNHAIAGVAVALKQAMTLEFKVYQHQVVANCRALSEALTELGYKIVTGGSDNHLILVDLRSKGTDGGRAEKVLEACSIACNKNTCPGDRSALRPSGLRLGTPALTSRGLLEKDFQCQSHPERVQGETGRG

SEQ ID NO: 891502 - protein, 483 aa, Homo sapiens; identical to SEQ ID NO: 891491

SEQ ID NO: 891503 - protein, 180 aa, Homo sapiens
MFFCDVDIYFSAEFLNSCRLNAEPGKKVFYPVVFSLYNPAIVYANQEVPPPVEQQLVHKKDSGFWRDFGFGMTCQYRSDFLTIGGFDMEVKGWGGEDVHLYRKYLHGDLIVIRTPVPGLFHLWHEKRCADELTPEQYRMCIQSKAMNEASHSHLGMLVFREEIETHLHKQAYRTNSEAVG

SEQ ID NO: 891504 - protein, 109 aa, Homo sapiens
MTCQYRSDFLTIGGFDMEVKGWGGEDVHLYRKYLHGDLIVIRTPVPGLFHLWHEKRCADELTPEQYRMCIQSKAMNEASHSHLGMLVFREEIETHLHKQAYRTNSEAVG

SEQ ID NO: 891505 - protein, 478 aa, Homo sapiens
MPVIQHWEAKAGGPPEVGSLSPATVWVLPAIGPRSLGLSYRSEYHAVLQRPAARVPGRWSRPHQRPRGMEAENAGSYSLQQAQAFYTFPFQQLMAEAPNMAVVNEQQMPEEVPAPAPAQEPVQEAPKGRKRKPRTTEPKQPVEPKKPVESKKSGKSAKSKEKQEKITDTFKVKRKVDRFNGVSEAELLTKTLPDILTFNLDIVIIGINPGLMAAYKGHHYPGPGNHFWKCLFMSGLSEVQLNHMDDHTLPGKYGIGFTNMVERTTPGSKDLSSKEFREGGRILVQKLQKYQPRIAVFNGKCIYEIFSKEVFGVKVKNLEFGLQPHKIPDTETLCYVMPSSSARCAQFPRAQDKVHYYIKLKDLRDQLKGIERNMDVQEVQYTFDLQLAQEDAKKMAVKEEKYDPGYEAAYGGAYGENPCSSEPCGFSSNGLIESVELRGESAFSGIPNGQWMTQSFTDQIPSFSNHCGTQEQEEESHA

SEQ ID NO: 891506 - protein, 477 aa, Homo sapiens
SAAQKGGPWGTVEAWRRSLSPATVWVLPAIGPRSLGLSYRSEYHAVLQRPAARVPGRWSRPHQRPRGMEAENAGSYSLQQAQAFYTFPFQQLMAEAPNMAVVNEQQMPEEVPAPAPAQEPVQEAPKGRKRKPRTTEPKQPVEPKKPVESKKSGKSAKSKEKQEKITDTFKVKRKVDRFNGVSEAELLTKTLPDILTFNLDIVIIGINPGLMAAYKGHHYPGPGNHFWKCLFMSGLSEVQLNHMDDHTLPGKYGIGFTNMVERTTPGSKDLSSKEFREGGRILVQKLQKYQPRIAVFNGKCIYEIFSKEVFGVKVKNLEFGLQPHKIPDTETLCYVMPSSSARCAQFPRAQDKVHYYIKLKDLRDQLKGIERNMDVQEVQYTFDLQLAQEDAKKMAVKEEKYDPGYEAAYGGAYGENPCSSEPCGFSSNGLIESVELRGESAFSGIPNGQWMTQSFTDQIPSFSNHCGTQEQEEESHA

SEQ ID NO: 891507 - protein, 477 aa, Homo sapiens; identical to SEQ ID NO: 891506

SEQ ID NO: 891508 - protein, 267 aa, Homo sapiens
MAAYKGHHYPGPGNHFWKCLFMSGLSEVQLNHMDDHTLPGKYGIGFTNMVERTTPGSKDLSSKEFREGGRILVQKLQKYQPRIAVFNGKCIYEIFSKEVFGVKVKNLEFGLQPHKIPDTETLCYVMPSSSARCAQFPRAQDKVHYYIKLKDLRDQLKGIERNMDVQEVQYTFDLQLAQEDAKKMAVKEEKYDPGYEAAYGGAYGENPCSSEPCGFSSNGLIESVELRGESAFSGIPNGQWMTQSFTDQIPSFSNHCGTQEQEEESHA

SEQ ID NO: 891509 - protein, 477 aa, Homo sapiens; identical to SEQ ID NO: 891506

SEQ ID NO: 891510 - protein, 154 aa, Homo sapiens
MPVIQHWEAKAGGPPEVGSLSPATVWVLPAIGPRSLGLSYRSEYHAVLQRPAARVPGRWSRPHQRPRGMEAENAGSYSLQQAQAFYTFPFQQLMAEAPNMAVVNEQQMPEEVPAPAPAQEPVQVEAPYGLNCGPWSPGPELTGGTLNTWNFKVI

SEQ ID NO: 891511 - protein, 477 aa, Homo sapiens; identical to SEQ ID NO: 891506

SEQ ID NO: 891512 - protein, 459 aa, Homo sapiens
SAAQKGGPWGTVEAWRRSLSPATVWVLPAIGPRSLGLSYRSEYHAVLQRPAARVPGRWSRPHQRPRGMEAENAGSYSLQQAQAFYTFPFQQLMAEAPNMAVVNEQQMPEEVPAPAPAQEPVQEAPKGRKRKPRTTEPKQPVEPKKPVESKKSGKSAKSKEKQEKITDTFKVKSPDILTFNLDIVIIGINPGLMAAYKGHHYPGPGNHFWKCLFMSGLSEVQLNHMDDHTLPGKYGIGFTNMVERTTPGSKDLSSKEFREGGRILVQKLQKYQPRIAVFNGKCIYEIFSKEVFGVKVKNLEFGLQPHKIPDTETLCYVMPSSSARCAQFPRAQDKVHYYIKLKDLRDQLKGIERNMDVQEVQYTFDLQLAQEDAKKMAVKEEKYDPGYEAAYGGAYGENPCSSEPCGFSSNGLIESVELRGESAFSGIPNGQWMTQSFTDQIPSFSNHCGTQEQEEESHA

SEQ ID NO: 891513 - protein, 509 aa, Homo sapiens
MPVIQHWEAKAGGPPEVGSLSPATVWVLPAIGPRSLGLSYRSEYHAVLQRPAARVPGRWSRPHQRPRGMEAENAGSYSLQQAQAFYTFPFQQLMAEAPNMAVVNEQQMPEEVPAPAPAQEPVQVGLKLLMMAVVNEQQMPEEVPAPAPAQEPVQEAPKGRKRKPRTTEPKQPVEPKKPVESKKSGKSAKSKEKQEKITDTFKVKRKVDRFNGVSEAELLTKTLPDILTFNLDIVIIGINPGLMAAYKGHHYPGPGNHFWKCLFMSGLSEVQLNHMDDHTLPGKYGIGFTNMVERTTPGSKDLSSKEFREGGRILVQKLQKYQPRIAVFNGKCIYEIFSKEVFGVKVKNLEFGLQPHKIPDTETLCYVMPSSSARCAQFPRAQDKVHYYIKLKDLRDQLKGIERNMDVQEVQYTFDLQLAQEDAKKMAVKEEKYDPGYEAAYGGAYGENPCSSEPCGFSSNGLIESVELRGESAFSGIPNGQWMTQSFTDQIPSFSNHCGTQEQEEESHA

SEQ ID NO: 891514 - protein, 477 aa, Homo sapiens; identical to SEQ ID NO: 891506

SEQ ID NO: 891515 - protein, 237 aa, Homo sapiens
PVACDPVIASVMSWVQAASLIQGPGDKGDVFDEEADESLLAQREWQSNMQRRVKEGYRDGIDAGKAVTLQQGFNQGYKKGAEVILNYGRLRGTLSALLSWCHLHNNNSTLINKINNLLDAVGQCEEYVLKHLKSITPPSHVVDLLDSIEDMDLCHVVPAEKKIDEAKDERLCENNAEFNKNCSKSHSGIDCSYVECCRTQEHAHSENPSPTWILEQTASLVKQLGLSVDVLQHLKQL

SEQ ID NO: 891516 - protein, 98 aa, Homo sapiens
PVACDPVIASVMSWVQAASLIQGPGDKGDVFDEEADESLLAQREWQSNMQRRVKEGYRDGIDAGKAVTLQQGFNQGYKKGAEVILNYGRLRGTLSWPV

SEQ ID NO: 891517 - protein, 237 aa, Homo sapiens; identical to SEQ ID NO: 891515

SEQ ID NO: 891518 - protein, 219 aa, Homo sapiens
PVACDPVIASVMSWVQAASLIQGPGDKGDVFDEEADESLLAQREWQSNMQRRVKEGYRDGIDAGKAVTLQQGFNQGYKKGAEVILNYGRLRGTLSALLSWCHLHNNNSTLINNLKSITPPSHVVDLLDSIEDMDLCHVVPAEKKIDEAKDERLCENNAEFNKNCSKSHSGIDCSYVECCRTQEHAHSENPSPTWILEQTASLVKQLGLSVDVLQHLKQL

SEQ ID NO: 891519 - protein, 393 aa, Homo sapiens
MEYTIDIIFSQTWYDERLCYNDTFESLVLNGNVVSQLWIPDTFFRNSKRTHEHEITMPNQMVRIYKDGKVLYTIRMTIDAGCSLHMLRFPMDSHSCPLSFSSFSYPENEMIYKWENFKLEINEKNSWKLFQFDFTGVSNKTEIITTPVGDFMVMTIFFNVSRRFGYVAFQNYVPSSVTTMLSWVSFWIKTESAPARTSLGITSVLTMTTLGTFSRKNFPRVSYITALDFYIAICFVFCFCALLEFAVLNFLIYNQTKAHASPKLRHPRINSRAHARTRARSRACARQHQEAFVCQIVTTEGSDGEERPSCSAQQPPSPGSPEGPRSLCSKLACCEWCKRFKKYFCMVPDCEGSTWQQGRLCIHVYRLDNYSRVVFPVTFFFFNVLYWLVCLNL

SEQ ID NO: 891520 - protein, 361 aa, Homo sapiens
MEYTIDIIFSQTWNSKRTHEHEITMPNQMVRIYKDGKVLYTIRMTIDAGCSLHMLRFPMDSHSCPLSFSSFSYPENEMIYKWENFKLEINEKNSWKLFQFDFTGVSNKTEIITTPVGDFMVMTIFFNVSRRFGYVAFQNYVPSSVTTMLSWVSFWIKTESAPARTSLGITSVLTMTTLGTFSRKNFPRVSYITALDFYIAICFVFCFCALLEFAVLNFLIYNQTKAHASPKLRHPRINSRAHARTRARSRACARQHQEAFVCQIVTTEGSDGEERPSCSAQQPPSPGSPEGPRSLCSKLACCEWCKRFKKYFCMVPDCEGSTWQQGRLCIHVYRLDNYSRVVFPVTFFFFNVLYWLVCLNL

SEQ ID NO: 891521 - protein, 154 aa, Homo sapiens [sequence omitted]

SEQ ID NO: 891522 - protein, 361 aa, Homo sapiens
MMSWAQRKAHTSLGVMIAAECLGRVCQSIKQHECYKRRCQLEIEVVIRSRRSHDRLAESHDQGHNVQVTVRTSVCPVDVYATDLTSGGLTEMFILSFFFSFPEDTQFGLGVIDYRPKSPGLESWCKIAGHLRKSVSRWDWLWVRCVWKMSVGAGSWWAFSIRFQSADVCIAHVKQGATKTLGSRLVPVLTTCGAVLTHEGILPSHECAEKEAKSILCFSTTAQTSLVSFAESRHSEGQQCRCDVPQRVMKPLVSHLDISCVGMISRRLIDFFLSPDSLANLQRQTLGVGQWTEKEAIKILALAELSTGHWSCSKSFFWASSGPICMYCIVTSCLYPREYCELKNETLTVHVLLRGTVVSAL

SEQ ID NO: 891523 - protein, 240 aa, Homo sapiens
MTIFFNVSRRFGYVAFQNYVPSSVTTMLSWVSFWIKTESAPARTSLGITSVLTMTTLGTFSRKNFPRVSYITALDFYIAICFVFCFCALLEFAVLNFLIYNQTKAHASPKLRHPRINSRAHARTRARSRACARQHQEAFVCQIVTTEGSDGEERPSCSAQQPPSPGSPEGPRSLCSKLACCEWCKRFKKYFCMVPDCEGSTWQQGRLCIHVYRLDNYSRVVFPVTFFFFNVLYWLVCLNL

SEQ ID NO: 891524 - protein, 72 aa, Homo sapiens
QSPNSAQSPNRAQSPNSAQSPNSAQRPNSAQSPNSAQSPNKTMPKYRRISYLPTMLTTRQLLHFSRSPLLPL

SEQ ID NO: 891525 - protein, 71 aa, Homo sapiens
AQSVSRDLRAGGRAGLRGNVVQSSSSPPRHLIDPPVENMYTEKCSNHKCTADELSENDHSGVKKAKSRTRM

SEQ ID NO: 891526 - protein, 506 aa, Homo sapiens
MLSKVLPVLLGILLILQSRVEGPQTESKNEASSRDVVYGPQPQPLENQLLSEETKSTETETGSRVGKLPEASRILNTILSNYDHKLRPGIGEKPTVVTVEISVNSLGPLSILDMEYTIDIIFSQTWYDERLCYNDTFESLVLNGNVVSQLWIPDTFFRNSKRTHEHEITMPNQMVRIYKDGKVLYTIRMTIDAGCSLHMLRFPMDSHSCPLSFSSFSYPENEMIYKWENFKLEINEKNSWKLFQFDFTGVSNKTEIITTPVGDFMVMTIFFNVSRRFGYVAFQNYVPSSVTTMLSWVSFWIKTESAPARTSLGITSVLTMTTLGTFSRKNFPRVSYITALDFYIAICFVFCFCALLEFAVLNFLIYNQTKAHASPKLRHPRINSRAHARTRARSRACARQHQEAFVCQIVTTEGSDGEERPSCSAQQPPSPGSPEGPRSLCSKLACCEWCKRFKKYFCMVPDCEGSTWQQGRLCIHVYRLDNYSRVVFPVTFFFFNVLYWLVCLNL

SEQ ID NO: 891527 - protein, 393 aa, Homo sapiens; identical to SEQ ID NO: 891519

SEQ ID NO: 891528 - protein, 85 aa, Homo sapiens
PPFLQPLLTSPRHSRSGTTCLFSPSSPSPLHLHWHYLGLGLCYLPPGLLPHLHFETAHVQNEIHCLLQTSTTKTSVLLLGSHLSH

SEQ ID NO: 891529 - protein, 557 aa, Homo sapiens
MMSWAQRKAHTSLGVMIAAECLGRVCQSIKQHECYKRRCQLEIEVVIRSRRSHDRLAESHDQGHNVQVTVRTSVCPVDVYATDLTSGGLTEMFILSFFFSFPEDTQFGLGVIDYRPKSPGLESWCKIAGHLRKSVSRWDWLWVRCVWKMSVGAGSWWAFSIRFQSADVCIAHVKQGATKTLGSRLVPVLTTCGAVLTHEGILPSHECAEKEAKSILCFSTTAQTSLVSFAESRHSEGQQCRCDVPQRVMKPLVSHLDISCVGMISRRLIDFFLSPDSLANLQRQTLGVGQWTEKEAIKILALAELSTGHWSCSDFMVMTIFFNVSRRFGYVAFQNYVPSSVTTMLSWVSFWIKTESAPARTSLGITSVLTMTTLGTFSRKNFPRVSYITALDFYIAICFVFCFCALLEFAVLNFLIYNQTKAHASPKLRHPRINSRAHARTRARSRACARQHQEAFVCQIVTTEGSDGEERPSCSAQQPPSPGSPEGPRSLCSKLACCEWCKRFKKYFCMVPDCEGSTWQQGRLCIHVYRLDNYSRVVFPVTFFFFNVLYWLVCLNL

SEQ ID NO: 891530 - protein, 313 aa, Homo sapiens
MRSPCPTRWSASTRMARCCTQLVSYPENEMIYKWENFKLEINEKNSWKLFQFDFTGVSNKTEIITTPVGDFMVMTIFFNVSRRFGYVAFQNYVPSSVTTMLSWVSFWIKTESAPARTSLGITSVLTMTTLGTFSRKNFPRVSYITALDFYIAICFVFCFCALLEFAVLNFLIYNQTKAHASPKLRHPRINSRAHARTRARSRACARQHQEAFVCQIVTTEGSDGEERPSCSAQQPPSPGSPEGPRSLCSKLACCEWCKRFKKYFCMVPDCEGSTWQQGRLCIHVYRLDNYSRVVFPVTFFFFNVLYWLVCLNL

SEQ ID NO: 891531 - protein, 135 aa, Homo sapiens
MEYTIDIIFSQTWYDERLCYNDTFESLVLNGNVVSQLWIPDTFFRNSKRTHEHEITMPNQMVRIYKDGKVLYTIRMTIDAGCSLHMLRFPMDSHSCPLSFSSCEYLLKFLGPQKHAGLLLFLILAIYIFLPLLFF

SEQ ID NO: 891532 - protein, 124 aa, Homo sapiens
MWHNENPSPVQVAPRPGPRLSSAPCPIFGKILLLWSSPLALKNKGLVRGPSHCCFPKKAWIQGRGLPRATPLTPSQRPEQPLSGWFGAGAAWRKDSEGGPSRLHPLAPLPSPSPPVASENLRDR

SEQ ID NO: 891533 - protein, 204 aa, Homo sapiens
GPMFTELRSKLSPPRGRAGAVRAGFGERRDVDATAHFSFCRTLLEHTVSAESIPCHLPRTPGTSLTWHDSRSQRAASSRPIKLLQQPGTDTPQGRLYSDHYGLYHTSPSLGGLTRPVVLWSQQDVCKWLKKHCPHNYLVYVEAFSQHAITGRALLRLNAEKLQRMGLAQEAQRQEVLQQVLRLQVREEGRSLQLLSQASFGKMS

SEQ ID NO: 891534 - protein, 262 aa, Homo sapiens
RTTLMFTVGWAVSKSQAGFSGEAGAYLKASKDVGDRGKCVGGVDLPLVLAPALFTCRYHTEPSFIHSLTMNVGCPSVNQTWIKTPASPDSATAHFSFCRTLLEHTVSAESIPCHLPRTPGTSLTWHDSRSQRAASSRPIKLLQQPGTDTPQGRLYSDHYGLYHTSPSLGGLTRPVVLWSQQDVCKWLKKHCPHNYLVYVEAFSQHAITGRALLRLNAEKLQRMGLAQEAQRQEVLQQVLRLQVREEGRSLQLLSQASFGKMS

SEQ ID NO: 891535 - protein, 124 aa, Homo sapiens; identical to SEQ ID NO: 891532

SEQ ID NO: 891536 - protein, 223 aa, Homo sapiens
RTTLMFTVGWAVSKSQAGFSGEAGAYLKASKDVGDRGKCVGGVDLPLVLAAATAHFSFCRTLLEHTVSAESIPCHLPRTPGTSLTWHDSRSQRAASSRPIKLLQQPGTDTPQGRLYSDHYGLYHTSPSLGGLTRPVVLWSQQDVCKWLKKHCPHNYLVYVEAFSQHAITGRALLRLNAEKLQRMGLAQEAQRQEVLQQVLRLQVREEGRSLQLLSQASFGKMS

SEQ ID NO: 891537 - protein, 221 aa, Homo sapiens
NLDNWPGRSHPVSPHHGETLIPAPVWLRKYSARLPPSAFAQGALLPLLPSLLLCLALAHARLSRLPCFAALTFLYSDKKKKSEIKLVPKCWRCWVCEERASGQPRPPGGSGVTPWRGVWATPRRGWKQGSSHACGRSPVLDTTPDTLEGTAQTAREGPAAAVTEDHGGVLRTADIHSLWSSGGRSPKSSSLRASWGDSSPLQLPVAAGGTRAHGHYPSPPL

SEQ ID NO: 891538 - protein, 765 aa, Homo sapiens
QASRACVIGRGRGRFLELQPRLRDVSARQSWPVELVQTKPRRDGLEPGPGFAQAAFEADPAGSSWGLPAFELRWRAGARSPVRPRLGAAISMATAVSRPCAGRSRDILWRVLGWRIVASIVWSVLFLPICTTVFIIFSRIDLFHPIQWLSDSFSDLYSSYVIFYFLLLSVVIIIISIFNVEFYAVVPSIPCSRLALIGKIIHPQQLMHSFIHAAMGMVMAWCAAVITQGQYSFLVVPCTGTNSFGSPAAQTCLNEYHLFFLLTGAFMGYSYSLLYFVNNMNYLPFPIIQQYKFLRFRRSLLLLVKHSCVESLFLVRNFCILYYFLGYIPKAWISTAMNLHIDEQVHRPLDTVSGLLNLSLLYHVWLCGVFLLTTWYVSWILFKIYATEAHVFPVQPPFAEGSDECLPKVLNSNPPPIIKYLALQDLMLLSQYSPSRRQEVFSLSQPGGHPHNWTAISRECLNLLNGMTQKLILYQEAAATNGRVSSSYPVEPKKLNSPEETAFQTPKSSQMPRPSVPPLVKTSLFSSKLSTPDVVSPFGTPFGSSVMNRMAGIFDVNTCYGSPQSPQLIRRGPRLWTSASDQQMTEFSNPSPSTSISAEGKTMRQPSVIYSWIQNKREQIKNFLSKRVLIMYFFSKHPEASIQAVFSDAQMHIWALEGLSHLVAASFTEDRFGVVQTTLPAILNTLLTLQEAVDKYFKLPHASSKPPRISGSLVDTSYKTLRFAFRASLKTAIYRITTTFGEHLNAVQASAEHQKRLQQFLEFKE

SEQ ID NO: 891539 - protein, 633 aa, Homo sapiens
QASRACVIGRGRGRFLELQPRLRDVSARQSWPVELVQTKPRRDGLEPGPGFAQAAFEADPAGSSWGLPAFELRWRAGARSPVRPRLGAAISMATAVSRPCAGRSRDILWRVLGWRIVASIVWSVLFLPICTTVFIIFSRIDLFHPIQWLSDSFSDLYSSYVIFYFLLLSVVIIIISIFNVEFYAVVPSIPCSRLALIGKIIHPQQLMHSFIHAAMGMVMAWCAAVITQGQYSFLVVPCTGTNSFGSPAAQTCLNEYHLFFLLTGAFMGYSYSLLYFVNNMNYLPFPIIQQYKFLRFRRSLLLLVKHSCVESLFLVRNFCILYYFLGYIPKAWISTAMNLHIDEQVHRPLDTVSGLLNLSLLYHVWLCGVFLLTTWYVSWILFKIYATEAHVFPVQPPFAEGSDECLPKVLNSNPPPIIKYLALQDLMLLSQYSPSRRQEVFSLSQPGGHPHNWTAISRECLNLLNGMTQKLILYQEAAATNGRVSSSYPVEPKKLNSPEETAFQTPKSSQMPRPSVPPLVKTSLFSSKLSTPDVVSPFGTPFGSSVMNRMAGIFDVNTCYGSPQSPQLIRRGPRLWTSASDQQMTEFSNPSPSTSISAEAPRGLHSGCFFRCPNAYLGIRRSVALSSSIIYRG

SEQ ID NO: 891540 - protein, 131 aa, Homo sapiens
MQRRHLLLAPRWTLLRRDRLVARGRFLELQPRLRDVSARQSWPVELVQTKPRRDGLEPGPGFAQAAFEADPAGSSWGLPAFELRWRAGARSPVRPRLGAAISMATAVSRPCAGRSRDILWRILSVTCIVPM

SEQ ID NO: 891541 - protein, 504 aa, Homo sapiens
QASRACVIGRGRGRFLELQPRLRDVSARQSWPVELVQTKPRRDGLEPGPGFAQAAFEADPAGSSWGLPAFELRWRAGARSPVRPRLGAAISMATAVSRPCAGRSRDILWRVLGWRIVASIVWSVLFLPICTTVFIIFSRIDLFHPIQWLSDSFSDLYSSYVIFYFLLLSVVIIIISIFNVEFYAVVPSIPCSRLALIGKIIHPQQLMHSFIHAAMGMVMAWCAAVITQGQYSFLVVPCTGTNSFGSPAAQTCLNEYHLFFLLTGAFMGYSYSLLYFVNNMNYLPFPIIQQYKFLRFRRSLLLLVKHSCVESLFLVRNFCILYYFLGYIPKAWISTAMNLHIDEQVHRPLDTVSGLLNLSLLYHVWLCGVFLLTTWYVSWILFKIYATEAHVFPVQPPFAEGSDECLPKVLNSNPPPIIKYLALQDLMLLSQYSPSRRQEVFSLSQPGGHPHNWTAISRECLNLLNGMTQKLILYQEAAATNGRVSSSYPVEPKKLNSPGSRQVL

SEQ ID NO: 891542 - protein, 793 aa, Homo sapiens
QASRACVIGRGRGRFLELQPRLRDVSARQSWPVELVQTKPRRDGLEPGPGFAQAAFEADPAGSSWGLPAFELRWRAGARSPVRPRLGAAISMATAVSRPCAGRSRDILWRVLGWRIVASIVWSVLFLPICTTVFIIFSRIDLFHPIQWLSDSFSDLYSSYVIFYFLLLSVVIIIISIFNVEFYAVVPSIPCSRLALIGKIIHPQQLMHSFIHAAMGMVMAWCAAVITQGQYSFLVVPCTGTNSFGSPAAQTCLNEYHLFFLLTGAFMGYSYSLLYFVNNMNYLPFPIIQQYKFLRFRRSLLLLVKHSCVESLFLVRNFCILYYFLGYIPKAWISTAMNLHIDEQVHRPLDTVSGLLNLSLLYHVWLCGVFLLTTWYVSWILFKIYATEAHVFPVQPPFAEGSDECLPKVLNSNPPPIIKYLALQDLMLLSQYSPSRRQEVFSLSQPGGHPHNWTAISRECLNLLNGMTQKLILYQEAAATNGRVSSSYPVEPKKLNSPEETAFQTPKSSQMPRPSVPPLVKTSLFSSKLSTPDVVSPFGTPFGSSVMNRMAGIFDVNTCYGSPQSPQLIRRGPRLWTSASDQQMTEFSNPSPSTSISAEGKTMRQPSVIYSWIQNKREQIKNFLSKRVLIMYFFSKHPEASIQAVFSDAQMHIWALEGLSHLVAASFTEDRFGVVQTTLPAILNTLLTLQEAVDKYFKLPHASSKPPRISGSLVDTSYKTLRFAFRASLKTAIYRITTTFGEHLNKLKTWGEQSIPEMNPWCFVIHAGKTPTDHNTLRNRTREKTTNAKPVYI

SEQ ID NO: 891543 - protein, 494 aa, Homo sapiens
QASRACVIGRGRGRFLELQPRLRDVSARQSWPVELVQTKPRRDGLEPGPGFAQAAFEADPAGSSWGLPAFELRWRAGARSPVRPRLGAAISMATAVSRPCAGRSRDILWRVLGWRIVASIVWSVLFLPICTTVFIIFSRIDLFHPIQWLSDSFSDLYSSYVIFYFLLLSVVIIIISIFNVEFYAVVPSIPCSRLALIGKIIHPQQLMHSFIHAAMGMVMAWCAAVITQGQYSFLVVPCTGTNSFGSPAAQTCLNEYHLFFLLTGAFMGYSYSLLYFVNNMNYLPFPIIQQYKFLRFRRSLLLLVKHSCVESLFLVRNFCILYYFLGYIPKAWISTAMNLHIDEQVHRPLDTVSGLLNLSLLYHVWLCGVFLLTTWYVSWILFKIYATEAHVFPVQPPFAEGSDECLPKVLNSNPPPIIKYLALQDLMLLSQYSPSRRQEVFSLSQPAPCIGIPMNYDFSFCFIRVHICPTSGKVKQSFRKKVNLYPKHFNKKLK

SEQ ID NO: 891544 - protein, 776 aa, Homo sapiens
MQRRHLLLAPRWTLLRRDRLVARGRFLELQPRLRDVSARQSWPVELVQTKPRRDGLEPGPGFAQAAFEADPAGSSWGLPAFELRWRAGARSPVRPRLGAAISMATAVSRPCAGRSRDILWRVLGWRIVASIVWSVLFLPICTTVFIIFSRIDLFHPIQWLSDSFSDLYSSYVIFYFLLLSVVIIIISIFNVEFYAVVPSIPCSRLALIGKIIHPQQLMHSFIHAAMGMVMAWCAAVITQGQYSFLVVPCTGTNSFGSPAAQTCLNEYHLFFLLTGAFMGYSYSLLYFVNNMNYLPFPIIQQYKFLRFRRSLLLLVKHSCVESLFLVRNFCILYYFLGYIPKAWISTAMNLHIDEQVHRPLDTVSGLLNLSLLYHVWLCGVFLLTTWYVSWILFKIYATEAHVFPVQPPFAEGSDECLPKVLNSNPPPIIKYLALQDLMLLSQYSPSRRQEVFSLSQPGGHPHNWTAISRECLNLLNGMTQKLILYQEAAATNGRVSSSYPVEPKKLNSPEETAFQTPKSSQMPRPSVPPLVKTSLFSSKLSTPDVVSPFGTPFGSSVMNRMAGIFDVNTCYGSPQSPQLIRRGPRLWTSASDQQMTEFSNPSPSTSISAEGKTMRQPSVIYSWIQNKREQIKNFLSKRVLIMYFFSKHPEASIQAVFSDAQMHIWALEGLSHLVAASFTEDRFGVVQTTLPAILNTLLTLQEAVDKYFKLPHASSKPPRISGSLVDTSYKTLRFAFRASLKTAIYRITTTFGEHLNAVQASAEHQKRLQQFLEFKE

SEQ ID NO: 891545 - protein, 765 aa, Homo sapiens; identical to SEQ ID NO: 891538

SEQ ID NO: 891546 - protein, 765 aa, Homo sapiens; identical to SEQ ID NO: 891538

SEQ ID NO: 891547 - protein, 363 aa, Homo sapiens
QASRACVIGRGRGRFLELQPRLRDVSARQSWPVELVQTKPRRDGLEPGPGFAQAAFEADPAGSSWGLPAFELRWRAGARSPVRPRLGAAISMATAVSRPCAGRSRDILWRVLGWRIVASIVWSVLFLPICTTVFIIFSRIDLFHPIQWLSDSFSDLYSSYVIFYFLLLSVVIIIISIFNVEFYAVVPSIPCSRLALIGKIIHPQQLMHSFIHAAMGMVMAWCAAVITQGQYSFLVVPCTGTNSFGSPAAQTCLNEYHLFFLLTGAFMGYSYSLLYFVNNMNYLPFPIIQAVDKYFKLPHASSKPPRISGSLVDTSYKTLRFAFRASLKTAIYRITTTFGEHLNAVQASAEHQKRLQQFLEFKE

SEQ ID NO: 891548 - protein, 374 aa, Homo sapiens
MEPGGEPTGAKESSTLMESLAAVKAAFLAQAPSGSRSAEVQAAQSTEPAAEAGAPEGEGHRGGPPRALGSLGLCENQEARERPGGSPRGPVTSEKTGGQSGLESDVPPNAGPGAEGGGSWKGRPFPCGACGRSFKCSSDAAKHRSIHSGEKPYECSDCGKAFIHSSHVVRHQRAHSGERPYACAECGKAFGQSFNLLRHQRVHTGEKPYACADCGKAFGQRSDAAKHRRTHTGERLYACGECGKRFLHSSNVVRHRRTHHGENPYECRECGQAFSQSSNLLQHQRVHTGERPFACQDCGRAFSRSSFLREHCRIHTGEKPHQCGHCGRAFRALSGFFRHQRLHTGEKPFRCTECGRAFRLSFHLIQHRRVHGAE

SEQ ID NO: 891549 - protein, 124 aa, Homo sapiens
YIKFFYVVEFVRHLMSGLEKSFLIPKLYHSNKLFFSSGLTFLYSNPYNYQENFKTHGNFSRHLKTAGGRGLPQHGARKLWPRPPVLCVSPGWRGTRRAWTRVPGHPTEQNTRFWECLLSQDLDC

SEQ ID NO: 891550 - protein, 954 aa, Homo sapiens
PSRTREMEEKEILRRQIRLLQGLIDDYKTLHGNAPAPGTPAASGWQPPTYHSGRAFSARYPRPSRRGYSSHHGPSWRKKYSLVNRPPGPSDPPADHAVRPLHGARGGQPPVPQQHVLERQVQLSQGQNVVIKVKPPSKSGSASASGAQRGSLEEFEDTPWSDQRPREGEGEPPRGQLQPSRPTRARGTCSVEDPLLVCQKEPGKPRMVKSVGSVGDSPREPRRTVSESVIAVKASFPSSALPPRTGVALGRKLGSHSVASCAPQLLGDRRVDAGHTDQPVPSGSVGGPARPASGPRQAREASLVVTCRTNKFRKNNYKWVAASSKSPRVARRALSPRVAAENVCKASAGMANKVEKPQLIADPEPKPRKPATSSKPGSAPSKYKWKASSPSASSSSSFRWQSEASSKDHASQLSPVLSRSPSGDRPAVGHSGLKPLSGETPLSAYKVKSRTKIIRRRGSTSLPGDKKSGTSPAATAKSHLSLRRRQALRGKSSPVLKKTPNKGLVQVTTHRLCRLPPSRAHLPTKEASSLHAVRTAPTSKVIKTRYRIVKKTPASPLSAPPFPLSLPSWRARRLSLSRSLVLNRLRPVASGGGKAQPGSPWWRSKGYRCIGGVLYKVSANKLSKTSGQPSDAGSRPLLRTGRLDPAGSCSRSLASRAVQRSLAIIRQARQRREKRKEYCMYYNRFGRCNRGERCPYIHDPEKVAVCTRFVRGTCKKTDGTCPFSHHVSKEKMPVCSYFLKGICSNSNCPYSHVYVSRKAEVCSDFLKGYCPLGAKCKKKHTLLCPDFARRGACPRGAQCQLLHRTQKRHSRRAATSPAPGPSDATARSRVSASHGPRKPSASQRPTRQTPSSAALTAAAVAAPPHCPGGSASPSSSKASSSSSSSSSPPASLDHEAPSLQEAALAAACSNRLCKLPSFISLQSSPSPGAQPRVRAPRAPLTKDSGKPLHIKPRL

SEQ ID NO: 891551 - protein, 677 aa, Homo sapiens
PPPAPPPARVNIRLGSRALGSREASLVVTCRTNKFRKNNYKWVAASSKSPRVARRALSPRVAAENVCKASAGMANKVEKPQLIADPEPKPRKPATSSKPGSAPSKYKWKASSPSASSSSSFRWQSEASSKDHASQLSPVLSRSPSGDRPAVGHSGLKPLSGETPLSAYKVKSRTKIIRRRGSTSLPGDKKSGTSPAATAKSHLSLRRRQALRGKSSPVLKKTPNKGLVQVTTHRLCRLPPSRAHLPTKEASSLHAVRTAPTSKVIKTRYRIVKKTPASPLSAPPFPLSLPSWRARRLSLSRSLVLNRLRPVASGGGKAQPGSPWWRSKGYRCIGGVLYKVSANKLSKTSGQPSDAGSRPLLRTGRLDPAGSCSRSLASRAVQRSLAIIRQARQRREKRKEYCMYYNRFGRCNRGERCPYIHDPEKVAVCTRFVRGTCKKTDGTCPFSHHVSKEKMPVCSYFLKGICSNSNCPYSHVYVSRKAEVCSDFLKGYCPLGAKCKKKHTLLCPDFARRGACPRGAQCQLLHRTQKRHSRRAATSPAPGPSDATARSRVSASHGPRKPSASQRPTRQTPSSAALTAAAVAAPPHCPGGSASPSSSKASSSSSSSSSPPASLDHEAPSLQEAALAAACSNRLCKLPSFISLQSSPSPGAQPRVRAPRAPLTKDSGKPLHIKPRL

SEQ ID NO: 891552 - protein, 1002 aa, Homo sapiens
PSRTREMEEKEILRRQIRLLQGLIDDYKTLHGNAPAPGTPAASGWQPPTYHSGRAFSARYPRPSRRGYSSHHGPSWRKKYSLVNRPPGPSDPPADHAVRPLHGARGGQPPVPQQHVLERQVQLSQGQNVVIKVKPPSKSGSASASGAQRGSLEEFEDTPWSDQRPREGEGEPPRGQLQPSRPTRARGTCSVEDPLLVCQKEPGKPRMVKSVGSVGDSPREPRRTVSESVIAVKASFPSSALPPRTGVALGRKLGSHSVASCAPQLLGDRRVDAGHTDQPVPSGSVGGPARPASGPRQAREASLVVTCRTNKFRKNNYKWVAASSKSPRVARRALSPRVAAENVCKASAGMANKVEKPQLIADPEPKPRKPATSSKPGSAPSKYKWKASSPSASSSSSFRWQSEASSKDHASQLSPVLSRSPSGDRPAVGHSGLKPLSGETPLSAYKVKSRTKIIRRRGSTSLPGDKKSGTSPAATAKSHLSLRRRQALRGKSSPVLKKTPNKGLVQVTTHRLCRLPPSRAHLPTKEASSLHAVRTAPTSKVIKTRYRIVKKTPASPLSAPPFPLSLPSWRARRLSLSRSLVLNRLRPVASGGGKAQPGSPWWRSKGYRCIGGVLYKVSANKLSKTSGQPSDAGSRPLLRTGRLDPAGSCSRSLASRAVQRSLAIIRQARQRREKRKEYCMYYNRFGRCNRGERCPYIHDPEKVAVCTRFVRGTCKKTDGTCPFSHHVSKEKMPVCSYFLKGICSNSNCPYSHVYVSRKAEVCSDFLKGYCPLGAKCKKKHTLLCPDFARRGACPRGAQCQLLHRTQKRHSRRAATSPAPGPSDATARSRVSASHGPRKPSASQRPTRQTPSSAALTAAAVAAPPHCPGGSASPSSSKASSSSSSSSSPPTAPNKNVKTKKKKKKKKKKKKNLDGGQKQRRRAQKTTTATHTTQARGHITVVHDAPTSVDTGGETNAGPPKRRATNYFATTTVPSAYALRHNSTQHTRPNNQTHTHSHTTAPK

SEQ ID NO: 891553 - protein, 625 aa, Homo sapiens
PSRTREMEEKEILRRQIRLLQGLIDDYKTLHGNAPAPGTPAASGWQPPTYHSGRAFSARYPRPSRRGYSSHHGPSWRKKYSLVNRPPGPSDPPADHAVRPLHGARGGQPPVPQQHVLERQVQLSQGQNVVIKVKPPSKSGSASASGAQRGSLEEFEDTPWSDQRPREGEGEPPRGQLQPSRPTRARGTCSVEDPLLVCQKEPGKPRMVKSVGSVGDSPREPRRTVSESVIAVKASFPSSALPPRTGVALGRKLGSHSVASCAPQLLGDRRVDAGHTDQPVPSGSVGGPARPASGPRQAREASLVVTCRTNKFRKNNYKWVAASSKSPRVARRALSPRVAAENVCKASAGMANKVEKPQLIADPEPKPRKPATSSKPGSAPSKYKWKASSPSASSSSSFRWQSEASSKDHASQLSPVLSRSPSGDRPAVGHSGLKPLSGETPLSAYKVKSRTKIIRRRGSTSLPGDKKSGTSPAATAKSHLSLRRRQALRGKSSPVLKKTPNKGLVQVTTHRLCRLPPSRAHLPTKEASSLHAVRTAPTSKVIKTRYRIVKKTPASPLSAPPFPLSLPSWRARRLSLSRYHCPCKGRMKFAEVTTPFQGAEPDLLCGLRRGCPRAWEWGDVCCESL

SEQ ID NO: 891554 - protein, 374 aa, Homo sapiens; identical to SEQ ID NO: 891548

SEQ ID NO: 891555 - protein, 363 aa, Homo sapiens
PSRTREMEEKEILRRQIRLLQGLIDDYKTLHGNAPAPGTPAASGWQPPTYHSGRAFSARYPRPSRRGYSSHHGPSWRKKYSLVNRPPGPSDPPADHAVRPLHGARGGQPPVPQQHVLERQVQLSQGQNVVIKVKPPSKSGSASASGAQRGSLEEFEDTPWSDQRPREGEGEPPRGQLQPSRPTRARGTCSVEDPLLVCQKEPGKPRMVKSVGSVGDSPREPRRTVSESVIAVKASFPSSALPPRTGVALGRKLGSHSVASCAPQLLGDRRVDAGHTDQPVPSGSVGGPARPASGPRQGRCFMFSNKGSIRKKKKKKKRAAARRVLYSCITSKSVFTVFCVAIMFKLRKTQFLNYLGRVWILYF

SEQ ID NO: 891556 - protein, 335 aa, Homo sapiens
MEPGGEPTGAKESSTLMESLAGRLDPAGSCSRSLASRAVQRSLAIIRQARQRREKRKEYCMYYNRFGRCNRGERCPYIHDPEKVAVCTRFVRGTCKKTDGTCPFSHHVSKEKMPVCSYFLKGICSNSNCPYSHVYVSRKAEVCSDFLKGYCPLGAKCKKKHTLLCPDFARRGACPRGAQCQLLHRTQKRHSRRAATSPAPGPSDATARSRVSASHGPRKPSASQRPTRQTPSSAALTAAAVAAPPHCPGGSASPSSSKASSSSSSSSSPPASLDHEAPSLQEAALAAACSNRLCKLPSFISLQSSPSPGAQPRVRAPRAPLTKDSGKPLHIKPRL

SEQ ID NO: 891557 - protein, 177 aa, Homo sapiens
SGSKSSLFDTEICQHLILGQPSELYIIEQGVCDLVLCEAAFPKTLAFAYLEDLHSEFDEQHGKKVPTVSRPYSFIEFDTFIQKTKKLYIDSCARRNLGSINTELQDVQRIMVANIEEVLQRGEALSALDSKANNLSSLSKKYRQDAKYLNMHSTYAKLAAVAVFFIMLIVYVRFWWL

SEQ ID NO: 891558 - protein, 177 aa, Homo sapiens; identical to SEQ ID NO: 891557

SEQ ID NO: 891559 - protein, 237 aa, Homo sapiens
MTPDHFPSLFCKEMSVGYANGIRVMSMTHTGEPGFMLYIPIEYALHVYNEVMSVGQKYGIRNAGYYALRSLRIEKFFAFWGQDINNLTTPLECGRESRVKLEKGMDFIGRDALLQQKQNGVYKRLTMFILDDHDSDLDLWPWWGEPIYRNGQYVGKTTSSAYSYSLERHVCLGFVHNFSEDTGEEQVVTADFINRGEYEIDIAGYRFQAKAKLYPVASLFTQKRRKDDMELSDLHGK

SEQ ID NO: 891560 - protein, 142 aa, Homo sapiens
  misc_feature (142)..(142): Xaa can be any naturally occurring amino acid
MTPDHFPSLFCKEMSVGYANGIRVMSMTHTGEPGFMLYIPIEYALHVYNEVMSVGQKYGIRNAGYYALRSLRIEKFFAFWGQDINNLTTPLECGRESRVKLEKGMDFIGRDALLQQKQNGVYKRLTMFILDSSSINTVTAKX

SEQ ID NO: 891561 - protein, 191 aa, Homo sapiens
MTPDHFPSLFCKEMSVGYANGIRVMSMTHTGEPGFMLYIPIEYALHVYNEVMSVGQKYGIRNAGYYALRSLRIEKFFAFWGQDINNLTTPLECGRESRVKLEKGMDFIGRDALLQQKQNGVYKRLTMFILDDHDSDLDLWPWWGEPIYRNGQYVGKTTSSAYSYSLERHVCLGFVLLELKTAAESGGRSHL

SEQ ID NO: 891562 - protein, 122 aa, Homo sapiens
MTPDHFPSLFCKEMSVGYANGIRVMSMTHTGEPGFMLYIPIEYALHVYNEVMSVGQKYGIRNAGYYALRSLRIEKFFAFWGQDINNLTTPLECGRESRVKLEKVLCLPRLHFHSASRVVNLH

SEQ ID NO: 891563 - protein, 265 aa, Homo sapiens
MRFIAGGAMWPSQVLSRSLSLFHSLTLQSTGDQALEVLQYLFSNDLDVPVGHIVHTGMLNEGGGYENDCSIARLNKRSFFMISPTDQQVHCWAWLKKHMPKDSNLLLEDVTWKYTALNLIGPRAVDVLSELSYAPMTPDHFPSLFCKEMSVGYANGIRVMSMTHTGEPGFMLYIPIEGMDFIGRDALLQQKQNGVYKRLTMFILDDHDSDLDLWPWWGEPIYRNGQYVGKTTSSAYSYSLERHVCLGFVLLELKTAAESGGRSHL

SEQ ID NO: 891564 - protein, 107 aa, Homo sapiens [sequence omitted]

SEQ ID NO: 891565 - protein, 407 aa, Homo sapiens
MVNEYKKILLLKGFELMDDYHFTSIKSLLAYDLGLTTKMQEEYNRIKITDLMEKKFQGVACLDKLIELAKDMPSLKNLVNNLRKEKSKVAKKIKTQEKAPVKKINQEEVGLAAPAPTARNKLTSEARGRIPVAQKRKTPNKEKTEAKRNKVSQEQSKPPGPSGASTSAAVDHPPLPQTSSSTPSNTSFTPNQETQAQRQVDARRNVPQNDPVTVVVLKATAPFKYESPENGKSTMFHATVASKTQYFHVKVFDINLKEKFVRKKVITISDYSECKGVMEIKEASSVSDFNQNFEVPNRIIEIANKTPKISQLYKQASGTMVYGLFMLQKKSVHKKNTIYEIQDNTGSMDVVGSGKWHNIKCEKGDKLRLFCLQLRTVDRKLKLVCGSHSFIKVIKAKKNKEGPMNVN

SEQ ID NO: 891566 - protein, 389 aa, Homo sapiens
MVNEYKKILLLKGFELMDDYHFTSIKSLLAYDLGLTTKMQEEYNRIKITDLMEKKFQGVACLDKLIELAKDMPSLKNLVNNLRKEKSKVAKKIKTQEKAPVKKINQEEVGLAAPAPTARNKLTSEARGRIPVAQKRKTPNKEKTGASTSAAVDHPPLPQTSSSTPSNTSFTPNQETQAQRQVDARRNVPQNDPVTVVVLKATAPFKYESPENGKSTMFHATVASKTQYFHVKVFDINLKEKFVRKKVITISDYSECKGVMEIKEASSVSDFNQNFEVPNRIIEIANKTPKISQLYKQASGTMVYGLFMLQKKSVHKKNTIYEIQDNTGSMDVVGSGKWHNIKCEKGDKLRLFCLQLRTVDRKLKLVCGSHSFIKVIKAKKNKEGPMNVN

SEQ ID NO: 891567 - protein, 407 aa, Homo sapiens; identical to SEQ ID NO: 891565

SEQ ID NO: 891568 - protein, 398 aa, Homo sapiens
MVNEYKKILLLKGFELMDDYHFTSIKSLLAYDLGLTTKMQEEYNRIKITDLMEKKFQGVACLDKLIELAKDMPSLKNLVNNLRKEKSKVAKKIKTQEKAPVKKINQEEVGLAAPAPTARNKLTSEARGRIPVAQKRKTPNKEKTEAKRNKVSQEQSKPPGPSGASTSAAVDHPPLPQTSSSTPSNTSFTPNQETQAQRQVDARRNVPQNDPVTVVVLKATAPFKYESPENGKSTMFHATVASKTQYFHVKVFDINLKEKFVRKKVITISDYSECKGVMEIKEASSVSDFNQNFEVPNRIIEIANKTPKISQLYKQASGTMVYGLFMLQKKSVHKKNTIYEIQDNTGSMDVVGSGKWHNIKCEKGDKLRLFCLQLRTVDRKLKLVIKAKKNKEGPMNVN

SEQ ID NO: 891569 - protein, 335 aa, Homo sapiens
MVNEYKKILLLKGFELMDDYHFTSIKSLLAYDLGLTTKMQEEYNRIKITDLMEKKFQGVACLDKLIELAKDMPSLKNLVNNLRKEKSKVAKKIKTQEKAPVKKINQEEVGLAAPAPTARNKLTSEARGRIPVAQKRKTPNKEKTEAKRNKVSQEQSKPPGPSGASTSAAVDHPPLPQTSSSTPSNTSFTPNQETQAQRQVDARRNVPQNDPVTVVVLKATAPFKYESPENGKSTMFHATVASKTQYFHVKVFDINLKEKFVRKKVITISDYSECKGVMEIKEASSVSDFNQNFEVPNRIIEIANKTPKISQLYKQASGSDVAIWVRCCHLGQMLP

SEQ ID NO: 891570 - protein, 228 aa, Homo sapiens
MPVKGGTKCIKYLLFGFNFIFWLAGIAVLAIGLWLRFDSQTKSIFEQETNNNNSSFYTGVYILIGAGALMMLVGFLGCCGAVQESQCMLGLFFGFLLVIFAIEIAAAIWGYSHKDEVIKEVQEFYKDTYNKLKTKDEPQRETLKAIHYALNCCGLAGGVEQFISDICPKKDVLETFTVKSCPDAIKEVFDNKFHIIGAVGIGIAVVMIFGMIFSMILCCAIRRNREMV

SEQ ID NO: 891571 - protein, 228 aa, Homo sapiens; identical to SEQ ID NO: 891570

SEQ ID NO: 891572 - protein, 228 aa, Homo sapiens; identical to SEQ ID NO: 891570

SEQ ID NO: 891573 - protein, 228 aa, Homo sapiens; identical to SEQ ID NO: 891570

SEQ ID NO: 891574 - protein, 228 aa, Homo sapiens; identical to SEQ ID NO: 891570

SEQ ID NO: 891575 - protein, 228 aa, Homo sapiens; identical to SEQ ID NO: 891570

SEQ ID NO: 891576 - protein, 228 aa, Homo sapiens; identical to SEQ ID NO: 891570

SEQ ID NO: 891577 - protein, 228 aa, Homo sapiens; identical to SEQ ID NO: 891570

SEQ ID NO: 891578 - protein, 73 aa, Homo sapiens
TEEEEEEEGGEERRGNEEKKRREGSCPDAIKEVFDNKFHIIGAVGIGIAVVMIFGMIFSMILCCAIRRNREMV

SEQ ID NO: 891579 - protein, 68 aa, Homo sapiens
MASGQDFTVKVSSTSFLGQSCPDAIKEVFDNKFHIIGAVGIGIAVVMIFGMIFSMILCCAIRRNREMV

SEQ ID NO: 891580 - protein, 121 aa, Homo sapiens
PSPPSAHQFSRVRRGPWEGGGALGGRIVCDPGLGLSPQVSCPDAIKEVFDNKFHIIGAVGIGIAVVMEPRDGLESAYIPEQESLPMKIGGIFCLFVLFCLLFVVCFFATNFSIHSALLDKS

SEQ ID NO: 891581 - protein, 123 aa, Homo sapiens
MPVKGGTKCIKYLLFGFNFIFWLAGIAVLAIGLWLRFDSQTKSIFEQETNNNNSSFYTGVYILIGAGALMMLVGFLGCCGAVQESQCMLGLFFGFLLVIFAIEIAAAIWGYSHKDEVIFFQVS

SEQ ID NO: 891582 - protein, 228 aa, Homo sapiens; identical to SEQ ID NO: 891570

SEQ ID NO: 891583 - protein, 228 aa, Homo sapiens; identical to SEQ ID NO: 891570

SEQ ID NO: 891584 - protein, 228 aa, Homo sapiens; identical to SEQ ID NO: 891570

SEQ ID NO: 891585 - protein, 158 aa, Homo sapiens
MLVGFLGCCGAVQESQCMLGLFFGFLLVIFAIEIAAAIWGYSHKDEVIKEVQEFYKDTYNKLKTKDEPQRETLKAIHYALNCCGLAGGVEQFISDICPKKDVLETFTVKSCPDAIKEVFDNKFHIIGAVGIGIAVVMIFGMIFSMILCCAIRRNREMV

SEQ ID NO: 891586 - protein, 232 aa, Homo sapiens
DLVALFDRHGEGKLSLGERVLGLLSQRPQQSRKHTSIMRAPDSDQNIDSCVEAGIIIISFLLEDALGLRVESEPESNGKDSNPGKPEDEVKSEQQFFGFLLVIFAIEIAAAIWGYSHKDEVIKEVQEFYKDTYNKLKTKDEPQRETLKAIHYALNCCGLAGGVEQFISDICPKKDVLETFTVKSCPDAIKEVFDNKFHIIGAVGIGIAVVMIFGMIFSMILCCAIRRNREMV

SEQ ID NO: 891587 - protein, 228 aa, Homo sapiens; identical to SEQ ID NO: 891570

SEQ ID NO: 891588 - protein, 96 aa, Homo sapiens
RLDLVSRLYLCSRLYRVSRLYLVSRLYLVSRLYLVFGSTLVSRLYLVSCPDAIKEVFDNKFHIIGAVGIGIAVVMIFGMIFSMILCCAIRRNREMV

SEQ ID NO: 891589 - protein, 216 aa, Homo sapiens
MPVKGGTKCIKYLLFGFNFIFWLAGIAVLAIGLWLRFDSQTKSIFEQETNNNNSSFYTGVYILIGAGALMMLVGFLGCCGAVQESQCMLGLFFGFLLVIFAIEIAAAIWGYSHKDEVIKEVQEFYKDTYNKLKTKDEPQRETLKAIHYALNCCGLAGGVEQFISDICPKKDVLETFTVKVNSDQDPGVPAPIALDKPCKHESDSSQVLLQQDPFCL

SEQ ID NO: 891590 - protein, 107 aa, Homo sapiens
MERITFVRGGRCENAVSAPLSSAHCEVIKEVQEFYKDTYNKLKTKDEPQRETLKAIHYAVCRLGKDTLLRFLRIVSAHRVLTAPDQCKHSNRLLTICFSHPHPCLLA

SEQ ID NO: 891591 - protein, 316 aa, Homo sapiens
LQEREEQQLHRQERDRKFLEEEPQLRRQEREQQLRHDRDRKFREEEQLLQEGEEQQLRRQERDRKFREEEQQLRRQERERKFLQEEQQLRRQELERKFREEEQLRQETEQEQLRRQERYRKILEEEQLRPEREEQQLRRQERDRKFREEEQLRQEREEQQLRSQESDRKFREEEQLRQEREEQQLRPQQRDGKYRWEEEQLQLEEQEQRLRQERDRQYRAEEQFATQEKSRREEQELWQEEEQKRRQERERKLREEHIRRQQKEEQRHRQVGEIQSQEGKGHGRLLEPGTHQFASVPVRSSPLYEYIQEQRSQYRP

SEQ ID NO: 891592 - protein, 103 aa, Homo sapiens
VDPRGSPVILRTCTSAFYSSSSSSLLQDVFLCSLMRMWIVQSTSAASRRRNRGTAKSGRYNPKKGRAMGGFWSPALISLPVSQCAPALSMSTSKSRDLNTALK

SEQ ID NO: 891593 - protein, 316 aa, Homo sapiens; identical to SEQ ID NO: 891591

SEQ ID NO: 891594 - protein, 316 aa, Homo sapiens; identical to SEQ ID NO: 891591

SEQ ID NO: 891595 - protein, 77 aa, Homo sapiens
SESYLVIVVPRGIPQSTSAASRRRNRGTAKSGRYNPKKGRAMGGFWSPALISLPVSQCAPALSMSTSKSRDLNTALK

SEQ ID NO: 891596 - protein, 132 aa, Homo sapiens
MAAATLTSKLYSLLFRRPPPSPSPSSWASCSSSAPSIKARTLSTTTSTRGSCGNTSSTSMRTSSSLEAPIQARRTRSTQQLFAQSWSLSLKMMLKVLFMDHHSLLARNGFTYKTDSLPSAVFEVCLVSMLRK

SEQ ID NO: 891597 - protein, 132 aa, Homo sapiens; identical to SEQ ID NO: 891596

SEQ ID NO: 891598 - protein, 132 aa, Homo sapiens; identical to SEQ ID NO: 891596

SEQ ID NO: 891599 - protein, 132 aa, Homo sapiens; identical to SEQ ID NO: 891596

SEQ ID NO: 891600 - protein, 132 aa, Homo sapiens; identical to SEQ ID NO: 891596

SEQ ID NO: 891601 - protein, 132 aa, Homo sapiens; identical to SEQ ID NO: 891596

SEQ ID NO: 891602 - protein, 132 aa, Homo sapiens; identical to SEQ ID NO: 891596

SEQ ID NO: 891603 - protein, 132 aa, Homo sapiens; identical to SEQ ID NO: 891596

SEQ ID NO: 891604 - protein, 83 aa, Homo sapiens [sequence omitted]

SEQ ID NO: 891605 - protein, 83 aa, Homo sapiens [sequence omitted]

SEQ ID NO: 891606 - protein, 132 aa, Homo sapiens; identical to SEQ ID NO: 891596

SEQ ID NO: 891607 - protein, 132 aa, Homo sapiens; identical to SEQ ID NO: 891596

SEQ ID NO: 891608 - protein, 83 aa, Homo sapiens [sequence omitted]

SEQ ID NO: 891609 - protein, 83 aa, Homo sapiens [sequence omitted]

SEQ ID NO: 891610 - protein, 132 aa, Homo sapiens; identical to SEQ ID NO: 891596

SEQ ID NO: 891611 - protein, 132 aa, Homo sapiens; identical to SEQ ID NO: 891596

SEQ ID NO: 891612 - protein, 352 aa, Homo sapiens
MVLASLSTLSEAAWIEFMMGDARTILEENIQDQDVLLLIKKRAPSPLPKMADVSAEEKKKQDQKAPDKEAILRATANLPSYNMDRAAVQTNMRDFQTELRKILVSLIEVAQKLLALNPDAVELFKKANAMLDEDEDERVDEAALRQLTEMGFPENRATKALQLNHMSVPQAMEWLIEHAEDPTIDTPLPGQAPPEAEGATAAASEAAAGASATDEEARDELTEIFKKIRRKREFRADARAVISLMEMGFDEKEVIDALRVNNNQQNAACEWLLGDRKPSPEELDKGIDPDSPLFQAILDNPVVQLGLTNPKTLLAFEDMLENPLNSTQWMNDPETGPVMLQISRIFQTLNRT

SEQ ID NO: 891613 - protein, 434 aa, Homo sapiens
TVRETIGWVRGPGGFRARVAGAGPCGGGGMFVQEEKIFAGKVLRLHICASDGAEWLEEATEDTSVEKLKERCLKHCAHGSLEDPKSITHHKLIHAASERVLSDARTILEENIQDQDVLLLIKKRAPSPLPKMADVSAEEKKKQDQKAPDKEAILRATANLPSYNMDRAAVQTNMRDFQTELRKILVSLIEVAQKLLALNPDAVELFKKANAMLDEDEDERVDEAALRQLTEMGFPENRATKALQLNHMSVPQAMEWLIEHAEDPTIDTPLPGQAPPEAEGATAAASEAAAGASATDEEARDELTEIFKKIRRKREFRADARAVISLMEMGFDEKEVIDALRVNNNQQNAACEWLLGDRKPSPEELDKGIDPDSPLFQAILDNPVVQLGLTNPKTLLAFEDMLENPLNSTQWMNDPETGPVMLQISRIFQTLNRT

SEQ ID NO: 891614 - protein, 405 aa, Homo sapiens
MFVQEEKIFAGKVLRLHICASDGAEWLEEATEDTSVEKLKERCLKHCAHGSLEDPKSITHHKLIHAASERVLSDARTILEENIQDQDVLLLIKKRAPSPLPKMADVSAEEKKKQDQKAPDKEAILRATANLPSYNMDRAAVQTNMRDFQTELRKILVSLIEVAQKLLALNPDAVELFKKANAMLDEDEDERVDEAALRQLTEMGFPENRATKALQLNHMSVPQAMEWLIEHAEDPTIDTPLPGQAPPEAEGATAAASEAAAGASATDEEARDELTEIFKKIRRKREFRADARAVISLMEMGFDEKEVIDALRVNNNQQNAACEWLLGDRKPSPEELDKGIDPDSPLFQAILDNPVVQLGLTNPKTLLAFEDMLENPLNSTQWMNDPETGPVMLQISRIFQTLNRT

SEQ ID NO: 891615 - protein, 448 aa, Homo sapiens
MFVQEEKIFAGKVLRLHICASDGAEWLEEATEDTSVEKLKERCLKHCAHGSLEDPKSITHHKLIHAASERVLSDARTILEENIQDQDVLLLIKKRAPSPLPKMADVSAEEKKKQDQKAPDKEAILRATANLPSYNMDRAAVQTNMRDFQTELRKILVSLIEVAQKLLALNPDAVELFKKANAMLDEDEDERVDEAALRQLTEMGFPENRATKALQLNHMSVPQAMEWLIEHAEDPTIDTPLPGQAPPEAEGATAAASEAAAGASATDEEARDELTEIFKKIRRKREFRADARGAKFTSDPGSLSKLEQSLSSWVPCALRLDFALSCVVVLHGLLEAVISLMEMGFDEKEVIDALRVNNNQQNAACEWLLGDRKPSPEELDKGIDPDSPLFQAILDNPVVQLGLTNPKTLLAFEDMLENPLNSTQWMNDPETGPVMLQISRIFQTLNRT

SEQ ID NO: 891616 - protein, 378 aa, Homo sapiens
MFVQEEKIFAGKVLRLHICASDGAEWLEEATEDTSVEKLKERCLKHCAHGSLEDPKSITHHKLIHAASERVLSDARTILEENIQDQDVLLLIKKRAPSPLPKMADVSAEEKKKQDQKAPDKEAILRATANLPSYNMDRAAVQTNMRDFQTELRKILVSLIEVAQKLLALNPDAVELFKKANAMLDEDEDERVDEAALRQLTEMGFPENRATKALQLNHMSVPQAMEWLIEHAEDPTIDTPLPGQAPPEAEGATAAASEAAAGASATDEEARDELTEIFKKIRRKREFRADARAVISLMEMGFDEKEVIDALRVNNNQQNAAAILDNPVVQLGLTNPKTLLAFEDMLENPLNSTQWMNDPETGPVMLQISRIFQTLNRT

SEQ ID NO: 891617 - protein, 303 aa, Homo sapiens
MADVSAEEKKKQDQKAPDKEAILRATANLPSYNMDRAAVQTNMRDFQTELRKILVSLIEVAQKLLALNPDAVELFKKANAMLDEDEDERVDEAALRQLTEMGFPENRATKALQLNHMSVPQAMEWLIEHAEDPTIDTPLPGQAPPEAEGATAAASEAAAGASATDEEARDELTEIFKKIRRKREFRADARAVISLMEMGFDEKEVIDALRVNNNQQNAACEWLLGDRKPSPEELDKGIDPDSPLFQAILDNPVVQLGLTNPKTLLAFEDMLENPLNSTQWMNDPETGPVMLQISRIFQTLNRT

SEQ ID NO: 891618 - protein, 330 aa, Homo sapiens
MFVQEEKIFAGKVLRLHICASDGAEWLEEATEDTSVEKLKERCLKHCAHGSLEDPKSITHHKLIHAASERVLSDARTILEENIQDQDVLLLIKKRAPSPLPKMADVSAEEKKKQDQKAPDKEAILRATANLPSYNMDRAAVQTNMRDFQTELRKILVSLIEVAQKLLALNPDAVELFKKANAMLDEDEDERVDEAALRQLTEMGFPENRATKALQLNHMSVPQAMEWLIEHAEDPTIDTPLPGQAPPEAEGATAAASEAAAGASATDEEARDELTEIFKKIRRKREFRADARAVISLMEMGFDEKEVILWEDLGKPVSGYVGLHYFAFFL

SEQ ID NO: 891619 - protein, 187 aa, Homo sapiens [sequence omitted]

SEQ ID NO: 891620 - protein, 230 aa, Homo sapiens
MSVPQAMEWLIEHAEDPTIDTPLPGQAPPEAEGATAAASEAAAGASATDEEARDELTEIFKKIRRKREFRADARGAKFTSDPGSLSKLEQSLSSWVPCALRLDFALSCVVVLHGLLEAVISLMEMGFDEKEVIDALRVNNNQQNAACEWLLGDRKPSPEELDKGIDPDSPLFQAILDNPVVQLGLTNPKTLLAFEDMLENPLNSTQWMNDPETGPVMLQISRIFQTLNRT

SEQ ID NO: 891621 - protein, 215 aa, Homo sapiens
MFVQEEKIFAGKVLRLHICASDGAEWLEEATEDTSVEKLKERCLKHCAHGSLEDPKSITHHKLIHAASERVLSDARTILEENIQDQDVLLLIKKRAPSPLPKMADVSAEEKKKQDQKAPDKEAILRATANLPSYNMDRAAVQTNMRDVSVSPERRRVHGVPVWGIAVGGFLRGGAARGDSLGGFGEAGERVCRTALFCIFSVNQKLFPSKSWKAI

SEQ ID NO: 891622 - protein, 405 aa, Homo sapiens; identical to SEQ ID NO: 891614

SEQ ID NO: 891623 - protein, 435 aa, Homo sapiens
RRREQKHKSRTRLGWYRARVAGAGPCGGGGMFVQEEKIFAGKVLRLHICASDGAEWLEEATEDTSVEKLKERCLKHCAHGSLEDPKSITHHKLIHAASERVLSDARTILEENIQDQDVLLLIKKRAPSPLPKMADVSAEEKKKQDQKAPDKEAILRATANLPSYNMDRAAVQTNMRDFQTELRKILVSLIEVAQKLLALNPDAVELFKKANAMLDEDEDERVDEAALRQLTEMGFPENRATKALQLNHMSVPQAMEWLIEHAEDPTIDTPLPGQAPPEAEGATAAASEAAAGASATDEEARDELTEIFKKIRRKREFRADARAVISLMEMGFDEKEVIDALRVNNNQQNAACEWLLGDRKPSPEELDKGIDPDSPLFQAILDNPVVQLGLTNPKTLLAFEDMLENPLNSTQWMNDPETGPVMLQISRIFQTLNRT

SEQ ID NO: 891624 - protein, 405 aa, Homo sapiens; identical to SEQ ID NO: 891614

SEQ ID NO: 891625 - protein, 405 aa, Homo sapiens; identical to SEQ ID NO: 891614

SEQ ID NO: 891626 - protein, 405 aa, Homo sapiens; identical to SEQ ID NO: 891614

SEQ ID NO: 891627 - protein, 405 aa, Homo sapiens; identical to SEQ ID NO: 891614

SEQ ID NO: 891628 - protein, 313 aa, Homo sapiens
MDRAAVQTNMRDFQTELRKILVSLIEVAQKLLALNPDAVELFKKANAMLDEDEDERVDEAALRQLTEMGFPENRATKALQLNHMSVPQAMEWLIEHAEDPTIDTPLPGQAPPEAEGATAAASEAAAGASATDEEARDELTEIFKKIRRKREFRADARGAKFTSDPGSLSKLEQSLSSWVPCALRLDFALSCVVVLHGLLEAVISLMEMGFDEKEVIDALRVNNNQQNAACEWLLGDRKPSPEELDKGIDPDSPLFQAILDNPVVQLGLTNPKTLLAFEDMLENPLNSTQWMNDPETGPVMLQISRIFQTLNRT

SEQ ID NO: 891629 - protein, 106 aa, Homo sapiens
MGFDEKEVIDALRVNNNQQNAACEWLLGDRKPSPEELDKGIDPDSPLFQAILDNPVVQLGLTNPKTLLAFEDMLENPLNSTQWMNDPETGPVMLQISRIFQTLNRT

SEQ ID NO: 891630 - protein, 88 aa, Homo sapiens
CEWLLGDRKPSPEELDKGIDPDSPLFQAILDNPVVQLGLTNPKTLLGMCAFFYAKSRVGEAGWFPCRTNRCCGGDTEDPALRIAVRWQ

SEQ ID NO: 891631 - protein, 555 aa, Homo sapiens
MAFTQLTFRDVAIEFSQDEWKCLNSTQRTLYRDVMLENYRNLVSLDLSRNCVIKELAPQQEGNPGEVFHTVTLEQHEKHDIEEFCFREIKKKIHDFDCQWRDDERNCNKVTTAPKENLTCRRDQRDRRGIGNKSIKHQLGLSFLPHPHELQQFQAEGKIYECNHVEKSVNHGSSVSPPQILSSTVKTHVSNKYGTDFICSSLLTQEQKSCIREKPYRYIECDKALNHGSHMTVRQVSHSGEKGYKCDLCGKVFSQKSNLARHWRVHTGEKPYKCNECDRSFSRNSCLALHRRVHTGEKPYKCYECDKVFSRNSCLALHQKTHIGEKPYTCKECGKAFSVRSTLTNHQVIHSGKKPYKCNECGKVFSQTSSLATHQRIHTGEKPYKCNECGKVFSQTSSLARHWRIHTGEKPYKCNECGKVFSYNSHLASHRRVHTGEKPYKCNECGKAFSVHSNLTTHQVIHTGEKPYKCNQCGKGFSVHSSLTTHQVIHTGEKPYKCNECGKSFSVRPNLTRHQIIHTGKKPYKCSDCGKSFSVRPNLFRHQIIHTKEKPYKRN

SEQ ID NO: 891632 - protein, 591 aa, Homo sapiens
MAFTQLTFRDVAIEFSQDEWKCLNSTQRTLYRDVMLENYRNLVSLEYYPMWEHRKEPWTIESQVRVARKPKGWEWIKGVKTDLSRNCVIKELAPQQEGNPGEVFHTVTLEQHEKHDIEEFCFREIKKKIHDFDCQWRDDERNCNKVTTAPKENLTCRRDQRDRRGIGNKSIKHQLGLSFLPHPHELQQFQAEGKIYECNHVEKSVNHGSSVSPPQILSSTVKTHVSNKYGTDFICSSLLTQEQKSCIREKPYRYIECDKALNHGSHMTVRQVSHSGEKGYKCDLCGKVFSQKSNLARHWRVHTGEKPYKCNECDRSFSRNSCLALHRRVHTGEKPYKCYECDKVFSRNSCLALHQKTHIGEKPYTCKECGKAFSVRSTLTNHQVIHSGKKPYKCNECGKVFSQTSSLATHQRIHTGEKPYKCNECGKVFSQTSSLARHWRIHTGEKPYKCNECGKVFSYNSHLASHRRVHTGEKPYKCNECGKAFSVHSNLTTHQVIHTGEKPYKCNQCGKGFSVHSSLTTHQVIHTGEKPYKCNECGKSFSVRPNLTRHQIIHTGKKPYKCSDCGKSFSVRPNLFRHQIIHTKEKPYKRN

SEQ ID NO: 891633 - protein, 558 aa, Homo sapiens
MCLLFYGQLTFRDVAIEFSQDEWKCLNSTQRTLYRDVMLENYRNLVSLDLSRNCVIKELAPQQEGNPGEVFHTVTLEQHEKHDIEEFCFREIKKKIHDFDCQWRDDERNCNKVTTAPKENLTCRRDQRDRRGIGNKSIKHQLGLSFLPHPHELQQFQAEGKIYECNHVEKSVNHGSSVSPPQILSSTVKTHVSNKYGTDFICSSLLTQEQKSCIREKPYRYIECDKALNHGSHMTVRQVSHSGEKGYKCDLCGKVFSQKSNLARHWRVHTGEKPYKCNECDRSFSRNSCLALHRRVHTGEKPYKCYECDKVFSRNSCLALHQKTHIGEKPYTCKECGKAFSVRSTLTNHQVIHSGKKPYKCNECGKVFSQTSSLATHQRIHTGEKPYKCNECGKVFSQTSSLARHWRIHTGEKPYKCNECGKVFSYNSHLASHRRVHTGEKPYKCNECGKAFSVHSNLTTHQVIHTGEKPYKCNQCGKGFSVHSSLTTHQVIHTGEKPYKCNECGKSFSVRPNLTRHQIIHTGKKPYKCSDCGKSFSVRPNLFRHQIIHTKEKPYKRN

SEQ ID NO: 891634 - protein, 580 aa, Homo sapiens
ACQMFLGKTEAEDCPHCPGDVRGPPEGHHGTMTVEVGLGAGNHLEGVRDQPSQPGETPSLLQIQKLAGITDLSRNCVIKELAPQQEGNPGEVFHTVTLEQHEKHDIEEFCFREIKKKIHDFDCQWRDDERNCNKVTTAPKENLTCRRDQRDRRGIGNKSIKHQLGLSFLPHPHELQQFQAEGKIYECNHVEKSVNHGSSVSPPQILSSTVKTHVSNKYGTDFICSSLLTQEQKSCIREKPYRYIECDKALNHGSHMTVRQVSHSGEKGYKCDLCGKVFSQKSNLARHWRVHTGEKPYKCNECDRSFSRNSCLALHRRVHTGEKPYKCYECDKVFSRNSCLALHQKTHIGEKPYTCKECGKAFSVRSTLTNHQVIHSGKKPYKCNECGKVFSQTSSLATHQRIHTGEKPYKCNECGKVFSQTSSLARHWRIHTGEKPYKCNECGKVFSYNSHLASHRRVHTGEKPYKCNECGKAFSVHSNLTTHQVIHTGEKPYKCNQCGKGFSVHSSLTTHQVIHTGEKPYKCNECGKSFSVRPNLTRHQIIHTGKKPYKCSDCGKSFSVRPNLFRHQIIHTKEKPYKRN

SEQ ID NO: 891635 - protein, 657 aa, Homo sapiens
ISCLCPPRSLCSSQACVLPVPGPSLLLPQGLHVGCASAGTRWPLSCSIDFQRLLAHEEETQKRRAKESGMAFTQLTFRDVAIEFSQDEWKCLNSTQRTLYRDVMLENYRNLVSLGWSAMVQSRLTATFASRIQMILLPQPPEYAGITDLSRNCVIKELAPQQEGNPGEVFHTVTLEQHEKHDIEEFCFREIKKKIHDFDCQWRDDERNCNKVTTAPKENLTCRRDQRDRRGIGNKSIKHQLGLSFLPHPHELQQFQAEGKIYECNHVEKSVNHGSSVSPPQILSSTVKTHVSNKYGTDFICSSLLTQEQKSCIREKPYRYIECDKALNHGSHMTVRQVSHSGEKGYKCDLCGKVFSQKSNLARHWRVHTGEKPYKCNECDRSFSRNSCLALHRRVHTGEKPYKCYECDKVFSRNSCLALHQKTHIGEKPYTCKECGKAFSVRSTLTNHQVIHSGKKPYKCNECGKVFSQTSSLATHQRIHTGEKPYKCNECGKVFSQTSSLARHWRIHTGEKPYKCNECGKVFSYNSHLASHRRVHTGEKPYKCNECGKAFSVHSNLTTHQVIHTGEKPYKCNQCGKGFSVHSSLTTHQVIHTGEKPYKCNECGKSFSVRPNLTRHQIIHTGKKPYKCSDCGKSFSVRPNLFRHQIIHTKEKPYKRN

SEQ ID NO: 891636 - protein, 542 aa, Homo sapiens
MWEHRKEPWTIESQVRVARKPKGWEWIKGVKTDLSRNCVIKELAPQQEGNPGEVFHTVTLEQHEKHDIEEFCFREIKKKIHDFDCQWRDDERNCNKVTTAPKENLTCRRDQRDRRGIGNKSIKHQLGLSFLPHPHELQQFQAEGKIYECNHVEKSVNHGSSVSPPQILSSTVKTHVSNKYGTDFICSSLLTQEQKSCIREKPYRYIECDKALNHGSHMTVRQVSHSGEKGYKCDLCGKVFSQKSNLARHWRVHTGEKPYKCNECDRSFSRNSCLALHRRVHTGEKPYKCYECDKVFSRNSCLALHQKTHIGEKPYTCKECGKAFSVRSTLTNHQVIHSGKKPYKCNECGKVFSQTSSLATHQRIHTGEKPYKCNECGKVFSQTSSLARHWRIHTGEKPYKCNECGKVFSYNSHLASHRRVHTGEKPYKCNECGKAFSVHSNLTTHQVIHTGEKPYKCNQCGKGFSVHSSLTTHQVIHTGEKPYKCNECGKSFSVRPNLTRHQIIHTGKKPYKCSDCGKSFSVRPNLFRHQIIHTKEKPYKRN

SEQ ID NO: 891637 - protein, 241 aa, Homo sapiens
MDEMTFHIWYPQVRAPGQQPQAQLAMALCLKQVFAKDKTFRPRKRFEPGTQRFELYKKAQASLKSGLDLRSVVRLPPGENIDDWIAVHVVDFFNRINLIYGTMAERCSETSCPVMAGGPRYEYRWQDERQYRRPAKLSAPRYMALLMDWIEGLINDEEVFPTRVGVPFPKNFQQVCTKILTRLFRVFVHVYIHHFDSILSMGAEAHVNTCYKHFYYFIREFSLVDQRELEPLREMTERICH

SEQ ID NO: 891638 - protein, 238 aa, Homo sapiens
MCQELRIWEWIGRSRSLIGSRDKCDADDSRRAKKPPLSSSSCFCSRRSRAFSHFTVWELEAASLVEVQGSTERAGSSVSPLSKGKLGAPYGLSGKVGASASVYWSGGESPFSAPPRPVAAALAGPGRSWRRPGQEGSRGRQDRQTDRLTGERTGTAGPAGERRSCGWECDPTARRGPVSVRRAPAASPRTPPAWLPLSFLRPSWRGTVRRRVPPEGRLAAVLRLASEAQSFESCGGDC

SEQ ID NO: 891639 - protein, 216 aa, Homo sapiens
MALCLKQVFAKDKTFRPRKRFEPGTQRFELYKKAQASLKSGLDLRSVVRLPPGENIDDWIAVHVVDFFNRINLIYGTMAERCSETSCPVMAGGPRYEYRWQDERQYRRPAKLSAPRYMALLMDWIEGLINDEEVFPTRVGVPFPKNFQQVCTKILTRLFRVFVHVYIHHFDSILSMGAEAHVNTCYKHFYYFIREFSLVDQRELEPLREMTERICH

SEQ ID NO: 891640 - protein, 239 aa, Homo sapiens
MPLSLAGYPQVRAPGQQPQAQLAMALCLKQVFAKDKTFRPRKRFEPGTQRFELYKKAQASLKSGLDLRSVVRLPPGENIDDWIAVHVVDFFNRINLIYGTMAERCSETSCPVMAGGPRYEYRWQDERQYRRPAKLSAPRYMALLMDWIEGLINDEEVFPTRVGVPFPKNFQQVCTKILTRLFRVFVHVYIHHFDSILSMGAEAHVNTCYKHFYYFIREFSLVDQRELEPLREMTERICH

SEQ ID NO: 891641 - protein, 751 aa, Homo sapiens
MEDLSSPDSTLLQGGHNLLSSASFQEAVTFKDVIVDFTQEEWKQLDPGQRDLFRDVTLENYTHLVSIGLQVSKPDVISQLEQGTEPWIMEPSIPVGTCADWETRLENSVSAPEPDISEEELSPEVIVEKHKRDDSWSSNLLESWEYEGSLERQQANQQTLPKEIKVTEKTIPSWEKGPVNNEFGKSVNVSSNLVTQEPSPEETSTKRSIKQNSNPVKKEKSCKCNECGKAFSYCSALIRHQRTHTGEKPYKCNECEKAFSRSENLINHQRIHTGDKPYKCDQCGKGFIEGPSLTQHQRIHTGEKPYKCDECGKAFSQRTHLVQHQRIHTGEKPYTCNECGKAFSQRGHFMEHQKIHTGEKPFKCDECDKTFTRSTHLTQHQKIHTGEKTYKCNECGKAFNGPSTFIRHHMIHTGEKPYECNECGKAFSQHSNLTQHQKTHTGEKPYDCAECGKSFSYWSSLAQHLKIHTGEKPYKCNECGKAFSYCSSLTQHRRIHTREKPFECSECGKAFSYLSNLNQHQKTHTQEKAYECKECGKAFIRSSSLAKHERIHTGEKPYQCHECGKTFSYGSSLIQHRKIHTGERPYKCNECGRAFNQNIHLTQHKRIHTGAKPYECAECGKAFRHCSSLAQHQKTHTEEKPYQCNKCEKTFSQSSHLTQHQRIHTGEKPYKCNECDKAFSRSTHLTEHQNTHTGEKPYNCNECRKTFSQSTYLIQHQRIHSGEKPFGCNDCGKSFRYRSALNKHQRLHPGI

SEQ ID NO: 891642 - protein, 751 aa, Homo sapiens; identical to SEQ ID NO: 891641

SEQ ID NO: 891643 - protein, 751 aa, Homo sapiens; identical to SEQ ID NO: 891641

SEQ ID NO: 891644 - protein, 46 aa, Homo sapiens
MLDLYVQGVLHLCQVLHGLAGIQQCIAEVGQHIVQFRDPLDYPATR

SEQ ID NO: 891645 - protein, 154 aa, Homo sapiens
GLRCGVTQTRGRVEEEAAKSTVLLRCRRAPPTSADQPCPATRPRLEEGKAVASAPSAAHGDDAWHIRDPQAAAVASPAARAPAPAAVVTPPRLAVAPVPPAAPAARDMSNLGGRRNGPVEVRLTGTCHPRFRRTCIWFEKELESRRYPTFTIYP

SEQ ID NO: 891646 - protein, 154 aa, Homo sapiens; identical to SEQ ID NO: 891645

SEQ ID NO: 891647 - protein, 152 aa, Homo sapiens
GLRCGVTQTRGRVEEEAAKSTVLLRCRRAPPTSADQPCPATRPRLEEGKAVASAPSAAHGDDAWHIRDPQAAAVASPAARAPAPAAVVTPPRLAVAPVPPAAPAARDMSNLGGRRNGPVEVRLTGIILTGHENETKRSLEAINDKISWRRRP

SEQ ID NO: 891648 - protein, 154 aa, Homo sapiens; identical to SEQ ID NO: 891645

SEQ ID NO: 891649 - protein, 154 aa, Homo sapiens; identical to SEQ ID NO: 891645

SEQ ID NO: 891650 - protein, 154 aa, Homo sapiens; identical to SEQ ID NO: 891645

SEQ ID NO: 891651 - protein, 154 aa, Homo sapiens; identical to SEQ ID NO: 891645

SEQ ID NO: 891652 - protein, 154 aa, Homo sapiens; identical to SEQ ID NO: 891645

SEQ ID NO: 891653 - protein, 152 aa, Homo sapiens; identical to SEQ ID NO: 891647

SEQ ID NO: 891654 - protein, 154 aa, Homo sapiens; identical to SEQ ID NO: 891645

SEQ ID NO: 891655 - protein, 120 aa, Homo sapiens
MRGWVGLRVLDGPGQYLRHRLADDIHLLHLFEVIIQLGPLSPSDLLTDQLARLVELLLQPGNRHAASCRGTFRPDPPAQTPPATGSRAPPTLCAPQRPPSAPPPPPACQLGARPGAASSS

SEQ ID NO: 891656 - protein, 71 aa, Homo sapiens
CLLMRWLAAQNRMAEMSTTIKNSRTSAVGPVICFMEFTSLVSSKSRRMMADGRKEEEGNLEEFPDLLCCCD

SEQ ID NO: 891657 - protein, 103 aa, Homo sapiens
MAGRRKRVIWKSFLTYSAAVIKQPPGNFDDTVLLSSSLSSGKKSIETTKIKCYLAGVRSHVCLCGGSLLRTGNHWRYSLLFEGLQWNEFKYDLFEELKLTLWS

SEQ ID NO: 891658 - protein, 103 aa, Homo sapiens; identical to SEQ ID NO: 891657

SEQ ID NO: 891659 - protein, 119 aa, Homo sapiens
RHRFRRAMGPRVLQPPLLLLLLALLLAALPCGAEEASPLRPAQVTLSPPPAVTNGSQPGAPHNSTHTRPPGASGSALTRSFYVILGFCGLTALYFLIRAFRCVRRTWAPSLSLGQLARA

SEQ ID NO: 891660 - protein, 139 aa, Homo sapiens
RHRFRRAMGPRVLQPPLLLLLLALLLAALPCGAEEASPLRPAQVTLSPPPAVTNGSQPGAPHNSTHTRPPGASGSALTRSFYVILGFCGLTALYFLIRAFRLKKPQRRRYGLLANTEDPTEMASLDSDEETVFESRNLR

SEQ ID NO: 891661 - protein, 119 aa, Homo sapiens; identical to SEQ ID NO: 891659

SEQ ID NO: 891662 - protein, 139 aa, Homo sapiens; identical to SEQ ID NO: 891660

SEQ ID NO: 891663 - protein, 139 aa, Homo sapiens; identical to SEQ ID NO: 891660

SEQ ID NO: 891664 - protein, 139 aa, Homo sapiens; identical to SEQ ID NO: 891660

SEQ ID NO: 891665 - protein, 121 aa, Homo sapiens
MIELYPVSHAQLDVLWPELRQALRGSLYYLLSALPQPKAPGYICHGLSPGGLSNGSREECYWGHVFWDQVSTVHPAPATQQATHGGPRSLPSLGPGLWLGKHRDCGKREEAWKVCRSLVEE

SEQ ID NO: 891666 - protein, 91 aa, Homo sapiens
TLRPEACLSAFSAERPAAVTTALRRVGDERPEVMQAQASAWTAGIRGTKDGDSAPSEFPRVRSSAVSQEQDVMASAAETLMRTRPPAPLSA

SEQ ID NO: 891667 - protein, 535 aa, Homo sapiens
MEDAGEDPTTFAAHSLPSDPRLLATVTNAYLGTRVFHDTLHVSGVYNGAGGDTHRAMLPSPLNVRLEAPAGMGEQLTETFALDTNTGSFLHTLEGPRFRASQCIYAHRTLPHVLAFRVSIARLAPGSGPITLLLRSAFSPESPDLDLHQGPDFQGARYLYGHTLTPEQPGGPQQEVHMLWTPAPPDLTLGEGEEARTWDFLTAVGGSQAEAQACLTEALQLQARGALYTAHAQAWAQLWVECGLDVVGPLQLRQALRGSLYYLLSALPQPKAPGYICHGLSPGGLSNGSREECYWGHVFWDQDLWMFPSILMFHPEAARAILEYRIRTLDGALENAQNLGYQGAKFAWESADSGLEVCPEDIYGVQEVHVNGAVVLAFELYYHTTQDLQLFREAGGWDVVRAVAEFWCSRVEWSPREEKYHLRGVMSPDEYHSGVNNSVYTNVLVQNSLRFAAALAQDLGLPIPSQWLAVADKIKVPFDVEQNFHPEVPAPSSLGGLFQMLGTRSRAPSGSPWVPAARLSGKVHAAWPEFKAFCL

SEQ ID NO: 891668 - protein, 767 aa, Homo sapiens
MEDAGEDPTTFAAHSLPSDPRLLATVTNAYLGTRVFHDTLHVSGVYNGAGGDTHRAMLPSPLNVRLEAPAGMGEQLTETFALDTNTGSFLHTLEGPRFRASQCIYAHRTLPHVLAFRVSIARLAPGSGPITLLLRSAFSPESPDLDLHQGPDFQGARYLYGHTLTPEQPGGPQQEVHMLWTPAPPDLTLGEGEEARTWDFLTAVGGSQAEAQACLTEALQLQARGALYTAHAQAWAQLWVECGLDVVGPLQLRQALRGSLYYLLSALPQPKAPGYICHGLSPGGLSNGSREECYWGHVFWDQDLWMFPSILMFHPEAARAILEYRIRTLDGALENAQNLGYQGAKFAWESADSGLEVCPEDIYGVQEVHVNGAVVLAFELYYHTTQDLQLFREAGGWDVVRAVAEFWCSRVEWSPREEKYHLRGEAMVGRGSGRNGGCSQTQQMIFRHLTCASPTLTTGVEGRPLRLCTEHHLGLVCPGVMSPDEYHSGVNNSVYTNVLVQNSLRFAAALAQDLGLPIPSQWLAVADKIKVPFDVEQNFHPEFDGYEPGKILEIYEAVTSPQGPAMTWSMFAVGWMELKDAVRARGLLDRSFANMAEPFKVWTENADGSGAVNFLTGMGGFLQAVVFGCTGFRVTRAGVTFDPVCLSGISRVSVSGIFYQGNKLNFSFSEDSVTVEVTARAGPWAPHLEAELWPSQSRLSLLPGHKVSFPRSAGRIQMSPPKLPGSSSSEFPGRTFSDVRDPLQSPLWVTLGSSSPTESLTVDPASE

SEQ ID NO: 891669 - protein, 462 aa, Homo sapiens
MFPSILMFHPEAARAILEYRIRTLDGALENAQNLGYQGAKFAWESADSGLEVCPEDIYGVQEVHVNGAVVLAFELYYHTTQDLQLFREAGGWDVVRAVAEFWCSRVEWSPREEKYHLRGEAMVGRGSGRNGGCSQTQQMIFRHLTCASPTLTTGVEGRPLRLCTEHHLGLVCPGVMSPDEYHSGVNNSVYTNVLVQNSLRFAAALAQDLGLPIPSQWLAVADKIKVPFDVEQNFHPEFDGYEPGKILEIYEAVTSPQGPAMTWSMFAVGWMELKDAVRARGLLDRSFANMAEPFKVWTENADGSGAVNFLTGMGGFLQAVVFGCTGFRVTRAGVTFDPVCLSGISRVSVSGIFYQGNKLNFSFSEDSVTVEVTARAGPWAPHLEAELWPSQSRLSLLPGHKVSFPRSAGRIQMSPPKLPGSSSSEFPGRTFSDVRDPLQSPLWVTLGSSSPTESLTVDPASE

SEQ ID NO: 891670 - protein, 822 aa, Homo sapiens
MEDAGEDPTTFAAHSLPSDPRLLATVTNAYLGTRVFHDTLHVSGVYNGAGGDTHRAMLPSPLNVRLEAPAGMGEQLTETFALDTNTGSFLHTLEGPRFRASQCIYAHRTLPHVLAFRVSIARLAPGSGPITLLLRSAFSPESPDLDLHQGPDFQGARYLYGHTLTPEQPGGPQQEVHMLWTPAPPDLTLGEGEEARTWDFLTAVGGSQAEAQACLTEALQLQARGALYTAHAQAWAQLWVECGLDVVGPLQLRQALRGSLYYLLSALPQPKAPGYICHGLSPGGLSNGSREECYWGHVFWDQDLWMFPSILMFHPEAARAILEYRIRTLDGALENAQNLGYQGAKFAWESADSGLEVCPEDIYGVQEVHVNGAVVLAFELYYHTTQDLQLFREAGGWDVVRAVAEFWCSRVEWSPREEKYHLRGEAMVGRGSGRNGGCSQTQQMIFRHLTCASPTLTTGVEGRPLRLCTEHHLGLVCPGVMSPDEYHSGVNNSVYTNVLVQNSLRFAAALAQDLGLPIPSQWLAVADKIKVPFDVEQNFHPEFDGYEPGGGPLQGLLPCRRDPRVCPGTPSSQRHLPVGEVVKQADVVLLGYPVPFSLSPDVRRKNLEIYEAVTSPQGPAMTWSMFAVGWMELKDAVRARGLLDRSFANMAEPFKVWTENADGSGAVNFLTGMGGFLQAVVFGCTGFRVTRAGVTFDPVCLSGISRVSVSGIFYQGNKLNFSFSEDSVTVEVTARAGPWAPHLEAELWPSQSRLSLLPGHKVSFPRSAGRIQMSPPKLPGSSSSEFPGRTFSDVRDPLQSPLWVTLGSSSPTESLTVDPASE

SEQ ID NO: 891671 - protein, 737 aa, Homo sapiens
MEDAGEDPTTFAAHSLPSDPRLLATVTNAYLGTRVFHDTLHVSGVYNGAGGDTHRAMLPSPLNVRLEAPAGMGEQLTETFALDTNTGSFLHTLEGPRFRASQCIYAHRTLPHVLAFRVSIARLAPGSGPITLLLRSAFSPESPDLDLHQGPDFQGARYLYGHTLTPEQPGGPQQEVHMLWTPAPPDLTLGEGEEARTWDFLTAVGGSQAEAQACLTEALQLQARGALYTAHAQAWAQLWVECGLDVVGPLQLRQALRGSLYYLLSALPQPKAPGYICHGLSPGGLSNGSREECYWGHVFWDQDLWMFPSILMFHPEAARAILEYRIRTLDGALENAQNLGYQGAKFAWESADSGLEVCPEDIYGVQEVHVNGAVVLAFELYYHTTQDLQLFREAGGWDVVRAVAEFWCSRVEWSPREEKYHLRGVMSPDEYHSGVNNSVYTNVLVQNSLRFAAALAQDLGLPIPSQWLAVADKIKVPFDVEQNFHPEFDGYEPGEVVKQADVVLLGYPVPFSLSPDVRRKNLEIYEAVTSPQGPAMTWSMFAVGWMELKDAVRARGLLDRSFANMAEPFKVWTENADGSGAVNFLTGMGGFLQAVVFGCTGFRVTRAGVTFDPVCLSGISRVSVSGIFYQGNKLNFSFSEDSVTVEVTARAGPWAPHLEAELWPSQSRLSLLPGHKVSFPRSAGRIQMSPPKLPGSSSSEFPGRTFSDVRDPLQSPLWVTLGSSSPTESLTVDPASE

SEQ ID NO: 891672 - protein, 799 aa, Homo sapiens
MEDAGEDPTTFAAHSLPSDPRLLATVTNAYLGTRVFHDTLHVSGVYNGAGGDTHRAMLPSPLNVRLEAPAGMGEQLTETFALDTNTGSFLHTLEGPRFRASQCIYAHRTLPHVLAFRVSIARLAPGSGPITLLLRSAFSPESPDLDLHQGPDFQGARYLYGHTLTPEQPGGPQQEVHMLWTPAPPDLTLGEGEEARTWDFLTAVGGSQAEAQACLTEALQLQARGALYTAHAQAWAQLWVECGLDVVGPLQLRQALRGSLYYLLSALPQPKAPGYICHGLSPGGLSNGSREECYWGHVFWDQDLWMFPSILMFHPEAARAILEYRIRTLDGALENAQNLGYQGAKFAWESADSGLEVCPEDIYGVQEVHVNGAVVLAFELYYHTTQDLQLFREAGGWDVVRAVAEFWCSRVEWSPREEKYHLRGEAMVGRGSGRNGGCSQTQQMIFRHLTCASPTLTTGVEGRPLRLCTEHHLGLVCPGVMSPDEYHSGVNNSVYTNVLVQNSLRFAAALAQDLGLPIPSQWLAVADKIKVPFDVEQNFHPEFDGYEPVSGTSLVGEVVKQADVVLLGYPVPFSLSPDVRRKNLEIYEAVTSPQGPAMTWSMFAVGWMELKDAVRARGLLDRSFANMAEPFKVWTENADGSGAVNFLTGMGGFLQAVVFGCTGFRVTRAGVTFDPVCLSGISRVSVSGIFYQGNKLNFSFSEDSVTVEVTARAGPWAPHLEAELWPSQSRLSLLPGHKVSFPRSAGRIQMSPPKLPGSSSSEFPGRTFSDVRDPLQSPLWVTLGSSSPTESLTVDPASE

SEQ ID NO: 891673 - protein, 587 aa, Homo sapiens [sequence omitted]

SEQ ID NO: 891674 - protein, 719 aa, Homo sapiens
MEDAGEDPTTFAAHSLPSDPRLLATVTNAYLGTRVFHDTLHVSGVYNGAGGDTHRAMLPSPLNVRLEAPAGMGEQLTETFALDTNTGSFLHTLEGPRFRASQCIYAHRTLPHVLAFRVSIARLAPGSGPITLLLRSAFSPESPDLDLHQGPDFQGARYLYGHTLTPEQPGGPQQEVHMLWTPAPPDLTLGEGEEARTWDFLTAVGGSQAEAQACLTEALQLQARGALYTAHAQAWAQLWVECGLDVVGPLQLRQALRGSLYYLLSALPQPKAPGYICHGLSPGGLSNGSREECYWGHVFWDQDLWMFPSILMFHPEAARAILEYRIRTLDGALENAQNLGYQGAKFAWESADSGLEVCPEDIYGVQEVHVNGAVVLAFELYYHTTQDLQLFREAGGWDVVRAVAEFWCSRVEWSPREEKYHLRGVMSPDEYHSGVNNSVYTNVLVQNSLRFAAALAQDLGLPIPSQWLAVADKIKVPFDVEQNFHPEFDGYEPGEVVKQADVVLLGYPVPFSLSPDVRRKNLEIYEAVTSPQGPAMTWSMFAVGWMELKDAVRARGLLDRSFANMAEPFKVWTENADGSGAVNFLTGMGGFLQAVVFGCTGFRVSVSGIFYQGNKLNFSFSEDSVTVEVTARAGPWAPHLEAELWPSQSRLSLLPGHKVSFPRSAGRIQMSPPKLPGSSSSEFPGRTFSDVRDPLQSPLWVTLGSSSPTESLTVDPASE

SEQ ID NO: 891675 - protein, 109 aa, Homo sapiens
MFPSILMFHPEAARAILEYRIRTLDGALENAQNLGYQPQAASLPAGHKVSFPRSAGRIQMSPPKLPGSSSSEFPGRTFSDVRDPLQSPLWVTLGSSSPTESLTVDPASE

SEQ ID NO: 891676 - protein, 767 aa, Homo sapiens; identical to SEQ ID NO: 891668

SEQ ID NO: 891677 - protein, 354 aa, Homo sapiens
MEDAGEDPTTFAAHSLPSDPRLLATVTNAYLGTRVFHDTLHVSGVYNGAGGDTHRAMLPSPLNVRLEAPAGMGEQLTETFALDTNTGSFLHTLEGPRFRASQCIYAHRTLPHVLAFRVSIARLAPGSGPITLLLRSAFSPESPDLDLHQGPDFQGARYLYGHTLTPEQPGGPQQEVHMLWTPAPPDLTLGEGEEARTWDFLTAVGGSQAEAQACLTEALQLQARGALYTAHAQAWAQLWVECGLDVVGPLQLRQALRGSLYYLLSALPQPKAPGYICHGLSPGGLSNGSREECYWGHVFWDQVSTVHPAPATQQATHGGPRSLPSLGPGLWLGKHRDCGKREEAWKVCRSLVEE

SEQ ID NO: 891678 - protein, 545 aa, Homo sapiens
MEDAGEDPTTFAAHSLPSDPRLLATVTNAYLGTRVFHDTLHVSGVYNGAGGDTHRAMLPSPLNVRLEAPAGMGEQLTETFALDTNTGSFLHTLEGPRFRASQCIYAHRTLPHVLAFRVSIARLAPGSGPITLLLRSAFSPESPDLDLHQGPDFQGARYLYGHTLTPEQPGGPQQEVHMLWTPAPPDLTLGEGEEARTWDFLTAVGGSQAEAQACLTEALQLQARGALYTAHAQAWAQLWVECGLDVVGPLQLRQALRGSLYYLLSALPQPKAPGYICHGLSPGGLSNGSREECYWGHVFWDQDLWMFPSILMFHPEAARAILEYRIRTLDGALENAQNLGYQGAKFAWESADSGLEVCPEDIYGVQEVHVNGAVVLAFELYYHTTQDLQLFREAGGWDVVRAVAEFWCSRVEWSPREEKYHLRGVMSPDEYHSGVNNSVYTNVLVQNSLRFAAALAQDLGLPIPSQWLAVADKIKVPFDVEQNFHPEFDGYEPGEVVKQADVVLLGYPVPFSLSPDVRRKNLEIYEAVTSPQGPAMTWVSTLGLW

SEQ ID NO: 891679 - protein, 123 aa, Homo sapiens
MGIGNCTGGLRRMENPSSSCTRTEAKGPQFNRKPKTRARKRPNTRARRKPKLRRARRVCAFASLPASRFLLTRPRVLSPDGVENPGAGWGWSLAGLGAPPSPRATARRGPRERQAPGRDPRGR

SEQ ID NO: 891680 - protein, 512 aa, Homo sapiens
MEDAGEDPTTFAAHSLPSDPRLLATVTNAYLGTRVFHDTLHVSGVYNGAGGDTHRAMLPSPLNVRLEAPAGMGEQLTETFALDTNTGSFLHTLEGPRFRASQCIYAHRTLPHVLAFRVSIARLAPGSGPITLLLRSAFSPESPDLDLHQGPDFQGARYLYGHTLTPEQPGGPQQEVHMLWTPAPPDLTLGEGEEARTWDFLTAVGGSQAEAQACLTEALQLQARGALYTAHAQAWAQLWVECGLDVVGPLQLRQALRGSLYYLLSALPQPKAPGYICHGLSPGGLSNGSREECYWGHVFWDQDLWMFPSILMFHPEAARAILEYRIRTLDGALENAQNLGYQGAKFAWESADSGLEVCPEDIYGVQEVHVNGAVVLAFELYYHTTQDLQLFREAGGWDVVRAVAEFWCSRVEWSPREEKYHLRGEAMVGRGSGRNGGCSQTQQMIFRHLTCASPTLTTGVEGRPLRLCTEHHLGLVCPGVMSPDEYHSGVNNSVYTNVLVQNRSDTRSPHLT

SEQ ID NO: 891681 - protein, 111 aa, Homo sapiens
MENPSSSCTRTEAKGPQFNRKPKTRARKRPNTRARRKPKLRRARRVCAFASLPASRFLLTRPRVLSPDGVENPGAGWGWSLAGLGAPPSPRATARRGPRERQAPGRDPRGR

SEQ ID NO: 891682 - protein, 148 aa, Homo sapiens
VTVEVTARAGPWAPHLEAELWPSQSRLSLLPGRTAPNSPGACDPRLPLTPRLPLSLQDTRSPFPARLAGYKCHPRSCLEVPAPSSLGGLFQMLGTRSRAPSGSPWVPPAPPSHSLWTLPLNNQERWLQRRLLGLPSGHVCTHPSWAPS

SEQ ID NO: 891683 - protein, 70 aa, Homo sapiens
SFLHTLEGPRFRASQCIYAHRTLPHVLAFRVSIARLAPGSGPITLLLRSAFSPESPDLDLHQGPDFQGAR

SEQ ID NO: 891684 - protein, 89 aa, Homo sapiens
MSNRSSFSRLTWFRKQRKAVVSTSDKKMPNGILEEQEQQRVMLLSRSPSGPKKYFPIPVEHLEEEIRIRSADDCKQFREEFNVSVGRAL

SEQ ID NO: 891685 - protein, 794 aa, Homo sapiens
PQPELEPRRRRDAAGRTNFLLAADSGRQEPARAASGTHGLCASPRPFFAPGEDSRAPRRAAGRRPGDAEPPLQRDLRDQTGPPETIAFTFPRSTMEPLCPLLLVGFSLPLARALRGNETTADSNETTTTSGPPDPGASQPLLAWLLLPLLLLLLVLLLAAYFFRFRKQRKAVVSTSDKKMPNGILEEQEQQRVMLLSRSPSGPKKYFPIPVEHLEEEIRIRSADDCKQFREEFNSLPSGHIQGTFELANKEENREKNRYPNILPNDHSRVILSQLDGIPCSDYINASYIDGYKEKNKFIAAQGPKQETVNDFWRMVWEQKSATIVMLTNLKERKEEKCHQYWPDQGCWTYGNIRVCVEDCVVLVDYTIRKFCIQPQLPDGCKAPRLVSQLHFTSWPDFGVPFTPIGMLKFLKKVKTLNPVHAGPIVVHCSAGVGRTGTFIVIDAMMAMMHAEQKVDVFEFVSRIRNQRPQMVQTDMQYTFIYQALLEYYLYGDTELDVSSLEKHLQTMHGTTTHFDKIGLEEEFRKLTNVRIMKENMRTGNLPANMKKARVIQIIPYDFNRVILSMKRGQEYTDYINASFIDGYRQKDYFIATQGPLAHTVEDFWRMIWEWKSHTIVMLTEVQEREQDKCYQYWPTEGSVTHGEITIEIKNDTLSEAISIRDFLVTLNQPQARQEEQVRVVRQFHFHGWPEIGIPAEGKGMIDLIAAVQKQQQQTGNHPITVHCSAGAGRTGTFIALSNILERVKAEGLLDVFQAVKSLRLQRPHMVQTLEQYEFCYKVVQDFIDIFSDYANFK

SEQ ID NO: 891686 - protein, 480 aa, Homo sapiens
MVWEQKSATIVMLTNLKERKEEKCHQYWPDQGCWTYGNIRVCVEDCVVLVDYTIRKFCIQPQLPDGCKAPRLVSQLHFTSWPDFGVPFTPIGMLKFLKKVKTLNPVHAGPIVVHCSAGVGRTGTFIVIDAMMAMMHAEQKVDVFEFVSRIRNQRPQMVQTDMQYTFIYQALLEYYLYGDTELDVSSLEKHLQTMHGTTTHFDKIGLEEEFRKLTNVRIMKENMRTGNLPANMKKARVIQIIPYDFNRVILSMKRGQEYTDYINASFIDGYRQKDYFIATQGPLAHTVEDFWRMIWEWKSHTIVMLTEVQEREQDKCYQYWPTEGSVTHGEITIEIKNDTLSEAISIRDFLVTLNQPQARQEEQVRVVRQFHFHGWPEIGIPAEGKGMIDLIAAVQKQQQQTGNHPITVHCSAGAGRTGTFIALSNILERVKAEGLLDVFQAVKSLRLQRPHMVQTLEQYEFCYKVVQDFIDIFSDYANFK

SEQ ID NO: 891687 - protein, 480 aa, Homo sapiens; identical to SEQ ID NO: 891686

SEQ ID NO: 891688 - protein, 480 aa, Homo sapiens; identical to SEQ ID NO: 891686

SEQ ID NO: 891689 - protein, 615 aa, Homo sapiens
MPNGILEEQEQQRVMLLSRSPSGPKKYFPIPVEHLEEEIRIRSADDCKQFREEFNSLPSGHIQGTFELANKEENREKNRYPNILPNDHSRVILSQLDGIPCSDYINASYIDGYKEKNKFIAAQGPKQETVNDFWRMVWEQKSATIVMLTNLKERKEEKCHQYWPDQGCWTYGNIRVCVEDCVVLVDYTIRKFCIQPQLPDGCKAPRLVSQLHFTSWPDFGVPFTPIGMLKFLKKVKTLNPVHAGPIVVHCSAGVGRTGTFIVIDAMMAMMHAEQKVDVFEFVSRIRNQRPQMVQTDMQYTFIYQALLEYYLYGDTELDVSSLEKHLQTMHGTTTHFDKIGLEEEFRKLTNVRIMKENMRTGNLPANMKKARVIQIIPYDFNRVILSMKRGQEYTDYINASFIDGYRQKDYFIATQGPLAHTVEDFWRMIWEWKSHTIVMLTEVQEREQDKCYQYWPTEGSVTHGEITIEIKNDTLSEAISIRDFLVTLNQPQARQEEQVRVVRQFHFHGWPEIGIPAEGKGMIDLIAAVQKQQQQTGNHPITVHCSAGAGRTGTFIALSNILERVKAEGLLDVFQAVKSLRLQRPHMVQTLEQYEFCYKVVQDFIDIFSDYANFK

SEQ ID NO: 891690 - protein, 794 aa, Homo sapiens; identical to SEQ ID NO: 891685

SEQ ID NO: 891691 - protein, 794 aa, Homo sapiens; identical to SEQ ID NO: 891685

SEQ ID NO: 891692 - protein, 389 aa, Homo sapiens
MEPLCPLLLVGFSLPLARALRGNETTADSNETTTTSGPPDPGASQPLLAWLLLPLLLLLLVLLLAAYFFRFRKQRKAVVSTSDKKMPNGILEEQEQQRVMLLSRSPSGPKKYFPIPVEHLEEEIRIRSADDCKQFREEFNSLPSGHIQGTFELANKEENREKNRYPNILPNDHSRVILSQLDGIPCSDYINASYIDGYKEKNKFIAAQGPKQETVNDFWRMVWEQKSATIVMLTNLKERKEEKCHQYWPDQGCWTYGNIRVCVEDCVVLVDYTIRKFCIQPQLPDGCKAPRLVSQLHFTSWPDFGVPFTPIGMLKFLKKVKTLNPVHAGPIVVHCSAGVGRTGTFIVIDAMMAMMHAEQKVDVFEFVSRIRNQRPQMVQTDVSHAFLLP

SEQ ID NO: 891693 - protein, 209 aa, Homo sapiens
MEPLCPLLLVGFSLPLARALRGNETTADSNETTTTSGPPDPGASQPLLAWLLLPLLLLLLVLLLAAYFFRFRKQRKAVVSTSDKKMPNGILEEQEQQRVMLLSRSPSGPKKYFPIPVEHLEEEIRIRSADDCKQFREEFNSLPSGHIQGTFELANKEENREKNRYPNILPNDHSRVILSQLDGIPCSDYINASYIDLQREEEFIAAPPA

SEQ ID NO: 891694 - protein, 642 aa, Homo sapiens
MSNRSSFSRLTWFRKQRKAVVSTSDKKMPNGILEEQEQQRVMLLSRSPSGPKKYFPIPVEHLEEEIRIRSADDCKQFREEFNSLPSGHIQGTFELANKEENREKNRYPNILPNDHSRVILSQLDGIPCSDYINASYIDGYKEKNKFIAAQGPKQETVNDFWRMVWEQKSATIVMLTNLKERKEEKCHQYWPDQGCWTYGNIRVCVEDCVVLVDYTIRKFCIQPQLPDGCKAPRLVSQLHFTSWPDFGVPFTPIGMLKFLKKVKTLNPVHAGPIVVHCSAGVGRTGTFIVIDAMMAMMHAEQKVDVFEFVSRIRNQRPQMVQTDMQYTFIYQALLEYYLYGDTELDVSSLEKHLQTMHGTTTHFDKIGLEEEFRKLTNVRIMKENMRTGNLPANMKKARVIQIIPYDFNRVILSMKRGQEYTDYINASFIDGYRQKDYFIATQGPLAHTVEDFWRMIWEWKSHTIVMLTEVQEREQDKCYQYWPTEGSVTHGEITIEIKNDTLSEAISIRDFLVTLNQPQARQEEQVRVVRQFHFHGWPEIGIPAEGKGMIDLIAAVQKQQQQTGNHPITVHCSAGAGRTGTFIALSNILERVKAEGLLDVFQAVKSLRLQRPHMVQTLEQYEFCYKVVQDFIDIFSDYANFK

SEQ ID NO: 891695 - protein, 642 aa, Homo sapiens; identical to SEQ ID NO: 891694

SEQ ID NO: 891696 - protein, 700 aa, Homo sapiens
MEPLCPLLLVGFSLPLARALRGNETTADSNETTTTSGPPDPGASQPLLAWLLLPLLLLLLVLLLAAYFFRFRKQRKAVVSTSDKKMPNGILEEQEQQRVMLLSRSPSGPKKYFPIPVEHLEEEIRIRSADDCKQFREEFNSLPSGHIQGTFELANKEENREKNRYPNILPNDHSRVILSQLDGIPCSDYINASYIDGYKEKNKFIAAQGPKQETVNDFWRMVWEQKSATIVMLTNLKERKEEKCHQYWPDQGCWTYGNIRVCVEDCVVLVDYTIRKFCIQPQLPDGCKAPRLVSQLHFTSWPDFGVPFTPIGMLKFLKKVKTLNPVHAGPIVVHCSAGVGRTGTFIVIDAMMAMMHAEQKVDVFEFVSRIRNQRPQMVQTDMQYTFIYQALLEYYLYGDTELDVSSLEKHLQTMHGTTTHFDKIGLEEEFRKLTNVRIMKENMRTGNLPANMKKARVIQIIPYDFNRVILSMKRGQEYTDYINASFIDGYRQKDYFIATQGPLAHTVEDFWRMIWEWKSHTIVMLTEVQEREQDKCYQYWPTEGSVTHGEITIEIKNDTLSEAISIRDFLVTLNQPQARQEEQVRVVRQFHFHGWPEIGIPAEGKGMIDLIAAVQKQQQQTGNHPITVHCSAGAGRTGTFIALSNILERVKAEGLLDVFQAVKSLRLQRPHMVQTLEQYEFCYKVVQDFIDIFSDYANFK

SEQ ID NO: 891697 - protein, 735 aa, Homo sapiens
LPKGNLPLRPKNSAQWILQGQDGFPASSQEDKRSTMEPLCPLLLVGFSLPLARALRGNETTADSNETTTTSGPPDPGASQPLLAWLLLPLLLLLLVLLLAAYFFRFRKQRKAVVSTSDKKMPNGILEEQEQQRVMLLSRSPSGPKKYFPIPVEHLEEEIRIRSADDCKQFREEFNSLPSGHIQGTFELANKEENREKNRYPNILPNDHSRVILSQLDGIPCSDYINASYIDGYKEKNKFIAAQGPKQETVNDFWRMVWEQKSATIVMLTNLKERKEEKCHQYWPDQGCWTYGNIRVCVEDCVVLVDYTIRKFCIQPQLPDGCKAPRLVSQLHFTSWPDFGVPFTPIGMLKFLKKVKTLNPVHAGPIVVHCSAGVGRTGTFIVIDAMMAMMHAEQKVDVFEFVSRIRNQRPQMVQTDMQYTFIYQALLEYYLYGDTELDVSSLEKHLQTMHGTTTHFDKIGLEEEFRKLTNVRIMKENMRTGNLPANMKKARVIQIIPYDFNRVILSMKRGQEYTDYINASFIDGYRQKDYFIATQGPLAHTVEDFWRMIWEWKSHTIVMLTEVQEREQDKCYQYWPTEGSVTHGEITIEIKNDTLSEAISIRDFLVTLNQPQARQEEQVRVVRQFHFHGWPEIGIPAEGKGMIDLIAAVQKQQQQTGNHPITVHCSAGAGRTGTFIALSNILERVKAEGLLDVFQAVKSLRLQRPHMVQTLEQYEFCYKVVQDFIDIFSDYANFK

SEQ ID NO: 891698 - protein, 480 aa, Homo sapiens; identical to SEQ ID NO: 891686

SEQ ID NO: 891699 - protein, 794 aa, Homo sapiens; identical to SEQ ID NO: 891685

SEQ ID NO: 891700 - protein, 794 aa, Homo sapiens; identical to SEQ ID NO: 891685

SEQ ID NO: 891701 - protein, 70 aa, Homo sapiens
LREECDSRRSIFLFPQSAGVGRTGTFIVIDAMMAMMHAEQKVDVFEFVSRIRNQRPQMVQTDVSHAFLLP

SEQ ID NO: 891702 - protein, 1753 aa, Homo sapiens
MPRRRKNLGGNPFRKTANPKEVVVSSVASREEPTTTLPSMGETKVDQEELFTSISEIFSDLDPDVVYLMLSECDFKVENAMDCLLELSATDTKIEESSSQSFVASENQVGAAESKIMEKRPEEESEDSKMDSFLDMQLTEDLDSLIQNAFEKLNSSPDDQVYSFLPSQDVNSFNDSSEFINPDSSNMTPIFSTQNMNLNGENLENSGSTLSLNPLPSHSVLNESKCFIKDNTLALESNYPEDSLLSSSLNVASDSIAGCSSLNQKQKELLESECVEAQFSEAPVDLDASEPQACLNLPGLDLPGTGGDQKSTRVSDVFLPSEGFNFKPHKHPELPTKGKDVSYCPVLAPLPLLLPPPPPPPMWNPMIPAFDLFQGNHGFVAPVVTTAAHWRSVNYTFPPSVISHTSPTKVWRNKDGTSAYQVQETPVSQVVRKKTSYVGLVLVLLRGLPGSGKSFLARTLQEDNPSGVILSTDDYFYINGQYQFDVKYLGEAHEWNQNRAKEAFEKKISPIIIDNTNLQAWEMKPYVALSQKHKYKVLFREPDTWWKFKPKELARRNIHGVSKEKITRMLEHYQRFVSVPIIMSSSVPEKIERIELCAYSCEDRSTSPRDDEDIISEKEENILSLSLKHLEFTEEKNLDVTKETMLPENVAYLSNADLNKRRKEISDMNPSIQSALILETPHMYFSDSESKLQATDKSENEQIEMVAVKGYSKTDTDSSMERVSPSTCCSENNQEDCDLANSGPLQNEKSSPGEIVEERATVTKKAFGKQKSKSTLEKFPRHELSNFVGDWPVDKTIGQRTKRNRKTEKTSSVQSDKKYNYPQSHKLVNSVSVNTDCVQQRGSPHESVEDGRKSQCDDASEPLNSYKYDAYKNIDKNSFNIMGDWPSSDSLAQREHRSRMPKTGLSEPNLEIGTNDKMNEISLSTAHEACWGTSSQKLKTLGSSNLGSSEMLLSEMTCESQTCLSKKSHGQHTSLPLTFTNSAPTVSGVVEPQTLAECQEQMPKRDPGKEVGMCTQTEPQDFALLWKIEKNKISISDSIKVLTGRLDGFKPKVFNINTKSDVQEAIPYRVMYDKSTFVEESELTSADESENLNILCKLFGSFSLEALKDLYERCNKDIIWATSLLLDSETKLCEDTEFENFQKSCDGSQIGPFSLGLNLKEIISQRGTLENSNSPVPEFSHGIGISNADSQSTCDAERGNSEQAEMRAVTPENHESMTSIFPSAAVGLKNNNDILPNSQEELLYSSKQSFPGILKATTPKDMSETEKNLVVTETGDNIHSPSHFSDIFNFVSSTSNLELNEEIYFTDSLEIKRNENFPKDYVKFSDEEEFMNEDEKEMKEILMAGSSLSAGVSGEDKTEILNPTPAMAKSLTIDCLELALPPELAFQLNELFGPVGIDSGSLTVEDCVVHIDLNLAKVIHEKWKESVMERQRQEEVSCGKFMQDPSLVGHTGLDNPEQKSSQRTGKKLLKTLTASEMLPLLDHWNTQTKKVSLREIMSEEIALQEKHNLKRETLMFEKDCATKLKEKQLFKIFPAINQNFLVDIFKDHNYSLEHTVQFLNCVLEGDPVKTVVAQEFVHQNENVTSHTGQKSKEKKDFEYPDYDDYRAEAFLHQQKRMECYSKAKEAYRIGKKNVATFYAQQGTLHEQKMKEANHLAAIEIFEKVNASLLPQNVLDLHGLHVDEALEHLMRVLEKKTEEFKQNGGKPYLSVITGRGNHSQGGVARIKPAVIKYLISHSFRFSEIKPGCLKVMLK

SEQ ID NO: 891703 - protein, 1673 aa, Homo sapiens
MDCLLELSATDTKIEESSSQSFVASENQVGAAESKIMEKRPEEESEDSKMDSFLDMQLTEDLDSLIQNAFEKLNSSPDDQVYSFLPSQDVNSFNDSSEFINPDSSNMTPIFSTQNMNLNGENLENSGSTLSLNPLPSHSVLNESKCFIKDNTLALGSNYPEDSLLSSSLNVASDSIAGCSSLNQKQKELLESECVEAQFSEAPVDLDASEPQACLNLPGLDLPGTGGDQKSTRVSDVFLPSEGFNFKPHKHPELPTKGKDVSYCPVLAPLPLLLPPPPPPPMWNPMIPAFDLFQGNHGFVAPVVTTAAHWRSVNYTFPPSVISHTSPTKVWRNKDGTSAYQVQETPVSQVVRKKTSYVGLVLVLLRGLPGSGKSFLARTLQEDNPSGVILSTDDYFYINGQYQFDVKYLGEAHEWNQNRAKEAFEKKISPIIIDNTNLQAWEMKPYVALSQKHKYKVLFREPDTWWKFKPKELARRNIHGVSKEKITRMLEHYQRFVSVPIIMSSSVPEKIERIELCAYSCEDRSTSPRDDEDIISEKEENILSLSLKHLEFTEEKNLDVTKETMLPENVAYLSNADLNKRRKEISDMNPSIQSALILETPHMYFSDSESKLQATDKSENEQIEMVAVKGYSKTDTDSSMERVSPSTCCSENNQEDCDLANSGPLQNEKSSPGEIVEERATVTKKAFGKQKSKSTLEKFPRHELSNFVGDWPVDKTIGQRTKRNRKTEKTSSVQSDKKYNYPQSHKLVNSVSVNTDCVQQRGSPHESVEDGRKSQCDDASEPLNSYKYDAYKNIDKNSFNIMGDWPSSDSLAQREHRSRMPKTGLSEPNLEIGTNDKMNEISLSTAHEACWGTSSQKLKTLGSSNLGSSEMLLSEMTCESQTCLSKKSHGQHTSLPLTFTNSAPTVSGVVEPQTLAECQEQMPKRDPGKEVGMCTQTEPQDFALLWKIEKNKISISDSIKVLTGRLDGFKPKVFNINTKSDVQEAIPYRVMYDKSTFVEESELTSADESENLNILCKLFGSFSLEALKDLYERCNKDIIWATSLLLDSETKLCEDTEFENFQKSCDGSQIGPFSLGLNLKEIISQRGTLENSNSPVPEFSHGIGISNADSQSTCDAERGNSEQAEMRAVTPENHESMTSIFPSAAVGLKNNNDILPNSQEELLYSSKQSFPGILKATTPKDMSETEKNLVVTETGDNIHSPSHFSDIFNFVSSTSNLELNEEIYFTDSLEIKRNENFPKDYVKFSDEEEFMNEDEKEMKEILMAGSSLSAGVSGEDKTEILNPTPAMAKSLTIDCLELALPPELAFQLNELFGPVGIDSGSLTVEDCVVHIDLNLAKVIHEKWKESVMERQRQEEVSCGKFMQDPSLVGHTGLDNPEQKSSQRTGKKLLKTLTASEMLPLLDHWNTQTKKVSLREIMSEEIALQEKHNLKRETLMFEKDCATKLKEKQLFKIFPAINQNFLVDIFKDHNYSLEHTVQFLNCVLEGDPVKTVVAQEFVHQNENVTSHTGQKSKEKKDFEYPDYDDYRAEAFLHQQKRMECYSKAKEAYRIGKKNVATFYAQQGTLHEQKMKEANHLAAIEIFEKVNASLLPQNVLDLHGLHVDEALEHLMRVLEKKTEEFKQNGGKPYLSVITGRGNHSQGGVARIKPAVIKYLISHSFRFSEIKPGCLKVMLK

SEQ ID NO: 891704 - protein, 1770 aa, Homo sapiens
MPRRRKNLGGNPFRKTANPKEVVVSSVASREEPTTTLPSMGETKVDQEELFTSISEIFSDLDPDVVYLMLSECDFKVENAMDCLLELSATDTKIEESSSQSFVASENQVGAAESKIMEKRPEEESEDSKMDSFLDMQLTEDLDSLIQNAFEKLNSSPDDQVYSFLPSQDVNSFNDSSEFINPDSSNMTPIFSTQNMNLNGENLENSGSTLSLNPLPSHSVLNESKCFIKDNTLALESNYPEDSLLSSSLNVASDSIAGCSSLNQKQKELLESECVEAQFSEAPVDLDASEPQACLNLPGLDLPGTGGDQKSTRVSDVFLPSEGFNFKPHKHPELPTKGKDVSYCPVLAPLPLLLPPPPPPPMWNPMIPAFDLFQGNHGFVAPVVTTAAHWRSVNYTFPPSVISHTSPTKVWRNKDGTSAYQVQETPVSQVVRKKTSYVGLVLVLLRGLPGSGKSFLARTLQEDNPSGVILSTDDYFYINGQYQFDVKYLGEAHEWNQNRAKEAFEKKISPIIIDNTNLQAWEMKPYVALSQKHKYKVLFREPDTWWKFKPKELARRNIHGVSKEKITRMLEHYQRFVSVPIIMSSSVPEKIERIELCAYSCEDRSTSPRDDEDIISEKEENILSLSLKHLEFTEEKNLDVTKETMLPENVAYLSNADLNKRRKEISDMNPSIQSALILETPHMYFSDSESKLQATDKSENEQIEMVAVKGYSKTDTDSSMERVSPSTCCSENNQEDCDLANSGPLQNEKSSPGEIVEERATVTKKAFGKQKSKSTLEKFPRHELSNFVGDWPVDKTIGQRTKRNRKTEKTSSVQSDKKYNYPQSHKLVNSVSVNTDCVQQRGSPHESVEDGRKSQCDDASEPLNSYKYDAYKNIDKNSFNIMGDWPSSDSLAQREHRSRMPKTGLSEPNLEIGTNDKMNEISLSTAHEACWGTSSQKLKTLGSSNLGSSEMLLSEMTCESQTCLSKKSHGQHTSLPLTFTNSAPTVSGVVEPQTLAECQEQMPKRDPGKEVGMCTQTEPQDFALLWKIEKNKISISDSIKVLTGRLDGFKPKVFNINTKSDVQEAIPYRVMYDKSTFVEESELTSADESENLNILCKLFGSFSLEALKDLYERCNKDIIWATSLLLDSETKLCEDTEFENFQKSCDGSQIGPFSLGLNLKEIISQRGTLENSNSPVPEFSHGIGISNADSQSTCDAERGNSEQAEMRAVTPENHESMTSIFPSAAVGLKNNNDILPNSQEELLYSSKQSFPGILKATTPKDMSETEKNLVVTETGDNIHSPSHFSDIFNFVSSTSNLELNEEIYFTDSLEIKRNENFPKDYVKFSDEEEFMNEDEKEMKEILMAGSSLSAGVSGEDKTEILNPTPAMAKSLTIDCLELALPPELAFQLNELFGPVGIDSGSLTVEDCVVHIDLNLAKVIHEKWKESVMERQRQEEVSCGKFMQDPSLVGHTGLDNPEQKSSQRTGKKLLKTLTASEMLPLLDHWNTQTKKVSLREIMSEEIALQEKHNLKRETLMFEKDCATKLKEKQLFKIFPAINQNFLVDIFKDHNYSLEHTVQFLNCVLEGDPVKTVVAQEFVHQNENVTSHTGQKSKEKKPKKLKETEETPSELSFQDFEYPDYDDYRAEAFLHQQKRMECYSKAKEAYRIGKKNVATFYAQQGTLHEQKMKEANHLAAIEIFEKVNASLLPQNVLDLHGLHVDEALEHLMRVLEKKTEEFKQNGGKPYLSVITGRGNHSQGGVARIKPAVIKYLISHSFRFSEIKPGCLKVMLK

SEQ ID NO: 891705 - protein, 380 aa, Homo sapiens
ELLVLWYDSGSLTVEDCVVHIDLNLAKVIHEKWKESVMERQRQEEVSCGKFMQDPSLVGHTGLDNPEQKSSQRTGKKLLKTLTASEMLPLLDHWNTQTKKVSLREIMSEEIALQEKHNLKRETLMFEKDCATKLKEKQLFKIFPAINQNFLVDIFKDHNYSLEHTVQFLNCVLEGDPVKTVVAQEFVHQNENVTSHTGQKSKEKKPKKLKETEETPSELSFQDFEYPDYDDYRAEAFLHQQKRMECYSKAKEAYRIGKKNVATFYAQQGTLHEQKMKEANHLAAIEIFEKVNASLLPQNVLDLHGLHVDEALEHLMRVLEKKTEEFKQNGGKPYLSVITGRGNHSQGGVARIKPAVIKYLISHSFRFSEIKPGCLKVMLK

SEQ ID NO: 891706 - protein, 199 aa, Homo sapiens
VPVPSSLDAAPAAVVGCWVWSFPAPLGSDPLSVLLRRQPTSLLGAMTTTTTFKGVDPNSRNSSRVLRPPGGGSNFSLGFDEPTEQPVRKNKMASNIFGTPEENQASWAKSAGAKSSGGREDLESSGLQRRNSSEASSGDFLDLKGEGDIHENVDTDLPGSLGQSEEKPVPAAPVPSPVAPAPVPSRRNPPGGKSSLVLG

SEQ ID NO: 891707 - protein, 154 aa, Homo sapiens
MTTTTTFKGVDPNSRNSSRVLRPPGGGSNFSLGFDEPTEQPVRKNKMASNIFGTPEENQASWAKSAGAKSSGGREDLESSGLQRRNSSEASSGDFLDLKGEGDIHENVDTDLPGSLGQSEEKPVPAAPVPSPVAPAPVPSRRNPPGGKSSLVLG

SEQ ID NO: 891708 - protein, 203 aa, Homo sapiens
MAVISGYKVARPGSPAAVVGCWVWSFPAPLGSDPLSVLLRRQPTSLLGAMTTTTTFKGVDPNSRNSSRVLRPPGGGSNFSLGFDEPTEQPVRKNKMASNIFGTPEENQASWAKSAGAKSSGGREDLESSGLQRRNSSEASSGDFLDLKGEGDIHENVDTDLPGSLGQSEEKPVPAAPVPSPVAPAPVPSRRNPPGGKSSLVLG

SEQ ID NO: 891709 - protein, 154 aa, Homo sapiens; identical to SEQ ID NO: 891707

SEQ ID NO: 891710 - protein, 199 aa, Homo sapiens; identical to SEQ ID NO: 891706

SEQ ID NO: 891711 - protein, 154 aa, Homo sapiens; identical to SEQ ID NO: 891707

SEQ ID NO: 891712 - protein, 154 aa, Homo sapiens; identical to SEQ ID NO: 891707

SEQ ID NO: 891713 - protein, 154 aa, Homo sapiens; identical to SEQ ID NO: 891707

SEQ ID NO: 891714 - protein, 108 aa, Homo sapiens
MASNIFGTPEENQASWAKSAGAKSSGGREDLESSGLQRRNSSEASSGDFLDLKGEGDIHENVDTDLPGSLGQSEEKPVPAAPVPSPVAPAPVPSRRNPPGGKSSLVLG

SEQ ID NO: 891715 - protein, 252 aa, Homo sapiens
SPVRCARAGAGGGVLPSAPPLCRLASPARRPHPGPCCSPFIPSTESGAEEAGAGRPSEHGRFSLIGTFGEGFAFSCVHPGWCIPRVVGLAPQVPGDPLGPHAWSGPIVPLMGHALLSLPRGMRLVSLSRAAIGSGDRIDQVRRAPYPRRAPTPYSDLPDRCMCGRAGLVIATLHPPLRTQSFFPSSKCLPSSKCLPFLTKERPLLPIPALISKAGGGGGRGERANPSGFSALKPSDRGLCILPSLPPLTFAQ

SEQ ID NO: 891716 - protein, 275 aa, Homo sapiens
SPVRCARAGAGGGVLPSAPPLCRLASPARRPHPGPCCSPFIPSTESGAEEAGAGRPSEHGRFSLIGTFGEGFAFSCVHPGWCIPRVVGLAPQVPGDPLGPHAWSGPIVPLMGHALLSLPRGMRLVSLSRAAIGSGDRIDRVLRPPGGGSNFSLGFDEPTEQPVRKNKMASNIFGTPEENQASWAKSAGAKSSGGREDLESSGLQRRNSSEASSGDFLDLKGEGDIHENVDTDLPGSLGQSEEKPVPAAPVPSPVAPAPVPSRRNPPGGKSSLVLG

SEQ ID NO: 891717 - protein, 295 aa, Homo sapiens
SPVRCARAGAGGGVLPSAPPLCRLASPARRPHPGPCCSPFIPSTESGAEEAGAGRPSEHGRFSLIGTFGEGFAFSCVHPGWCIPRVVGLAPQVPGDPLGPHAWSGPIVPLMGHALLSLPRGMRLVSLSRAAIGSGDRIDQVRRAPYPRRAPTPYSDLPDRVLRPPGGGSNFSLGFDEPTEQPVRKNKMASNIFGTPEENQASWAKSAGAKSSGGREDLESSGLQRRNSSEASSGDFLDLKGEGDIHENVDTDLPGSLGQSEEKPVPAAPVPSPVAPAPVPSRRNPPGGKSSLVLG

SEQ ID NO: 891718 - protein, 108 aa, Homo sapiens; identical to SEQ ID NO: 891714

SEQ ID NO: 891719 - protein, 150 aa, Homo sapiens
VSPPVCATISRNSSRVLRPPGGGSNFSLGFDEPTEQPVRKNKMASNIFGTPEENQASWAKSAGAKSSGGREDLESSGLQRRNSSEASSGDFLDLKGEGDIHENVDTDLPGSLGQSEEKPVPAAPVPSPVAPAPVPSRRNPPGGKSSLVLG

SEQ ID NO: 891720 - protein, 154 aa, Homo sapiens; identical to SEQ ID NO: 891707

SEQ ID NO: 891721 - protein, 154 aa, Homo sapiens; identical to SEQ ID NO: 891707

SEQ ID NO: 891722 - protein, 181 aa, Homo sapiens
MAVISGYKVARPGSPAAVVGCWVWSFPAPLGSDPLSVLLRRQPTSLLGAMTTTTTFKGVDPNSRNSSRVLRPPGGGSNFSLGFDEPTEQPVRKNKMASNIFGTPEENQASWAKSAGAKSSGGREDLESSGLQRRNSSEASSGDFLDLKGEGDREGDIHENVDTDLPSRRNPPGGKSSLVLG

SEQ ID NO: 891723 - protein, 172 aa, Homo sapiens
MAVISGYKVARPGSPAAVVGCWVWSFPAPLGSDPLSVLLRRQPTSLLGAMTTTTTFKGVDPNSRNSSRVLRPPGGGSNFSLGFDEPTEQPVRKNKMASNIFGTPEENQASWAKSAGAKSSGGREDLESSGLQRRNSSEASSGDFLDLKGEGDMTVLNAVVLSVSSMLVNCTT

SEQ ID NO: 891724 - protein, 68 aa, Homo sapiens
EYDLTRQTEAWGQLGLQGDAFIRDRSGPSCAIQKKSPWRQVQPRLGLALTVLNAVVLSVSSMLVNCTT

SEQ ID NO: 891725 - protein, 161 aa, Homo sapiens
MTTTTTFKGVDPNSRNSSRVLRPPGGGSNFSLGFDEPTEQPVRKNKMASNIFGTPEENQASWAKSAGAKSSGGREDLESSGLQRRNSSEASSGDFLDLKGEGDIHENVDTDLPGSLGQSEEKPVPAAPVPSPNPQGVSPQSLLGVALTCQWPLLRASSCDM

SEQ ID NO: 891726 - protein, 154 aa, Homo sapiens
MAVISGYKVARPGSPAAVVGCWVWSFPAPLGSDPLSVLLRRQPTSLLGAMTTTTTFKGVDPNSRNSSRVLRPPGGGSNFSLGFDEPTEQPVRKNKMASNIFGTPEENQASWAKSAGAKSSGGREDLESSGLQRRNSSEASSGDFLDLKGEGDTA

SEQ ID NO: 891727 - protein, 194 aa, Homo sapiens
MQAVRNAGSRFLRSWTWPQTAGRVVARTPAGTICTGARQLQDAAAKQKVEQNAAPSHTKFSIYPPIPGEESSLRWAGKKFEEIPIAHIKASHNNTQIQVVSASNEPLAFASCGTEGFRNAKKGTGIAAQTAGIAAAARAKQKGVIHIRVVVKGLGPGRLSAMHGLIMGGLEVISITDNTPIPHNGCRPRKARKL

SEQ ID NO: 891728 - protein, 161 aa, Homo sapiens
MQAVRNAGSRFLRSWTWPQTAGRVVARTPAGTICTGARQLQDAAAKQKVEQNAAPSHTKFSTQIQVVSASNEPLAFASCGTEGFRNAKKGTGIAAQTAGIAAAARAKQKGVIHIRVVVKGLGPGRLSAMHGLIMGGLEVISITDNTPIPHNGCRPRKARKL

SEQ ID NO: 891729 - protein, 194 aa, Homo sapiens; identical to SEQ ID NO: 891727

SEQ ID NO: 891730 - protein, 159 aa, Homo sapiens
MEKRTWSSEVNGSSSGQVEVGHWRQSIYPPIPGEESSLRWAGKKFEEIPIAHIKASHNNTQIQVVSASNEPLAFASCGTEGFRNAKKGTGIAAQTAGIAAAARAKQKGVIHIRVVVKGLGPGRLSAMHGLIMGGLEVISITDNTPIPHNGCRPRKARKL

SEQ ID NO: 891731 - protein, 159 aa, Homo sapiens; identical to SEQ ID NO: 891730

SEQ ID NO: 891732 - protein, 161 aa, Homo sapiens; identical to SEQ ID NO: 891728

SEQ ID NO: 891733 - protein, 95 aa, Homo sapiens
MQAVRNAGSRFLRSWTWPQTAGRVVARTPAGTICTGARQLQDAAAKQKVEQNAAPSHTKFSIYPPIPGEESSLRWAGKKFEEIPIAHCRDSVRLD

SEQ ID NO: 891734 - protein, 70 aa, Homo sapiens
MQAVRNAGSRFLRSWTWPQTAGRVVARTPAGTICTGARQLQDANEGAARVIGTLLGTVDNTHVEVTIAFR

SEQ ID NO: 891735 - protein, 194 aa, Homo sapiens; identical to SEQ ID NO: 891727

SEQ ID NO: 891736 - protein, 194 aa, Homo sapiens; identical to SEQ ID NO: 891727

SEQ ID NO: 891737 - protein, 194 aa, Homo sapiens; identical to SEQ ID NO: 891727

SEQ ID NO: 891738 - protein, 159 aa, Homo sapiens; identical to SEQ ID NO: 891730

SEQ ID NO: 891739 - protein, 171 aa, Homo sapiens
MQAVRNAGSRFLRSWTWPQTAGRVVARTPAGTICTGARQLQDAAAKQKVEQNAAPSHTKFSIYPPIPGEESSLRWAGKKFEEIPIAHIKASHNNRNAKKGTGIAAQTAGIAAAARAKQKGVIHIRVVVKGLGPGRLSAMHGLIMGGLEVISITDNTPIPHNGCRPRKARKL

SEQ ID NO: 891740 - protein, 355 aa, Homo sapiens
REVCYGDTGPTTFVPSSIVFSRAMASGLVRLLQQGHRCLLAPVAPKLVPPVRGVKKGFRAAFRFQKELERQRLLRCPPPPVRRSEKPNWDYHAEIQAFGHRLQENFSLDLLKTAFVNSCYIKSEEAKRQQLGIEKEAVLLNLKSNQELSEQGTSFSQTCLTQFLEDEYPDMPTEGIKNLVDFLTGEEVVCHVARNLAVEQLTLSEEFPVPPAVLQQTFFAVIGALLQSSGPERTALFIRDFLITQMTGKELFEMWKIINPMGLLVEELKKRNVSAPESRLTRQSGGTTALPLYFVGLYCDKKLIAEGPGETVLVAEEEAARVALRKLYGFTENRRPWNYSKPKETLRAEKSITAS

SEQ ID NO: 891741 - protein, 355 aa, Homo sapiens; identical to SEQ ID NO: 891740

SEQ ID NO: 891742 - protein, 355 aa, Homo sapiens; identical to SEQ ID NO: 891740

SEQ ID NO: 891743 - protein, 355 aa, Homo sapiens; identical to SEQ ID NO: 891740

SEQ ID NO: 891744 - protein, 1331 aa, Homo sapiens
MQAAPRAGCGAALLLWIVSSCLCRAWTAPSTSQKCDEPLVSGLPHVAFSSSSSISGSYSPGYAKINKRGGAGGWSPSDSDHYQWLQVDFGNRKQISAIATQGRYSSSDWVTQYRMLYSDTGRNWKPYHQDGNIWAFPGNINSDGVVRHELQHPIIARYVRIVPLDWNGEGRIGLRIEVYGCSYWADVINFDGHVVLPYRFRNKKMKTLKDVIALNFKTSESEGVILHGEGQQGDYITLELKKAKLVLSLNLGSNQLGPIYGHTSVMTGSLLDDHHWHSVVIERQGRSINLTLDRSMQHFRTNGEFDYLDLDYEITFGGIPFSGKPSSSSRKNFKGCMESINYNGVNITDLARRKKLEPSNVGNLSFSCVEPYTVPVFFNATSYLEVPGRLNQDLFSVSFQFRTWNPNGLLVFSHFADNLGNVEIDLTESKVGVHINITQTKMSQIDISSGSGLNDGQWHEVRFLAKENFAILTIDGDEASAVRTNSPLQVKTGEKYFFGGFLNQMNNSSHSVLQPSFQGCMQLIQVDDQLVNLYEVAQRKPGSFANVSIDMCAIIDRCVPNHCEHGGKCSQTWDSFKCTCDETGYSGATCHNSIYEPSCEAYKHLGQTSNYYWIDPDGSGPLGPLKVYCNMTEDKVWTIVSHDLQMQTPVVGYNPEKYSVTQLVYSASMDQISAITDSAEYCEQYVSYFCKMSRLLNTPDGSPYTWWVGKANEKHYYWGGSGPGIQKCACGIERNCTDPKYYCNCDADYKQWRKDAGFLSYKDHLPVSQVVVGDTDRQGSEAKLSVGPLRCQGDRNYWNAASFPNPSSYLHFSTFQGETSADISFYFKTLTPWGVFLENMGKEDFIKLELKSATEVSFSFDVGNGPVEIVVRSPTPLNDDQWHRVTAERNVKQASLQVDRLPQQIRKAPTEGHTRLELYSQLFVGGAGGQQGFLGCIRSLRMNGVTLDLEERAKVTSGFISGCSGHCTSYGTNCENGGKCLERYHGYSCDCSNTAYDGTFCNKDVGAFFEEGMWLRYNFQAPATNARDSSSRVDNAPDQQNSHPDLAQEEIRFSFSTTKAPCILLYISSFTTDFLAVLVKPTGSLQIRYNLGGTREPYNIDVDHRNMANGQPHSVNITRHEKTIFLKLDHYPSVSYHLPSSSDTLFNSPKSLFLGKVIETGKIDQEIHKYNTPGFTGCLSRVQFNQIAPLKAALRQTNASAHVHIQGELVESNCGASPLTLSPMSSATDPWHLDHLDSASADFPYNPGQGQAIRNGVNRNSAIIGGVIAVVIFTILCTLVFLIRYMFRHKGTYHTNEAKGAESAESADAAIMNNDPNFTETIDESKKEWLI

SEQ ID NO: 891745 - protein, 425 aa, Homo sapiens
SLCSSLLPHPSLCSSLLVGGAGGQQGFLGCIRSLRMNGVTLDLEERAKVTSGFISGCSGHCTSYGTNCENGGKCLERYHGYSCDCSNTAYDGTFCNKDVGAFFEEGMWLRYNFQAPATNARDSSSRVDNAPDQQNSHPDLAQEEIRFSFSTTKAPCILLYISSFTTDFLAVLVKPTGSLQIRYNLGGTREPYNIDVDHRNMANGQPHSVNITRHEKTIFLKLDHYPSVSYHLPSSSDTLFNSPKSLFLGKVIETGKIDQEIHKYNTPGFTGCLSRVQFNQIAPLKAALRQTNASAHVHIQGELVESNCGASPLTLSPMSSATDPWHLDHLDSASADFPYNPGQGQAIRNGVNRNSAIIGGVIAVVIFTILCTLVFLIRYMFRHKGTYHTNEAKGAESAESADAAIMNNDPNFTETIDESKKEWLI

SEQ ID NO: 891746 - protein, 1377 aa, Homo sapiens
RGEEEAGGAWLPRVFEDSPSPFKNPTESRTASPQRALGAPPAGRRRMQAAPRAGCGAALLLWIVSSCLCRAWTAPSTSQKCDEPLVSGLPHVAFSSSSSISGSYSPGYAKINKRGGAGGWSPSDSDHYQWLQVDFGNRKQISAIATQGRYSSSDWVTQYRMLYSDTGRNWKPYHQDGNIWAFPGNINSDGVVRHELQHPIIARYVRIVPLDWNGEGRIGLRIEVYGCSYWADVINFDGHVVLPYRFRNKKMKTLKDVIALNFKTSESEGVILHGEGQQGDYITLELKKAKLVLSLNLGSNQLGPIYGHTSVMTGSLLDDHHWHSVVIERQGRSINLTLDRSMQHFRTNGEFDYLDLDYEITFGGIPFSGKPSSSSRKNFKGCMESINYNGVNITDLARRKKLEPSNVGNLSFSCVEPYTVPVFFNATSYLEVPGRLNQDLFSVSFQFRTWNPNGLLVFSHFADNLGNVEIDLTESKVGVHINITQTKMSQIDISSGSGLNDGQWHEVRFLAKENFAILTIDGDEASAVRTNSPLQVKTGEKYFFGGFLNQMNNSSHSVLQPSFQGCMQLIQVDDQLVNLYEVAQRKPGSFANVSIDMCAIIDRCVPNHCEHGGKCSQTWDSFKCTCDETGYSGATCHNSIYEPSCEAYKHLGQTSNYYWIDPDGSGPLGPLKVYCNMTEDKVWTIVSHDLQMQTPVVGYNPEKYSVTQLVYSASMDQISAITDSAEYCEQYVSYFCKMSRLLNTPDGSPYTWWVGKANEKHYYWGGSGPGIQKCACGIERNCTDPKYYCNCDADYKQWRKDAGFLSYKDHLPVSQVVVGDTDRQGSEAKLSVGPLRCQGDRNYWNAASFPNPSSYLHFSTFQGETSADISFYFKTLTPWGVFLENMGKEDFIKLELKSATEVSFSFDVGNGPVEIVVRSPTPLNDDQWHRVTAERNVKQASLQVDRLPQQIRKAPTEGHTRLELYSQLFVGGAGGQQGFLGCIRSLRMNGVTLDLEERAKVTSGFISGCSGHCTSYGTNCENGGKCLERYHGYSCDCSNTAYDGTFCNKDVGAFFEEGMWLRYNFQAPATNARDSSSRVDNAPDQQNSHPDLAQEEIRFSFSTTKAPCILLYISSFTTDFLAVLVKPTGSLQIRYNLGGTREPYNIDVDHRNMANGQPHSVNITRHEKTIFLKLDHYPSVSYHLPSSSDTLFNSPKSLFLGKVIETGKIDQEIHKYNTPGFTGCLSRVQFNQIAPLKAALRQTNASAHVHIQGELVESNCGASPLTLSPMSSATDPWHLDHLDSASADFPYNPGQGQAIRNGVNRNSAIIGGVIAVVIFTILCTLVFLIRYMFRHKGTYHTNEAKGAESAESADAAIMNNDPNFTETIDESKKEWLI

SEQ ID NO: 891747 - protein, 108 aa, Homo sapiens
MSSATDPWHLDHLDSASADFPYNPGQGQAIRNGVNRNSAIIGGVIAVVIFTILCTLVFLIRYMFRHKGTYHTNEAKGAESAESADAAIMNNDPNFTETIDESKKEWLI

SEQ ID NO: 891748 - protein, 798 aa, Homo sapiens
MQAAPRAGCGAALLLWIVSSCLCRAWTAPSTSQKCDEPLVSGLPHVAFSSSSSISGSYSPGYAKINKRGGAGGWSPSDSDHYQWLQVDFGNRKQISAIATQGRYSSSDWVTQYRMLYSDTGRNWKPYHQDGNIWAFPGNINSDGVVRHELQHPIIARYVRIVPLDWNGEGRIGLRIEVYGCSYWADVINFDGHVVLPYRFRNKKMKTLKDVIALNFKTSESEGVILHGEGQQGDYITLELKKAKLVLSLNLGSNQLGPIYGHTSVMTGSLLDDHHWHSVVIERQGRSINLTLDRSMQHFRTNGEFDYLDLDYEITFGGIPFSGKPSSSSRKNFKGCMESINYNGVNITDLARRKKLEPSNVGNLSFSCVEPYTVPVFFNATSYLEVPGRLNQDLFSVSFQFRTWNPNGLLVFSHFADNLGNVEIDLTESKVGVHINITQTKMSQIDISSGSGLNDGQWHEVRFLAKENFAILTIDGDEASAVRTNSPLQVKTGEKYFFGGFLNQMNNSSHSVLQPSFQGCMQLIQVDDQLVNLYEVAQRKPGSFANVSIDMCAIIDRCVPNHCEHGGKCSQTWDSFKCTCDETGYSGATCHNSIYEPSCEAYKHLGQTSNYYWIDPDGSGPLGPLKVYCNMTEDKVWTIVSHDLQMQTPVVGYNPEKYSVTQLVYSASMDQISAITDSAEYCEQYVSYFCKMSRLLNTPDGSPYTWWVGKANEKHYYWGGSGPGIQKCACGIERNCTDPKYYCNCDADYKQWRKDAGFLSYKDHLPVSQVVVGDTDRQGSEAKLSVGPLRCQGDSKFA

SEQ ID NO: 891749 - protein, 483 aa, Homo sapiens
MKLWIHLFYSSLLACISLHSQTPVLSSRGSCDSLCNCEEKDGTMLINCEAKGIKMVSEISVPPSRPFQLSLLNNGLTMLHTNDFSGLTNAISIHLGFNNIADIEIGAFNGLGLLKQLHINHNSLEILKEDTFHGLENLEFLQADNNFITVIEPSAFSKLNRLKVLILNDNAIESLPPNIFRFVPLTHLDLRGNQLQTLPYVGFLEHIGRILDLQLEDNKWACNCDLLQLKTWLENMPPQSIIGDVVCNSPPFFKGSILSRLKKESICPTPPVYEEHEDPSGSLHLAATSSINDSRMSTKTTSILKLPTKAPGLIPYITKPSTQLPGPYCPIPCNCKVLSPSGLLIHCQERNIESLSDLRPPPQNPRKLILAGNIIHSLMKSDLVEYFTLEMLHLGNNRIEVLEEGSFMNLTRLQKLYLNGNHLTKLSKGMFLGLHNLEYLYLEYNAIKEILPGTFNPMPKLKVLYLNNTSSKFYHHIFFQGFL

SEQ ID NO: 891750 - protein, 423 aa, Homo sapiens
MKLWIHLFYSSLLACISLHSQTPVLSSRGSCDSLCNCEEKDGTMLINCEAKGIKMVSEISVPPSRPFQLSLLNNGLTMLHTNDFSGLTNAISIHLGFNNIADIEIGAFNGLGLLKQLHINHNSLEILKEDTFHGLENLEFLQADNNFITVIEPSAFSKLNRLKVLILNDNAIESLPPNIFRFVPLTHLDLRGNQLQTLPYVGFLEHIGRILDLQLEDNKWACNCDLLQLKTWLENMPPQSIIGDVVCNSPPFFKGSILSRLKKESICPTPPVYEEHEDPSGSLHLAATSSINDSRMSTKTTSILKLPTKAPGLIPYITKPSTQLPGPYCPIPCNCKVLSPSGLLIHCQERNIESLSDLRPPPQNPRKLILAGNIIHSLMKFHPLVQSIWKRKKRGMRKKEVMQNISKEVFWNRKIIHHSQGQI

SEQ ID NO: 891751 - protein, 308 aa, Homo sapiens
MNQNHSLELDFLQAEARLLEEQRRVQVYLHESTQDELARKCEQVLIEKHLEIFHTEFQNLLDADKNEDLGRMYNLVSRIQDGLGELKKLLETHIHNQGLAAIEKCGEAALNDPKMYVQTVLDVHKKYNALVMSAFNNDAGFVAALDKACGRFINNNAVTKMAQSSSKSPELLARYCDSLLKKSSKNPEEAELEDTLNQVMVVFKVHRRHTAPGAEEMRINSSTENSDEGLKVRDGKGIPFTATLASSSVNSAEEHVASTNEGREPTDSVPKEQMSLVHVGTEAFPISDESMIKDRKDRLPLESAVVRG

SEQ ID NO: 891752 - protein, 776 aa, Homo sapiens
MSSTRSQNPHGLKQIGLDQIWDDLRAGIQQVYTRQSMAKSRYMELYTHVYNYCTSVHQSNQARGAGVPPSKSKKGQTPGGAQFVGLELYKRLKEFLKNYLTNLLKDGEDLMDESVLKFYTQQWEDYRFSSKVLNGICAYLNRHWVRRECDEGRKGIYEIYSLALVTWRDCLFRPLNKQVTNAVLKLIEKERNGETINTRLISGVVQSYVELGLNEDDAFAKGPTLTVYKESFESQFLADTERFYTRESTEFLQQNPVTEYMKKAEARLLEEQRRVQVYLHESTQDELARKCEQVLIEKHLEIFHTEFQNLLDADKNEDLGRMYNLVSRIQDGLGELKKLLETHIHNQGLAAIEKCGEAALNDPKMYVQTVLDVHKKYNALVMSAFNNDAGFVAALDKACGRFINNNAVTKMAQSSSKSPELLARYCDSLLKKSSKNPEEAELEDTLNQVMVVFKYIEDKDVFQKFYAKMLAKRLVHQNSASDDAEASMISKLKQACGFEYTSKLQRMFQDIGVSKDLNEQFKKHLTNSEPLDLDFSIQVLSSGSWPFQQSCTFALPSELERSYQRFTAFYASRHSGRKLTWLYQLSKGELVTNCFKNRYTLQASTFQMAILLQYNTEDAYTVQQLTDSTQIKMDILAQVLQILLKSKLLVLEDENANVDEVELKPDTLIKLYLGYKNKKLRVNINVPMKTEQKQEQETTHKNIEEDRKLLIQAAIVRIMKMRKVLKHQQLLGEVLTQLSSRFKPRVPVIKKCIDILIEKEYLERVDGEKDTYSYLA

SEQ ID NO: 891753 - protein, 666 aa, Homo sapiens
MDESVLKFYTQQWEDYRFSSKVLNGICAYLNRHWVRRECDEGRKGIYEIYSLALVTWRDCLFRPLNKQVTNAVLKLIEKERNGETINTRLISGVVQSYVELGLNEDDAFAKGPTLTVYKESFESQFLADTERFYTRESTEFLQQNPVTEYMKKAEARLLEEQRRVQVYLHESTQDELARKCEQVLIEKHLEIFHTEFQNLLDADKNEDLGRMYNLVSRIQDGLGELKKLLETHIHNQGLAAIEKCGEAALNDPKMYVQTVLDVHKKYNALVMSAFNNDAGFVAALDKACGRFINNNAVTKMAQSSSKSPELLARYCDSLLKKSSKNPEEAELEDTLNQVMVVFKYIEDKDVFQKFYAKMLAKRLVHQNSASDDAEASMISKLKQACGFEYTSKLQRMFQDIGVSKDLNEQFKKHLTNSEPLDLDFSIQVLSSGSWPFQQSCTFALPSELERSYQRFTAFYASRHSGRKLTWLYQLSKGELVTNCFKNRYTLQASTFQMAILLQYNTEDAYTVQQLTDSTQIKMDILAQVLQILLKSKLLVLEDENANVDEVELKPDTLIKLYLGYKNKKLRVNINVPMKTEQKQEQETTHKNIEEDRKLLIQAAIVRIMKMRKVLKHQQLLGEVLTQLSSRFKPRVPVIKKCIDILIEKEYLERVDGEKDTYSYLA

SEQ ID NO: 891754 - protein, 666 aa, Homo sapiens; identical to SEQ ID NO: 891753

SEQ ID NO: 891755 - protein, 666 aa, Homo sapiens; identical to SEQ ID NO: 891753

SEQ ID NO: 891756 - protein, 776 aa, Homo sapiens; identical to SEQ ID NO: 891752

SEQ ID NO: 891757 - protein, 776 aa, Homo sapiens; identical to SEQ ID NO: 891752

SEQ ID NO: 891758 - protein, 776 aa, Homo sapiens; identical to SEQ ID NO: 891752

SEQ ID NO: 891759 - protein, 776 aa, Homo sapiens; identical to SEQ ID NO: 891752

SEQ ID NO: 891760 - protein, 759 aa, Homo sapiens
MSSTRSQNPHGLKQIGLDQIWDDLRAGIQQVYTRQSMAKSRYMELYTHVYNYCTSVHQSNQARGAGVPPSKSKKGQTPGGAQFVGLELYKRLKEFLKNYLTNLLKDGEDLMDESVLKFYTQQWEDYRFSSKVLNGICAYLNRHWVRRECDEGRKGIYEIYSVTNAVLKLIEKERNGETINTRLISGVVQSYVELGLNEDDAFAKGPTLTVYKESFESQFLADTERFYTRESTEFLQQNPVTEYMKKAEARLLEEQRRVQVYLHESTQDELARKCEQVLIEKHLEIFHTEFQNLLDADKNEDLGRMYNLVSRIQDGLGELKKLLETHIHNQGLAAIEKCGEAALNDPKMYVQTVLDVHKKYNALVMSAFNNDAGFVAALDKACGRFINNNAVTKMAQSSSKSPELLARYCDSLLKKSSKNPEEAELEDTLNQVMVVFKYIEDKDVFQKFYAKMLAKRLVHQNSASDDAEASMISKLKQACGFEYTSKLQRMFQDIGVSKDLNEQFKKHLTNSEPLDLDFSIQVLSSGSWPFQQSCTFALPSELERSYQRFTAFYASRHSGRKLTWLYQLSKGELVTNCFKNRYTLQASTFQMAILLQYNTEDAYTVQQLTDSTQIKMDILAQVLQILLKSKLLVLEDENANVDEVELKPDTLIKLYLGYKNKKLRVNINVPMKTEQKQEQETTHKNIEEDRKLLIQAAIVRIMKMRKVLKHQQLLGEVLTQLSSRFKPRVPVIKKCIDILIEKEYLERVDGEKDTYSYLA

SEQ ID NO: 891761 - protein, 703 aa, Homo sapiens
MSSTRSQNPHGLKQIGLDQIWDDLRAGIQQVYTRQSMAKSRYMELYTHVYNYCTSVHQSNQARGAGVPPSKSKKGQTPGGAQFVGLELYKRLKEFLKNYLTNLLKDGEDLMDESVLKFYTQQWEDYRFSSKVLNGICAYLNRHWVRRECDEGRKGIYEIYSLALVTWRDCLFRPLNKQVTNAVLKLIEKERNGETINTRLISGVVQSYVELGLNEDDAFAKGPTLTVYKESFESQFLADTERFYTRESTEFLQQNPVTEYMKKAEARLLEEQRRVQVYLHESTQDELARKCEQVLIEKHLEIFHTEFQNLLDADKNEDLGRMYNLVSRIQDGLGELKKLLETHIHNQGLAAIEKCGEAALNDPKMYVQTVLDVHKKYNALVMSAFNNDAGFVAALDKACGRFINNNAVTKMAQSSSKSPELLARYCDSLLKKSSKNPEEAELEDTLNQVMVVFKYIEDKDVFQKFYAKMLAKRLVHQNSASDDAEASMISKLKQACGFEYTSKLQRMFQDIGVSKDLNEQFKKHLTNSEPLDLDFSIQVLSSGSWPFQQSCTFALPSELERSYQRFTAFYASRHSGRKLTWLYQLSKGELVTNCFKNRYTLQASTFQMAILLQYNTEDAYTVQQLTDSTQIKMDILAQVLQILLKSKLLVLEDENANVDEVELKPDTLIKLYLGYKNKKLRVNINVPMKTEQKQEQETTQRPS

SEQ ID NO: 891762 - protein, 776 aa, Homo sapiens; identical to SEQ ID NO: 891752

SEQ ID NO: 891763 - protein, 776 aa, Homo sapiens; identical to SEQ ID NO: 891752

SEQ ID NO: 891764 - protein, 755 aa, Homo sapiens [sequence omitted]

SEQ ID NO: 891765 - protein, 223 aa, Homo sapiens
PSKLILYSQPYSAFTIANSARRVTTFTWLYQLSKGELVTNCFKNRYTLQASTFQMAILLQYNTEDAYTVQQLTDSTQIKMDILAQVLQILLKSKLLVLEDENANVDEVELKPDTLIKLYLGYKNKKLRVNINVPMKTEQKQEQETTHKNIEEDRKLLIQAAIVRIMKMRKVLKHQQLLGEVLTQLSSRFKPRVPVIKKCIDILIEKEYLERVDGEKDTYSYLA

SEQ ID NO: 891766 - protein, 558 aa, Homo sapiens
MSSTRSQNPHGLKQIGLDQIWDDLRAGIQQVYTRQSMAKSRYMELYTHVYNYCTSVHQSNQARGAGVPPSKSKKGQTPGGAQFVGLELYKRLKEFLKNYLTNLLKDGEDLMDESVLKFYTQQWEDYRFSSKVLNGICAYLNRHWVRRECDEGRKGIYEIYSLALVTWRDCLFRPLNKQVTNAVLKLIEKERNGETINTRLISGVVQSYVELGLNEDDAFAKGPTLTVYKESFESQFLADTERFYTRESTEFLQQNPVTEYMKKAEARLLEEQRRVQVYLHESTQDELARKCEQVLIEKHLEIFHTEFQNLLDADKNEDLGRMYNLVSRIQDGLGELKKLLETHIHNQGLAAIEKCGEAALNDPKMYVQTVLDVHKKYNALVMSAFNNDAGFVAALDKACGRFINNNAVTKMAQSSSKSPELLARYCDSLLKKSSKNPEEAELEDTLNQVMVVFKVHRRHTAPGAEEMRINSSTENSDEGLKVRDGKGIPFTATLASSSVNSAEEHVASTNEGREPTDSVPKEQMSLVHVGTEAFPISDESMIKDRKDRLPLESAVVRG

SEQ ID NO: 891767 - protein, 184 aa, Homo sapiens
MSSTRSQNPHGLKQIGLDQIWDDLRAGIQQVYTRQSMAKSRYMELYTHVYNYCTSVHQSNQARGAGVPPSKSKKGQTPGGAQFVGLELYKRLKEFLKNYLTNLLKDGEDLMDESVLKFYTQQWEDYRFSSKVLNGICAYLNRHWVRRECDEGRKGIYEIYSLALVTWRDCLFRPLNKQTNAVLS

SEQ ID NO: 891768 - protein, 776 aa, Homo sapiens; identical to SEQ ID NO: 891752

SEQ ID NO: 891769 - protein, 776 aa, Homo sapiens; identical to SEQ ID NO: 891752

SEQ ID NO: 891770 - protein, 776 aa, Homo sapiens; identical to SEQ ID NO: 891752

SEQ ID NO: 891771 - protein, 907 aa, Homo sapiens
MSSTRSQNPHGLKQIGLDQIWDDLRAGIQQVYTRQSMAKSRYMELYTHVYNYCTSVHQSNQARGAGVPPSKSKKGQTPGGAQFVGLELYKRLKEFLKNYLTNLLKDGEDLMDESVLKFYTQQWEDYRFSSKVLNGICAYLNRHWVRRECDEGRKGIYEIYSLALVTWRDCLFRPLNKQVTNAVLKLIEKERNGETINTRLISGVVQSYVELGLNEDDAFAKGPTLTVYKESFESQFLADTERFYTRESTEFLQQNPVTEYMKKAEARLLEEQRRVQVYLHESTQDELARKCEQVLIEKHLEIFHTEFQNLLDADKNEDLGRMYNLVSRIQDGLGELKKLLETHIHNQGLAAIEKCGEAALNDPKMYVQTVLDVHKKYNALVMSAFNNDAGFVAALDKACGRFINNNAVTKMAQSSSKSPELLARYCDSLLKKSSKNPEEAELEDTLNQVVKCFMSIPISSSCVFHKLFVMLFVDGLLKCEEVIIIDFILNLWFYFLNSVTTFSIHTFLINTQSVQLTELRDSQNFQDSGVEIFAIINVGVQTCPKPKAHLGSWLVAGDSQLCTVGLCVCWLSVLSRWLCQMVVFKYIEDKDVFQKFYAKMLAKRLVHQNSASDDAEASMISKLKQACGFEYTSKLQRMFQDIGVSKDLNEQFKKHLTNSEPLDLDFSIQVLSSGSWPFQQSCTFALPSELERSYQRFTAFYASRHSGRKLTWLYQLSKGELVTNCFKNRYTLQASTFQMAILLQYNTEDAYTVQQLTDSTQIKMDILAQVLQILLKSKLLVLEDENANVDEVELKPDTLIKLYLGYKNKKLRVNINVPMKTEQKQEQETTHKNIEEDRKLLIQAAIVRIMKMRKVLKHQQLLGEVLTQLSSRFKPRVPVIKKCIDILIEKEYLERVDGEKDTYSYLA

SEQ ID NO: 891772 - protein, 759 aa, Homo sapiens; identical to SEQ ID NO: 891760

SEQ ID NO: 891773 - protein, 455 aa, Homo sapiens
MYNLVSRIQDGLGELKKLLETHIHNQGLAAIEKCGEAALNDPKMYVQTVLDVHKKYNALVMSAFNNDAGFVAALDKACGRFINNNAVTKMAQSSSKSPELLARYCDSLLKKSSKNPEEAELEDTLNQVMVVFKYIEDKDVFQKFYAKMLAKRLVHQNSASDDAEASMISKLKQACGFEYTSKLQRMFQDIGVSKDLNEQFKKHLTNSEPLDLDFSIQVLSSGSWPFQQSCTFALPSELERSYQRFTAFYASRHSGRKLTWLYQLSKGELVTNCFKNRYTLQASTFQMAILLQYNTEDAYTVQQLTDSTQIKMDILAQVLQILLKSKLLVLEDENANVDEVELKPDTLIKLYLGYKNKKLRVNINVPMKTEQKQEQETTHKNIEEDRKLLIQAAIVRIMKMRKVLKHQQLLGEVLTQLSSRFKPRVPVIKKCIDILIEKEYLERVDGEKDTYSYLA

SEQ ID NO: 891774 - protein, 614 aa, Homo sapiens
MSSTRSQNPHGLKQIGLDQIWDDLRAGIQQVYTRQSMAKSRYMELYTHVYNYCTSVHQSNQARGAGVPPSKSKKGQTPGGAQFVGLELYKRLKEFLKNYLTNLLKDGEDLMDESVLKFYTQQWEDYRFSSKVLNGICAYLNRHWVRRECDEGRKGIYEIYSLALVTWRDCLFRPLNKQVTNAVLKLIEKERNGETINTRLISGVVQSYVELGLNEDDAFAKGPTLTVYKESFESQFLADTERFYTRESTEFLQQNPVTEYMKKAEARLLEEQRRVQVYLHESTQDELARKCEQVLIEKHLEIFHTEFQNLLDADKNEDLGRMYNLVSRIQDGLGELKKLLETHIHNQGLAAIEKCGEAALNDPKMYVQTVLDVHKKYNALVMSAFNNDAGFVAALDKACGRFINNNAVTKMAQSSSKSPELLARYCDSLLKKSSKNPEEAELEDTLNQVMVVFKYIEDKDVFQKFYAKMLAKRLVHQNSASDDAEASMISKLKQACGFEYTSKLQRMFQDIGVSKDLNEQFKKHLTNSEPLDLDFSIQVLSSGSWPFQQSCTFALPSELERSYQRFTAFYASRHSGRKLTWLYQLSKGELVTNCFKNRYTLQVRSHFYLKIFLF

SEQ ID NO: 891775 - protein, 190 aa, Homo sapiens [sequence omitted]

SEQ ID NO: 891776 - protein, 453 aa, Homo sapiens
MSSTRSQNPHGLKQIGLDQIWDDLRAGIQQVYTRQSMAKSRYMELYTHVYNYCTSVHQSNQARGAGVPPSKSKKGQTPGGAQFVGLELYKRLKEFLKNYLTNLLKDGEDLMDESVLKFYTQQWEDYRFSSKVLNGICAYLNRHWVRRECDEGRKGIYEIYSLALVTWRDCLFRPLNKQVTNAVLKLIEKERNGETINTRLISGVVQSYVELGLNEDDAFAKGPTLTVYKESFESQFLADTERFYTRESTEFLQQNPVTEYMKKAEARLLEEQRRVQVYLHESTQDELARKCEQVLIEKHLEIFHTEFQNLLDADKNEDLGRMYNLVSRIQDGLGELKKLLETHIHNQGLAAIEKCGEAALNDPKMYVQTVLDVHKKYNALVMSAFNNDAGFVAALDKACGRFINNNAVTKMAQSSSKSPELLARYCDSLLKKSSKNPEEAELEDTLNQVVSAS

SEQ ID NO: 891777 - protein, 193 aa, Homo sapiens [sequence omitted]

SEQ ID NO: 891778 - protein, 193 aa, Homo sapiens [sequence omitted]

SEQ ID NO: 891779 - protein, 193 aa, Homo sapiens [sequence omitted]

SEQ ID NO: 891780 - protein, 212 aa, Homo sapiens
PDRSSRHALFGTRRVGRQARGRSGLPGVLCAAPGDKMAARGRRAEPQGREAPGPAGGGGGGSRWAESGSGTSPESGDEEVSGAGSSPVSGGVNLFANDGSFLELFKRKMEEEQRQRQEEPPPGPQRPDQSAAAAGPGDPKRKGGPGSTLSFVGKRRGGNKLALKTGIVAKKQKTEDEVLTSKGDAWAKYMAEVKKYKAHQCGDDDKTRPLVK

SEQ ID NO: 891781 - protein, 212 aa, Homo sapiens; identical to SEQ ID NO: 891780

SEQ ID NO: 891782 - protein, 212 aa, Homo sapiens; identical to SEQ ID NO: 891780

SEQ ID NO: 891783 - protein, 169 aa, Homo sapiens
PDRSSRHALFGTRRVGRQARGRSGLPGVLCAAPGDKMAARGRRAEPQGREAPGPAGGGGGGSRWAESGSGTSPESGDEEVSGAGSSPVSGGVNLFANDGSFLELFKRKMEEEQRQRQEEPPPGPQRPDQSAAAAGPGDPKRKGGPGSTLSFVGRLAELGAASGRATRPG

SEQ ID NO: 891784 - protein, 169 aa, Homo sapiens; identical to SEQ ID NO: 891783

SEQ ID NO: 891785 - protein, 194 aa, Homo sapiens
PDRSSRHALFGTRRVGRQARGRSGLPGVLCAAPGDKMAARGRRAEPQGREAPGPAGGGGGGSRWAESGSGTSPESGDEEVSGAGSSPVSGGVNLFANDGSFLELFKRKMEEEQRQRQEEPPPGPQRPDQSAAAAGPGDPKRKGGPGSTLSFVRSRGGGGGRHGLSWQRESGPVKGDRDRSPLSVLNEGPVRVTR

SEQ ID NO: 891786 - protein, 194 aa, Homo sapiens; identical to SEQ ID NO: 891785

SEQ ID NO: 891787 - protein, 212 aa, Homo sapiens; identical to SEQ ID NO: 891780

SEQ ID NO: 891788 - protein, 212 aa, Homo sapiens; identical to SEQ ID NO: 891780

SEQ ID NO: 891789 - protein, 133 aa, Homo sapiens
AIHRHLAIHRHLAIDRHLAIHRHLAIHRHLASHPHPRPCNWNESTLNPLTIAIIGTPGDPKRKGGPGSTLSFVGKRRGGNKLALKTGIVAKKQKTEDEVLTSKGDAWAKYMAEVKKYKAHQCGDDDKTRPLVK

SEQ ID NO: 891790 - protein, 212 aa, Homo sapiens; identical to SEQ ID NO: 891780

SEQ ID NO: 891791 - protein, 180 aa, Homo sapiens
PDRSSRHALFGTRRVGRQARGRSGLPGVLCAAPGDKMAARGRRAEPQGREAPGPAGGGGGGSRWAESGSGTSPESGDEEVSGAGSSPVSGGVNLFANDGSFLELFKRKMEEEQRQRQEEPPPGPQRPDQSAAAAGPGDPKRKGGPGSTLSFVGKRRGGNKLALKTGIVAKKQKTEDEITI

SEQ ID NO: 891792 - protein, 163 aa, Homo sapiens
MSLLLLVVSALHILILILLFVATLDKSWWTLPGKESLNLWYDCTWNNDTKTWACSNVSENGWLKAVQVLMVLSLILCCLSFILFMFQLYTMRRGGLFYATGLCQLCTSVAVFTGALIYAIHAEEILEKHPRGGSFGYCFALAWVAFPLALVSGIIYIHLRKRE

SEQ ID NO: 891793 - protein, 163 aa, Homo sapiens; identical to SEQ ID NO: 891792

SEQ ID NO: 891794 - protein, 131 aa, Homo sapiens
EKGHMVSKQVKLELWTHGDVPLCVLLTAGWLKAVQVLMVLSLILCCLSFILFMFQLYTMRRGGLFYATGLCQLCTSVAVFTGALIYAIHAEEILEKHPRGGSFGYCFALAWVAFPLALVSGIIYIHLRKRE

SEQ ID NO: 891795 - protein, 103 aa, Homo sapiens
MSLLLLVVSALHILILCCLSFILFMFQLYTMRRGGLFYATGLCQLCTSVAVFTGALIYAIHAEEILEKHPRGGSFGYCFALAWVAFPLALVSGIIYIHLRKRE

SEQ ID NO: 891796 - protein, 163 aa, Homo sapiens; identical to SEQ ID NO: 891792

SEQ ID NO: 891797 - protein, 177 aa, Homo sapiens
MSLLLLVVSALHILILILLFVATLDKSWWTLPGKESLNLWYDCTWNNDTKTWACSNVSENGEEVRAAGLVFKGEGWLKAVQVLMVLSLILCCLSFILFMFQLYTMRRGGLFYATGLCQLCTSVAVFTGALIYAIHAEEILEKHPRGGSFGYCFALAWVAFPLALVSGIIYIHLRKRE

SEQ ID NO: 891798 - protein, 118 aa, Homo sapiens
MLQLSLLACSNVSENGWLKAVQVLMVLSLILCCLSFILFMFQLYTMRRGGLFYATGLCQLCTSVAVFTGALIYAIHAEEILEKHPRGGSFGYCFALAWVAFPLALVSGIIYIHLRKRE

SEQ ID NO: 891799 - protein, 111 aa, Homo sapiens
MPPGSCMPEEPKPKRGRRSWPRKRTATHTCDYAGCGKTYTKSSHLKAHLRTHTGEKPYHCDWDGCGWKFARSDELTRHYRKHTGHRPFQCQKCDRAFSRSDHLALHMKRHF

SEQ ID NO: 891800 - protein, 479 aa, Homo sapiens
MRQPPGESDMAVSDALLPSFSTFASGPAGREKTLRQAGAPNNRWREELSHMKRLPPVLPGRPYDLAAATVATDLESGGAGAACGGSNLAPLPRRETEEFNDLLDLDFILSNSLTHPPESVAATVSSSASASSSSSPSSSGPASAPSTCSFTYPIRAGNDPGVAPGGTGGGLLYGRESAPPPTAPFNLADINDVSPSGGFVAELLRPELDPVYIPPQQPQPPGGGLMGKFVLKASLSAPGSEYGSPSVISVSKGSPDGSHPVVVAPYNGGPPRTCPKIKQEAVSSCTHLGAGPPLSNGHRPAAHDFPLGRQLPSRTTPTLGLEEVLSSRDCHPALPLPPGFHPHPGPNYPSFLPDQMQPQVPPLHYQELMPPGSCMPEEPKPKRGRRSWPRKRTATHTCDYAGCGKTYTKSSHLKAHLRTHTGEKPYHCDWDGCGWKFARSDELTRHYRKHTGHRPFQCQKCDRAFSRSDHLALHMKRHF

SEQ ID NO: 891801 - protein, 479 aa, Homo sapiens; identical to SEQ ID NO: 891800

SEQ ID NO: 891802 - protein, 429 aa, Homo sapiens
MKRLPPVLPGRPYDLAAATVATDLESGGAGAACGGSNLAPLPRRETEEFNDLLDLDFILSNSLTHPPESVAATVSSSASASSSSSPSSSGPASAPSTCSFTYPIRAGNDPGVAPGGTGGGLLYGRESAPPPTAPFNLADINDVSPSGGFVAELLRPELDPVYIPPQQPQPPGGGLMGKFVLKASLSAPGSEYGSPSVISVSKGSPDGSHPVVVAPYNGGPPRTCPKIKQEAVSSCTHLGAGPPLSNGHRPAAHDFPLGRQLPSRTTPTLGLEEVLSSRDCHPALPLPPGFHPHPGPNYPSFLPDQMQPQVPPLHYQELMPPGSCMPEEPKPKRGRRSWPRKRTATHTCDYAGCGKTYTKSSHLKAHLRTHTGEKPYHCDWDGCGWKFARSDELTRHYRKHTGHRPFQCQKCDRAFSRSDHLALHMKRHF

SEQ ID NO: 891803 - protein, 104 aa, Homo sapiens
GRLSLCGGGRRSWPRKRTATHTCDYAGCGKTYTKSSHLKAHLRTHTGEKPYHCDWDGCGWKFARSDELTRHYRKHTGHRPFQCQKCDRAFSRSDHLALHMKRHF

SEQ ID NO: 891804 - protein, 82 aa, Homo sapiens
HFGTHGMMLTPPSSPLELMPPGSCMPEEPKPKRGRRSWPRKRTATHTCDYAGCGKTYTKSSHLKAHLRTHTGRGTNCRREGG

SEQ ID NO: 891805 - protein, 479 aa, Homo sapiens; identical to SEQ ID NO: 891800

SEQ ID NO: 891806 - protein, 201 aa, Homo sapiens
  misc_feature (198)..(198): Xaa can be any naturally occurring amino acid
MRQPPGESDMAVSDALLPSFSTFASGPAGREKTLRQAGAPNNRWREELSHMKRLPPVLPGRPYDLAAATVATDLESGGAGAACGGSNLAPLPRRETEEFNDLLDLDFILSNSLTHPPESVAATVSSSASASSSSSPSSSGPASAPSTCSFTYPIRAGNDPGVAPGGTGGGLLYGRESSLAVLTALHSSRLHLAMTARXRRG

SEQ ID NO: 891807 - protein, 479 aa, Homo sapiens; identical to SEQ ID NO: 891800

SEQ ID NO: 891808 - protein, 470 aa, Homo sapiens
MAVSDALLPSFSTFASGPAGREKTLRQAGAPNNRWREELSHMKRLPPVLPGRPYDLAAATVATDLESGGAGAACGGSNLAPLPRRETEEFNDLLDLDFILSNSLTHPPESVAATVSSSASASSSSSPSSSGPASAPSTCSFTYPIRAGNDPGVAPGGTGGGLLYGRESAPPPTAPFNLADINDVSPSGGFVAELLRPELDPVYIPPQQPQPPGGGLMGKFVLKASLSAPGSEYGSPSVISVSKGSPDGSHPVVVAPYNGGPPRTCPKIKQEAVSSCTHLGAGPPLSNGHRPAAHDFPLGRQLPSRTTPTLGLEEVLSSRDCHPALPLPPGFHPHPGPNYPSFLPDQMQPQVPPLHYQELMPPGSCMPEEPKPKRGRRSWPRKRTATHTCDYAGCGKTYTKSSHLKAHLRTHTGEKPYHCDWDGCGWKFARSDELTRHYRKHTGHRPFQCQKCDRAFSRSDHLALHMKRHF

SEQ ID NO: 891809 - protein, 69 aa, Homo sapiens
APTRPWPAPMAARAPHNSPESAPCAADQFAAPRHGSQSHLAAPPAHRPGHSPCAHGSNRGDRDSGGGRC

SEQ ID NO: 891810 - protein, 159 aa, Homo sapiens
MGQGHVELLKTQWTEFNGIRDYHKRGSMCNTLFSDAILEYKLYEALKFIMLYQVTEVYEQMKTKKVIPSLFRLLFSRETSSDPLSFMMNHLNSVGDTCGLEQIDMFILGYSLEVKIKVFRLFKFNSRDFEVCYPEEPLRDWPEISLLTENDRHYHIPVF

SEQ ID NO: 891811 - protein, 380 aa, Homo sapiens
AAVASDRPLQTTGRGPAPVRSAAGMAATRSPTRARERERSGAPAAGSDQVHSWMLATSQALDTVWRMAKGFVMLAVSFLVAAICYFRRLHLYSGHKLKWWIGYLQRKFKRNLSVEAEVDLLSYCAREWKGETPRNKLMRKAYEELFWRHHIKCVRQVRRDNYDALRSVLFQIFSQGISFPSWMKEKDIVKLPEKLLFSQGCNWIQQYSFGPEKYTGSNVFGKLRKYVELLKTQWTEFNGIRDYHKRGSMCNTLFSDAILEYKLYEALKFIMLYQVTEVYEQMKTKKVIPSLFRLLFSRETSSDPLSFMMNHLNSVGDTCGLEQIDMFILGYSLEVKIKVFRLFKFNSRDFEVCYPEEPLRDWPEISLLTENDRHYHIPVF

SEQ ID NO: 891812 - protein, 380 aa, Homo sapiens; identical to SEQ ID NO: 891811

SEQ ID NO: 891813 - protein, 122 aa, Homo sapiens
MARVLKAAAANAVGLFSRLQAPIPTVRASSTSQPLDQVTGSVWNLGRLNHVAIAVPDLEKAAAFYKNILGAQVDNINAAVMDLKKKKIRSLSEEVKIGAHGKPVIFLHPKDCGGVLVELEQA

SEQ ID NO: 891814 - protein, 176 aa, Homo sapiens
MARVLKAAAANAVGLFSRLQAPIPTVRASSTSQPLDQVTGSVWNLGRLNHVAIAVPDLEKAAAFYKNILGAQVSEAVPLPEHGVSVVFVNLGNTKMELLHPLGRDSPIAGFLQKNKAGGMHHICIEVDNINAAVMDLKKKKIRSLSEEVKIGAHGKPVIFLHPKDCGGVLVELEQA

SEQ ID NO: 891815 - protein, 118 aa, Homo sapiens
MARVLKAAAANAVGEYRAPATFAMGQGAWERRSGAEEASAWPKHLDLMSSPGGAFHSSCCHLGRGCLPEAPPLSSGDCLVHESHFHPRAVRLGLCTFQYVGGRVEGTCPAGQAGQGQK

SEQ ID NO: 891816 - protein, 176 aa, Homo sapiens; identical to SEQ ID NO: 891814

SEQ ID NO: 891817 - protein, 176 aa, Homo sapiens; identical to SEQ ID NO: 891814

SEQ ID NO: 891818 - protein, 118 aa, Homo sapiens; identical to SEQ ID NO: 891815

SEQ ID NO: 891819 - protein, 176 aa, Homo sapiens; identical to SEQ ID NO: 891814

SEQ ID NO: 891820 - protein, 498 aa, Homo sapiens
SSWLLAFSCQQFLSQHVLQIFLGLCAENHFHPGNSSPGHWKQQGQQYSHVSCWFENAEGQERGGGSKPWSARTEERETSRAFPSPLQRQSASPRKGNMVVETEPSSAQRPNPVQLDKGLKELETLRFGAINCREYEPDHNLESNFITNPRTLLGKKPYICSDCGRSFKDRSTLIRHHRIHSMEKPYVCSECGRGFSQKSNLSRHQRTHSEEKPYLCRECGQSFRSKSILNRHQWTHSEEKPYVCSECGRGFSEKSSFIRHQRTHSGEKPYVCLECGRSFVISQPSENTRGYTQGRSLMFAGSVGEALARTQISSNTRGHTWMRSLMFAGSVGEAFVTSQPSSYTSGRTLERSLMCVVSVAEALVGNHSSLSTRGHTQGRSIMSAGSVGEVLARSQISSDTRGRTQMRSLIFAGNVGEAFVTSQPSLYMRGHTQERSLTCAVSVAEALAGNHSSLSTRGHTQGRSIMFVGSVGEALVISQISSDTRGHTDGRNLCMQGS

SEQ ID NO: 891821 - protein, 498 aa, Homo sapiens; identical to SEQ ID NO: 891820

SEQ ID NO: 891822 - protein, 498 aa, Homo sapiens; identical to SEQ ID NO: 891820

SEQ ID NO: 891823 - protein, 604 aa, Homo sapiens
MEAPLQTEMVELVPNGKHSEGLLPVITPMAGNQRVEDPARSCMEGKSFLQKSPSKEPHFTDFEGKTSFGMSVFNLSNAIMGSGILGLAYAMANTGIILFLFLLTAVALLSSYSIHLLLKSSGVVGIRAYEQLGYRAFGTPGKLAAALAITLQNIGAMSSYLYIIKSELPLVIQTFLNLEEKTSDWYMNGNYLVILVSVTIILPLALMRQLGYLGYSSGFSLSCMVFFLIAVIYKKFHVPCPLPPNFNNTTGNFSHVEIVKEKVQLQVEPEASAFCTPSYFTLNSQVLTGQGKAGAQMRVADCLDSSPVFPQTAYTIPIMAFAFVCHPEVLPIYTELKDPSKKKMQHISNLSIAVMYIMYFLAALFGYLTFYSTVAPVGRGLARLGGRGWLWPWCPPYRGVWCLAVPCRCGGESACQSPQCWGPLGSSDPTSFLGPPTGPPSLPATDGVESELLHTYSKVDPFDVLILCVRVAVLTAVTLTVPIVLFPVRRAIQQMLFPNQEFSWLRHVLIAVGLLTCINLLVIFAPNILGIFGVIGATSAPFLIFIFPAIFYFRIMPTEKEPARSTPKILALCFAMLGFLLMTMSLSFIIIDWASGTSRHGGNH

SEQ ID NO: 891824 - protein, 544 aa, Homo sapiens
VQTPRSQTLHPQASQSPSPSASHGSPPVASFSSIFPCVPRFLLTAVALLSSYSIHLLLKSSGVVGIRAYEQLGYRAFGTPGKLAAALAITLQNIGAMSSYLYIIKSELPLVIQTFLNLEEKTSDWYMNGNYLVILVSVTIILPLALMRQLGYLGYSSGFSLSCMVFFLIAVIYKKFHVPCPLPPNFNNTTGNFSHVEIVKEKVQLQVEPEASAFCTPSYFTLNSQVLTGQGKAGAQMRVADCLDSSPVFPQTAYTIPIMAFAFVCHPEVLPIYTELKDPSKKKMQHISNLSIAVMYIMYFLAALFGYLTFYSTVAPVGRGLGWLGGRGWLWPWCPPYRGVWCLAVPCRCGGESACQSPQCWGPLGSSDPTSFLGPPTGPPSLPATDGVESELLHTYSKVDPFDVLILCVRVAVLTAVTLTVPIVLFPVRRAIQQMLFPNQEFSWLRHVLIAVGLLTCINLLVIFAPNILGIFGVIGATSAPFLIFIFPAIFYFRIMPTEKEPARSTPKILALCFAMLGFLLMTMSLSFIIIDWASGTSRHGGNH

SEQ ID NO: 891825 - protein, 288 aa, Homo sapiens
MEAPLQTEMVELVPNGKHSEGLLPVITPMAGNQRVEDPARSCMEGKSFLQKSPSKEPHFTDFEGKTSFGMSVFNLSNAIMGSGILGLAYAMANTGIILFLFLLTAVALLSSYSIHLLLKSSGVVGIRAYEQLGYRAFGTPGKLAAALAITLQNIGAMSSYLYIIKSELPLVIQTFLNLEEKTSDWYMNGNYLVILVSVTIILPLALMRQLGYLGYSSGFSLSCMVFFLIAVIYKKFHVPCPLPPNFNNTTGNFSHVEIVKEKVQLQVEPEASAFCTPSLGYRMKNCFT

SEQ ID NO: 891826 - protein, 504 aa, Homo sapiens
MEAPLQTEMVELVPNGKHSEGLLPVITPMAGNQRVEDPARSCMEGKSFLQKSPSKEPHFTDFEGKTSFGMSVFNLSNAIMGSGILGLAYAMANTGIILFLFLLTAVALLSSYSIHLLLKSSGVVGIRAYEQLGYRAFGTPGKLAAALAITLQNIGAMSSYLYIIKSELPLVIQTFLNLEEKTSDWYMNGNYLVILVSVTIILPLALMRQLGYLGYSSGFSLSCMVFFLIAVIYKKFHVPCPLPPNFNNTTGNFSHVEIVKEKVQLQVEPEASAFCTPSYFTLNSQTAYTIPIMAFAFVCHPEVLPIYTELKDPSKKKMQHISNLSIAVMYIMYFLAALFGYLTFYNGVESELLHTYSKVDPFDVLILCVRVAVLTAVTLTVPIVLFPVRRAIQQMLFPNQEFSWLRHVLIAVGLLTCINLLVIFAPNILGIFGVIGATSAPFLIFIFPAIFYFRIMPTEKEPARSTPKILALCFAMLGFLLMTMSLSFIIIDWASGTSRHGGNH

SEQ ID NO: 891827 - protein, 530 aa, Homo sapiens
MEAPLQTEMVELVPNGKHSEGLLPVITPMAGNQRVEDPARSCMEGKSFLQKSPSKEPHFTDFEGKTSFGMSVFNLSNAIMGSGILGLAYAMANTGIILFLFLLTAVALLSSYSIHLLLKSSGVVGIRAYEQLGYRAFGTPGKLAAALAITLQNIGAMSSYLYIIKSELPLVIQTFLNLEEKTSDWYMNGNYLVILVSVTIILPLALMRQLGYLGYSSGFSLSCMVFFLIAVIYKKFHVPCPLPPNFNNTTGNFSHVEIVKEKVQLQVEPEASAFCTPSYFTLNSQVLTGQGKAGAQMRVADCLDSSPVFPQTAYTIPIMAFAFVCHPEVLPIYTELKDPSKKKMQHISNLSIAVMYIMYFLAALFGYLTFYNGVESELLHTYSKVDPFDVLILCVRVAVLTAVTLTVPIVLFPVRRAIQQMLFPNQEFSWLRHVLIAVGLLTCINLLVIFAPNILGIFGVIGATSAPFLIFIFPAIFYFRIMPTEKEPARSTPKILALCFAMLGFLLMTMSLSFIIIDWASGTSRHGGNH

SEQ ID NO: 891828 - protein, 345 aa, Homo sapiens
MTSVRENILFGMGNPLLDISAVVDKDFLDKYSLKPNDQILAEDKHKELFDELVKKFKVEYHAGGSTQNSIKVAQWMIQQPHKAATFFGCIGIDKFGEILKRKAAEAHVDAHYYEQNEQPTGTCAACITGDNRSLIANLAAANCYKKEKHLDLEKNWMLVEKARVCYIAGFFLTVSPESVLKVAHHASENNRIFTLNLSAPFISQFYKESLMKVMPYVDILFGNETEAATFAREQGFETKDIKEIAKKTQALPKMNSKRQRIVIFTQGRDDTIMATESEVTAFAVLDQDQKEIIDTNGAGDAFVGGFLSQLVSDKPLTECIRAGHYAASIIIRRTGCTFPEKPDFH

SEQ ID NO: 891829 - protein, 345 aa, Homo sapiens; identical to SEQ ID NO: 891828

SEQ ID NO: 891830 - protein, 345 aa, Homo sapiens; identical to SEQ ID NO: 891828

SEQ ID NO: 891831 - protein, 362 aa, Homo sapiens
MAAAEEEPKPKKLKVEAPQALRENILFGMGNPLLDISAVVDKDFLDKYSLKPNDQILAEDKHKELFDELVKKFKVEYHAGGSTQNSIKVAQWMIQQPHKAATFFGCIGIDKFGEILKRKAAEAHVDAHYYEQNEQPTGTCAACITGDNRSLIANLAAANCYKKEKHLDLEKNWMLVEKARVCYIAGFFLTVSPESVLKVAHHASENNRIFTLNLSAPFISQFYKESLMKVMPYVDILFGNETEAATFAREQGFETKDIKEIAKKTQALPKMNSKRQRIVIFTQGRDDTIMATESEVTAFAVLDQDQKEIIDTNGAGDAFVGGFLSQLVSDKPLTECIRAGHYAASIIIRRTGCTFPEKPDFH

SEQ ID NO: 891832 - protein, 345 aa, Homo sapiens; identical to SEQ ID NO: 891828

SEQ ID NO: 891833 - protein, 334 aa, Homo sapiens [sequence omitted]

SEQ ID NO: 891834 - protein, 345 aa, Homo sapiens; identical to SEQ ID NO: 891828

SEQ ID NO: 891835 - protein, 345 aa, Homo sapiens; identical to SEQ ID NO: 891828

SEQ ID NO: 891836 - protein, 345 aa, Homo sapiens; identical to SEQ ID NO: 891828

SEQ ID NO: 891837 - protein, 262 aa, Homo sapiens
GRVGRPTRPDKFGEILKRKAAEAHVDAHYYEQNEQPTGTCAACITGDNRSLIANLAAANCYKKEKHLDLEKNWMLVEKARVCYIAGFFLTVSPESVLKVAHHASENNRIFTLNLSAPFISQFYKESLMKVMPYVDILFGNETEAATFAREQGFETKDIKEIAKKTQALPKMNSKRQRIVIFTQGRDDTIMATESEVTAFAVLDQDQKEIIDTNGAGDAFVGGFLSQLVSDKPLTECIRAGHYAASIIIRRTGCTFPEKPDFH

SEQ ID NO: 891838 - protein, 345 aa, Homo sapiens; identical to SEQ ID NO: 891828

SEQ ID NO: 891839 - protein, 186 aa, Homo sapiens
MTSVRENILFGMGNPLLDISAVVDKDFLDKYSLKPNDQILAEDKHKELFDELVKKFKVEYHAGGSTQNSIKVAQWMIQQPHKAATFFGCIGIDKFGEILKRKAAEAHVDAHYYEQNEQPTGTCAACITGDNRSLIANLAAANCYKKEKHLDLEKNWMLVEKARVCYIAKLPLLLESKALRLKTLKR

SEQ ID NO: 891840 - protein, 345 aa, Homo sapiens; identical to SEQ ID NO: 891828

SEQ ID NO: 891841 - protein, 345 aa, Homo sapiens; identical to SEQ ID NO: 891828

SEQ ID NO: 891842 - protein, 133 aa, Homo sapiens
HSCNDSLNLHRYSEAATFAREQGFETKDIKEIAKKTQALPKMNSKRQRIVIFTQGRDDTIMATESEVTAFAVLDQDQKEIIDTNGAGDAFVGGFLSQLVSDKPLTECIRAGHYAASIIIRRTGCTFPEKPDFH

SEQ ID NO: 891843 - protein, 348 aa, Homo sapiens
MTSVRENILFGMGNPLLDISAVVDKDFLDKYSLKPNDQILAEDKHKELFDELVKKFKVEYHAGGSTQNSIKVAQWMIQQPHKAATFFGCIGIDKFGEILKRKAAEAHVDAHYYEQNEQPTGTCAACITGDNRSLIANLAAANCYKKEKHLDLEKNWMLVEKARVCYIAGFFLTVSPESVLKVAHHASENNRIFTLNLSAPFISQFYKESLMKVMPYVDILFGNETEAATFAREQGFETKDIKEIAKKTQALPKMNSKRQRIVIFTQGRDDTIMATESEVTAFAVLDQDQKEIIDTNGAGDAFVGGWCAVVQSQLTATSTSRVQMILLPQPPKQLGPQVFCLNWSLTSL

SEQ ID NO: 891844 - protein, 85 aa, Homo sapiens
FYFVIQYTHKSNQHHQSEVTAFAVLDQDQKEIIDTNGAGDAFVGGFLSQLVSDKPLTECIRAGHYAASIIIRRTGCTFPEKPDFH

SEQ ID NO: 891845 - protein, 325 aa, Homo sapiens
MTSVRENILFGMGNPLLDISAVVDKDFLDKYSLKPNDQILAEDKHKELFDELVKKFKVEYHAGGSTQNSIKVAQWMIQQPHKAATFFGCIGIDKFGEILKRKAAEAHVDAHYYEQNEQPTGTCAACITGDNRSLIANLAAANCYKKEKHLDLEKNWMLVEKARVCYIAGFFLTVSPESVLKVAHHASENNRIFTLNLSAPFISQFYKESLMKVMPYVDILFGNETEAATFAREQGFETKDIKEIAKKTQALPKMNSKRQRIVIFTQGRDDTIMATESEVTAFAVLDQDQKEIIDTNGAGDAFVGGFLSQLVSDKPLTECIRAGHY

SEQ ID NO: 891846 - protein, 92 aa, Homo sapiens
AQSDKKNNKQPTTPTKTPHKNKKSEVTAFAVLDQDQKEIIDTNGAGDAFVGGFLSQLVSDKPLTECIRAGHYAASIIIRRTGCTFPEKPDFH

SEQ ID NO: 891847 - protein, 316 aa, Homo sapiens
MTSVRENILFGMGNPLLDISAVVDKDFLDKYSLKPNDQILAEDKHKELFDELVKKFKVEYHAGGSTQNSIKVAQWMIQQPHKAATFFGCIGIDKFGEILKRKAAEAHVDAHYYEQNEQPTGTCAACITGDNRSLIANLAAANCYKKEKHLDLEKNWMLVEKARVCYIAGFFLTVSPESVLKVAHHASENNRIFTLNLSAPFISQFYKESLMKVMPYVDILFGNETEAATFAREQGFETKDIKEIAKKTQALPKMNSKRQRIVIFTQGRDDTIMATGFLSQLVSDKPLTECIRAGHYAASIIIRRTGCTFPEKPDFH

SEQ ID NO: 891848 - protein, 203 aa, Homo sapiens
MAAAEEEPKPKKLKVEAPQALRENILFGMGNPLLDISAVVDKDFLDKYSLKPNDQILAEDKHKELFDELVKKFKVEYHAGGSTQNSIKVAQWMIQQPHKAATFFGCIGIDKFGEILKRKAAEAHVDAHYYEQNEQPTGTCAACITGDNRSLIANLAAANCYKKEKHLDLEKNWMLVEKARVCYIAKLPLLLESKALRLKTLKR

SEQ ID NO: 891849 - protein, 186 aa, Homo sapiens; identical to SEQ ID NO: 891839

SEQ ID NO: 891850 - protein, 82 aa, Homo sapiens
FGAKAALSSRFFVEANEDMVGSQLLLSELQENCKAVLAPLGQRAARDLDVEAAATQHCSPVNAFGVCEPGLDVENPRLVVGR

SEQ ID NO: 891851 - protein, 138 aa, Homo sapiens
MAELQQLRVQEAVESMVKSLERENIRKMQGLMFRCSASCCEDSQASMKQVHQCIERCHVPLAQAQALVTSELEKFQDRLARCTMHCNDKAKDSIDAGSKELQVKQQLDSCVTKCVDDHMHLIPTMTKKMKEALLSIGK

SEQ ID NO: 891852 - protein, 223 aa, Homo sapiens
MAELQQLRVQEAVESMVKSLERENIRKMQVAGLGPNQDPLLSGWVPGPSLSHHATPCTAAASPQTGCGRPWGRRGGLGQDFGSFGGSDEIRVPLPCARLFSAPSSPGQERPRRQGLMFRCSASCCEDSQASMKQVHQCIERCHVPLAQAQALVTSELEKFQDRLARCTMHCNDKAKDSIDAGSKELQVKQQLDSCVTKCVDDHMHLIPTMTKKMKEALLSIGK

SEQ ID NO: 891853 - protein, 138 aa, Homo sapiens; identical to SEQ ID NO: 891851

SEQ ID NO: 891854 - protein, 138 aa, Homo sapiens; identical to SEQ ID NO: 891851

SEQ ID NO: 891855 - protein, 107 aa, Homo sapiens
MFRCSASCCEDSQASMKQVHQCIERCHVPLAQAQALVTSELEKFQDRLARCTMHCNDKAKDSIDAGSKELQVKQQLDSCVTKCVDDHMHLIPTMTKKMKEALLSIGK

SEQ ID NO: 891856 - protein, 138 aa, Homo sapiens; identical to SEQ ID NO: 891851

SEQ ID NO: 891857 - protein, 107 aa, Homo sapiens; identical to SEQ ID NO: 891855

SEQ ID NO: 891858 - protein, 138 aa, Homo sapiens; identical to SEQ ID NO: 891851

SEQ ID NO: 891859 - protein, 138 aa, Homo sapiens; identical to SEQ ID NO: 891851

SEQ ID NO: 891860 - protein, 531 aa, Homo sapiens
GAATPPAPADLRLAQSPLGPFATPLARRAETSVPGGSCGAQVSPGCARGPSSPAPPSQGPSPYDESEVHDSFQQLIQEQSQCTAQEGLELQQREREVTGSSQQTLWRPEGTQSTATLRILASMPSRTIGRSRGAIISQYYNRTVQLRCRSSRPLLGNFVRSAWPSLRLYDLELDPTALEEEEKQSLLVKELQSLAVAQRDHMLRGMPLSLAEKRSLRPCTAWAWLLLSALQALMPWRYALKRIGGQFGSSVLSYFLFLKTLLAFNALLLLLLVAFIMGPQVAFPPALPGPAPVCTGLELLTGAGCFTHTVMYYGHYSNATLNQPCGSPLDGSQCTPRVGGLPYNMPLAYLSTVGVSFFITCITLVYSMAHSFGESYRVGSTSGIHAITVFCSWDYKVTQKRASRLQQDNIRTRLKELLAEWQLRHSPRSVCGRLRQAAVLGLVWLLCLGTALGCAVAVHVFSEFMIQSPEAAGQEAVLLVLPLVVGLLNLGAPYLCRVLAALEPHDSPVLEVYVAICRCVAAHENIIWCWS

SEQ ID NO: 891861 - protein, 87 aa, Homo sapiens
AKSDIEFAAARRRRQKLGVLFSPLLPAVQIIKLLLVFYVKKEGEDKIFLINKLHSIYERKEREERSRVGTTEEAAAPPALLTDEQDA

SEQ ID NO: 891862 - protein, 805 aa, Homo sapiens
MAQPLAFILDVPETPGDQGQGPSPYDESEVHDSFQQLIQEQSQCTAQEGLELQQREREVTGSSQQTLWRPEGTQSTATLRILASMPSRTIGRSRGAIISQYYNRTVQLRCRSSRPLLGNFVRSAWPSLRLYDLELDPTALEEEEKQSLLVKELQSLAVAQRDHMLRGMPLSLAEKRSLREKSRTPRGKWRGQPGSGGVCSCCGRLRYACVLALHSLGLALLSALQALMPWRYALKRIGGQFGSSVLSYFLFLKTLLAFNALLLLLLVAFIMGPQVAFPPALPGPAPVCTGLELLTGAGCFTHTVMYYGHYSNATLNQPCGSPLDGSQCTPRVGGLPYNMPLAYLSTVGVSFFITCITLVYSMAHSFGESYRVGSTSGIHAITVFCSWDYKVTQKRASRLQQDNIRTRLKELLAEWQLRHSPRSVCGRLRQAAVLGLVWLLCLGTALGCAVAVHVFSEFMIQSPEAAGQEAVLLVLPLVVGLLNLGAPYLCRVLAALEPHDSPVLEVYVAICRNLILKLAILGTLCYHWLGRRVGVLQGQCWEDFVGQELYRFLVMDFVLMLLDTLFGELVWRIISEKKLKRRRKPEFDIARNVLELIYGQTLTWLGVLFSPLLPAVQIIKLLLVFYVKKTSLLANCQAPRRPWLASHMSTVFLTLLCFPAFLGAAVFLCYAVWQVKPSSTCGPFRTLDTMYEAGRVWVRHLEAAGPRVSWLPWVHRYLMENTFFVFLVSALLLAVIYLNIQVVRGQRKVICLLKEQISNEGEDKIFLINKLHSIYERKEREERSRVGTTEEAAAPPALLTDEQDA

SEQ ID NO: 891863 - protein, 805 aa, Homo sapiens; identical to SEQ ID NO: 891862

SEQ ID NO: 891864 - protein, 805 aa, Homo sapiens; identical to SEQ ID NO: 891862

SEQ ID NO: 891865 - protein, 595 aa, Homo sapiens
MAQPLAFILDVPETPGDQGQGPSPYDESEVHDSFQQLIQEQSQCTAQEGLELLLLLVAFIMGPQVAFPPALPGPAPVCTGLELLTGAGCFTHTVMYYGHYSNATLNQPCGSPLDGSQCTPRVGGLPYNMPLAYLSTVGVSFFITCITLVYSMAHSFGESYRVGSTSGIHAITVFCSWDYKVTQKRASRLQQDNIRTRLKELLAEWQLRHSPRSVCGRLRQAAVLGLVWLLCLGTALGCAVAVHVFSEFMIQSPEAAGQEAVLLVLPLVVGLLNLGAPYLCRVLAALEPHDSPVLEVYVAICRNLILKLAILGTLCYHWLGRRVGVLQGQCWEDFVGQELYRFLVMDFVLMLLDTLFGELVWRIISEKKLKRRRKPEFDIARNVLELIYGQTLTWLGVLFSPLLPAVQIIKLLLVFYVKKTSLLANCQAPRRPWLASHMSTVFLTLLCFPAFLGAAVFLCYAVWQVKPSSTCGPFRTLDTMYEAGRVWVRHLEAAGPRVSWLPWVHRYLMENTFFVFLVSALLLAVIYLNIQVVRGQRKVICLLKEQISNEGEDKIFLINKLHSIYERKEREERSRVGTTEEAAAPPALLTDEQDA

SEQ ID NO: 891866 - protein, 854 aa, Homo sapiens
MAQPLAFILDVPETPGDQGQGPSPYDESEVHDSFQQLIQEQSQCTAQEGLELQQREREVTGSSQQTLWRPEGTQSTATLRILASMPSRTIGRSRGAIISQYYNRTVQLRCRSSRPLLGNFVRSAWPSLRLYDLELDPTALEEEEKQSLLVKELQSLAVAQRDHMLRGMPLSLAEKRSLREKSRTPRGKWRGQPGSGGVCSCCGRLRYACVLALHSLGLALLSALQALMPWRYALKRIGGQFGSSVLSYFLFLKTLLAFNALLLLLLVAFIMGPQVAFPPALPGPAPVCTGLELLTGAGCFTHTVMYYGHYSNATLNQPCGSPLDGSQCTPRVGGLPYNMPLAYLSTVGVSFFITCITLVYSMAHSFGESYRVGSTSGIHAITVFCSWDYKVTQKRASRLQQDNIRTRLKELLAEWQLRHSPRSVCGRLRQAAVLGLVWLLCLGTALGCAVAVHVFSEFMIQSPEAAGQEAVLLVLPLVVGLLNLGAPYLCRVLAALEPHDSPVLEVYVAICRNLILKLAILGTLCYHWLGRRVGVLQGQCWEDFVGQELYRFLVMDFVLMLLDTLFGELVWRALCLHPSEEDSGNRTELIFRLERKTGFKVMCMARHGGSCLESQHFGRLRIISEKKLKRRRKPEFDIARNVLELIYGQTLTWLGVLFSPLLPAVQIIKLLLVFYVKKTSLLANCQAPRRPWLASHMSTVFLTLLCFPAFLGAAVFLCYAVWQVKPSSTCGPFRTLDTMYEAGRVWVRHLEAAGPRVSWLPWVHRYLMENTFFVFLVSALLLAVIYLNIQVVRGQRKVICLLKEQISNEGEDKIFLINKLHSIYERKEREERSRVGTTEEAAAPPALLTDEQDA

SEQ ID NO: 891867 - protein, 525 aa, Homo sapiens
MAQPLAFILDVPETPGDQGQGPSPYDESEVHDSFQQLIQEQSQCTAQEGLELQQREREVTGSSQQTLWRPEGTQSTATLRILASMPSRTIGRSRGAIISQYYNRTVQLRCRSSRPLLGNFVRSAWPSLRLYDLELDPTALEEEEKQSLLVKELQSLAVAQRDHMLRGMPLSLAEKRSLREKSRTPRGKWRGQPGSGGVCSCCGRLRYACVLALHSLGLALLSALQALMPWRYALKRIGGQFGSSVLSYFLFLKTLLAFNALLLLLLVAFIMGPQVAFPPALPGPAPVCTGLELLTGAGCFTHTVMYYGHYSNATLNQPCGSPLDGSQCTPRVGGLPYNMPLAYLSTVGVSFFITCITLVYSMAHSFGESYRVGSTSGIHAITVFCSWDYKVTQKRASRLQQDNIRTRLKELLAEWQLRHSPRSVCGRLRQAAVLGLVWLLCLGTALGCAVAVHVFSEFMIQSPEAAGQEAVLLVLPLVVGLLNLGAPYLCRVLAALEPHDSPVLEVYVAICRCVAAHENIIWCWS

SEQ ID NO: 891868 - protein, 805 aa, Homo sapiens; identical to SEQ ID NO: 891862

SEQ ID NO: 891869 - protein, 327 aa, Homo sapiens
ASKRWMESACGGSHWGPTVRLRLDDDSRYEVYVWNLILKLAILGTLCYHWLGRRVGVLQGQCWEDFVGQELYRFLVMDFVLMLLDTLFGELVWRIISEKKLKRRRKPEFDIARNVLELIYGQTLTWLGVLFSPLLPAVQIIKLLLVFYVKKTSLLANCQAPRRPWLASHMSTVFLTLLCFPAFLGAAVFLCYAVWQVKPSSTCGPFRTLDTMYEAGRVWVRHLEAAGPRVSWLPWVHRYLMENTFFVFLVSALLLAVIYLNIQVVRGQRKVICLLKEQISNEGEDKIFLINKLHSIYERKEREERSRVGTTEEAAAPPALLTDEQDA

SEQ ID NO: 891870 - protein, 675 aa, Homo sapiens
MAQPLAFILDVPETPGDQGQGPSPYDESEVHDSFQQLIQEQSQCTAQEGLELQQREREVTGSSQQTLWRPEGTQSTATLRILASMPSRTIGRSRGAIISQYYNRTVQLRCRSSRPLLGNFVRSAWPSLRLYDLELDPTALEEEEKQSLLVKELQSLAVAQRDHMLRGMPLSLAEKRSLREKSRTPRGKWRGQPGSGGVCSCCGRLRYACVLALHSLGLALLSALQALMPWRYALKRIGGQFGSSVLSYFLFLKTLLAFNALLLLLLVAFIMGPQVAFPPALPGPAPVCTGLELLTGAGCFTHTVMYYGHYSNATLNQPCGSPLDGSQCTPRVGGLPYNMPLAYLSTVGVSFFITCITLVYSMAHSFGESYRVGSTSGIHAITVFCSWDYKVTQKRASRLQQDNIRTRLKELLAEWQLRHSPRSVCGRLRQAAVLGLVWLLCLGTALGCAVAVHVFSEFMIQSPEAAGQEAVLLVLPLVVGLLNLGAPYLCRVLAALEPHDSPVLEVYVAICRNLILKLAILGTLCYHWLGRRVGVLQGQCWEDFVGQELYRFLVMDFVLMLLDTLFGELVWRIISEKKLKRRRKPEFDIARNVLELIYGQTLTWLGVLFSPLLPAVQIIKLLLVFYVKKEGEDKIFLINKLHSIYERKEREERSRVGTTEEAAAPPALLTDEQDA

SEQ ID NO: 891871 - protein, 271 aa, Homo sapiens
MAQPLAFILDVPETPGDQGQGPSPYDESEVHDSFQQLIQEQSQCTAQEGLELQQREREVTGSSQQTLWRPEGTQSTATLRILASMPSRTIGRSRGAIISQYYNRTVQLRCRSSRPLLGNFVRSAWPSLRLYDLELDPTALEEEEKQSLLVKELQSLAVAQRDHMLRGMPLSLAEKRSLREKSRTPRGKWRGQPGSGGVCSCCGRLRYACVLALHSLGLALLSALQALMPWRYALKRIGGQFGSACSPTSSFSRSFASRKPQLRLGWSWKGG

SEQ ID NO: 891872 - protein, 102 aa, Homo sapiens
EVPSSPSTTTARCSFGAGAAGPCSGTLSAPPGPASACTTWSWTPRPWRRRVSEWALEPQWRTPAWGGVQEASLAWAVAGVLQSQRPLSYPLAGCLKAPPSLC

SEQ ID NO: 891873 - protein, 488 aa, Homo sapiens
MAQPLAFILDVPETPGDQGQGPSPYDESEVHDSFQQLIQEQSQCTAQEGLELQQREREVTGSSQQTLWRPEGTQSTATLRSAWPSLRLYDLELDPTALEEEEKQSLLVKELQSLAVAQRDHMLRGMPLSLAEKRSLREKSRTPRGKWRGQPGSGGVCSCCGRLRYACVAALLAFNALLLLLLVAFIMGPQVAFPPALPGPAPVCTGLELLTGAGCFTHTVMYYGHYSNATLNQPCGSPLDGSQCTPRVGGLPYNMPLAYLSTVGVSFFITCITLVYSMAHSFGESYRVGSTSGIHAITVFCSWDYKVTQKRASRLQQDNIRTRLKELLAEWQLRHSPRSVCGRLRQAAVLGLVWLLCLGTALGCAVAVHVFSEFMIQSPEAAGQEAVLLVLPLVVGLLNLGAPYLCRVLAALEPHDSPVLEVYVAICRNLILKLAILGTLCYHWLGRRVGVLQGQCWEDFVGQELYRFLVMDFVLMLLDTLFGELVWR

SEQ ID NO: 891874 - protein, 238 aa, Homo sapiens
  misc_feature (225)..(225): Xaa can be any naturally occurring amino acid
GAATPPAPADLRLAQSPLGPFATPLARRAETSVPGGSCGAQVSPGCARGPSSPAPPSQGPSPYDESEVHDSFQQLIQEQSQCTAQEGLELQQREREVTGSSQQTLWRPEGTQSTATLRILASMPSRTIGRSRGAIISQYYNRTVQLRCRSSRPLLGNFVRSAWPSLRLYDLELDPTALEEEEKQSLLVKELQSLAVAQRDHMLRGMPLSLAEKRSLRLTAGLACXAWGLMRASLTMGS

SEQ ID NO: 891875 - protein, 721 aa, Homo sapiens
MAQPLAFILDVPETPGDQGQGPSPYDESEVHDSFQQLIQEQSQCTAQEGLELQQREREVTGSSQQTLWRPEGTQSTATLRSAWPSLRLYDLELDPTALEEEEKQSLLVKELQSLAVAQRDHMLRGMPLSLAEKRSLREKSRTPRGKWRGQPGSGGVCSCCGRLRYACVAALLAFNALLLLLLVAFIMGPQVAFPPALPGPAPVCTGLELLTGAGCFTHTVMYYGHYSNATLNQPCGSPLDGSQCTPRVGGLPYNMPLAYLSTVGVSFFITCITLVYSMAHSFGESYRVGSTSGIHAITVFCSWDYKVTQKRASRLQQDNIRTRLKELLAEWQLRHSPRSVCGRLRQAAVLGLVWLLCLGTALGCAVAVHVFSEFMIQSPEAAGQEAVLLVLPLVVGLLNLGAPYLCRVLAALEPHDSPVLEVYVAICRNLILKLAILGTLCYHWLGRRVGVLQGQCWEDFVGQELYRFLVMDFVLMLLDTLFGELVWRIISEKKLKRRRKPEFDIARNVLELIYGQTLTWLGVLFSPLLPAVQIIKLLLVFYVKKTSLLANCQAPRRPWLASHMSTVFLTLLCFPAFLGAAVFLCYAVWQVKPSSTCGPFRTLDTMYEAGRVWVRHLEAAGPRVSWLPWVHRYLMENTFFVFLVSALLLAVIYLNIQVVRGQRKVICLLKEQISNEGEDKIFLINKLHSIYERKEREERSRVGTTEEAAAPPALLTDEQDA

SEQ ID NO: 891876 - protein, 805 aa, Homo sapiens; identical to SEQ ID NO: 891862

SEQ ID NO: 891877 - protein, 501 aa, Homo sapiens [sequence omitted]

SEQ ID NO: 891878 - protein, 745 aa, Homo sapiens
MAQPLAFILDVPETPGDQGQGPSPYDESEVHDSFQQLIQEQSQCTAQEGLELQQREREVTGSSQQTLWRPEGTQSTATLRILASMPSRTIGRSRGAIISQYYNRTVQLRCRSSRPLLGNFVRSAWPSLRLYDLELDPTALEEEEKQSLLVKELQSLAVAQRDHMLRGMPLSLAEKRSLREKSRTPRGKWRGQPGSGGVCSCCGRLRYACVLALHSLGLALLSALQALMPWRYALKRIGGQFGSSVLSYFLFLKTLLAFNALLLLLLVAFIMGPQVAFPPALPGPAPVCTGLELLTGAGCFTHTVMYYGHYSNATLNQPCGSPLDGSQCTPRVGGLPYNMPLAYLSTVGVSFFITCITLVYSMAHSFGESYRVGSTSGIHAITVFCSWDYKVTQKRASRLQQDNIRTRLKELLAEWQLRHSPRSVCGRLRQAAVLGLVWLLCLGTALGCAVAVHVFSEFMIQSPEAAGQEAVLLVLPLVVGLLNLGAPYLCRVLAALEPHDSPVLEVYVAICRIISEKKLKRRRKPEFDIARNVLELIYGQTLTWLGVLFSPLLPAVQIIKLLLVFYVKKTSLLANCQAPRRPWLASHMSTVFLTLLCFPAFLGAAVFLCYAVWQVKPSSTCGPFRTLDTMYEAGRVWVRHLEAAGPRVSWLPWVHRYLMENTFFVFLVSALLLAVIYLNIQVVRGQRKVICLLKEQISNEGEDKIFLINKLHSIYERKEREERSRVGTTEEAAAPPALLTDEQDA

SEQ ID NO: 891879 - protein, 381 aa, Homo sapiens
LEEGGATCQFHPGPFPVAARSHHGWGASMTPLPAPLQSPEAAGQEAVLLVLPLVVGLLNLGAPYLCRVLAALEPHDSPVLEVYVAICRNLILKLAILGTLCYHWLGRRVGVLQGQCWEDFVGQELYRFLVMDFVLMLLDTLFGELVWRIISEKKLKRRRKPEFDIARNVLELIYGQTLTWLGVLFSPLLPAVQIIKLLLVFYVKKTSLLANCQAPRRPWLASHMSTVFLTLLCFPAFLGAAVFLCYAVWQVKPSSTCGPFRTLDTMYEAGRVWVRHLEAAGPRVSWLPWVHRYLMENTFFVFLVSALLLAVIYLNIQVVRGQRKVICLLKEQISNEGEDKIFLINKLHSIYERKEREERSRVGTTEEAAAPPALLTDEQDA

SEQ ID NO: 891880 - protein, 675 aa, Homo sapiens; identical to SEQ ID NO: 891870

SEQ ID NO: 891881 - protein, 539 aa, Homo sapiens
MAQPLAFILDVPETPGDQGQGPSPYDESEVHDSFQQLIQEQSQCTAQEGLELQQREREVTGSSQQTLWRPEGTQSTATLRILASMPSRTIGRSRGAIISQYYNRTVQLRCRSSRPLLGNFVRSAWPSLRLYDLELDPTALEEEEKQSLLVKELQSLAVAQRDHMLRGMPLSLAEKRSLREKSRTPRGKWRGQPGSGGVCSCCGRLRYACVLALHSLGLALLSALQALMPWRYALKRIGGQFGSSVLSYFLFLKTLLAFNALLLLLLVAFIMGPQVAFPPALPGPAPVCTGLELLTGAGCFTHTVMYYGHYSNATLNQPCGSPLDGSQCTPRVGGLPYNMPLAYLSTVGVSFFITCITLVYSMAHSFGESYRVGSTSGIHAITVFCSWDYKVTQKRASRLQQDNIRTRLKELLAEWQLRHSPRSVCGRLRQAAVLGLVWLLCLGTALGCAVAVHVFSEFMIQVRGWGEPGPCLERVPSDSGHLPPGEAALPLLLHPASPGCHVRCAPCWGPLRAPLLSPLSCLTVLFFGFWFLFHYLYPS

SEQ ID NO: 891882 - protein, 99 aa, Homo sapiens
DYRHEPPHLAILAPVSSGLLFPHPCSGDHVPVGTEGGGVYSVVCRAWHGSDLQQMEVLLASPVCVQVTGRLLSSSVNEEAAGSRVQALPGRTALVALPS

SEQ ID NO: 891883 - protein, 220 aa, Homo sapiens
MAILFAVVARGTTILAKHAWCGGNFLEVTEQILAKIPSENNKLTYSHGNYLFHYICQDRIVYLCITDDDFERSRAFNFLNEIKKRFQTTYGSRAQTALPYAMNSEFSSVLAAQLKHHSENKGLDKVMETQAQVDELKGIMVRNIDLVAQRGERLELLIDKTENLVDSSVTFKTTSRNLARAMCMKNLKLTIIIIIVSIVFIYIIVSPLCGGFTWPSCVKK

SEQ ID NO: 891884 - protein, 260 aa, Homo sapiens
MAILFAVVARGTTILAKHAWCGGNFLEVTEQILAKIPSENNKLTYSHGNYLFHYICQDRIVYLCITDDDFERSRAFNFLNEIKKRFQTTYGSRAQTALPYAMNSEFSSVLAAQLKHHSENKGLDKVMETQAQVDELKGIMVRNIVCHLQNYQQKSCSSHVYEEPQAHYYHHHRINCVHLYHCFTSLWWIYMAKLCEEIGKKKLPLTKDMREQGVKSNPCDSSLSHTDRWYLPVSSTLFSLFKILFHASRFIFVLSTSLFL

SEQ ID NO: 891885 - protein, 119 aa, Homo sapiens
MNSEFSSVLAAQLKHHSENKGLDKVMETQAQVDELKGIMVRNIDLVAQRGERLELLIDKTENLVDSSVTFKTTSRNLARAMCMKNLKLTIIIIIVSIVFIYIIVSPLCGGFTWPSCVKK

SEQ ID NO: 891886 - protein, 220 aa, Homo sapiens; identical to SEQ ID NO: 891883

SEQ ID NO: 891887 - protein, 179 aa, Homo sapiens
MAILFAVVARGTTILAKHAWCGGNFLEDFERSRAFNFLNEIKKRFQTTYGSRAQTALPYAMNSEFSSVLAAQLKHHSENKGLDKVMETQAQVDELKGIMVRNIDLVAQRGERLELLIDKTENLVDSSVTFKTTSRNLARAMCMKNLKLTIIIIIVSIVFIYIIVSPLCGGFTWPSCVKK

SEQ ID NO: 891888 - protein, 173 aa, Homo sapiens
MCYLFHYICQDRIVYLCITDDDFERSRAFNFLNEIKKRFQTTYGSRAQTALPYAMNSEFSSVLAAQLKHHSENKGLDKVMETQAQVDELKGIMVRNIDLVAQRGERLELLIDKTENLVDSSVTFKTTSRNLARAMCMKNLKLTIIIIIVSIVFIYIIVSPLCGGFTWPSCVKK

SEQ ID NO: 891889 - protein, 74 aa, Homo sapiens
MERCWGGARRQCRGDLGFSGVDSSSCRAGPVLARCVLCHWKGLELKSVRMRHLSCHYRREKMLTFSQFVFYKTF

SEQ ID NO: 891890 - protein, 1557 aa, Homo sapiens
MAGGVRLLWVSLLVLLAQLGPQPGLGRLGERLRVRFTPVVCGLRCVHGPTGSRCTPTCAPRNATSVDSGAPGGAAPGGPGFRAFLCPLICHNGGVCVKPDRCLCPPDFAGKFCQLHSSGARPPAPAVPGLTRSVYTMPLANHRDDEHGVASMVSVHVEHPQEASVVVHQVERVSGPWEEADAEAVARAEAAARAEAAAPYTVLAQSAPREDGYSDASGFGYCFRELRGGECASPLPGLRTQEVCCRGAGLAWGVHDCQLCSERLGNSERVSAPDGPCPTGFERVNGSCEDVDECATGGRCQHGECANTRGGYTCVCPDGFLLDSSRSSCISQHVISEAKGPCFRVLRDGGCSLPILRNITKQICCCSRVGKAWGRGCQLCPPFGSEGFREICPAGPGYHYSASDLRYNTRPLGQEPPRVSLSQPRTLPATSRPSAGFLPTHRLEPRPEPRPDPRPGPELPLPSIPAWTGPEIPESGPSSGMCQRNPQVCGPGRCISRPSGYTCACDSGFRLSPQGTRCIDVDECRRVPPPCAPGRCENSPGSFRCVCGPGFRAGPRAAECLDVDECHRVPPPCDLGRCENTPGSFLCVCPAGYQAAPHGASCQDVDECTQSPGLCGRGACKNLPGSFRCVCPAGFRGSACEEDVDECAQEPPPCGPGRCDNTAGSFHCACPAGFRSRGPGAPCQDVDECARSPPPCTYGRCENTEGSFQCVCPMGFQPNTAGSECEDVDECENHLACPGQECVNSPGSFQCRTCPSGHHLHRGRCTDVDECSSGAPPCGPHGHCTNTEGSFRCSCAPGYRAPSGRPGPCADVNECLEGDFCFPHGECLNTDGSFACTCAPGYRPGPRGASCLDVDECSEEDLCQSGICTNTDGSFECICPPGHRAGPDLASCLDVDECRERGPALCGSQRCENSPGSYRCVRDCDPGYHAGPEGTCDDVDECQEYGPEICGAQRCENTPGSYRCTPACDPGYQPTPGGGCQDVDECRNRSFCGAHAVCQNLPGSFQCLCDQGYEGARDGRHCVDVNECETLQGVCGAALCENVEGSFLCVCPNSPEEFDPMTGRCVPPRTSAGTFPGSQPQAPASPVLPARPPPPPLPRRPSTPRQGPVGSGRRECYFDTAAPDACDNILARNVTWQECCCTVGEGWGSGCRIQQCPGTETAEYQSLCPHGRGYLAPSGDLSLRRDVDECQLFRDQVCKSGVCVNTAPGYSCYCSNGYYYHTQRLECIDNDECADEEPACEGGRCVNTVGSYHCTCEPPLVLDGSQRRCVSNESQSLDDNLGVCWQEVGADLVCSHPRLDRQATYTECCCLYGEAWGMDCALCPAQDSDDFEALCNVLRPPAYSPPRPGGFGLPYEYGPDLGPPYQGLPYGPELYPPPALPYDPYPPPPGPFARREAPYGAPRFDMPDFEDDGGPYGESEAPAPPGPGTRWPYRSRDTRRSFPEPEEPPEGGSYAGSLAEPYEELEAEECGILDGCTNGRCVRVPEGFTCRCFDGYRLDMTRMACVDINECDEAEAASPLCVNARCLNTDGSFRCICRPGFAPTHQPHHCAPARPRA

SEQ ID NO: 891891 - protein, 57 aa, Homo sapiens
MVAPLSVLVLLPVLCPLICHNGGVCVKPDRCLVAARELRSDRGGGYTYGSPTRVPRG

SEQ ID NO: 891892 - protein, 1538 aa, Homo sapiens
MPRPGTSGRRPLLLVLLLPLFAAATSAASPSPSPSQVVEVPGVPSRPASVAVCRCCPGQTSRRSRCIRAFCRVRSCQPKKCAGPQRCLNPVPAVPSPSPSVRKRQVSLNWQPLTLQEARALLKRRRPRGPGGRGLLRRRPPQRAPAGKAPVLCPLICHNGGVCVKPDRCLCPPDFAGKFCQLHSSGARPPAPAVPGLTRSVYTMPLANHRDDEHGVASMVSVHVEHPQEASVVVHQVERVSGPWEEADAEAVARAEAAARAEAAAPYTVLAQSAPREDGYSDASGFGYCFRELRGGECASPLPGLRTQEVCCRGAGLAWGVHDCQLCSERLGNSERVSAPDGPCPTGFERVNGSCEDVDECATGGRCQHGECANTRGGYTCVCPDGFLLDSSRSSCISQHVISEAKGPCFRVLRDGGCSLPILRNITKQICCCSRVGKAWGRGCQLCPPFGSEGFREICPAGPGYHYSASDLRYNTRPLGQEPPRVSLSQPRTLPATSRPSAGFLPTHRLEPRPEPRPDPRPGPELPLPSIPAWTGPEIPESGPSSGMCQRNPQVCGPGRCISRPSGYTCACDSGFRLSPQGTRCIDVDECRRVPPPCAPGRCENSPGSFRCVCGPGFRAGPRAAECLDVDECHRVPPPCDLGRCENTPGSFLCVCPAGYQAAPHGASCQDVDECTQSPGLCGRGACKNLPGSFRCVCPAGFRGSACEEDVDECAQEPPPCGPGRCDNTAGSFHCACPAGFRSRGPGAPCQDVDECARSPPPCTYGRCENTEGSFQCVCPMGFQPNTAGSECEDVDECENHLACPGQECVNSPGSFQCRTCPSGHHLHRGRCTDVDECSSGAPPCGPHGHCTNTEGSFRCSCAPGYRAPSGRPGPCADVNECLEGDFCFPHGECLNTDGSFACTCAPGYRPGPRGASCLDVDECSEEDLCQSGICTNTDGSFECICPPGHRAGPDLASCLDVDECRERGPALCGSQRCENSPGSYRCVRDCDPGYHAGPEGTCDDVNECETLQGVCGAALCENVEGSFLCVCPNSPEEFDPMTGRCVPPRTSAGTFPGSQPQAPASPVLPARPPPPPLPRRPSTPRQGPVGSGRRECYFDTAAPDACDNILARNVTWQECCCTVGEGWGSGCRIQQCPGTETAEYQSLCPHGRGYLAPSGDLSLRRDVDECQLFRDQVCKSGVCVNTAPGYSCYCSNGYYYHTQRLECIDNDECADEEPACEGGRCVNTVGSYHCTCEPPLVLDGSQRRCVSNESQSLDDNLGVCWQEVGADLVCSHPRLDRQATYTECCCLYGEAWGMDCALCPAQDSDDFEALCNVLRPPAYSPPRPGGFGLPYEYGPDLGPPYQGLPYGPELYPPPALPYDPYPPPPGPFARREAPYGAPRFDMPDFEDDGGPYGESEAPAPPGPGTRWPYRSRDTRRSFPEPEEPPEGGSYAGSLAEPYEELEAEECGILDGCTNGRCVRVPEGFTCRCFDGYRLDMTRMACVDINECDEAEAASPLCVNARCLNTDGSFRCICRPGFAPTHQPHHCAPARPRA

SEQ ID NO: 891893 - protein, 1335 aa, Homo sapiens
MPLANHRDDEHGVASMVSVHVEHPQEASVVVHQVERVSGPWEEADAEAVARAEAAARAEAAAPYTVLAQSAPREDGYSDASGFGYCFRELRGGECASPLPGLRTQEVCCRGAGLAWGVHDCQLCSERLGNSERVSAPDGPCPTGFERVNGSCEDVDECATGGRCQHGECANTRGGYTCVCPDGFLLDSSRSSCISQHVISEAKGPCFRVLRDGGCSLPILRNITKQICCCSRVGKAWGRGCQLCPPFGSEGFREICPAGPGYHYSASDLRYNTRPLGQEPPRVSLSQPRTLPATSRPSAGFLPTHRLEPRPEPRPDPRPGPELPLPSIPAWTGPEIPESGPSSGMCQRNPQVCGPGRCISRPSGYTCACDSGFRLSPQGTRCIDVDECRRVPPPCAPGRCENSPGSFRCVCGPGFRAGPRAAECLDVDECHRVPPPCDLGRCENTPGSFLCVCPAGYQAAPHGASCQDVDECTQSPGLCGRGACKNLPGSFRCVCPAGFRGSACEEDVDECAQEPPPCGPGRCDNTAGSFHCACPAGFRSRGPGAPCQDVDECARSPPPCTYGRCENTEGSFQCVCPMGFQPNTAGSECEDVDECENHLACPGQECVNSPGSFQCRTCPSGHHLHRGRCTDVDECSSGAPPCGPHGHCTNTEGSFRCSCAPGYRAPSGRPGPCADVNECLEGDFCFPHGECLNTDGSFACTCAPGYRPGPRGASCLDVDECSEEDLCQSGICTNTDGSFECICPPGHRAGPDLASCLDVDECRERGPALCGSQRCENSPGSYRCVRDCDPGYHAGPEGTCDDVNECETLQGVCGAALCENVEGSFLCVCPNSPEEFDPMTGRCVPPRTSAGTFPGSQPQAPASPVLPARPPPPPLPRRPSTPRQGPVGSGRRECYFDTAAPDACDNILARNVTWQECCCTVGEGWGSGCRIQQCPGTETAEYQSLCPHGRGYLAPSGDLSLRRDVDECQLFRDQVCKSGVCVNTAPGYSCYCSNGYYYHTQRLECIDNDECADEEPACEGGRCVNTVGSYHCTCEPPLVLDGSQRRCVSNESQSLDDNLGVCWQEVGADLVCSHPRLDRQATYTECCCLYGEAWGMDCALCPAQDSDDFEALCNVLRPPAYSPPRPGGFGLPYEYGPDLGPPYQGLPYGPELYPPPALPYDPYPPPPGPFARREAPYGAPRFDMPDFEDDGGPYGESEAPAPPGPGTRWPYRSRDTRRSFPEPEEPPEGGSYAGSLAEPYEELEAEECGILDGCTNGRCVRVPEGFTCRCFDGYRLDMTRMACVDINECDEAEAASPLCVNARCLNTDGSFRCICRPGFAPTHQPHHCAPARPRA

SEQ ID NO: 891894 - protein, 1335 aa, Homo sapiens; identical to SEQ ID NO: 891893

SEQ ID NO: 891895 - protein, 1549 aa, Homo sapiens
MPRPGTSGRRPLLLVLLLPLFAAATSAASPSPSPSQVVEVPGVPSRPASVAVCRCCPGQTSRRSRCIRAFCRVRSCQPKKCAGPQRCLNPVPAVPSPSPSVRKRQVSLNWQPLTLQEARALLKRRRPRGPGGRGLLRRRPPQRAPAGKAPVLCPLICHNGGVCVKPDRCLCPPDFAGKFCQLHSSGARPPAPAVPGLTRSVYTMPLANHRDDEHGVASMVSVHVEHPQEASVVVHQVERVSGPWEEADAEAVARAEAAARAEAAAPYTVLAQSAPREDGYSDASGFGYCFRELRGGECASPLPGLRTQEVCCRGAGLAWGVHDCQLCSERLGNSERVSAPDGPCPTGFERVNGSCEDVDECATGGRCQHGECANTRGGYTCVCPDGFLLDSSRSSCISQHVISEAKGPCFRVLRDGGCSLPILRNITKQICCCSRVGKAWGRGCQLCPPFGSEGFREICPAGPGYHYSASDLRYNTRPLGQEPPRVSLSQPRTLPATSRPSAGFLPTHRLEPRPEPRPDPRPGPELPLPSIPAWTGPEIPESGPSSGMCQRNPQVCGPGRCISRPSGYTCACDSGFRLSPQGTRCIDVDECRRVPPPCAPGRCENSPGSFRCVCGPGFRAGPRAAECLDVDECHRVPPPCDLGRCENTPGSFLCVCPAGYQAAPHGASCQDVDECTQSPGLCGRGACKNLPGSFRCVCPAGFRGSACEEDVDECAQEPPPCGPGRCDNTAGSFHCACPAGFRSRGPGAPCQDVDECARSPPPCTYGRCENTEGSFQCVCPMGFQPNTAGSECEDVDECENHLACPGQECVNSPGSFQCRTCPSGHHLHRGRCTDVDECSSGAPPCGPHGHCTNTEGSFRCSCAPGYRAPSGRPGPCADVNECLEGDFCFPHGECLNTDGSFACTCAPGYRPGPRGASCLDVDECSEEDLCQSGICTNTDGSFECICPPGHRAGPDLASCLDVDECRERGPALCGSQRCENSPGSYRCVRDCDPGYHAGPEGTCDDVNECETLQGVCGAALCENVEGSFLCVCPNSPEEFDPMTGRCVPPRTSAGTFPGSQPQAPASPVLPARPPPPPLPRRPSTPRQGPVGSGRRECYFDTAAPDACDNILARNVTWQECCCTVGEGWGSGCRIQQCPGTETAEYQSLCPHGRGYLAPSGDLSLRRDVDECQLFRDQVCKSGVCVNTAPGYSCYCSNGYYYHTQRLECIDNDECADEEPACEGGRCVNTVGSYHCTCEPPLVLDGSQRRCVSNESQSLDDNLGVCWQEVGADLVCSHPRLDRQATYTECCCLYGEAWGMDCALCPAQDSDDFEALCNVLRPPAYSPPRPGGFGLPYEYGPDLGPPYQGLPYGPELYPPPALPYDPYPPPPGPFARREAPYGAPRFDMPDFEDDGGPYGESEAPAPPGPGTRWPYRSRDTRRSFPEPEEPPEGGSYAGSLAEPYEELEAEECGILDGCTNGRCVRVPEGFTCRCFDGYRLDMTRMACVAFSSDRCLPSADINECDEAEAASPLCVNARCLNTDGSFRCICRPGFAPTHQPHHCAPARPRA

SEQ ID NO: 891896 - protein, 809 aa, Homo sapiens
MPRPGTSGRRPLLLVLLLPLFAAATSAASPSPSPSQVVEVPGVPSRPASVAVCRCCPGQTSRRSRCIRAFCRVRSCQPKKCAGPQRCLNPVPAVPSPSPSVRKRQVSLNWQPLTLQEARALLKRRRPRGPGGRGLLRRRPPQRAPAGKAPVLCPLICHNGGVCVKPDRCLCPPDFAGKFCQLHSSGARPPAPAVPGLTRSVYTMPLANHRDDEHGVASMVSVHVEHPQEASVVVHQVERVSGPWEEADAEAVARAEAAARAEAAAPYTVLAQSAPREDGYSDASGFGYCFRELRGGECASPLPGLRTQEVCCRGAGLAWGVHDCQLCSERLGNSERVSAPDGPCPTGFERVNGSCEDVDECATGGRCQHGECANTRGGYTCVCPDGFLLDSSRSSCISQHVISEAKGPCFRVLRDGGCSLPILRNITKQICCCSRVGKAWGRGCQLCPPFGSEGFREICPAGPGYHYSASDLRYNTRPLGQEPPRVSLSQPRTLPATSRPSAGFLPTHRLEPRPEPRPDPRPGPELPLPSIPAWTGPEIPESGPSSGMCQRNPQVCGPGRCISRPSGYTCACDSGFRLSPQGTRCIDVDECRRVPPPCAPGRCENSPGSFRCVCGPGFRAGPRAAECLDVDECHRVPPPCDLGRCENTPGSFLCVCPAGYQAAPHGASCQDVDECTQSPGLCGRGACKNLPGSFRCVCPAGFRGSACEEDVDECAQEPPPCGPGRCDNTAGSFHCACPAGFRSRGPGAPCQDVDECARSPPPCTYGGVRTQKAASSVSAPWASNPTLLAPSARMWMSVRTTSHALGRSV

SEQ ID NO: 891897 - protein, 1710 aa, Homo sapiens
MPRPGTSGRRPLLLVLLLPLFAAATSAASPSPSPSQVVEVPGVPSRPASVAVCRCCPGQTSRRSRCIRAFCRVRSCQPKKCAGPQRCLNPVPAVPSPSPSVRKRQVSLNWQPLTLQEARALLKRRRPRGPGGRGLLRRRPPQRAPAGKAPVLCPLICHNGGVCVKPDRCLCPPDFAGKFCQLHSSGARPPAPAVPGLTRSVYTMPLANHRDDEHGVASMVSVHVEHPQEASVVVHQVERVSGPWEEADAEAVARAEAAARAEAAAPYTVLAQSAPREDGYSDASGFGYCFRELRGGECASPLPGLRTQEVCCRGAGLAWGVHDCQLCSERLGNSERVSAPDGPCPTGFERVNGSCEDVDECATGGRCQHGECANTRGGYTCVCPDGFLLDSSRSSCISQHVISEAKGPCFRVLRDGGCSLPILRNITKQICCCSRVGKAWGRGCQLCPPFGSEGFREICPAGPGYHYSASDLRYNTRPLGQEPPRVSLSQPRTLPATSRPSAGFLPTHRLEPRPEPRPDPRPGPELPLPSIPAWTGPEIPESGPSSGMCQRNPQVCGPGRCISRPSGYTCACDSGFRLSPQGTRCIDVDECRRVPPPCAPGRCENSPGSFRCVCGPGFRAGPRAAECLDVDECHRVPPPCDLGRCENTPGSFLCVCPAGYQAAPHGASCQDVDECTQSPGLCGRGACKNLPGSFRCVCPAGFRGSACEEDVDECAQEPPPCGPGRCDNTAGSFHCACPAGFRSRGPGAPCQDVDECARSPPPCTYGRCENTEGSFQCVCPMGFQPNTAGSECEDVDECENHLACPGQECVNSPGSFQCRTCPSGHHLHRGRCTDVDECSSGAPPCGPHGHCTNTEGSFRCSCAPGYRAPSGRPGPCADVNECLEGDFCFPHGECLNTDGSFACTCAPGYRPGPRGASCLGSYRADPGPGKGGLRAGKGGTGRRGRKGENEFLAGVFQQDQGAAGGSLEAVRGGGAGDERAESGYLDRDCKEAVLNPSGGGVCREGSSVRQVGEGVRGLGEPRGGGGVWPRMLGGAGGGPGLRTPCPADVDECSEEDLCQSGICTNTDGSFECICPPGHRAGPDLASCLDVDECRERGPALCGSQRCENSPGSYRCVRDCDPGYHAGPEGTCDDVDECQEYGPEICGAQRCENTPGSYRCTPACDPGYQPTPGGGCQDVNECETLQGVCGAALCENVEGSFLCVCPNSPEEFDPMTGRCVPPRTSAGTFPGSQPQAPASPVLPARPPPPPLPRRPSTPRQGPVGSGRRECYFDTAAPDACDNILARNVTWQECCCTVGEGWGSGCRIQQCPGTETAEYQSLCPHGRGYLAPSGDLSLRRDVDECQLFRDQVCKSGVCVNTAPGYSCYCSNGYYYHTQRLECIDNDECADEEPACEGGRCVNTVGSYHCTCEPPLVLDGSQRRCVSNESQSLDDNLGVCWQEVGADLVCSHPRLDRQATYTECCCLYGEAWGMDCALCPAQDSDDFEALCNVLRPPAYSPPRPGGFGLPYEYGPDLGPPYQGLPYGPELYPPPALPYDPYPPPPGPFARREAPYGAPRFDMPDFEDDGGPYGESEAPAPPGPGTRWPYRSRDTRRSFPEPEEPPEGGSYAGSLAEPYEELEAEECGILDGCTNGRCVRVPEGFTCRCFDGYRLDMTRMACVDINECDEAEAASPLCVNARCLNTDGSFRCICRPGFAPTHQPHHCAPARPRA

SEQ ID NO: 891898 - protein, 1492 aa, Homo sapiens
MPRPGTSGRRPLLLVLLLPLFAAATSAASPSPSPSQVVEVPGVPSRPASVAVCRCCPGQTSRRSRCIRAFCRVRSCQPKKCAGPQRCLNPVPAVPSPSPSVRKRQVSLNWQPLTLQEARALLKRRRPRGPGGRGLLRRRPPQRAPAGKAPVLCPLICHNGGVCVKPDRCLCPPDFAGKFCQLHSSGARPPAPAVPGLTRSVYTMPLANHRDDEHGVASMVSVHVEHPQEASVVVHQVERVSGPWEEADAEAVARAEAAARAEAAAPYTVLAQSAPREDGYSDASGFGYCFRELRGGECASPLPGLRTQEVCCRGAGLAWGVHDCQLCSERLGNSERVSAPDGPCPTGFERVNGSCEDVDECATGGRCQHGECANTRGGYTCVCPDGFLLDSSRSSCISQHVISEAKGPCFRVLRDGGCSLPILRNITKQICCCSRVGKAWGRGCQLCPPFGSEGFREICPAGPGYHYSASDLRYNTRPLGQEPPRVSLSQPRTLPATSRPSAGFLPTHRLEPRPEPRPDPRPGPELPLPSIPAWTGPEIPESGPSSGMCQRNPQVCGPGRCISRPSGYTCACDSGFRLSPQGTRCIDVDECRRVPPPCAPGRCENSPGSFRCVCGPGFRAGPRAAECLDVDECHRVPPPCDLGRCENTPGSFLCVCPAGYQAAPHGASCQDVDECTQSPGLCGRGACKNLPGSFRCVCPAGFRGSACEEDVDECAQEPPPCGPGRCDNTAGSFHCACPAGFRSRGPGAPCQDVDECARSPPPCTYGRCENTEGSFQCVCPMGFQPNTAGSECEDVDECENHLACPGQECVNSPGSFQCRTCPSGHHLHRGRCTDVDECSSGAPPCGPHGHCTNTEGSFRCSCAPGYRAPSGRPGPCADVNECLEGDFCFPHGECLNTDGSFACTCAPGYRPGPRGASCLDVDECSEEDLCQSGICTNTDGSFECICPPGHRAGPDLASCLDVDECRERGPALCGSQRCENSPGSYRCVRDCDPGYHAGPEGTCDDVNECETLQGVCGAALCENVEGSFLCVCPNSPEEFDPMTGRCVPPRTSAGTFPGSQPQAPASPVLPARPPPPPLPRRPSTPRQGPVGSGRRECYFDTAAPDACDNILARNVTWQECCCTVGEGWGSGCRIQQCPGTETAEYQSLCPHGRGYLAPSGDLSLRRDVDECQLFRDQVCKSGVCVNTAPGYSCYCSNGYYYHTQRLECIDNDECADEEPACEGGRCVNTVGSYHCTCEPPLVLDGSQRRCVSNESQSLDDNLGVCWQEVGADLVCSHPRLDRQATYTECCCLYGEAWGMDCALCPAQDSDDFEALCNVLRPPAYSPPRPGGFGLPYEYGPDLGPPYQGLPYGPELYPPPALPYDPYPPPPGPFARREAPYGAPRFDMPDFEDDGGPYGESEAEECGILDGCTNGRCVRVPEGFTCRCFDGYRLDMTRMACVDINECDEAEAASPLCVNARCLNTDGSFRCICRPGFAPTHQPHHCAPARPRA

SEQ ID NO: 891899 - protein, 809 aa, Homo sapiens; identical to SEQ ID NO: 891896

SEQ ID NO: 891900 - protein, 1438 aa, Homo sapiens
  misc_feature (1343)..(1343): Xaa can be any naturally occurring amino acid
MPRPGTSGRRPLLLVLLLPLFAAATSAASPSPSPSQVVEVPGVPSRPASVAVCRCCPGQTSRRSRCIRAFCRVRSCQPKKCAGPQRCLNPVPAVPSPSPSVRKRQVSLNWQPLTLQEARALLKRRRPRGPGGRGLLRRRPPQRAPAGKAPVLCPLICHNGGVCVKPDRCLCPPDFAGKFCQLHSSGARPPAPAVPGLTRSVYTMPLANHRDDEHGVASMVSVHVEHPQEASVVVHQVERVSGPWEEADAEAVARAEAAARAEAAAPYTVLAQSAPREDGYSDASGFGYCFRELRGGECASPLPGLRTQEVCCRGAGLAWGVHDCQLCSERLGNSERVSAPDGPCPTGFERVNGSCEDVDECATGGRCQHGECANTRGGYTCVCPDGFLLDSSRSSCISQHVISEAKGPCFRVLRDGGCSLPILRNITKQICCCSRVGKAWGRGCQLCPPFGSEGFREICPAGPGYHYSASDLRYNTRPLGQEPPRVSLSQPRTLPATSRPSAGFLPTHRLEPRPEPRPDPRPGPELPLPSIPAWTGPEIPESGPSSGMCQRNPQVCGPGRCISRPSGYTCACDSGFRLSPQGTRCIDVDECRRVPPPCAPGRCENSPGSFRCVCGPGFRAGPRAAECLDVDECHRVPPPCDLGRCENTPGSFLCVCPAGYQAAPHGASCQDVDECTQSPGLCGRGACKNLPGSFRCVCPAGFRGSACEEDVDECAQEPPPCGPGRCDNTAGSFHCACPAGFRSRGPGAPCQDVDECARSPPPCTYGRCENTEGSFQCVCPMGFQPNTAGSECEDVDECENHLACPGQECVNSPGSFQCRTCPSGHHLHRGRCTDVDECSSGAPPCGPHGHCTNTEGSFRCSCAPGYRAPSGRPGPCADVNECLEGDFCFPHGECLNTDGSFACTCAPGYRPGPRGASCLDVDECSEEDLCQSGICTNTDGSFECICPPGHRAGPDLASCLDVDECRERGPALCGSQRCENSPGSYRCVRDCDPGYHAGPEGTCDDVNECETLQGVCGAALCENVEGSFLCVCPNSPEEFDPMTGRCVPPRTSAGTFPGSQPQAPASPVLPARPPPPPLPRRPSTPRQGPVGSGRRECYFDTAAPDACDNILARNVTWQECCCTVGEGWGSGCRIQQCPGTETAEYQSLCPHGRGYLAPSGDLSLRRDVDECQLFRDQVCKSGVCVNTAPGYSCYCSNGYYYHTQRLECIDNDECADEEPACEGGRCVNTVGSYHCTCEPPLVLDGSQRRCVSNESQSLDDNLGVCWQEVGADLVCSHPRLDRQATYTECCCLYGEAWGMDCALCPAQDSDDFEALCNVLRPPAYSPPRPGGFGLPVGPQPSWXGHEEAMGGTGRNRWGYGVQDEEEGRDAGTDTPSLESLGTEGGVGGSDSLRPASSCPRVGGGGRVVGVCGGVHTRSPNPTDPSFPQPRPLPQPGDR

SEQ ID NO: 891901 - protein, 1691 aa, Homo sapiens
MPRPGTSGRRPLLLVLLLPLFAAATSAASPSPSPSQVVEVPGVPSRPASVAVCRCCPGQTSRRSRCIRAFCRVRSCQPKKCAGPQRCLNPVPAVPSPSPSVRKRQVSLNWQPLTLQEARALLKRRRPRGPGGRGLLRRRPPQRAPAGKAPVLCPLICHNGGVCVKPDRCLCPPDFAGKFCQLHSSGARPPAPAVPGLTRSVYTMPLANHRDDEHGVASMVSVHVEHPQEASVVVHQVERVSGPWEEADAEAVARAEAAARAEAAAPYTVLAQSAPREDGYSDASGFGYCFRELRGGECASPLPGLRTQEVCCRGAGLAWGVHDCQLCSERLGNSERVSAPDGPCPTGFERVNGSCEDVDECATGGRCQHGECANTRGGYTCVCPDGFLLDSSRSSCISQHVISEAKGPCFRVLRDGGCSLPILRNITKQICCCSRVGKAWGRGCQLCPPFGSEGFREICPAGPGYHYSASDLRYNTRPLGQEPPRVSLSQPRTLPATSRPSAGFLPTHRLEPRPEPRPDPRPGPELPLPSIPAWTGPEIPESGPSSGMCQRNPQVCGPGRCISRPSGYTCACDSGFRLSPQGTRCIDVDECRRVPPPCAPGRCENSPGSFRCVCGPGFRAGPRAAECLDVDECHRVPPPCDLGRCENTPGSFLCVCPAGYQAAPHGASCQDVDECTQSPGLCGRGACKNLPGSFRCVCPAGFRGSACEEDVDECAQEPPPCGPGRCDNTAGSFHCACPAGFRSRGPGAPCQDVDECARSPPPCTYGRCENTEGSFQCVCPMGFQPNTAGSECEDVDECENHLACPGQECVNSPGSFQCRTCPSGHHLHRGRCTDVDECSSGAPPCGPHGHCTNTEGSFRCSCAPGYRAPSGRPGPCADVNECLEGDFCFPHGECLNTDGSFACTCAPGYRPGPRGASCLDVDECSEEDLCQSGICTNTDGSFECICPPGHRAGPDLASCLDVDECRERGPALCGSQRCENSPGSYRCVRDCDPGYHAGPEGTCDDVDECQEYGPEICGAQRCENTPGSYRCTPACDPGYQPTPGGGCQDVDECRNRSFCGAHAVCQNLPGSFQCLCDQGYEGARDGRHCVDVNECETLQGVCGAALCENVEGSFLCVCPNSPEEFDPMTGRCVPPRTSAGTFPGSQPQAPASPVLPARPPPPPLPRRPSTPRQGPVGSGRRECYFDTAAPDACDNILARNVTWQECCCTVGEGWGSGCRIQQCPGTETAEYQSLCPHGRGYLAPSGDLSLRRDVDECQLFRDQVCKSGVCVNTAPGYSCYCSNGYYYHTQRLECIGQAPPPPTPGNSLQPLALPAPLWNVATTSGKSFLESRLHPSHCQCAGKRNGKGWGELKGMPLNHPLPDNDECADEEPACEGGRCVNTVGSYHCTCEPPLVLDGSQRRCVSNESQSLDDNLGVCWQEVGADLVCSHPRLDRQATYTECCCLYGEAWGMDCALCPAQDSDDFEALCNVLRPPAYSPPRPGGFGLPYEYGPDLGPPYQGLPYGPELYPPPALPYDPYPPPPGPFARREAPYGAPRFDMPDFEDDGGPYGESEAPAPPGPGTRWPYRSRDTRRSFPEPEEPPEGGSYAGSLAEPYEELEAEECGILDGCTNGRCVRVPEGFTCRCFDGYRLDMTRMACVDINECDEAEAASPLCVNARCLNTDGSFRCICRPGFAPTHQPHHCAPARPRA

SEQ ID NO: 891902 - protein, 1600 aa, Homo sapiens
MPRPGTSGRRPLLLVLLLPLFAAATSAASPSPSPSQVVEVPGVPSRPASVAVCRCCPGQTSRRSRCIRAFCRVRSCQPKKCAGPQRCLNPVPAVPSPSPSVRKRQVSLNWQPLTLQEARALLKRRRPRGPGGRGLLRRRPPQRAPAGKAPVLCPLICHNGGVCVKPDRCLCPPDFAGKFCQLHSSGARPPAPAVPGLTRSVYTMPLANHRDDEHGVASMVSVHVEHPQEASVVVHQVERVSGPWEEADAEAVARAEAAARAEAAAPYTVLAQSAPREDGYSDASGFGYCFRELRGGECASPLPGLRTQEVCCRGAGLAWGVHDCQLCSERLGNSERVSAPDGPCPTGFERVNGSCEDVDECATGGRCQHGECANTRGGYTCVCPDGFLLDSSRSSCISQHVISEAKGPCFRVLRDGGCSLPILRNITKQICCCSRVGKAWGRGCQLCPPFGSEGFREICPAGPGYHYSASDLRYNTRPLGQEPPRVSLSQPRTLPATSRPSAGFLPTHRLEPRPEPRPDPRPGPELPLPSIPAWTGPEIPESGPSSGMCQRNPQVCGPGRCISRPSGYTCACDSGFRLSPQGTRCIDVDECRRVPPPCAPGRCENSPGSFRCVCGPGFRAGPRAAECLDVDECHRVPPPCDLGRCENTPGSFLCVCPAGYQAAPHGASCQDVDECTQSPGLCGRGACKNLPGSFRCVCPAGFRGSACEEDVDECAQEPPPCGPGRCDNTAGSFHCACPAGFRSRGPGAPCQDVDECARSPPPCTYGRCENTEGSFQCVCPMGFQPNTAGSECEDVDECENHLACPGQECVNSPGSFQCRTCPSGHHLHRGRCTDVDECSSGAPPCGPHGHCTNTEGSFRCSCAPGYRAPSGRPGPCADVNECLEGDFCFPHGECLNTDGSFACTCAPGYRPGPRGASCLDVDECSEEDLCQSGICTNTDGSFECICPPGHRAGPDLASCLDVDECRERGPALCGSQRCENSPGSYRCVRDCDPGYHAGPEGTCDDVDECQEYGPEICGAQRCENTPGSYRCTPACDPGYQPTPGGGCQDVDECRNRSFCGAHAVCQNLPGSFQCLCDQGYEGARDGRHCVDVNECETLQGVCGAALCENVEGSFLCVCPNSPEEFDPMTGRCVPPRTSAGTFPGSQPQAPASPVLPARPPPPPLPRRPSTPRQGPVGSGRRECYFDTAAPDACDNILARNVTWQECCCTVGEGWGSGCRIQQCPGTETDVDECQLFRDQVCKSGVCVNTAPGYSCYCSNGYYYHTQRLECIDNDECADEEPACEGGRCVNTVGSYHCTCEPPLVLDGSQRRCVSNESQSLDDNLGVCWQEVGADLVCSHPRLDRQATYTECCCLYGEAWGMDCALCPAQDSDDFEALCNVLRPPAYSPPRPGGFGLPYEYGPDLGPPYQGLPYGPELYPPPALPYDPYPPPPGPFARREAPYGAPRFDMPDFEDDGGPYGESEAPAPPGPGTRWPYRSRDTRRSFPEPEEPPEGGSYAGSLAEPYEELEAEECGILDGCTNGRCVRVPEGFTCRCFDGYRLDMTRMACVDINECDEAEAASPLCVNARCLNTDGSFRCICRPGFAPTHQPHHCAPARPRA

SEQ ID NO: 891903 - protein, 1467 aa, Homo sapiens
MPRPGTSGRRPLLLVLLLPLFAAATSAASPSPSPSQVVEVPGVPSRPASVAVCRCCPGQTSRRSRCIRAFCRVRSCQPKKCAGPQRCLNPVPAVPSPSPSVRKRQVSLNWQPLTLQEARALLKRRRPRGPGGRGLLRRRPPQRAPAGKAPVLCPLICHNGGVCVKPDRCLCPPDFAGKFCQLHSSGARPPAPAVPGLTRSVYTMPLANHRDDEHGVASMVSVHVEHPQEASVVVHQVERVSGPWEEADAEAVARAEAAARAEAAAPYTVLAQSAPREDGYSDASGFGYCFRELRGGECASPLPGLRTQEVCCRGAGLAWGVHDCQLCSERLGNSERVSAPDGPCPTGFERVNGSCEDVDECATGGRCQHGECANTRGGYTCVCPDGFLLDSSRSSCISQHVISEAKGPCFRVLRDGGCSLPILRNITKQICCCSRVGKAWGRGCQLCPPFGSEGFREICPAGPGYHYSASDLRYNTRPLGQEPPRVSLSQPRTLPATSRPSAGFLPTHRLEPRPEPRPDPRPGPELPLPSIPAWTGPEIPESGPSSGMCQRNPQVCGPGRCISRPSGYTCACDSGFRLSPQGTRCIDVDECRRVPPPCAPGRCENSPGSFRCVCGPGFRAGPRAAECLDVDECHRVPPPCDLGRCENTPGSFLCVCPAGYQAAPHGASCQDVDECTQSPGLCGRGACKNLPGSFRCVCPAGFRGSACEEDVDECAQEPPPCGPGRCDNTAGSFHCACPAGFRSRGPGAPCQDVDECARSPPPCTYGRCENTEGSFQCVCPMGFQPNTAGSECEDVDECENHLACPGQECVNSPGSFQCRTCPSGHHLHRGRCTDVDECSSGAPPCGPHGHCTNTEGSFRCSCAPGYRAPSGRPGPCADVNECLEGDFCFPHGECLNTDGSFACTCAPGYRPGPRGASCLDVDECSEEDLCQSGICTNTDGSFECICPPGHRAGPDLASCLDVDECRERGPALCGSQRCENSPGSYRCVRDCDPGYHAGPEGTCDDVDECRNRSFCGAHAVCQNLPGSFQCLCDQGYEGARDGRHCVDVNECETLQGVCGAALCENVEGSFLCVCPNSPEEFDPMTGRCVPPRTSADVDECQLFRDQVCKSGVCVNTAPGYSCYCSNGYYYHTQRLECIDNDECADEEPACEGGRCVNTVGSYHCTCEPPLVLDGSQRRCVSNESQSLDDNLGVCWQEVGADLVCSHPRLDRQATYTECCCLYGEAWGMDCALCPAQDSDDFEALCNVLRPPAYSPPRPGGFGLPYEYGPDLGPPYQGLPYGPELYPPPALPYDPYPPPPGPFARREAPYGAPRFDMPDFEDDGGPYGESEAPAPPGPGTRWPYRSRDTRRSFPEPEEPPEGGSYAGSLAEPYEELEAEECGILDGCTNGRCVRVPEGFTCRCFDGYRLDMTRMACVDINECDEAEAASPLCVNARCLNTDGSFRCICRPGFAPTHQPHHCAPARPRA

SEQ ID NO: 891904 - protein, 857 aa, Homo sapiens
MPRPGTSGRRPLLLVLLLPLFAAATSAASPSPSPSQVVEVPGVPSRPASVAVCRCCPGQTSRRSRCIRAFCRVRSCQPKKCAGPQRCLNPVPAVPSPSPSVRKRQVSLNWQPLTLQEARALLKRRRPRGPGGRGLLRRRPPQRAPAGKAPVLCPLICHNGGVCVKPDRCLCPPDFAGKFCQLHSSGARPPAPAVPGLTRSVYTMPLANHRDDEHGVASMVSVHVEHPQEASVVVHQVERVSGPWEEADAEAVARAEAAARAEAAAPYTVLAQSAPREDGYSDASGFGYCFRELRGGECASPLPGLRTQEVCCRGAGLAWGVHDCQLCSERLGNSERVSAPDGPCPTGFERVNGSCEDVDECATGGRCQHGECANTRGGYTCVCPDGFLLDSSRSSCISQHVISEAKGPCFRVLRDGGCSLPILRNITKQICCCSRVGKAWGRGCQLCPPFGSEGFREICPAGPGYHYSASDLLYLAPSGDLSLRRDVDECQLFRDQVCKSGVCVNTAPGYSCYCSNGYYYHTQRLECIDNDECADEEPACEGGRCVNTVGSYHCTCEPPLVLDGSQRRCVSNESQSLDDNLGVCWQEVGADLVCSHPRLDRQATYTECCCLYGEAWGMDCALCPAQDSDDFEALCNVLRPPAYSPPRPGGFGLPYEYGPDLGPPYQGLPYGPELYPPPALPYDPYPPPPGPFARREAPYGAPRFDMPDFEDDGGPYGESEAPAPPGPGTRWPYRSRDTRRSFPEPEEPPEGGSYAGSLAEPYEELEAEECGILDGCTNGRCVRVPEGFTCRCFDGYRLDMTRMACVDINECDEAEAASPLCVNARCLNTDGSFRCICRPGFAPTHQPHHCAPARPRA

SEQ ID NO: 891905 - protein, 479 aa, Homo sapiens
  misc_feature (3)..(3): Xaa can be any naturally occurring amino acid
KLXPLAINPNPGAESQDVDECRNRSFCGAHAVCQNLPGSFQCLCDQGYEGARDGRHCVDVNECETLQGVCGAALCENVEGSFLCVCPNSPEEFDPMTGRCVPPRTSADVDECQLFRDQVCKSGVCVNTAPGYSCYCSNGYYYHTQRLECIDNDECADEEPACEGGRCVNTVGSYHCTCEPPLVLDGSQRRCVSNESQSLDDNLGVCWQEVGADLVCSHPRLDRQATYTECCCLYGEAWGMDCALCPAQDSDDFEALCNVLRPPAYSPPRPGGFGLPYEYGPDLGPPYQGLPYGPELYPPPALPYDPYPPPPGPFARREAPYGAPRFDMPDFEDDGGPYGESEAPAPPGPGTRWPYRSRDTRRSFPEPEEPPEGGSYAGSLAEPYEELEAEECGILDGCTNGRCVRVPEGFTCRCFDGYRLDMTRMACVDINECDEAEAASPLCVNARCLNTDGSFRCICRPGFAPTHQPHHCAPARPRA

SEQ ID NO: 891906 - protein, 152 aa, Homo sapiens [sequence omitted]

SEQ ID NO: 891907 - protein, 924 aa, Homo sapiens
MPRPGTSGRRPLLLVLLLPLFAAATSAASPSPSPSQVVEVPGVPSRPASVAVCRCCPGQTSRRSRCIRAFCRVRSCQPKKCAGPQRCLNPVPAVPSPSPSVRKRQVSLNWQPLTLQEARALLKRRRPRGPGGRGLLRRRPPQRAPAGKAPVLCPLICHNGGVCVKPDRCLCPPDFAGKFCQLHSSGARPPAPAVPGLTRSVYTMPLANHRDDEHGVASMVSVHVEHPQEASVVVHQVERVSGPWEEADAEAVARAEAAARAEAAAPYTVLAQSAPREDGYSDASGFGYCFRELRGGECASPLPGLRTQEVCCRGAGLAWGVHDCQLCSERLGNSERVSAPDGPCPTGFERVNGSCEDVDECATGGRCQHGECANTRGGYTCVCPDGFLLDSSRSSCISQHVISEAKGPCFRVLRDGGCSLPILRNITKQICCCSRVGKAWGRGCQLCPPFGSEGFREICPAGPGYHYSASDLRYNTRPLGQEPPRVSLSQPRTLPATSRPSAGFLPTHRLEPRPEPRPDPRPGPELPLPSIPAWTGPEIPESGPSSGMCQRNPQVCGPGRCISRPSGYTCACDSGFRLSPQGTRCIDVDECRRVPPPCAPGRCENSPGSFRCVCGPGFRAGPRAAECLDVDECHRVPPPCDLGRCENTPGSFLCVCPAGYQAAPHGASCQDVDECTQSPGLCGRGACKNLPGSFRCVCPAGFRGSACEEDVDECAQEPPPCGPGRCDNTAGSFHCACPAGFRSRGPGAPCQDVDECARSPPPCTYGRCENTEGSFQCVCPMGFQPNTAGSECEDVDECENHLACPGQECVNSPGSFQCRTCPSGHHLHRGRCTDVDECSSGAPPCGPHGHCTNTEGSFRCSCAPGYRAPSGRPGPCADVNECLEGDFCFPHGECLNTDGSFACTCAPGYRPGPRGASCLGSYPG

SEQ ID NO: 891908 - protein, 112 aa, Homo sapiens
CDWREVRSPWLDCGESESASGGGGGGGRGGAGASLTRWTDRPPGAGLGARHDAEAWHQRPPPPPAGAVAAALRSRHLRRQPQPQPQPGRRGPGGPQPPGQVSPLLPCAPSTQ

SEQ ID NO: 891909 - protein, 1682 aa, Homo sapiens
CDWREVRSPWLDCGESESASGGGGGGGRGGAGASLTRWTDRPPGAGLGARHDAEAWQPAAAAPSCWCCCCRSSQPPPPPPAPAPAPARSSRSRGSPAARPALLFVAAARARRLGGAAASESLAVSEAFCRVRSCQPKKCAGPQRCLNPVPAVPSPSPSVRKRQVSLNWQPLTLQEARALLKRRRPRGPGGRGLLRRRPPQRAPAGKAPVLCPLICHNGGVCVKPDRCLCPPDFAGKFCQLHSSGARPPAPAVPGLTRSVYTMPLANHRDDEHGVASMVSVHVEHPQEASVVVHQVERVSGPWEEADAEAVARAEAAARAEAAAPYTVLAQSAPREDGYSDASGFGYCFRELRGGECASPLPGLRTQEVCCRGAGLAWGVHDCQLCSERLGNSERVSAPDGPCPTGFERVNGSCEDVDECATGGRCQHGECANTRGGYTCVCPDGFLLDSSRSSCISQHVISEAKGPCFRVLRDGGCSLPILRNITKQICCCSRVGKAWGRGCQLCPPFGSEGFREICPAGPGYHYSASDLRYNTRPLGQEPPRVSLSQPRTLPATSRPSAGFLPTHRLEPRPEPRPDPRPGPELPLPSIPAWTGPEIPESGPSSGMCQRNPQVCGPGRCISRPSGYTCACDSGFRLSPQGTRCIDVDECRRVPPPCAPGRCENSPGSFRCVCGPGFRAGPRAAECLDVDECHRVPPPCDLGRCENTPGSFLCVCPAGYQAAPHGASCQDVDECTQSPGLCGRGACKNLPGSFRCVCPAGFRGSACEEDVDECAQEPPPCGPGRCDNTAGSFHCACPAGFRSRGPGAPCQDVDECARSPPPCTYGRCENTEGSFQCVCPMGFQPNTAGSECEDVDECENHLACPGQECVNSPGSFQCRTCPSGHHLHRGRCTDVDECSSGAPPCGPHGHCTNTEGSFRCSCAPGYRAPSGRPGPCADVNECLEGDFCFPHGECLNTDGSFACTCAPGYRPGPRGASCLDVDECSEEDLCQSGICTNTDGSFECICPPGHRAGPDLASCLDVDECRERGPALCGSQRCENSPGSYRCVRDCDPGYHAGPEGTCDDVDECQEYGPEICGAQRCENTPGSYRCTPACDPGYQPTPGGGCQDVDECRNRSFCGAHAVCQNLPGSFQCLCDQGYEGARDGRHCVDVNECETLQGVCGAALCENVEGSFLCVCPNSPEEFDPMTGRCVPPRTSAGTFPGSQPQAPASPVLPARPPPPPLPRRPSTPRQGPVGSGRRECYFDTAAPDACDNILARNVTWQECCCTVGEGWGSGCRIQQCPGTETAEYQSLCPHGRGYLAPSGDLSLRRDVDECQLFRDQVCKSGVCVNTAPGYSCYCSNGYYYHTQRLECIDNDECADEEPACEGGRCVNTVGSYHCTCEPPLVLDGSQRRCVSNESQSLDDNLGVCWQEVGADLVCSHPRLDRQATYTECCCLYGEAWGMDCALCPAQDSDDFEALCNVLRPPAYSPPRPGGFGLPYEYGPDLGPPYQGLPYGPELYPPPALPYDPYPPPPGPFARREAPYGAPRFDMPDFEDDGGPYGESEAPAPPGPGTRWPYRSRDTRRSFPEPEEPPEGGSYAGSLAEPYEELEAEECGILDGCTNGRCVRVPEGFTCRCFDGYRLDMTRMACVDINECDEAEAASPLCVNARCLNTDGSFRCICRPGFAPTHQPHHCAPARPRA

SEQ ID NO: 891910 - protein, 1498 aa, Homo sapiens
PPANAPATGVAVCRCCPGQTSRRSRCIRAFCRVRSCQPKKCAGPQRCLNPVPAVPSPSPSVRKRQVSLNWQPLTLQEARALLKRRRPRGPGGRGLLRRRPPQRAPAGKAPVLCPLICHNGGVCVKPDRCLCPPDFAGKFCQLHSSGARPPAPAVPGLTRSVYTMPLANHRDDEHGVASMVSVHVEHPQEASVVVHQVERVSGPWEEADAEAVARAEAAARAEAAAPYTVLAQSAPREDGYSDASGFGYCFRELRGGECASPLPGLRTQEVCCRGAGLAWGVHDCQLCSERLGNSERVSAPDGPCPTGFERVNGSCEDVDECATGGRCQHGECANTRGGYTCVCPDGFLLDSSRSSCISQHVISEAKGPCFRVLRDGGCSLPILRNITKQICCCSRVGKAWGRGCQLCPPFGSEGFREICPAGPGYHYSASDLRYNTRPLGQEPPRVSLSQPRTLPATSRPSAGFLPTHRLEPRPEPRPDPRPGPELPLPSIPAWTGPEIPESGPSSGMCQRNPQVCGPGRCISRPSGYTCACDSGFRLSPQGTRCIDVDECRRVPPPCAPGRCENSPGSFRCVCGPGFRAGPRAAECLDVDECHRVPPPCDLGRCENTPGSFLCVCPAGYQAAPHGASCQDVDECTQSPGLCGRGACKNLPGSFRCVCPAGFRGSACEEDVDECAQEPPPCGPGRCDNTAGSFHCACPAGFRSRGPGAPCQDVDECARSPPPCTYGRCENTEGSFQCVCPMGFQPNTAGSECEDVDECENHLACPGQECVNSPGSFQCRTCPSGHHLHRGRCTDVDECSSGAPPCGPHGHCTNTEGSFRCSCAPGYRAPSGRPGPCADVNECLEGDFCFPHGECLNTDGSFACTCAPGYRPGPRGASCLDVDECSEEDLCQSGICTNTDGSFECICPPGHRAGPDLASCLDVDECRERGPALCGSQRCENSPGSYRCVRDCDPGYHAGPEGTCDDVNECETLQGVCGAALCENVEGSFLCVCPNSPEEFDPMTGRCVPPRTSAGTFPGSQPQAPASPVLPARPPPPPLPRRPSTPRQGPVGSGRRECYFDTAAPDACDNILARNVTWQECCCTVGEGWGSGCRIQQCPGTETAEYQSLCPHGRGYLAPSGDLSLRRDVDECQLFRDQVCKSGVCVNTAPGYSCYCSNGYYYHTQRLECIDNDECADEEPACEGGRCVNTVGSYHCTCEPPLVLDGSQRRCVSNESQSLDDNLGVCWQEVGADLVCSHPRLDRQATYTECCCLYGEAWGMDCALCPAQDSDDFEALCNVLRPPAYSPPRPGGFGLPYEYGPDLGPPYQGLPYGPELYPPPALPYDPYPPPPGPFARREAPYGAPRFDMPDFEDDGGPYGESEAPAPPGPGTRWPYRSRDTRRSFPEPEEPPEGGSYAGSLAEPYEELEAEECGILDGCTNGRCVRVPEGFTCRCFDGYRLDMTRMACVDINECDEAEAASPLCVNARCLNTDGSFRCICRPGFAPTHQPHHCAPARPRA

SEQ ID NO: 891911 - protein, 1580 aa, Homo sapiens
MPRPGTSGRRPLLLVLLLPLFAAATSAASPSPSPSQVVEVPGVPSRPASVAVCRCCPGQTSRRSRCIRAFCRVRSCQPKKCAGPQRCLNPVPAVPSPSPSVRKRQVSLNWQPLTLQEARALLKRRRPRGPGGRGLLRRRPPQRAPAGKAPVLCPLICHNGGVCVKPDRCLCPPDFAGKFCQLHSSGARPPAPAVPGLTRSVYTMPLANHRDDEHGVASMVSVHVEHPQEASVVVHQVERVSGPWEEADAEAVARAEAAARAEAAAPYTVLAQSAPREDGYSDASGFGYCFRELRGGECASPLPGLRTQEVCCRGAGLAWGVHDCQLCSERLGNSERVSAPDGPCPTGFERVNGSCEDVDECATGGRCQHGECANTRGGYTCVCPDGFLLDSSRSSCISQHVISEAKGPCFRVLRDGGCSLPILRNITKQICCCSRVGKAWGRGCQLCPPFGSEGFREICPAGPGYHYSASDLRYNTRPLGQEPPRVSLSQPRTLPATSRPSAGFLPTHRLEPRPEPRPDPRPGPELPLPSIPAWTGPEIPESGPSSGMCQRNPQVCGPGRCISRPSGYTCACDSGFRLSPQGTRCIDVDECRRVPPPCAPGRCENSPGSFRCVCGPGFRAGPRAAECLDVDECHRVPPPCDLGRCENTPGSFLCVCPAGYQAAPHGASCQDVDECTQSPGLCGRGACKNLPGSFRCVCPAGFRGSACEEDVDECAQEPPPCGPGRCDNTAGSFHCACPAGFRSRGPGAPCQDVDECARSPPPCTYGRCENTEGSFQCVCPMGFQPNTAGSECEDVDECENHLACPGQECVNSPGSFQCRTCPSGHHLHRGRCTDVDECSSGAPPCGPHGHCTNTEGSFRCSCAPGYRAPSGRPGPCADVNECLEGDFCFPHGECLNTDGSFACTCAPGYRPGPRGASCLDVDECSEEDLCQSGICTNTDGSFECICPPGHRAGPDLASCLDVDECRERGPALCGSQRCENSPGSYRCVRDCDPGYHAGPEGTCDDVDECRNRSFCGAHAVCQNLPGSFQCLCDQGYEGARDGRHCVDVNECETLQGVCGAALCENVEGSFLCVCPNSPEEFDPMTGRCVPPRTSAGTFPGSQPQAPASPVLPARPPPPPLPRRPSTPRQGPVGSGRRECYFDTAAPDACDNILARNVTWQECCCTVGEGWGSGCRIQQCPGTETAEYQSLCPHGRGYLAPSGDLSLRRDVDECQLFRDQVCKSGVCVNTAPGYSCYCSNGYYYHTQRLECIDNDECADEEPACEGGRCVNTVGSYHCTCEPPLVLDGSQRRCVSNESQSLDDNLGVCWQEVGADLVCSHPRLDRQATYTECCCLYGEAWGMDCALCPAQDSDDFEALCNVLRPPAYSPPRPGGFGLPYEYGPDLGPPYQGLPYGPELYPPPALPYDPYPPPPGPFARREAPYGAPRFDMPDFEDDGGPYGESEAPAPPGPGTRWPYRSRDTRRSFPEPEEPPEGGSYAGSLAEPYEELEAEECGILDGCTNGRCVRVPEGFTCRCFDGYRLDMTRMACVDINECDEAEAASPLCVNARCLNTDGSFRCICRPGFAPTHQPHHCAPARPRA

SEQ ID NO: 891912 - protein, 1666 aa, Homo sapiens
MPRPGTSGRRPLLLVLLLPLFAAATSAASPSPSPSQVVEVPGVPSRPASVAVCRCCPGQTSRRSRCIRAFCRVRSCQPKKCAGPQRCLNPVPAVPSPSPSVRKRQVSLNWQPLTLQEARALLKRRRPRGPGGRGLLRRRPPQRAPAGKAPVLCPLICHNGGVCVKPDRCLCPPDFAGKFCQLHSSGARPPAPAVPGLTRSVYTMPLANHRDDEHGVASMVSVHVEHPQEASVVVHQVERVSGPWEEADAEAVARAEAAARAEAAAPYTVLAQSAPREDGYSDASGFGYCFRELRGGECASPLPGLRTQEVCCRGAGLAWGVHDCQLCSERLGNSERVSAPDGPCPTGFERVNGSCEDVDECATGGRCQHGECANTRGGYTCVCPDGFLLDSSRSSCISQHVISEAKGPCFRVLRDGGCSLPILRNITKQICCCSRVGKAWGRGCQLCPPFGSEGFREICPAGPGYHYSASDLRYNTRPLGQEPPRVSLSQPRTLPATSRPSAGFLPTHRLEPRPEPRPDPRPGPELPLPSIPAWTGPEIPESGPSSGMCQRNPQVCGPGRCISRPSGYTCACDSGFRLSPQGTRCIDVDECRRVPPPCAPGRCENSPGSFRCVCGPGFRAGPRAAECLDVDECHRVPPPCDLGRCENTPGSFLCVCPAGYQAAPHGASCQDVDECTQSPGLCGRGACKNLPGSFRCVCPAGFRGSACEEDVDECAQEPPPCGPGRCDNTAGSFHCACPAGFRSRGPGAPCQDVDECARSPPPCTYGRCENTEGSFQCVCPMGFQPNTAGSECEDVDECENHLACPGQECVNSPGSFQCRTCPSGHHLHRGRCTDVDECSSGAPPCGPHGHCTNTEGSFRCSCAPGYRAPSGRPGPCADVNECLEGDFCFPHGECLNTDGSFACTCAPGYRPGPRGASCLGSYRADPGPGKGGLRAGKGGTGRRGRKGENEFLAGVFQQDQGAAGGSLEAVRGGGAGDERAESGYLDRDCKEAVLNPSGGGVCREGSSVRQVGEGVRGLGEPRGGGGVWPRMLGGAGGGPGLRTPCPADVDECSEEDLCQSGICTNTDGSFECICPPGHRAGPDLASCLDVDECRERGPALCGSQRCENSPGSYRCVRDCDPGYHAGPEGTCDDVNECETLQGVCGAALCENVEGSFLCVCPNSPEEFDPMTGRCVPPRTSAGTFPGSQPQAPASPVLPARPPPPPLPRRPSTPRQGPVGSGRRECYFDTAAPDACDNILARNVTWQECCCTVGEGWGSGCRIQQCPGTETAEYQSLCPHGRGYLAPSGDLSLRRDVDECQLFRDQVCKSGVCVNTAPGYSCYCSNGYYYHTQRLECIDNDECADEEPACEGGRCVNTVGSYHCTCEPPLVLDGSQRRCVSNESQSLDDNLGVCWQEVGADLVCSHPRLDRQATYTECCCLYGEAWGMDCALCPAQDSDDFEALCNVLRPPAYSPPRPGGFGLPYEYGPDLGPPYQGLPYGPELYPPPALPYDPYPPPPGPFARREAPYGAPRFDMPDFEDDGGPYGESEAPAPPGPGTRWPYRSRDTRRSFPEPEEPPEGGSYAGSLAEPYEELEAEECGILDGCTNGRCVRVPEGFTCRCFDGYRLDMTRMACVDINECDEAEAASPLCVNARCLNTDGSFRCICRPGFAPTHQPHHCAPARPRA

SEQ ID NO: 891913 - protein, 1752 aa, Homo sapiens
MPRPGTSGRRPLLLVLLLPLFAAATSAASPSPSPSQVVEVPGVPSRPASVAVCRCCPGQTSRRSRCIRAFCRVRSCQPKKCAGPQRCLNPVPAVPSPSPSVRKRQVSLNWQPLTLQEARALLKRRRPRGPGGRGLLRRRPPQRAPAGKAPVLCPLICHNGGVCVKPDRCLCPPDFAGKFCQLHSSGARPPAPAVPGLTRSVYTMPLANHRDDEHGVASMVSVHVEHPQEASVVVHQVERVSGPWEEADAEAVARAEAAARAEAAAPYTVLAQSAPREDGYSDASGFGYCFRELRGGECASPLPGLRTQEVCCRGAGLAWGVHDCQLCSERLGNSERVSAPDGPCPTGFERVNGSCEDVDECATGGRCQHGECANTRGGYTCVCPDGFLLDSSRSSCISQHVISEAKGPCFRVLRDGGCSLPILRNITKQICCCSRVGKAWGRGCQLCPPFGSEGFREICPAGPGYHYSASDLRYNTRPLGQEPPRVSLSQPRTLPATSRPSAGFLPTHRLEPRPEPRPDPRPGPELPLPSIPAWTGPEIPESGPSSGMCQRNPQVCGPGRCISRPSGYTCACDSGFRLSPQGTRCIDVDECRRVPPPCAPGRCENSPGSFRCVCGPGFRAGPRAAECLDVDECHRVPPPCDLGRCENTPGSFLCVCPAGYQAAPHGASCQDVDECTQSPGLCGRGACKNLPGSFRCVCPAGFRGSACEEDVDECAQEPPPCGPGRCDNTAGSFHCACPAGFRSRGPGAPCQDVDECARSPPPCTYGRCENTEGSFQCVCPMGFQPNTAGSECEDVDECENHLACPGQECVNSPGSFQCRTCPSGHHLHRGRCTDVDECSSGAPPCGPHGHCTNTEGSFRCSCAPGYRAPSGRPGPCADVNECLEGDFCFPHGECLNTDGSFACTCAPGYRPGPRGASCLGSYRADPGPGKGGLRAGKGGTGRRGRKGENEFLAGVFQQDQGAAGGSLEAVRGGGAGDERAESGYLDRDCKEAVLNPSGGGVCREGSSVRQVGEGVRGLGEPRGGGGVWPRMLGGAGGGPGLRTPCPADVDECSEEDLCQSGICTNTDGSFECICPPGHRAGPDLASCLDVDECRERGPALCGSQRCENSPGSYRCVRDCDPGYHAGPEGTCDDVDECQEYGPEICGAQRCENTPGSYRCTPACDPGYQPTPGGGCQDVDECRNRSFCGAHAVCQNLPGSFQCLCDQGYEGARDGRHCVDVNECETLQGVCGAALCENVEGSFLCVCPNSPEEFDPMTGRCVPPRTSAGTFPGSQPQAPASPVLPARPPPPPLPRRPSTPRQGPVGSGRRECYFDTAAPDACDNILARNVTWQECCCTVGEGWGSGCRIQQCPGTETAEYQSLCPHGRGYLAPSGDLSLRRDVDECQLFRDQVCKSGVCVNTAPGYSCYCSNGYYYHTQRLECIDNDECADEEPACEGGRCVNTVGSYHCTCEPPLVLDGSQRRCVSNESQSLDDNLGVCWQEVGADLVCSHPRLDRQATYTECCCLYGEAWGMDCALCPAQDSDDFEALCNVLRPPAYSPPRPGGFGLPYEYGPDLGPPYQGLPYGPELYPPPALPYDPYPPPPGPFARREAPYGAPRFDMPDFEDDGGPYGESEAPAPPGPGTRWPYRSRDTRRSFPEPEEPPEGGSYAGSLAEPYEELEAEECGILDGCTNGRCVRVPEGFTCRCFDGYRLDMTRMACVDINECDEAEAASPLCVNARCLNTDGSFRCICRPGFAPTHQPHHCAPARPRA

SEQ ID NO: 891914 - protein, 597 aa, Homo sapiens
CVSKILSGLGTAAEACRLIDVDECQEYGPEICGAQRCENTPGSYRCTPACDPGYQPTPGGGCQDVNECETLQGVCGAALCENVEGSFLCVCPNSPEEFDPMTGRCVPPRTSAGTFPGSQPQAPASPVLPARPPPPPLPRRPSTPRQGPVGSGRRECYFDTAAPDACDNILARNVTWQECCCTVGEGWGSGCRIQQCPGTETAEYQSLCPHGRGYLAPSGDLSLRRDVDECQLFRDQVCKSGVCVNTAPGYSCYCSNGYYYHTQRLECIDNDECADEEPACEGGRCVNTVGSYHCTCEPPLVLDGSQRRCVSNESQSLDDNLGVCWQEVGADLVCSHPRLDRQATYTECCCLYGEAWGMDCALCPAQDSDDFEALCNVLRPPAYSPPRPGGFGLPYEYGPDLGPPYQGLPYGPELYPPPALPYDPYPPPPGPFARREAPYGAPRFDMPDFEDDGGPYGESEAPAPPGPGTRWPYRSRDTRRSFPEPEEPPEGGSYAGSLAEPYEELEAEECGILDGCTNGRCVRVPEGFTCRCFDGYRLDMTRMACVDINECDEAEAASPLCVNARCLNTDGSFRCICRPGFAPTHQPHHCAPARPRA

SEQ ID NO: 891915 - protein, 1485 aa, Homo sapiens
MPRPGTSGRRPLLLVLLLPLFAAATSAASPSPSPSQVVEVPGVPSRPASVAVCRCCPGQTSRRSRCIRAFCRVRSCQPKKCAGPQRCLNPVPAVPSPSPSVRKRQVSLNWQPLTLQEARALLKRRRPRGPGGRGLLRRRPPQRAPAGKAPVLCPLICHNGGVCVKPDRCLCPPDFAGKFCQLHSSGARPPAPAVPGLTRSVYTMPLANHRDDEHGVASMVSVHVEHPQEASVVVHQVERVSGPWEEADAEAVARAEAAARAEAAAPYTVLAQSAPREDGYSDASGFGYCFRELRGGECASPLPGLRTQEVCCRGAGLAWGVHDCQLCSERLGNSERVSAPDGPCPTGFERVNGSCEDVDECATGGRCQHGECANTRGGYTCVCPDGFLLDSSRSSCISQHVISEAKGPCFRVLRDGGCSLPILRNITKQICCCSRVGKAWGRGCQLCPPFGSEGFREICPAGPGYHYSASDLRYNTRPLGQEPPRVSLSQPRTLPATSRPSAGFLPTHRLEPRPEPRPDPRPGPELPLPSIPAWTGPEIPESGPSSGMCQRNPQVCGPGRCISRPSGYTCACDSGFRLSPQGTRCIDVDECRRVPPPCAPGRCENSPGSFRCVCGPGFRAGPRAAECLDVDECHRVPPPCDLGRCENTPGSFLCVCPAGYQAAPHGASCQDVDECTQSPGLCGRGACKNLPGSFRCVCPAGFRGSACEEDVDECAQEPPPCGPGRCDNTAGSFHCACPAGFRSRGPGAPCQDVDECARSPPPCTYGRCENTEGSFQCVCPMGFQPNTAGSECEDVDECENHLACPGQECVNSPGSFQCRTCPSGHHLHRGRCTDVDECSSGAPPCGPHGHCTNTEGSFRCSCAPGYRAPSGRPGPCADVNECLEGDFCFPHGECLNTDGSFACTCAPGYRPGPRGASCLDVDECSEEDLCQSGICTNTDGSFECICPPGHRAGPDLASCLDVDECRERGPALCGSQRCENSPGSYRCVRDCDPGYHAGPEGTCDDVNECETLQGVCGAALCENVEGSFLCVCPNSPEEFDPMTGRCVPPRTSAGTFPGSQPQAPASPVLPARPPPPPLPRRPSTPRQGPVGSGRRECYFDTAAPDACDNILARNVTWQECCCTVGEGWGSGCRIQQCPGTETAEYQSLCPHGRGYLAPSGDLSLRRDVDECQLFRDQVCKSGVCVNTAPGYSCYCSNGYYYHTQRLECIDNDECADEEPACEGGRCVNTVGSYHCTCEPPLVLDGSQRRCVSNESQSLDDNLGVCWQEVGADLVCSHPRLDRQATYTECCCLYGEAWGMDCALCPAQDSDDFEALCNVLRPPAYSPPRPGGFGLPYEYGPDLGPPVTMWTSVKHYRVYVELPCVKMSEGSFLSAAQQLGFHLCLMGWLANGSTAHPVVFPVADCGNGRVGVVSLGARKNLSERWDAYCFRVQDVACRCRNGFVGDGISTCNGKLLDVLAATANFSTFYGMLLGYANATQPGSRLS

SEQ ID NO: 891916 - protein, 809 aa, Homo sapiens; identical to SEQ ID NO: 891896

SEQ ID NO: 891917 - protein, 1621 aa, Homo sapiens
MPRPGTSGRRPLLLVLLLPLFAAATSAASPSPSPSQVVEVPGVPSRPASVAVCRCCPGQTSRRSRCIRAFCRVRSCQPKKCAGPQRCLNPVPAVPSPSPSVRKRQVSLNWQPLTLQEARALLKRRRPRGPGGRGLLRRRPPQRAPAGKAPVLCPLICHNGGVCVKPDRCLCPPDFAGKFCQLHSSGARPPAPAVPGLTRSVYTMPLANHRDDEHGVASMVSVHVEHPQEASVVVHQVERVSGPWEEADAEAVARAEAAARAEAAAPYTVLAQSAPREDGYSDASGFGYCFRELRGGECASPLPGLRTQEVCCRGAGLAWGVHDCQLCSERLGNSERVSAPDGPCPTGFERVNGSCEDVDECATGGRCQHGECANTRGGYTCVCPDGFLLDSSRSSCISQHVISEAKGPCFRVLRDGGCSLPILRNITKQICCCSRVGKAWGRGCQLCPPFGSEGFREICPAGPGYHYSASDLRYNTRPLGQEPPRVSLSQPRTLPATSRPSAGFLPTHRLEPRPEPRPDPRPGPELPLPSIPAWTGPEIPESGPSSGMCQRNPQVCGPGRCISRPSGYTCACDSGFRLSPQGTRCIDVDECRRVPPPCAPGRCENSPGSFRCVCGPGFRAGPRAAECLDVDECHRVPPPCDLGRCENTPGSFLCVCPAGYQAAPHGASCQDVDECTQSPGLCGRGACKNLPGSFRCVCPAGFRGSACEEDVDECAQEPPPCGPGRCDNTAGSFHCACPAGFRSRGPGAPCQDVDECARSPPPCTYGRCENTEGSFQCVCPMGFQPNTAGSECEDVDECENHLACPGQECVNSPGSFQCRTCPSGHHLHRGRCTDVDECSSGAPPCGPHGHCTNTEGSFRCSCAPGYRAPSGRPGPCADVNECLEGDFCFPHGECLNTDGSFACTCAPGYRPGPRGASCLDVDECSEEDLCQSGICTNTDGSFECICPPGHRAGPDLASCLDVDECRERGPALCGSQRCENSPGSYRCVRDCDPGYHAGPEGTCDDVDECQEYGPEICGAQRCENTPGSYRCTPACDPGYQPTPGGGCQDVDECRNRSFCGAHAVCQNLPGSFQCLCDQGYEGARDGRHCVDVNECETLQGVCGAALCENVEGSFLCVCPNSPEEFDPMTGRCVPPRTSAGTFPGSQPQAPASPVLPARPPPPPLPRRPSTPRQGPVGSGRRECYFDTAAPDACDNILARNVTWQECCCTVGEGWGSGCRIQQCPGTETELCPHRPVPHRRTRHYRCTPAAVCGSSSRCCNSMSSPGPCSHTRHPCTPGLGRASTFVHVSPEAQVSTGRQVAPACEGGRCVNTVGSYHCTCEPPLVLDGSQRRCVSNESQSLDDNLGVCWQEVGADLVCSHPRLDRQATYTECCCLYGEAWGMDCALCPAQDSDDFEALCNVLRPPAYSPPRPGGFGLPYEYGPDLGPPYQGLPYGPELYPPPALPYDPYPPPPGPFARREAPYGAPRFDMPDFEDDGGPYGESEAPAPPGPGTRWPYRSRDTRRSFPEPEEPPEGGSYAGSLAEPYEELEAEECGILDGCTNGRCVRVPEGFTCRCFDGYRLDMTRMACVDINECDEAEAASPLCVNARCLNTDGSFRCICRPGFAPTHQPHHCAPARPRA

SEQ ID NO: 891918 - protein, 1597 aa, Homo sapiens
MPRPGTSGRRPLLLVLLLPLFAAATSAASPSPSPSQVVEVPGVPSRPASVAVCRCCPGQTSRRSRCIRAFCRVRSCQPKKCAGPQRCLNPVPAVPSPSPSVRKRQVSLNWQPLTLQEARALLKRRRPRGPGGRGLLRRRPPQRAPAGKAPVLCPLICHNGGVCVKPDRCLCPPDFAGKFCQLHSSGARPPAPAVPGLTRSVYTMPLANHRDDEHGVASMVSVHVEHPQEASVVVHQVERVSGPWEEADAEAVARAEAAARAEAAAPYTVLAQSAPREDGYSDASGFGYCFRELRGGECASPLPGLRTQEVCCRGAGLAWGVHDCQLCSERLGNSERVSAPDGPCPTGFERVNGSCEDVDECATGGRCQHGECANTRGGYTCVCPDGFLLDSSRSSCISQHVISEAKGPCFRVLRDGGCSLPILRNITKQICCCSRVGKAWGRGCQLCPPFGSEGFREICPAGPGYHYSASDLRYNTRPLGQEPPRVSLSQPRTLPATSRPSAGFLPTHRLEPRPEPRPDPRPGPELPLPSIPAWTGPEIPESGPSSGMCQRNPQVCGPGRCISRPSGYTCACDSGFRLSPQGTRCIDVDECRRVPPPCAPGRCENSPGSFRCVCGPGFRAGPRAAECLDVDECHRVPPPCDLGRCENTPGSFLCVCPAGYQAAPHGASCQDVDECTQSPGLCGRGACKNLPGSFRCVCPAGFRGSACEEDVDECAQEPPPCGPGRCDNTAGSFHCACPAGFRSRGPGAPCQDVDECARSPPPCTYGRCENTEGSFQCVCPMGFQPNTAGSECEDVDECENHLACPGQECVNSPGSFQCRTCPSGHHLHRGRCTDVDECSSGAPPCGPHGHCTNTEGSFRCSCAPGYRAPSGRPGPCADVNECLEGDFCFPHGECLNTDGSFACTCAPGYRPGPRGASCLGSYRADPGPGKGGLRAGKGGTGRRGRKGENEFLAGVFQQDQGAAGGSLEAVRGGGAGDERAESGYLDRDCKEAVLNPSGGGVCREGSSVRQVGEGVRGLGEPRGGGGVWPRMLGGAGGGPGLRTPCPADVDECSEEDLCQSGICTNTDGSFECICPPGHRAGPDLASCLDVDECRERGPALCGSQRCENSPGSYRCVRDCDPGYHAGPEGTCDDVDECQEYGPEICGAQRCENTPGSYRCTPACDPGYQPTPGGGCQDVNECETLQGVCGAALCENVEGSFLCVCPNSPEEFDPMTGRCVPPRTSADVDECQLFRDQVCKSGVCVNTAPGYSCYCSNGYYYHTQRLECIDNDECADEEPACEGGRCVNTVGSYHCTCEPPLVLDGSQRRCVSNESQSLDDNLGVCWQEVGADLVCSHPRLDRQATYTECCCLYGEAWGMDCALCPAQDSDDFEALCNVLRPPAYSPPRPGGFGLPYEYGPDLGPPYQGLPYGPELYPPPALPYDPYPPPPGPFARREAPYGAPRFDMPDFEDDGGPYGESEAPAPPGPGTRWPYRSRDTRRSFPEPEEPPEGGSYAGSLAEPYEELEAEECGILDGCTNGRCVRVPEGFTCRCFDGYRLDMTRMACVDINECDEAEAASPLCVNARCLNTDGSFRCICRPGFAPTHQPHHCAPARPRA

SEQ ID NO: 891919 - protein, 453 aa, Homo sapiens
MRMCTGRPPGPGEEDYGRLEAATPCTCPASTSASHCCTVGEGWGSGCRIQQCPGTETAEYQSLCPHGRGYLAPSGDLSLRRDVDECQLFRDQVCKSGVCVNTAPGYSCYCSNGYYYHTQRLECIDNDECADEEPACEGGRCVNTVGSYHCTCEPPLVLDGSQRRCVSNESQSLDDNLGVCWQEVGADLVCSHPRLDRQATYTECCCLYGEAWGMDCALCPAQDSDDFEALCNVLRPPAYSPPRPGGFGLPYEYGPDLGPPYQGLPYGPELYPPPALPYDPYPPPPGPFARREAPYGAPRFDMPDFEDDGGPYGESEAPAPPGPGTRWPYRSRDTRRSFPEPEEPPEGGSYAGSLAEPYEELEAEECGILDGCTNGRCVRVPEGFTCRCFDGYRLDMTRMACVDINECDEAEAASPLCVNARCLNTDGSFRCICRPGFAPTHQPHHCAPARPRA

SEQ ID NO: 891920 - protein, 1102 aa, Homo sapiens
MPRPGTSGRRPLLLVLLLPLFAAATSAASPSPSPSQVVEVPGVPSRPASVAVCRCCPGQTSRRSRCIRAFCRVRSCQPKKCAGPQRCLNPVPAVPSPSPSVRKRQVSLNWQPLTLQEARALLKRRRPRGPGGRGLLRRRPPQRAPAGKAPVLCPLICHNGGVCVKPDRCLCPPDFAGKFCQLHSSGARPPAPAVPGLTRSVYTMPLANHRDDEHGVASMVSVHVEHPQEASVVVHQVERVSGPWEEADAEAVARAEAAARAEAAAPYTVLAQSAPREDGYSDASGFGYCFRELRGGECASPLPGLRTQEVCCRGAGLAWGVHDCQLCSERLGNSERVSAPDGPCPTGFERVNGSCEDVDECATGGRCQHGECANTRGGYTCVCPDGFLLDSSRSSCISQHVISEAKGPCFRVLRDGGCSLPILRNITKQICCCSRVGKAWGRGCQLCPPFGSEGFREICPAGPGYHYSASDLRYNTRPLGQEPPRVSLSQPRTLPATSRPSAGFLPTHRLEPRPEPRPDPRPGPELPLPSIPAWTGPEIPESGPSSGMCQRNPQVCGPGRCISRPSGYTCACDSGFRLSPQGTRCIDVDECRRVPPPCAPGRCENSPGSFRCVCGPGFRAGPRAAECLDVDECHRVPPPCDLGRCENTPGSFLCVCPAGYQAAPHGASCQDVDECTQSPGLCGRGACKNLPGSFRCVCPAGFRGSACEEDVDECAQEPPPCGPGRCDNTAGSFHCACPAGFRSRGPGAPCQDVDECARSPPPCTYGRCENTEGSFQCVCPMGFQPNTAGSECEDVDECENHLACPGQECVNSPGSFQCRTCPSGHHLHRGRCTDVDECSSGAPPCGPHGHCTNTEGSFRCSCAPGYRAPSGRPGPCADVNECLEGDFCFPHGECLNTDGSFACTCAPGYRPGPRGASCLDVDECSEEDLCQSGICTNTDGSFECICPPGHRAGPDLASCLDVDECRERGPALCGSQRCENSPGSYRCVRDCDPGYHAGPEGTCDDVDECRNRSFCGAHAVCQNLPGSFQCLCDQGYEGARDGRHCVDVNECETLQGVCGAALCENVEGSFLCVCPNSPEEFDPMTGRCVPPRTSAGETDVSI

SEQ ID NO: 891921 - protein, 567 aa, Homo sapiens
MPRPGTSGRRPLLLVLLLPLFAAATSAASPSPSPSQVVEVPGVPSRPASVAVCRCCPGQTSRRSRCIRAFCRVRSCQPKKCAGPQRCLNPVPAVPSPSPSVRKRQVSLNWQPLTLQEARALLKRRRPRGPGGRGLLRRRPPQRAPAGKAPVLCPLICHNGGVCVKPDRCLCPPDFAGKFCQLHSSGARPPAPAVPGLTRSVYTMPLANHRDDEHGVASMVSVHVEHPQEASVVVHQVERVSGPWEEADAEAVARAEAAARAEAAAPYTVLAQSAPREDGYSDASGFGYCFRELRGGECASPLPGLRTQEVCCRGAGLAWGVHDCQLCSERLGNSERVSAPDGPCPTGFERVNGSCEDVDECATGGRCQHGECANTRGGYTCVCPDGFLLDSSRSSCISQHVISEAKGPCFRVLRDGGCSLPILRNITKQICCCSRVGKAWGRGCQLCPPFGSEGFREICPAGPGYHYSASDLRYNTRPLGQEPPRVSLSQPRTLPATSRPSAGFLPTHRLEPRPEPRPDPRPGPELPLPSIPAWTGPEIPESGLLERTEGIGPAAVAHACNPSILGG

SEQ ID NO: 891922 - protein, 496 aa, Homo sapiens
MFAKATRNFLREVDADGDLIAVSNLNDSDKLQLLSLVTKKKRFWCWQRPKYQFLSLTLGDVLIEDQFPSPVVVESDFVKYEGKFANHVSGTLETALGKVKLNLGGSSRVESQSSFGTLRKQEVDLQQLIRDSAERTINLRNPVLQQVLEGRNEVLCVLTQKITTMQKCVISEHMQVEEKCGGIVGIQTKTVQVSATEDGNVTKDSNVVLEIPAATTIAYGVIELYVKLDGQFEFCLLRGKQGGFENKKRIDSVYLDPLVFREFAFIDMPDAAHGISSQDGPLSVLKQATLLLERNFHPFAELPEPQQTALSDIFQAVLFDDELLMVLEPVCDDLVSGLSPTVAVLGELKPRQQQDLVAFLQLVGCSLQGGCPGPEDAGSKQLFMTAYFLVSALAEMPDSAAALLGTCCKLQIIPTLCHLLRALSDDGVSDLEDPTLTPLKDTERFGIVQRLFASADISLERLKSSVKAVILKDSKVFPLLLCITLNGLCALGREHS

SEQ ID NO: 891923 - protein, 344 aa, Homo sapiens [sequence omitted]

SEQ ID NO: 891924 - protein, 496 aa, Homo sapiens; identical to SEQ ID NO: 891922

SEQ ID NO: 891925 - protein, 475 aa, Homo sapiens
GAPGPSKGPGGRALSPPSPSARPPPAQRRLLRLRQRRGRGCRGPSSGRAVVVESDFVKYEGKFANHVSGTLETALGKVKLNLGGSSRVESQSSFGTLRKQEVDLQQLIRDSAERTINLRNPVLQQVLEGRNEVLCVLTQKITTMQKCVISEHMQVEEKCGGIVGIQTKTVQVSATEDGNVTKDSNVVLEIPAATTIAYGVIELYVKLDGQFEFCLLRGKQGGFENKKRIDSVYLDPLVFREFAFIDMPDAAHGISSQDGPLSVLKQATLLLERNFHPFAELPEPQQTALSDIFQAVLFDDELLMVLEPVCDDLVSGLSPTVAVLGELKPRQQQDLVAFLQLVGCSLQGGCPGPEDAGSKQLFMTAYFLVSALAEMPDSAAALLGTCCKLQIIPTLCHLLRALSDDGVSDLEDPTLTPLKDTERFGIVQRLFASADISLERLKSSVKAVILKDSKVFPLLLCITLNGLCALGREHS

SEQ ID NO: 891926 - protein, 435 aa, Homo sapiens
MFAKATRNFLREVDADGDLIAVSNLNDSDKLQLLSLVTKKKRFWCWQRPKYQFLSLTLGDVLIEDQFPSPVVVESDFVKYEGKFANHVSGTLETALGKVKLNLGGSSRVESQSSFGTLRKQEVDLQQLIRDSAERTINLRNPVLQQVLEGRNEVLCVLTQKITTMQKCVISEHMQVEEKCGGIVGIQTKTVQVSATEDGNVTKDSNVVLEIPAATTIAYGVIELYVKLDGQFEFCLLRGKQGGFENKKRIDSVYLDPLVFREFAFIDMPDAAHGISSQDGPLSVLKQATLLLERNFHPFAELPEPQQTALSDIFQAVLFDDELLMVLEPVCDDLVSGLSPTVAVLGELKPRQQQDLVAFLQLVGCSLQGGCPGPEDAGSKQLFMTAYFLVSALAEMPDSAAALLGTCCKLQIIPTLCHLVSNLPGGTLEWIGMGK

SEQ ID NO: 891927 - protein, 367 aa, Homo sapiens
MFAKATRNFLREVDADGDLIAVSNLNDSDKLQLLSLVTKKKRFWCWQRPKYQFLSLTLGDVLIEDQFPSPVVVESDFVKYEGKFANHVSGTLETALGKVKLNLGGSSRVESQSSFGTLRKQEVDLQQLIRDSAERTINLRNPVLQQVLEGRNEVLCVLTQKITTMQKCVISEHMQVEEKCGGIVGIQTKTVQVSATEDGNVTKDSNVVLEIPAATTIAYGVIELYVKLDGQFEFCLLRGKQGGFENKKRIDSVYLDPLVFREFAFIDMPDAAHGISSQDGPLSVLKQATLLLERNFHPFAELPEPQQTALSDIFQAVLFDDELLMVLEPVQKDILGRSSSLTLSCTNGESHTSCQPSSHPDSVSSLS

SEQ ID NO: 891928 - protein, 101 aa, Homo sapiens
MPDSAAALLGTCCKLQIIPTLCHLLRALSDDGVSDLEDPTLTPLKDTERFGIVQRLFASADISLERLKSSVKAVILKDSKVFPLLLCITLNGLCALGREHS

SEQ ID NO: 891929 - protein, 338 aa, Homo sapiens
MSDFDSNPFADPDLNNPFKDPSVTQVTRNVPPGLDEYNPFSDSRTPPPGGVKMPNVPNTQPAIMKPTEEHPAYTQIAKEHALAQAELLKRQEELERKAAELDRREREMQNLSQHGRKNNWPPLPSNFPVGPCFYQDFSVDIPVEFQKTVKLMYYLWMFHAVTLFLNIFGCLAWFCVDSARAVDFGLSILWFLLFTPCSFVCWYRPLYGAFRSDSSFRFFVFFFVYICQFAVHVLQAAGFHNWGNCGWISSLTGLNQNIPVGIMMIIIAALFTASAVISLVMFKKVHGLYRTTGASFEKAQQEFATGVMSNKTVQTAAANAASTAASSAAQNAFKGNQI

SEQ ID NO: 891930 - protein, 157 aa, Homo sapiens
MSDFDSNPFADPDLNNPFKDPSVTQVTRNVPPGLDEYNPFSDSRTPPPGGVKMPNVPNTQPAIMKPTEEHPAYTQIAKEHALAQAELLKRQEELERKAAELDRREREMQNLSQHGRKNNWPPLPSNFPVGPCFYQDFSVDIPVEFQKTVKLMYYLWM

SEQ ID NO: 891931 - protein, 147 aa, Homo sapiens
PPCSLISDCCASNQRDSVGVGPSEPGAGYNLVVRHFLSRSERRNIRVGVTRFSSGWISSLTGLNQNIPVGIMMIIIAALFTASAVISLVMFKKVHGLYRTTGASFEKAQQEFATGVMSNKTVQTAAANAASTAASSAAQNAFKGNQI

SEQ ID NO: 891932 - protein, 122 aa, Homo sapiens
MSDFDSNPFADPDLNNPFKDPSVTQVTRNVPPGLDEYNPFSDSRTPPPGGVKMPNVPNTQPAIMKPTEEHPAYTQIAKEHALAQAELLKRQEELERKAAELDRREREMQNLSQHGSIQRNLK

SEQ ID NO: 891933 - protein, 338 aa, Homo sapiens; identical to SEQ ID NO: 891929

SEQ ID NO: 891934 - protein, 304 aa, Homo sapiens
MSDFDSNPFADPDLNNPFKDPSVTQVTRNVPPGLDEYNPFSDSRTPPPGGVKMPNVPNTQPAIMKPTEEHPAYTQIAKEHALAQAELLKRQEELERKAAELDRREREMQNLSQHGRKNNWPPLPSNFPVGPCFYQDFSVDIPVEFQKTVKLMYYLWMFHAVTLFLNIFGCLAWFCVDSARAVDFGLSILWFLLFTPCSFVCWYRPLYGAFSGWISSLTGLNQNIPVGIMMIIIAALFTASAVISLVMFKKVHGLYRTTGASFEKAQQEFATGVMSNKTVQTAAANAASTAASSAAQNAFKGNQI

SEQ ID NO: 891935 - protein, 278 aa, Homo sapiens
MSDFDSNPFADPDLNNPFKPPPGGVKMPNVPNTQPAIMKPTEEHPAYTQIAKEHALAQAELLKRQEELERKAAELDRREREMQNLSQHGRKNNWPPLPSNFPVGPCFYQDFSVDIPVEFQKTVKLMYYLWMFHAVTLFLNIFGCLAWFCVDSARAVDFGLSILWFLLFTPCSFVCWYRPLYGAFSGWISSLTGLNQNIPVGIMMIIIAALFTASAVISLVMFKKVHGLYRTTGASFEKAQQEFATGVMSNKTVQTAAANAASTAASSAAQNAFKGNQI

SEQ ID NO: 891936 - protein, 147 aa, Homo sapiens; identical to SEQ ID NO: 891931

SEQ ID NO: 891937 - protein, 304 aa, Homo sapiens; identical to SEQ ID NO: 891934

SEQ ID NO: 891938 - protein, 338 aa, Homo sapiens; identical to SEQ ID NO: 891929

SEQ ID NO: 891939 - protein, 338 aa, Homo sapiens; identical to SEQ ID NO: 891929

SEQ ID NO: 891940 - protein, 177 aa, Homo sapiens
METEETRGIRRSSSSLLASPGHISVKEPTPSIASDISLPIATQELRQRLRQLENGTTLGQSPLGQIQLTIRHSSQRNKLIVVVHACRDKRRSGRRKTHVSKKTLNPVFDQSFDFSVSLPEVQRRTLDVAVKNSGGFLSKDKGLLGKVLVALASEELAKGWTQWYDLTEDGTRPQAMT

SEQ ID NO: 891941 - protein, 890 aa, Homo sapiens
PSRAEAGVRRSRVPSEGRWRGAEPPGISASTQPASAGRAARHCGAMSGARGEGPEAGAGGAGGRAAPENPGGVLSVELPGLLAQLARSFALLLPVYALGYLGLSFSWVLLALALLAWCRRSRGLKALRLCRALALLEDEERVVRLGVRACDLPAWVHFPDTERAEWLNKTVKHMWPFICQFIEKLFRETIEPAVRGANTHLSTFSFTKVDVGQQPLRINGVKVYTENVDKRQIILDLQISFVGNCEIDLEIKRYFCRAGVKSIQIHGTMRVILEPLIGDMPLVGALSIFFLRKPLLEINWTGLTNLLDVPGLNGLSDTIILDIISNYLVLPNRITVPLVSEVQIAQLRFPVPKGVLRIHFIEAQDLQGKDTYLKGLVKGKSDPYGIIRVGNQIFQSRVIKENLSPKWNEVYEALVYEHPGQELEIELFDEDPDKDDFLGSLMIDLIEVEKERLLDEWFTLDEVPKGKLHLRLEWLTLMPNASNLDKVLTDIKADKDQANDGLSSALLILYLDSARNLPSGKKISSNPNPVVQMSVGHKAQESKIRYKTNEPVWEENFTFFIHNPKRQDLEVEVRDEQHQCSLGNLKVPLSQLLTSEDMTVSQRFQLSNSGPNSTIKMKIALRVLHLEKRERPPDHQHSAQVKRPSVSKEGRKTSIKSHMSGSPGPGGSNTAPSTPVIGGSDKPGMEEKAQPPEAGPQGLHDLGRSSSSLLASPGHISVKEPTPSIASDISLPIATQELRQRLRQLENGTTLGQSPLGQIQLTIRHSSQRNKLIVVVHACRNLIAFSEDGSDPYVRMYLLPDKRRSGRRKTHVSKKTLNPVFDQSFDFSVSLPEVQRRTLDVAVKNSGGFLSKDKGLLGKVLVALASEELAKGWTQWYDLTEDGTRPQAMT

SEQ ID NO: 891942 - protein, 890 aa, Homo sapiens; identical to SEQ ID NO: 891941

SEQ ID NO: 891943 - protein, 1048 aa, Homo sapiens
MGGNKENMEPKGNCSESTKILGYCEQMGWRGALLSYRRNDLVVKIKHKSNLFELSTVSNGDLLAGLAIPGPKALHGLHNIHAFFHFAKHHMLAIQPLSLGSADEKLGTICVGSSICHGQDARTRMLLDEVLIFKFLPIDGLATSAIMACEVTTLTHKPWNNSVKARAPSPPRPGGQQRHCGAMSGARGEGPEAGAGGAGGRAAPENPGGVLSVELPGLLAQLARSFALLLPVYALGYLGLSFSWVLLALALLAWCRRSRGLKALRLCRALALLEDEERVVRLGVRACDLPAWVHFPDTERAEWLNKTVKHMWPFICQFIEKLFRETIEPAVRGANTHLSTFSFTKVDVGQQPLRINGVKVYTENVDKRQIILDLQISFVGNCEIDLEIKRYFCRAGVKSIQIHGTMRVILEPLIGDMPLVGALSIFFLRKPLLEINWTGLTNLLDVPGLNGLSDTIILDIISNYLVLPNRITVPLVSEVQIAQLRFPVPKGVLRIHFIEAQDLQGKDTYLKGLVKGKSDPYGIIRVGNQIFQSRVIKENLSPKWNEVYEALVYEHPGQELEIELFDEDPDKDDFLGSLMIDLIEVEKERLLDEWFTLDEVPKGKLHLRLEWLTLMPNASNLDKVLTDIKADKDQANDGLSSALLILYLDSARNLPSNPLEFNPDVLKKTAVQRALKSGKKISSNPNPVVQMSVGHKAQESKIRYKTNEPVWEENFTFFIHNPKRQDLEVEVRDEQHQCSLGNLKVPLSQLLTSEDMTVSQRFQLSNSGPNSTIKMKIALRVLHLEKRERPPDHQHSAQVKRPSVSKEGRKTSIKSHMSGSPGPGGSNTAPSTPVIGGSDKPGMEEKAQPPEAGPQGLHDLGRSSSSLLASPGHISVKEPTPSIASDISLPIATQELRQRLRQLENGTTLGQSPLGQIQLTIRHSSQRNKLIVVVHACRNLIAFSEDGSDPYVRMYLLPDKRRSGRRKTHVSKKTLNPVFDQSFDFSVSLPEVQRRTLDVAVKNSGGFLSKDKGLLGKVLVALASEELAKGWTQWYDLTEDGTRPQAMT

SEQ ID NO: 891944 - protein, 499 aa, Homo sapiens
LGGAGSNLAEVDIELFDEDPDKDDFLGSLMIDLIEVEKERLLDEWFTLDEVPKGKLHLRLEWLTLMPNASNLDKVLTDIKADKDQANDGLSSALLILYLDSARNLPSNPLEFNPDVLKKTAVQRALKSGKKISSNPNPVVQMSVGHKAQESKIRYKTNEPVWEENFTFFIHNPKRQDLEVEVRDEQHQCSLGNLKVPLSQLLTSEDMTVSQRFQLSNSGPNSTIKMKIALRVLHLEKRERPPDHQHSAQVKRPSVSKEGRKTSIKSHMSGSPGPGGSNTAPSTPVIGGSDKPGMEEKAQPPEAGPQGLHDLGRSSSSLLASPGHISVKEPTPSIASDISLPIATQELRQRLRQLENGTTLGQSPLGQIQLTIRHSSQRNKLIVVVHACRNLIAFSEDGSDPYVRMYLLPDKRRSGRRKTHVSKKTLNPVFDQSFDFSVSLPEVQRRTLDVAVKNSGGFLSKDKGLLGKVLVALASEELAKGWTQWYDLTEDGTRPQAMT

SEQ ID NO: 891945 - protein, 358 aa, Homo sapiens
MSVGHKAQESKIRYKTNEPVWEENFTFFIHNPKRQDLEVEVRDEQHQCSLGNLKVPLSQLLTSEDMTVSQRFQLSNSGPNSTIKMKIALRVLHLEKRERPPDHQHSAQVKRPSVSKEGRKTSIKSHMSGSPGPGGSNTAPSTPVIGGSDKPGMEEKAQPPEAGPQGLHDLGRSSSSLLASPGHISVKEPTPSIASDISLPIATQELRQRLRQLENGTTLGQSPLGQIQLTIRHSSQRNKLIVVVHACRNLIAFSEDGSDPYVRMYLLPDKRRSGRRKTHVSKKTLNPVFDQSFDFSVSLPEVQRRTLDVAVKNSGGFLSKDKGLLGKVLVALASEELAKGWTQWYDLTEDGTRPQAMT

SEQ ID NO: 891946 - protein, 185 aa, Homo sapiens
NLGSEAGLMDEAVKEPTPSIASDISLPIATQELRQRLRQLENGTTLGQSPLGQIQLTIRHSSQRNKLIVVVHACRNLIAFSEDGSDPYVRMYLLPDKRRSGRRKTHVSKKTLNPVFDQSFDFSVSLPEVQRRTLDVAVKNSGGFLSKDKGLLGKVLVALASEELAKGWTQWYDLTEDGTRPQAMT

SEQ ID NO: 891947 - protein, 109 aa, Homo sapiens
TLRERETGLKYCSIINSTTDKRRSGRRKTHVSKKTLNPVFDQSFDFSVSLPEVQRRTLDVAVKNSGGFLSKDKGLLGKVLVALASEELAKGWTQWYDLTEDGTRPQAMT

SEQ ID NO: 891948 - protein, 1048 aa, Homo sapiens; identical to SEQ ID NO: 891943

SEQ ID NO: 891949 - protein, 1048 aa, Homo sapiens; identical to SEQ ID NO: 891943

SEQ ID NO: 891950 - protein, 582 aa, Homo sapiens
PSRAEAGVRRSRVPSEGRWRGAEPPGISASTQPASAGRAARHCGAMSGARGEGPEAGAGGAGGRAAPENPGGVLSVELPGLLAQLARSFALLLPVYALGYLGLSFSWVLLALALLAWCRRSRGLKALRLCRALALLEDEERVVRLGVRACDLPAWVHFPDTERAEWLNKTVKHMWPFICQFIEKLFRETIEPAVRGANTHLSTFSFTKVDVGQQPLRINGVKVYTENVDKRQIILDLQISFVGNCEIDLEIKRYFCRAGVKSIQIHGTMRVILEPLIGDMPLVGALSIFFLRKPLLEINWTGLTNLLDVPGLNGLSDTIILDIISNYLVLPNRITVPLVSEVQIAQLRFPVPKGVLRIHFIEAQDLQGKDTYLKGLVKGKSDPYGIIRVGNQIFQSRVIKENLSPKWNEVYEALVYEHPGQELEIELFDEDPDKDDFLGSLMIDLIEVEKERLLDEWFTLDEVPKGKLHLRLEWLTLMPNASNLDKVLTDIKADKDQANDGLSSALLILYLDSARNLPSNPLEFNPDVLKKTAVQRALKSGKKISSNPNPVVQMSVGHKAQESKIRYKTNEPVVVGGGDTLE

SEQ ID NO: 891951 - protein, 347 aa, Homo sapiens
PSRAEAGVRRSRVPSEGRWRGAEPPGISASTQPASAGRAARHCGAMSGARGEGPEAGAGGAGGRAAPENPGGVLSVELPGLLAQLARSFALLLPVYALGYLGLSFSWVLLALALLAWCRRSRGLKALRLCRALALLEDEERVVRLGVRACDLPAWVHFPDTERAEWLNKTVKHMWPFICQFIEKLFRETIEPAVRGANTHLSTFSFTKVDVGQQPLRINGVKVYTENVDKRQIILDLQISFVGNCEIDLEIKRYFCRAGVKSIQIHGTMRVILEPLIGDMPLVGALSIFFLRKPVSQYLFHFYFPIWWQKYIPVEEYIKWRNKILSTHRCPFLLCESCGSFLYFFVP

SEQ ID NO: 891952 - protein, 153 aa, Homo sapiens
MWPFICQFIEKLFRETIEPAVRGANTHLSTFSFTKVDVGQQPLRINGVKVYTENVDKRQIILDLQISFVGNCEIDLEIKRYFCRAGVKSIQIHGTMRVILEPLIGDMPLVGALSIFFLRKPLLEINWTGLTNLLDVPGLNGLIQILSLSGIYI

SEQ ID NO: 891953 - protein, 1048 aa, Homo sapiens; identical to SEQ ID NO: 891943

SEQ ID NO: 891954 - protein, 913 aa, Homo sapiens
PSRAEAGVRRSRVPSEGRWRGAEPPGISASTQPASAGRAARHCGAMSGARGEGPEAGAGGAGGRAAPENPGGVLSVELPGLLAQLARSFALLLPVYALGYLGLSFSWVLLALALLAWCRRSRGLKALRLCRALALLEDEERVVRLGVRACDLPAWVHFPDTEESRMATVRTTVKHMWPFICQFIEKLFRETIEPAVRGANTHLSTFSFTKVDVGQQPLRINGVKVYTENVDKRQIILDLQISFVGNCEIDLEIKRYFCRAGVKSIQIHGTMRVILEPLIGDMPLVGALSIFFLRKPLLEINWTGLTNLLDVPGLNGLSDTIILDIISNYLVLPNRITVPLVSEVQIAQLRFPVPKGVLRIHFIEAQDLQGKDTYLKGLVKGKSDPYGIIRVGNQIFQSRVIKENLSPKWNEVYEALVYEHPGQELEIELFDEDPDKDDFLGSLMIDLIEVEKERLLDEWFTLDEVPKGKLHLRLEWLTLMPNASNLDKVLTDIKADKDQANDGLSSALLILYLDSARNLPSNPLEFNPDVLKKTAVQRALKSGKKISSNPNPVVQMSVGHKAQESKIRYKTNEPVWEENFTFFIHNPKRQDLEVEVRDEQHQCSLGNLKVPLSQLLTSEDMTVSQRFQLSNSGPNSTIKMKIALRVLHLEKRERPPDHQHSAQVKRPSVSKEGRKTSIKSHMSGSPGPGGSNTAPSTPVIGGSDKPGMEEKAQPPEAGPQGLHDLGRSSSSLLASPGHISVKEPTPSIASDISLPIATQELRQRLRQLENGTTLGQSPLGQIQLTIRHSSQRNKLIVVVHACRNLIAFSEDGSDPYVRMYLLPDKRRSGRRKTHVSKKTLNPVFDQSFDFSVSLPEVQRRTLDVAVKNSGGFLSKDKGLLGKVLVALASEELAKGWTQWYDLTEDGTRPQAMT

SEQ ID NO: 891955 - protein, 1048 aa, Homo sapiens; identical to SEQ ID NO: 891943

SEQ ID NO: 891956 - protein, 158 aa, Homo sapiens
MYEAGVESAEGQLENGTTLGQSPLGQIQLTIRHSSQRNKLIVVVHACRNLIAFSEDGSDPYVRMYLLPDKRRSGRRKTHVSKKTLNPVFDQSFDFSVSLPEVQRRTLDVAVKNSGGFLSKDKGLLGKVLVALASEELAKGWTQWYDLTEDGTRPQAMT

SEQ ID NO: 891957 - protein, 94 aa, Homo sapiens
LLLLLNSRPRRRKTHVSKKTLNPVFDQSFDFSVSLPEVQRRTLDVAVKNSGGFLSKDKGLLGKVLVALASEELAKGWTQWYDLTEDGTRPQAMT

SEQ ID NO: 891958 - protein, 890 aa, Homo sapiens; identical to SEQ ID NO: 891941

SEQ ID NO: 891959 - protein, 240 aa, Homo sapiens
PSRAEAGVRRSRVPSEGRWRGAEPPGISASTQPASAGRAARHCGAMSGARGEGPEAGAGGAGGRAAPENPGGVLSVELPGLLAQLARSFALLLPVYALGYLGLSFSWVLLALALLAWCRRSRGLKALRLCRALALLEDEERVVRLGVRACDLPAWVHFPDTERAEWLNKTVKHMWPFICQFIEKLFRETIEPAVRGANTHLSTFSFTKVDVGQQPLRINGVKVYTENVDKRQIILDLQIR

SEQ ID NO: 891960 - protein, 145 aa, Homo sapiens
MAPKGKVGTRGKKQIFEENRETLKFYLRIILGANAIYCLVTLVFFYSSASFWAWLALGFSLAVYGASYHSMSSMARAAFSEDGALMDGWHGPQHGQAWQSDVPHAAQHLKDVILLTAIVQCSAASLSMSGPSGFWLQAGPFTSCG

SEQ ID NO: 891961 - protein, 173 aa, Homo sapiens
MAPKGKVGTRGKKQIFEENRETLKFYLRIILGANAIYCLVTLVFFYSSASFWAWLALGFSLAVYGASYHSMSSMARAAFSEDGALMDGGMDLNMEQGMAEHLKDVILLTAIVQVLSCFSLYVWSFWLLAPGRALYLLWVNVLGPWFTADSGTPAPEHNEKRQRRQERRQMKRL

SEQ ID NO: 891962 - protein, 173 aa, Homo sapiens; identical to SEQ ID NO: 891961

SEQ ID NO: 891963 - protein, 173 aa, Homo sapiens; identical to SEQ ID NO: 891961

SEQ ID NO: 891964 - protein, 103 aa, Homo sapiens
MSSMARAAFSEDGALMDGGMDLNMEQGMAEHLKDVILLTAIVQVLSCFSLYVWSFWLLAPGRALYLLWVNVLGPWFTADSGTPAPEHNEKRQRRQERRQMKRL

SEQ ID NO: 891965 - protein, 103 aa, Homo sapiens; identical to SEQ ID NO: 891964

SEQ ID NO: 891966 - protein, 136 aa, Homo sapiens
TLTDSPNPPHLPLFWAWLALGFSLAVYGASYHSMSSMARAAFSEDGALMDGGMDLNMEQGMAEHLKDVILLTAIVQVLSCFSLYVWSFWLLAPGRALYLLWVNVLGPWFTADSGTPAPEHNEKRQRRQERRQMKRL

SEQ ID NO: 891967 - protein, 140 aa, Homo sapiens
MAPKGKVGTRGKKQIFEENRETLKFYLRIILGANAIYCLVTLVFFYSSASFWAWLALGFSLAVYGASYHSMSSMARAAFSEDGALMDGGMDLNMEQGMAEHLKDVILLTAIVQVLSCFSLYVWSFWLLVCGLGALPRRGI

SEQ ID NO: 891968 - protein, 173 aa, Homo sapiens; identical to SEQ ID NO: 891961

SEQ ID NO: 891969 - protein, 103 aa, Homo sapiens; identical to SEQ ID NO: 891964

SEQ ID NO: 891970 - protein, 103 aa, Homo sapiens; identical to SEQ ID NO: 891964

SEQ ID NO: 891971 - protein, 103 aa, Homo sapiens; identical to SEQ ID NO: 891964

SEQ ID NO: 891972 - protein, 173 aa, Homo sapiens; identical to SEQ ID NO: 891961

SEQ ID NO: 891973 - protein, 95 aa, Homo sapiens
VAKAGRLRSAPEVHELPMWCLVIAVSVALPCFPGWVFASHHGGFCTTGTWLSCGWSSIAHQAGGENEEDRGLLTASHHSSAAQGQSGHEREEADI

SEQ ID NO: 891974 - protein, 207 aa, Homo sapiens
MVAPVTGYSLGVRRAEIKPGVREIHLCKDERGKTGLRLRKVDQGLFVQLVQANTPASLVGLRFGDQLLQIDGRDCAGWSSHKAHQVVKKASGDKIVMVVRDRPFQRTVTMHKDSMGHVGFVIKKGKIVSLVKGSSAARNGLLTNHYVCEVDGQNVIGLKDKKIMEILATAGNVVTLTIIPSVIYEHMVKKLPPVLLHHTMDHSIPDA

SEQ ID NO: 891975 - protein, 292 aa, Homo sapiens [sequence omitted]

SEQ ID NO: 891976 - protein, 292 aa, Homo sapiens [sequence omitted]

SEQ ID NO: 891977 - protein, 94 aa, Homo sapiens
YSKLQSKGSPLGFGKPRKAQGVLTVARIIVNTGQQRGYSSIQNVCKDKKIMEILATAGNVVTLTIIPSVIYEHMVKKLPPVLLHHTMDHSIPDA

SEQ ID NO: 891978 - protein, 292 aa, Homo sapiens [sequence omitted]

SEQ ID NO: 891979 - protein, 292 aa, Homo sapiens [sequence omitted]

SEQ ID NO: 891980 - protein, 267 aa, Homo sapiens
MSSLYPSLEDLKVDQAIQAQVRASPKMPALPVQATAISPPPVLYPNLAELENYMGLSLSSQEVQESLLQIPEGDSTAVSGPGPGQMVAPVTGYSLGVRRAEIKGLFVQLVQANTPASLVGLRFGDQLLQIDGRDCAGWSSHKAHQVVKKASGDKIVMVVRDRPFQRTVTMHKDSMGHVGFVIKKGKIVSLVKGSSAARNGLLTNHYVCEVDGQNVIGLKDKKIMEILATAGNVVTLTIIPSVIYEHMVKKLPPVLLHHTMDHSIPDA

SEQ ID NO: 891981 - protein, 233 aa, Homo sapiens
MGEPQQVSALPPPPMQYIKEYTDENIQEGLAPKPPPPIKDSYMMFGNQFQCDDLIIRPLESQGIERLHPMQFDHKKELRKLNMSILINFLDLLDILIRSPGSIKREEKLEDLKLLFVHVHHLINEYRPHQARETLRVMMEVQKRQRLETAERFQKHLERVIEMIQNCLASLPDDLPHSEAGMRVKTEPMDADDSNNCTGQNEHQRENSGHRRDQIIEKDAALCVLIDEMNERP

SEQ ID NO: 891982 - protein, 233 aa, Homo sapiens; identical to SEQ ID NO: 891981

SEQ ID NO: 891983 - protein, 233 aa, Homo sapiens; identical to SEQ ID NO: 891981

SEQ ID NO: 891984 - protein, 233 aa, Homo sapiens; identical to SEQ ID NO: 891981

SEQ ID NO: 891985 - protein, 93 aa, Homo sapiens
AGNWGGMAEFGLQRRSFVFLSRVSPRVRSLRERGGLGVDSLEEGALSVAVSGLPPCWDAEPEWRLGDLASSPRAAVFLSCVALGESFALSGSL

SEQ ID NO: 891986 - protein, 233 aa, Homo sapiens; identical to SEQ ID NO: 891981

SEQ ID NO: 891987 - protein, 314 aa, Homo sapiens
MEDKRNIQIIEWEHLDKKKFYVFGVAMTMMIRVSVYPFTLIRTRLQVQKGKSLYHGTFDAFIKILRADGITGLYRGFLVNTFTLISGQCYVTTYELTRKFVADYSQSNTVKSLVAGGSASLVAQSITVPIDVVSQHLMMQRKGEKMGRFQVRGNPEGQGVVAFGQTKDIIRQILQADGLRGFYRGYVASLLTYIPNSAVWWPFYHFYAEQLSYLCPKECPHIVFQAVSGPLAAATASILTNPMDVIRTRVQVEGKNSIILTFRQLMAEEGPWGLMKGLSARIISATPSTIVIVVGYESLKKLSLRPELVDSRHW

SEQ ID NO: 891988 - protein, 314 aa, Homo sapiens; identical to SEQ ID NO: 891987
